United States Patent Application Publication US 2015/0376612 A1 - sequence listing, part 17

SEQ ID NO: 42751 - DNA, 1044 bp, Homo sapiens
tttcaacctgcagattttttcactcttctcttcccaactcagcctgaattttataacaccgtggaaggctccacaattgatgaagtcaagtctgggggacttgatccactctgtcaagtgccccagaagattttctgtcttctggttaaaagaaacaagtccctgctccaccatgttgttatctcccagcccctctccttcctgtcctctcctctcttaactgctctttccccgaaactgcccccactccatccctccaaggcctcccgacaaggacagtttcctcttcaggtgccattctgacatgaagcccaccagttccccctcttcctttcctttcctctcaagtccatcatagttctaagagcactcacctccccaagcaccacctgtcattgataagaccagaaggcttgaggagcttcaagtctagtgaagtgtcagtgcagcaggatggcattatggtcagcagcgtggaccttggaatcagagacctgtgtttgaattctggccctgtcacttaccagctgcatggccttagacctaaaccacttaatcctttaaccttcagggtcctcatccataaaatggggatgataatattatgaagaattatgggaagaaattggctagagtgtcccagcaacgtatgcaggagaggatagaatgatgaggtccagggtacagtggatctctggggcagtgtgaaggtaaaagagattctgagctaatgtcttagaatcatcaagtgaaagcttggctggaattggggaggctggggtaaacgcccacaaaggaaagggttctcagagagcactgcattctgaataaaaacagaagtgacctcagtgacattctctgtctaaggcaggtagcctcagagactgcatggttgtttccactgggttttcgtaagaagactgaaccagacatgcaagcactcgcttacatgtatgtgtgtgtaaaggagacgttaacaggacaagatatggagcacttaatttacccagttctccctcttctttctcacctccctctttttag

SEQ ID NO: 42752 - DNA, 1111 bp, Homo sapiens
ggaggaagcattgggacagatgaccttcagttcagttggagtgctctggaactcactagggctttctgagggcaacatcaggcccagaggagctgccaggcaggacggaaggctggggctgccagtggtccatttcttctgcctggacttagggattacaggccatttatgtccagctctagctcagtgccccagctttagcctaatgcccatctcagctgtctggacaagctcccattctggcagcttgtccatcaaggttggatctgtctctcctcccgtttgtgactccacttcattgccacagcttgtcttcccgcccaggaaagggtatttggaagaagctccatcctgtctccttttccccattggtgcaatctcctcctagcagcatctgctgaaaggggtgtagtcatcctggccccagacagagctgtcttccaagtcacggatgttgacgaggcctgtgtgtgtatctgcatgctcacaccgcagcctgatcgatgcctgtcagagctcagcatcagagtgacagctgcataccaggctgtttgctgaacacaactcgtccgtcaagggaaatcagatgaaatccatctccttgtccaaagcctggcccgatgggctgtgtctggaatgccagtcttgtgtcccaccctacttttgtgccctgaaaatcattccctcggatttcagtgttacttcgatgggtcccttggggcagaaaaattatagttaagaaaattatgtgaaaagaccaatagtcagccctacccttcagggacttctagtttagagctggtacctactgtatggatagtgcaagtctagaacacacaagaattggcatatgattatcttaaactggttggtataaaaatagagcataaatcaaatgcattgaataaaaaaatttgcttacatatattgaataggcattagccagattaaatagtgtgttgcagacaattggtggggaagggtctctttagagagtctcattagagacacaattatggggttttaaggctttcagaattgacaaggacaagttttggcagaggttctatgtttgtaaaccatttaggactgcaggaagctctgtcacccc

SEQ ID NO: 42753 - DNA, 1933 bp, Homo sapiens
tttatatactctgtggtgcacaactggggcttcagaaaagatttcctggaggaaggactgccgaggctgaatctataagaattagacatctgcccagccaaggggagaggaaggacatgaattccagtgagagattcaaatgcagcagttaggaatagcatttcgtcgctggtaatatagaccaaaaacagcattcgtttaacaagattaaagtttgcttctttctcataggaagcccagaggtgggcagttcagaaccaatacagtggcacctggtatcagcagggatccaggccccttcattctcctgctcagcatttcttagcacatggcttacattctcagggtccaaggtgtctacagatctctagccatttacctcatccttccagtcaggaagccaaaacacaggaagaaagcacaaagatagcaaatgctttcctagaagtcccaccaagaaatttctgccgaatctcgctagtgtggccagtgagaaacaagacttggggattgtagtctttcagctgaccatactgatgcatgcaataaaaggaacagaaaaaggagagaatggagccagggagatagatctctaccacacacagtgtgtccaaaggcacagagatatgaaacttcagtgtgtgttgagggaacacagagatcagtcgacccagatcaaagagtccctgtagtataaggcaagtaggaggtggtggaaatgagactagagacacaaatccacatttccctgcaggtactaaaagtgaccagtgctcaggctggggctgggcaggcagcatctaccaaaggactagtcccttagcctggctatcaggccaggattcacaacctctagttcaccacaccctgccctctctcagaggaaagctcccatgtagttctagaaatcacagagacctgaccccttgccagtgctaggcaaacaagctgggctatgcatcagccaaaggcctgcagtgttctcttagagaacaacagagctcagtcactctgtgacctaggtacactcaacatacgtttctattctcactacatgtgcttagcacaatgagatgagccaacagttattgagttcttattgttctaagagcttgatatatattaactcatttaaaccttgtgagggagatgttcagctttattactcccatgttacagcttgaagaaactgaagcacaaagtcttaaaataactccctccaggtccctgaatggcagaggctaaatttgaactcagatagtctggctgcagagctctcactgggtacctctgtgcagttctgccaattgatatcaccctgaaatcaagaggaaaatgttggactagaggcaggtaggtgaaggcaggaccaggcacaaagcattttgcttctcttttatgcagagaaggattgaaaattcatgcatctgaccacatctggtaaaggctgggccttcagcctttttctcctctttctgactcctttgatcgctcttgtaaacattctgactctagttcagcgtggtccattcacaagcttccacatgcatcatttcttcccatgtcattctcccagccatcacaggatttttatacatgttgttcaggttcctctcgttccgtccctccttccctcccctccttccttaaaaccagcccctgattcctccatccccgatctgtctcagcaggtgggtgggctctgactgttccccttgcccatccttcaagtcagctctctccagcttttcctctgagctgcttgcaccttctcctggcttctgttctccccgtcatcccgtgtttctctaatgtctacttgcacctccactgacctcagcatggctttctgtcccaaaattctaccctcgttccttcttctaccctgccacttatgcactatttctaaagtgtgaccctagacattccctat

SEQ ID NO: 42754 - DNA, 1037 bp, Homo sapiens
ccatccctttagggcttgggtacagctctaaagccatagaggttctttggctgggcctgggagaacatgggccactgctgctgactccatggcccaaaccagtgttcaagataaagaacggacgcaccgaatggaaggcagccttctctcctggttttttgcctgggactgcccttcacgtcaactgggaacatgaggaggagctgtgccattcaggcatgcctgctctggcttgggagacctttgggaagatgggtccgggacagaatgagggccccctgattctagccacatccctggcaccagcctcagggaagagtgttaaatctccctccagcttccagcacgggtttttcctgggaagatgaacagtctgcttccttattgcctgcaccaaaggaacagattgcgtcagtttgtaaactgtgttagcgctcgcaaaggcctggagtcagcaggtttgcatttcccagcagacccagatgatgctgatggcagtggctgctgcctcactgcctcaggcaggaccgaagctgcccccctacccctaccatcccacccctcatccctgaggtagggaaaaggcattccaggcgggagagaaagccaccctgagcttctagagccagctcacccacagcacaggccttttcttttcaggagcctcttggcccctcttgctggtgtgccagcccaggcctgatttccaggcattcctagcactccaatgccagaaaagaggttttctagaaaagcaatccactctgtgggctgcgcttgaaagagttacctggtctggaggtgatgggggattaggagcagaggcgtcagtggggatcagaaccacattgccacagtagcacatggaaaatccgtgctgctgcctgcctctagccagcccactccccacggttgcagatggtaacgagacccaggaggtattgcataggcacagcctctcgccttccacagcatcgccttattaattgcattgttaatgttcatcatctctgaaagaagtcggtgtggctgtgtgt

SEQ ID NO: 42755 - DNA, 1724 bp, Homo sapiens
gggttccctgccaggggctgtgctgaactcagcatcgttatttactgcacagtgggtttgtctgaaagagcccaagtcaccattttgctggtgccacttgatgacgctgaggagtaattaccagtgattaattacttacacggcctgcgtgtttttattccagtccaattaaaatgcagtgcacaactctcagtgctagggcctgccgcctcctgggtccctctcctgcaaatcccagtctgctcgtcaaggatcctgaggaaccgaggctggctttcttcctcctggaggggctgtttcccaggagcagcactagcagagctttgtagcagctctaagagttggctgaaccctgataagagcatctggtggccggctgggggacagtaacctgagtatctggggtgtacccagccttgtcccacttgatcccacaagggctgccttacctgtcaagagacagtggttacaagatcctgttagcatcaggatgcaggaatgtttgtgcctgtagctaaccaaggaaaggtaatgctgagggattctgtgagaccaggaagtgcagaaggctttagggagtgtgattgtgtgtgcatgcattcgtgagtgtgtctgtctgggggaatctgagaatgctggtttcccagctacgaaggcttaactacctccctgctgagtgtaattcctccctgtgccctgtggatgcctcctcagtgaagaggccgatagggctctccacttccttggcaggaggtaacccccacttcctcctcagcagccctgggcagacctgaggaccaaggagggaaccacagatggcagatgcctgtcccccctccttaaccccatctcacacacgtgctcagcagggccctgcacagggctggattggccatcgattggcttttattgagcttggcttccctgctgcaggcctaaaggcctccgccaccttggcccctcgccagccccacccctggagccttgcaagcagcaatgttaaacaggatttagaaaggaaagactccagccagtggattctctgtccacagtcctcatcacctgccaagagaaggacctgggactccctgaggaggaaatgcagggaagagagagagccagggcagggagaggagaggagagacagcctccattcctgacctgcctggtctgtgcctggcttgatgggctctttccctcagggtggccgcagcaacagaacacaaggagccccaaagtgtagaggggacccgagcaagacaggaacttgcatggcagagcagcctggagcagatgaacaggcaggaggggcctccatccacccttcccagtcttgctctgtagctggggccaccgggggtaccagcagtgccccaccaggggcagagctccaccctggccttggcctggagagacacttcccccacctgaccgcaaaccctggcatcagtcagctgggacagcctctccacaatagcaggcttagtaacagcctctccacatgcttagaggtggtccatgagaagggcagactgtcctgtggttggctctcccagcattcctgggccctgctgcttaggtcaagctcaggacccctgttctctgcccagctctttggccatagaggctcttccccagctcctccatctttcaagaggctggggtagagccatacagcaataattttctgtgtctgggtgtacaactactgtttcttctggagt

SEQ ID NO: 42756 - DNA, 1116 bp, Homo sapiens
atgcagtttattttcaatgcagctgaattattaagcaccctgcatgcattggggattctaccaggctttgtgcaagtaaacagaaagaagtgagctatgctctatgccctgaaggagctcacagtatagtagcagggaacttataaggctgactgtggcaagtgtaacaacagacatatgttgcgccctccttacagcactgccttgggcctgaagataaagagaggagccccacacttagaccacagatccacagtcaccctccttgcttctgagacgcaaggggcaaaaaaggtctgagactgagctagaatcagggccagaagggactgatgcctcccagagtcagggtgggagaattctacaaggagccagggagagaaactgagtaggccctgggtgttgctaaaacaggcaaaagcagcaaataagcagcaggaccactgacccaaggtcagagtgcttagggaaagacaaggcagggaatccctcctcctgtggcgcaggggccctgagtagcagggtgggacagtacagccccagcccagcagcactggaagtcctgttcagcatgtatcttgcagggtgacaagggtcagaggggccaagtttgaataatactgaggctctaggccctgatccaagaattcctcccccaccttccatggcttcaattctggggccttttccacggtggtgtggggcccatccttcatccctacttttgccccctgaaagacagtagacagtggcttctgtcagttaccacctctgtggcccaggccaggagctggccttgcaggaatggggtacgggctggccagctctcaccctggaggaggctgtttggattgtccttgctccctgtctactttctttctccacctccttaatcaaagctcaggcacatcccaagggctcccacaccctgggccagcagactggagagctgagatggcaaggctgtgtgtgcctttaaggcccaacatgtcagcaagtcaccagtcccacttctgaaggcagatggcatgaaacctctggagtggagaccaagagggcttccccgcatgggttggggacagagccagtgctgcagtgccccccagaattttacat

SEQ ID NO: 42757 - DNA, 1134 bp, Homo sapiens
caggtactaacaagcattttctgaaatggaaatttgtttttttattaacctaatacaaataaggttcaagcactgtatttaaatatttaaaagataggagtttcttaaaataccacatatggtgctcttgtgagcttgcttttctccacaatttggcaatttgcttcactctagtagtccaatctgcaacaaaagaacagaatataacactttctcagagccatgctaatgatgtgttgtattaaagaatgttgatgaactgctgacagttaatcttattcaggccgtattctcatgaggtcatagatctatattaagtttttttacaaagaacaaagatcctggcacactgtaggccaaacaaacgttttctaaatgaagtgttgccttattaacaacctagcttgtaggttgggaagtttttagattcaagggacaaagtagcaaaaatgtgccctctccctcaccctcaccttctccctctccctctctctctcccgtctccgtcgtctctgtctcctgctttccacggtctccccctctccctcgtctccgtctcccgctttccacggtctccctctgttgccgaggctggactgtactgctgcgatctcggctcactgcaacctccctgcctgattctcctgcctcagcctgctgagtgcctgggattgcaggcgcgcgccaccacgcctgactggtttttgtattttttggtggagacggggtttcgccgtgttggccgggctggtctccagctcctgaccacgagtgatctgcccgccctggcctcccgaggtgccgggattgcagagggagtcttgctcactcagtgctcaatgttgcccaggctggagtgcagtggcgtgatctctgctcgctacaatctccacctcccagccacctgccttggcctcccaaagtgctgagattgcagcctctgcccggccgccaccccgtctaggaagtgaggagcgtctctgcctggccgcccatcgtctgggatgtgaggagcccctctgcctggccgcccagtctgggaagtgaggagcgcctcttcccggctgccatcctgtctaggaagtgaggagcgtctctgcctggccgcccatcgtctgggatgtggggagcgcc

SEQ ID NO: 42758 - DNA, 1066 bp, Homo sapiens
acacttgatagatagtaagttctctggttgattgttcaaacagaatttagactcctataatgacggatggggcatttgggtataatgccagatggcaggactaaatgacctcagaaatgccttcagttctgggactgtggctctacctgaggataattttagtattaaagtgacatttggtaaagcaggataattgacgttagatataaataaaatatttgagagctggttcttaaaattttttcttaaatatttacagttgattatgagatcaatgcccacaaatactggaatgacttctacaaaatccacgaaaatgggtttttcaaggatagacattggctttttaccgaattccctgagctggcacctagccaaaatcaaaatcatttgaaggattggttcttggagaacaagagtgaagtatgtgaatgtagaaacaatgaggatggacctggtttaataatggaagaacagcacaagtgttcttcgaagagccttgaacataaaacacagacacctcctgtggaggagaatgtaactcagaaaattagtgacctggaaatttgtgctgatgagtttcctggatcctcagccacctaccgaatactggaggtaaccttttattgtcttggtagtgggatatgtgaagctattatatttgtgcacatgaggtagcatagagaggctgacaataaaagtaacttctattggatgatgctgactagacttgacccttatattagcctggaatcacctccatttttgaactgataaaatgccctcagtgcagaccagatatctggtggtcatcacagacaaagatcacacgggaatagcatgtcacttccaaaaattgtattaatagcatcatgctgtacctgtcacatgacactgtatcatacaggtgaaagagctcaacatgatcatgctataactctggaaaaatgtcccagatcagaagaaattgttgcttctcttctaatacagttacaggaatggagagggtagttaggatggtgcctgtttcttaggcctgggataattctcttcctctgcatttgga

SEQ ID NO: 42759 - DNA, 1063 bp, Homo sapiens
gtacagatgtgttcctggtgtggagaaagtgccaaggtggctcagcgaagaaaaaagaattcttgtggtgctatcaagcaaggcttcatttgagggaaaagtaggatttctgtaggtggaaaaagagaagacattgatttgaaactccctggttgttttataaacttcatattagctatgtccacagagcctccaaaaggatataattcaaaaaggattttaaccaaaatgaaatatgttgtgactaatagatacagtttatttgaatgaatgatagtttttcccatttgatattttaactgtgctacacaagaatgagagtagacatagctcgatttgtagtctcattgttttgtcttttctgcccatttcagtgacccaggactctttgtttattgctgtgatttttcttccacagctatagaactggtccaggtgagtacgatgggaaattacctattggtaatttccactgattaaagggaaaaggttctcctaaaaatcaaggtctctggctgtgttcttatacggtctgtgttcttacggtctaaaagtaaaagatttactgataacgagcataccttgttttattgcagttcactttatcacactgtacagatgtcatatctgttcatatattgaaagtctgtggcaaccctgcatcaagcaagcctaccagtgccgtttctccaccaccatatgctcacttagtgtctgtgtgtcatgctttggtgattctcagaatatttcagacttttttactattatgtatgttatagtgtgtgacgttactgttgtacttggtttggggttccacaaatcacatctgtgtaagacggtcaacttaataaatgcatgtgttgtgactgccccaccaacctgccattccatttctctccctctcctcaggtctccttgttctctaagacacaatattgcaattaggccacttcatactctacagtgtcctctgtgtgctcaagtgaaaggaagagtttcaccacgttgcccaggctggtctcgaatgatagcttacacttgtgttgtaattattaaatttaat

SEQ ID NO: 42760 - DNA, 1033 bp, Homo sapiens
agtggcttcccctacctaaacatgaacttgttgttaccaagccaccactgcatttataaccaaatggccatgtaaaaaacacgacagcaacttcccagagccccatttaacaaggacttagtagataaaaatgccttttcttgaggggaaaatgcataaacatcttttattttccacactagaggaactggacacgcttttcaccactgctggactggaaaaagttcagaatctggtggaccgccgactgcaggtgaaccgagggaagcaactgacaatgtaccgggtttggattcagtgcaaatactgcaagccccttctgtccagcaccagctaagaggcacctgctgccaacacgatgcaagcccgttgtgtttccgagcttttttaaaaaaaaatttgtagcaccgggcatggtgcatgcctgtaatcccagccactcaggaggctgaggcagggaggatccattgagcccaggagtccagcctgggcaaaatagcgagagaccctgaatctgaaagtaatgataaaataaaaagaatataaatgaggtctcgttgatgctggacaattcaagaattcagacttgaaccttaaacctaggaaaagttactttgtatcaggattctaacaattatgcttcatatttgtgaagtcctttaaaacataattttctcaagttctttctttgagacctcaatctgtcttagcattttgtaactaataactgaaattttattcaaaggaattgtaaaccttaaaccaccatttatttccatgtgaaaaagtgttatatatgacaagtgttttttgattgtaattgcgttaaatcttttgagagtgtaaatgccgggctaggcaattgcagttaatacatacaggggttagtgaagggcttattaagttgtaggggaagcaagctgggaagaatcagatcagatattttcctgacaagaaaaaaatgaccctgtagacagcatcaaaatgtggtgttcttgttaagtaattgatcgtggtctttgctttaatctta

SEQ ID NO: 42761 - DNA, 1050 bp, Homo sapiens
gctaattttgtatttttattagagatggggtttcttcatgttggtcaggctgttcttgaacttccgacctcaagtgatccgcctacctcagcctcccaaagtgctgggattacaggtgtgagccactgcgcccggcggcaagtatcttttaagttctcactttttttttttttttttggagagtttcactcttgtcgcccaggctggcgtgcagttgcatgatctctgctcacagcaatctccacctcccaggttcaagcgattctcctgcctcagcctcccgagtagctgggaggtgcccgccaccatgcccagctaatttttgtatttttaatagagacgaggttttaccacgttggccaggctggtctcgaactcctgacctcaggcgttcacccgccttggcctcccaaagtgctgggattacaggcgtgagccaccgtgccggggccaaggaactctttttctatcttttataaatttttaagtctgatacatcacattatgtaatcaaattgacttctgaaaaggtatttaactaactgatacctttcttttcatgtagttcgttgcagcaattagaagctttcagtcatgaatatctagtgtcagctttttcacataccaaagtcactttcattttttaaaaatgtttgtatgtcttagatttaattacatgcctgacaatgctcaataagcatgaatgctgagaaatggcctatacttatactgatgcattttaaggaactgtggattaatttactttagtatttatttgattccctccttatttcacatgtagtcaagtaccaacacgtgcctctttctctgaaatttctgaagtgtttttctgcccccattgctactgccttaatccagactgtttttattcataacttgaaattctagtttggaagtcttgcaccctttctgttcttctattggttaccacagaaattacaacacatatttttaacttataaaggttaatgttaatacctttgtcttcctcttggtcagtacaagggccttgaagattttttttttttt

SEQ ID NO: 42762 - DNA, 1050 bp, Homo sapiens
ggtatatatgtgacttttattacataaactgctgccagagttgttgatcacttagttcctgttctacctgactctagaagactactaaggattgattgtggaattaaaatataatctgaaggtacagctgatctcaggatcctccaattcaggatgtcttctgttactaacttcagcaaccacatttaatgttcaaatttagcagtagttactagcatcaaactaacttatccatcctccattatagtaacaattgaccagctagaacaaaacacagaatactcagttaatttcttttgaaaagccatttgacctgcttgtgtctggataagatgaaggaaaagagacataatagctgtatcaatttttttttttttttgagatggagtctcgctctttcacccaggctggagtctaatggcttgatttcaggtcattgcaacctccgcctcccgggttcaagcaattcacatgcctcagcctcccgagtagctgggactacaggtgcttgccaccactcccggccattttttgtattttagtagagacaggattttgccatgttggctgggctggtctccaacttctgactgcaagtgatctgcctgccttggcctcccaaagtgttgacattacagacataagccactgcacctggcttactttttgtatttttagtagaaacaaggtttcaccatgttggccaggctggtcttgaactcttgacctcaggtgatctgcccgcctcggcctcccaaagcactggaattacaggcatgagccactgtgcctggcctgtgtcaaaagcttagtgtccaaattttgcagcagttgagttcagccaactttgatcacatctatactgtatttagattgttaggggaatttaaaaaaatcaaccagatgtactgtatacttttttttttttttgtgacaaagtctttgttgcctaggctggagtgcagtggcacgatcatggctcactgcagtctcgacctccagggctcaagtgatcctcccacttcagcctcctggtacatgggactacag

SEQ ID NO: 42763 - DNA, 1025 bp, Homo sapiens
tgtgtgtgtaaaataggtttaaatgagggcttacattaaattctgcaagtactattgcaaggaaaatttcattcaccataacagattccttagggctttcaggttttgggatattggaattaatttgtaatatacatattatcaaaagttacaattcctagtttttaggtcttggagagaaaacagtagcaccatgtaattaattagaaagttaaaagatttagttaacttaaacatagttgatagtgttgtataaagcccagtctttttttttttttttgagacaaagtcttgctctatcgcccaggctggagcgcagtggcacaatctcgggtcactgcaacctctgcctcctgggctcaagcgattctcctttctcagcctcccaagtagctgggattacaggtgtgtgccaccacacccagctaattttttgtatttttagtagaggtggggttttgccattttggccaggctggtctcgaactcctgacctcaggttattcacctgccttggcctcccaaagtgctgggattacaggcatgagccaccgggcctagccaagccctgtcttttttactgtattattatttggtagctcattttgaaagagaatttttctagagatgattagaatattttatgtggggaaaagtgagttagacctgtatgtcttgcttgatactggagcaaaagttaaaaggtctcagctcttgaacagctatttctttggtttatttgtttgtttgtttgagacacagtctctgtcacccaggctggagtgcagtggcgcagccatggctctctgcagcctcaacctccagggctcacgagaccctcccacctcagcctccctgagtagctgggaccgtaggcatgcgccactgtccccagctaatttttgtattttttgtaaagacgaggttggtcaggcgcagtgactcatgcctgtaatcccagcactttgggaggctgaggcgggtggatcacctgaggtcaggagttcaagaccagcctggcgacc

SEQ ID NO: 42764 - DNA, 1073 bp, Homo sapiens
taaaaaaaaaaagaaaaaaagaattatttgttgtgaaaaacttattttaacaagttctccaaagttttatttatttctaaaataaaagatcagaacaaaattcttattatgggccattcttacagaactttttagagtgccatttgctataatgggatcctgcttttactagcaaaccttttattacaatgaatttcctagatcaggtctttgttgttattattttattttttaaagagatgagggtctccctatgttgcccaagctggagtgcagtggtatgatcatagttcactgcagccttaaactcctgggctcaagtgatcctcccgcctcagcctgccaagtagggaagactacaagtgtgtactaccacacctggctaattgtatctttatatttaaaagaatggaaaaagatactgtataaacagtatcactaaatataaaaaagctaagtataaacactaagtataaaaaagctagagtgatttttattagacaaaggagacctcagaacaagaaaaatattggtaggagtaatgaagcacgattcgtcacgaaagaaggatcaattttttgagaagacacagcggtcctaaatgtatatgcatccagtaacagagtggaagcaaaaactgacagttgaaaggagaaatagacaaatccacaattacatttggaaattgcaacattcttcctcaataactgatagaacaagcaggcaaaaaatcagtaaggttatagaagatttggacagtactctcaatggactatacttaattgacatttacagaacactctgcccacattcttttcaagtgcacatggaacatttaccaaaatagaccatatgctgggctacaaaacacatttcaacaaatttaaaaggattgaaacgtagtgtctactctgactacaatggaattaaattagaaatgaaaaagatacctggaaagtctccaaatatttgaaagtgaaataacatacttcaaaataacctttgggtcaaagaactcacaaaggaaattagaaaatattcataactaaatgaaaatgaaaacacaatatatc

SEQ ID NO: 42765 - DNA, 1076 bp, Homo sapiens
tgtaagagttgattatagttttagttcttttttttttttttttttttggctgtaagtttattcaatgcaaaagaatcctctccagttttactgaggtggctgaccacgtccacgaccaaatccgcctctaaactagaattcggttgctgacccagccccagcctcggctttcttgtcggcaccaggtagcacagcactcctcacatacagacctttaggccaaggtctgccagtctctggacggctacggggtagggtggcaggcacaatctccgggggcagatgaaggtaatcacggagatactggataccctcattggtaaggtaccagtagaaatgtctccaggcaaagtgttccttcacgtagcctcgggacttgagagactgcatggccttcatgacatgaaggttgggcacattcttgtctgccagctctgggtgcttaggcatgtggacatccttcttggccaccatgaccatcctccttaaaaaggagttcataaatggcaatccggttcttcttaggcgtcaacatctctgcggctgcagggtccggggctggggctggaaagctagttttagttcttatgttgaggtctttgatgtgttttgagttaatttttgcatgtagtaatggtccaactttcatttcatttgcatgtacatatccagtttctccagcaccatgttttgagaccatctcactctgtcgtccaggctggagtgcactggcagtaatctcagctcactgcaacctccaccttgcaggttcaagtgattctcgtgcctcagccacccgagtagctgggattataggcatgtgtcaccatgcccagctaatttttctatttttagtagagattgggttcgccatgttggccagactggtctcaaactcctgacctcaagtgatctgcccacctcaccctcccaaagtgctgggattataggcgtgagccaccgcgccagcctccagcaccaggttttgaaaaaattgactttcaccattgaatagccttggcaccttatcaaaaatcatttgaccatgtatgtgaggatttccttctggctgtcca

SEQ ID NO: 42766 - DNA, 1026 bp, Homo sapiens
agtaatccacccgtgtcagcctcccaaagtgctggaattacaggcgtgagccacggcgcctggcaagctcggaatgatttttagatttttaaaaggttttagaaacgaaggatatatgacagagactgatgtggcctgcaaaacctaaaatatttctatctggtccttcacaaaaaagctcccagaaaatcactataaagttaactctatataattgttacataggaaggtagactatttccagcagctggaaacctacatgctgttccctgatcacaactcccactaccctagaagtgatcacttggctagtttttgtggtaatcattttcgttttcatgtagtttaaactatccatgtatgaatccataaacaaaatagtttagttttgccagtaggtaaactcagtgtttaaatcttaggtatttttatttttggctgttctatcaattattaagagcggtgtgtatattcgtatttcttgctgtgattgtgggagttggctgtttcttcttatatttatattaaattttgttttatgtattatgactcttcatctctttaaagctctttgctttattttttaattttaatttttatttttgagacaggttctcgctctgttgcccaggctggaattcagtgcacgatctcgggtcactacaacctccgcctcctgggttcaagtgattcttgtgcctaagcctcccaaatacctgggattacaagcatgcatcaccatgcctagataatctttttgtatttttagttgggttttctccatgttggccaggctggtctggaactcctggcctcaagtgatctgcctgccttggcctcccaaagtattgggattacaggtgtgagcccccgagcctggctgaagccctttgctttaaatgtggtttatctgatatttaatatatccaaaccattgtgaggtataactatttccattcttaatactgtcaaatttgcattgttatgttttctatctttggcaaataccatataattagatttttt

SEQ ID NO: 42767 - DNA, 1003 bp, Homo sapiens
tgaagtcagttgtttcttcatcctctaccaaataaaatcatgtccccagaacactgtttactctgctactgatttggtggtagtggtgtatgtttttattttgcctttttttggtctcataaaatattattgttcagtgctatcagtgttcgtttaggtttatctgtatatttacctctttgtacttctttcctttttgcatcctacaccttccacctggggtcactttccttctgcctaagtattcctttagtattcttctagaatatatctgctagggattaactctctaggtttttgtttactgaaataactttattttgctcttattcctgaaaggtatttttggctgtgtatatttttaggttcactttctttttttttttcttttaacacaattgagcagtaattcattaccatgttctaaccctccattgttactattaagaaatcagctgtcatttacctgttgtttctttgaaggtatctgctttttttcccctggctgctttaaaagtctttagctatggtgttctgtagttttatgatgatgtgtcatttcatttctcttgcttgtgatttcttggacttctgaaatttgtgggttggtgtctttcatcagttctgaataattagccattgtctctttgaatattatctctgacttgttctttttttccttctcttatgaaattctaattaaccatacattatacttcctaattttattaccatggcttttgacttctttttttgtatttttgttcttcttgtctttatatactccatcatggataatttcttcttgcctttcagttcccagatcctgttttattgtttctaatttgctattagccctaatgaattggttactaccttttgaagaaaaagaattacatttcctgcagatattttcaagcctgtcttttattttttaaaatatggtagacacaattattttataatctgtttgataattctagcatctgaagcttttatgaat

SEQ ID NO: 42768 - DNA, 1159 bp, Homo sapiens
gggtgggggtaatttttgttctggtttaccctttccttgagaatgtaggtagctctggaggcccagcttgaagtgggaagggtttcctattgaaccctctcccttgggtgggctttggtctgtgactatctgcttgataccatgttgccctgaaaatggaaattcaagatctgcaggtgcccttaggccatatgtggctttggtgcttcttttacctgtcttatgttcctaatttcccttagattttgccgtggcagatccctaatactttatcaactcttcagtgcttttaatgttttttttttgttgttgttgttcgcccatattttatcctatctgtatagtcccccccccagggagaggttggttcaaacaggaaaggctatagcctacataggatatttacagaaatgtttttaaaatctttcaatccttggcaggtatttattgaatatatggcagaaggtttaattttactgttgcagctcattctcccatgcagtgagaatgttgtcatcaatgagtatcacaggtgttctggagcctgggtttaaactgttacatttgctggggtaggactctactcatagattcaaaacctaatttctttgtcaggatcattttactttttttttttgacatgaaaacgttaaagaactattcctgattaaggaaaattatttcctttattcatgcggattatgaaagttcaacaattcagaaatggtgaaataaaaaattccctccaaaagaactgttattagggagtatggtgggcaaatatttctagactttttgagatatacatgtatgtttatataataggttttcttatttccattgtattagattatttaaccagtatcttgtaagcatttgtattctataaatagtgctgtaatgaacatccttatacatacttactaacttatgcatttttcccagataaaccccctaattataattcccaggtcagaatatgatcatttaaaaatgtcatcacataaattgctagaaggttattagcagtttgagagtaccaattttttcacaccctgctaatactgaattttatcattgtaacctttggcataaagaaaaataccttgttttaacttgcgtttgttcattagttatatatattaaacatcatatgttt

SEQ ID NO: 42769 - DNA, 1060 bp, Homo sapiens
aggcatgtgccaccatgcccagctaatttttgtatttttagtagagacagggttttgccacgttggccaggctggtctcaaactcctgacctcaagtgatttgcccatcacggcctcccaaagtgctgggattacaggcatgagccactgtgccccgcccatggtttatatttttaatgtcatgtttaaaaagtcctttaccactggaaaattctaaaagcatttgtttattttttcttcttgtaattttttatatgtaataaaaggtaggaatctacttttccctttttttctaatatctgcacaaatgtcctaccatctttttaataagttcccgctaatatgaaatgcacattaatcacaacttatgtatctatattatatagatctgtttctgaattctgtattctgtgccactggtcaatctgtctgcttctgtatctgtatgatactgttttagttaatgtaacattgtagtatgtttcaatatctggtcaagtttccctgatactttttctgaaaaattatgtggctgattatgattatttttttaagtgaaccttagaatttattgtgaaattctccgaaaacaactgcccaagaaagcatgagagagaacctagatgaccactataccaccataagactatcccttggaagagaaaaaggccaaacacaaaattaaaaacattaaacttgggttttagagaaatttgatgtttgtagaatctgaacccaggaacatgatattaccgtttaacttagatcatcttttatattcatctgtgaagctgtatagtttttcttcataggtgttctgcatgtttcttaagtttgctttcaagtattttacagatttttgtttgctactttgaatctgcttttccttctgctacatgctctgattaaaatcagttggggaagctatcaattttagtgtatttattttgtatttggccatcttactgaactccttttaattgttatagtaatttttccattgatttgcttggtttcctttgtgaatggttatatcatccaaaaatgacactaaaaatct

SEQ ID NO: 42770 - DNA, 1094 bp, Homo sapiens
gtgtgcgtatcctttttggtatccaacaggaagaatcttaatttatcccttccctaaggttaatgtaatgaattacattagtagatttgctaatgttgaatcatttttaggtttctggagtaagttatgcgtaattgtggtgtattatccttttactatactgtggaacttgttttgcttgcatttattttagatttttgcatctaaatatagtacagtgagaatagaattgagagtgaaataagcttcacctataaagtcacgtgacaggccaggcacggtggctcatgcctgtaatcccagcactttgggaggctgaggcgggcagatcacctgaggtcaggagttcgagatcagcctggccaacatggtgaaaccccgtctctactaaaaatacaaaaaaattagccaggtgtggtggcaggcacctgtaatcccagctatttgggaggctgagacaggagaatcgcttgaactcaggaggcagaggttgcatgcaatgagagcagagactctccattgcactccagcctgggcaacaagaatgaaacactatctcaaaaaaaaaaaaaaaaaaaagaaaagaaagtcatgggacaatgtcttaattttcatttacctacaggatagaaataatatttcctgtgtagggttgagggcattatgaagttgatttgtagaattctacaaagtaacatgtaaattcagactctcataaatatagaaccattaaaatataatgtcaaagaatttgagtaagatagtcacatttttagataggttataatacaatgataatgttggtatgctctccataattatttttagagaggcctttttaaagaaaccattcatcttatgtttgataactgtttttaacccattgcatgtttgggcagtatcagattatctgtctcatgtcatttgtgtgtttctttactgttttccagtgacgagtagcacagcccctctatggtttagatggcagtgctgcaaaggaggcaacagaggagcagtctgctctgccaatcctcacgtcagtgatgctagcaaaacctcggcttgacacagagcagctggcgtaaaggagagct

SEQ ID NO: 42771 - DNA, 1046 bp, Homo sapiens
tgcaatttgaaccaaatgttacttttcctggtttctgggccctaccgggtcacctgtttgttgccaagggtgccagagtaacagaaagccccatcgccctattcctattccactttcaggggcatctttcagaactaagtcaccactcatccaaattttgtccctcttactggttcattttgtccagttatagtttaagtttcctgtttatttgccctatggtatctataagtcttcaatccacactccaccaactgtgttcaaaaaggtgctgaaaatggtgggtgtcttaaggaaaggaaatagaaataataaaacagttaaccagataggaagctattgtgcatgatatggaatgttttcttatagttatgatagctttaccttaagaaagagatacaacgctccttgaataacatcatttcattcaacatggtttcgtgatagtgctaattagacattgtgagttgacgccactgtctgtgtggagtttgcatgttttctccatgtctgtttgggttttcttagggcactctggtttcctcccatatcccagagatgtgtgcattaggttcattggtgtgtctatggagtcccagtctgagtgagtgtgggtgtgtgtgtgcaacagaatggcttcctgtccaggtttggtttctgcttgcaccctgagctgcctgggataggctctggctattcaccactctgtactggaataaacagataaatcattgtcttatttgtttttatgaatcttacttaaatgtatgtacagcttacttttatttcagtgtttaatgttagaagtgttttgatctttaatcatcaaaggaatggggaaacttcttgtgtgaagacagtatagtcctatccccaggtaacaaaggaaatatacatactttaaaaatgggagaattgacctgtataatattgtgagaggaactgacagcagtatggaatagttcctttgagaatgcagtatgctatagtattgttctaaagaatgtatgtgtgtcattcacacatttcgagattgttaatgttta

SEQ ID NO: 42772 - DNA, 1628 bp, Homo sapiens
cctgacctccacagccttctacatctcaataactgtcaacttttctccttctaatttttacagctaaaatccttggagtcattcttgtctttctcttctttttatattatatgctaaatccaaatctatcagtaaagcttattgattttaccttcaaaatatgttcagaatttttttttttttttttttttttgagatagagtcttgctttgttacccaggctggagtgcagtggtgcaatctgggctcactgcaacttccacctcccaggttcaagccggttctcctgcctcagcctcccaagtaactgggattacaggcacgtaccaccatacccagctgatttttgtatttttagtagagatagggtttcaccatgttggccaggctggtcttgaactcctaacctcaggtgatccacccgccttggcctcccaaagtgctgggattacaggcatgagccactgcatctggcctatgttcagaattttaccacttctaattctcttcactgctgccactccaacttaaaccattgtctcccactgagataactggacccattgctttgacctttgttttcttttaatctgttcttaacaaagcagagtgattgtgttgaagcataagtccagtcatgccactcccctgtcgaaaagtccttaaagtggccctgcatggtttgttttcctccaccctgacatgttttactactatctccctttctcatcagattccatgcacgctagccaccttgttttctcaaatactctctctcagtgatgctctcacctcggggcctttgcgttggctgttgcctttgccctaacattcttcacccatatatcatcatgccccgctctctcagttccctctggtttctgcttatatttactctatgagagaggcctaccttggctacactataaaatagcaacttctccccacccaccccacctgttattgagctcctaggccctgcgttgtttttctccttagtctacaccagctgacgtactatgatggacttttgtctgacttccccccactggaatgtaagctccatcaggtcaaggactttactttgttcacttgtgtatctgcaatgcccagaacgggacctgctctaatagacactcagtgtaattatatgttgcatgagttagtaaaagcattctttatagagggactggttaaatgaattctaatacatttgtacagtggaatgctatacagctgacaaaagaagtgaggtagctgtatatacaccaatgaaaggtttctaaatatgtgttgataaaaataggtggcagaatattaagaatttgatcttttaaatgtttaaaattattacataattgtgtgttttaacataggaaatttgaggttttatttttaagagagaggtctcgctatgttgcccaggctggggtacggtggctattcacaggtgcaatcatagcattatagcatactatagccttggaacttctgggttcaagcaattctcttgcctcagtttccagagtagctgcaactagagattgcaccacagtagctgcaactagagattgcaccactgcactccagcctgggtgacaaagtgagactcagtctcaaagaaaaaa

SEQ ID NO: 42773 - DNA, 1033 bp, Homo sapiens
ggattacaggtgtgagctgccatgcctggccaaatattatttttttaaatgaattgtttctcttagtctactttgttaaatttggaattcatatgggcgcggtggcttacacctgtaatcccagcactttgggaggccaaggcaggcagatatctaggtcgggagttcgagaccagcctgaccaacatggagaaacccgtctctactaaaaatacaaaattagacgggcgtggtggcgcatgtctgtaatcccagctattcgggagggcaaggcaggagaatcacttgaacccaggaggcagaggttgtggtgagccgaggttgcaccattgcactctagcctgggcaaaaagagcaaaactccatctcaaaataaataaataagtaaaatgttcagtactcaccaaggtgcccctattgtctctacttttatcttgatgcatcactgaattgatgttagatttcaaattcatcattgcccttatactattctatcctgtagccacctttatataatgatgaaagaaattagccatttgttattatcctctctctgttggtgtacatcaaatgctcacctaaaaagagcaacaaccagtggaaaacacatgatgtttttatttggatgactatttacttgtaacctactagcaaactataaaattgtatgatatgcagaattttaactgaattgctttaagtgaacatttaaacatgacaaaccatattgatggtatttatgttaatatacttaaaatgaacatttttcttcgttgtgagtaatataacctacttctcaatgaaaacctagcattaaatttgctaatgagttcaataacatttccataatatttttagttacatgcttaagtttctcttagtgtttctcccactttttaatagcttatgcctttttcgcctttggtttttttttggttcattttaaagcaaaaatctcacaacatgtgatacctggaaacactgtaacctagtggtaagaccataggccctggggacacaggctggccatgtc

SEQ ID NO: 42774 - DNA, 1023 bp, Homo sapiens
ccctgactgtgtgcagccattctgccccacagaagctgctccttggtatccgagctctggagtgtttgggctgcaactgacaggagttcagaggacaccccaggggcagtggcagtgcccgtctctgatattctccgctcccacgagcccttgttacactcctgctagcccctggcttgtgggcttggcctctgagctggacttctttcggtccttgttgcaagtgggccaccttcacctggaaggccaggtcgtggtatttctgcgtctcattgggccccagggtgtaccaccgcttgctcagcatctggctgacggtccggttgtcctggttggggtgaccctggtgcgccctgccagggcctggtgccgcttgctgaagatcatgaccgccactcatgggccaccggatgtggtccttgtcccatttgttggggctgcatccatccttctcagaagatgagtcctgttccttgcgcagggcactgagggactgggcctgacatcatctggctggtagaggcaactgggtgtcaggagacatgatggagaggaaagcatcatcatggtcattctctgtctcactgtccagcagggactcccctgaggggcccagggctcctcctccatggtgggaggtgagcttttaccaggttccaccacccccaaagtgtgtggggttgcgggccctgggctttcagggcaggtggctccagggggccacccagggtcagcactccctgtcccacctggtggacactcatgagcaacagctgctgacttggcaggttctttgctctggttggaggccactgagtgactggcaggttgctggacctcacatagctgcagggaggggtcaggaaggggacagagtaccaggagaacacagccacagagcaaggttccacgttcctccacacaaacatgctgacgccactggaggcctcgctggacgcagacatcaggggcctgtgggccaagtacatggtctgggcagggggttcctggcaggggctcaca

SEQ ID NO: 42775 - DNA, 1318 bp, Homo sapiens
tgggagactggccaccacagttgccttttccttttcaggtcacttacaagggtctttgttgctatggaggtggatgtgggcataatcaaagggtacatgttgtacaggcctttattatacaaacctctacaataaaacaataacacatcactgccaagacagttatacagtgttaaattggaatggaaaggaaggaatcagaatttcatgtgatagaacacttaaaagtctgcctgtgcacatgtatgaatatgcattagggagaagtaaaagagtgacctgaaaatcttcctaaagtaatattatctagaaagtttgagaggtttaactgtggctaacaagatttcctgaagataaaatgttcctggggccttaatagttacaagaactttaccaaatcaagaaagcaaatatataggagtctaaaaattatttagttttgcatattcatttcagagtaccaattatgattttatttctttttaatttttaaaagtttagaaaaaaaacgagaaccaattacaatgttaaaaggaaacaggaaggatagatttggggccaattatattactgtttgggtttttgttactataaaaatggaaatattaaagattttaaaaaatgagtggtaatagagtacaaatctgcaaatgatgaatcagcaattatatttttataccaaatggtatgtttgtgatattgatatagtattaatgcactgtgaatttatttatttattttgagatggaatcttgctctgtcgtgcagactggtgtgcagtggtgcgatctcagctcactgcaacctctgatatggtttagctgtgtccccacccaaatctcatcttgaattcctatgtgttgtgggagggacctggtggaaggtccatgaatgatgggggcaatcaattctttcctgtgctgttcttatgatagtaaataagtctcacaagatctgattttttttttttttttttttttttttttttccaagacagagtctcactctgtcacccaggctggtgtgaagtggtacaatctcagctcactgcagcctctgcctcccgggttcaagtgattctcctgtctcagcctcccaagtagttgggattacagttgcctgccaccatgcctggctaatttttgtatttttagtagagaggggatttcaccatgttggccaggctggccttgaagtcctgacttcagataatctgcctgtctcagcttcccaaagtgctgggattacaggcgtgagccactgtgcccagctgagatctgatggttttaaaaagaggagctcccctgcatgagatctc

SEQ ID NO: 42776 - DNA, 1050 bp, Homo sapiens
tggattttggacttgcatggggcctgtagcccctttgttttggccagtttctcccatttggaatggctatatttacccaatgcctatacccccattgtatccaggaagtaactaacctgcttttgattttacaggctcataggtggaagggacttgccttgtctcagatgagactttagactgtggacttttgagttaatgctgaaatgagttaagactttgggggactgttagaaaggcatgattggttttgaaatgcgagatcatgagatttgggaggggccaggggcagaatgatatggtttggctgtgtccccatccgaatctcatcttgaatttctgtgtgttgtgggagggacaggtgggaggtcattgaatgatgggggcaagtcttttctgtactgttcttgtgatagtgaataagtctcatgagatctgatggttttaaaaagaggagtttccctgctcaagctctctctctttgcctgctgccatccctgtaagatgtgacttgctcctccttgccatctgccatgatgtgaggcttccccagccacgtggaactgtaagtccaattaaacctcttttctttgtaaattatccagtcttgggtacgtctttatcagcagcgtgaaaacagactaatgcactctgcctcctggggttcaagcaattctcatgccttaaccttccaggtagctgggactacaggtgtggactaccatgcctggctaatttttgtatttttggtagaaacagggttttaccatgttggccaggctggtcttgaacttctgcctcaagtgatccacctgcctcggcctcccaaagtgctgggattacaggcatgagccaccgcacctggcctgcactgtgaatgtataatcccagtgattagatatggatattaatgttattcatttcctttttaccttattttatgtttgtttttaataataataattttgtaacatttgaagatataaatatccttaaatacttttacagtcatgttaaaaattcttcggatttcaaaaacaatgaaaaaat

SEQ ID NO: 42777 - DNA, 1027 bp, Homo sapiens
tttggggtttgtgtgtgtgttttgtttgtttgttcttggtgcttaaccaaaagttgttcacagtttggaaaatcattacaaagttgctcctaggacagtaaaacctatttaataagtggggttcagatcccctacacaaccttggttttagttgggattcactctgagtggggcttggagggaagggtaaagccagcaggaaaagacaggcggctcctgcagggcagctctcctgggtccagaattctccctacaggtctccccagatcaagccaaggaaatgggcgccaagtaaccagagactgctggagtcattgccagtggtcccgtgaatcacagccagcctcaagacctcaatttcttcacccggccatgtaagcagagcggacaactctgagggcgtggctgggcggggttcttggggcagcccggcgccactgccggcatctacgcaccctgaacgcgcccgatctggtctcatctcggaagctaagcagggtcgggcctggttagtacttggatgggagatcgcctggaaataccgggtgctgtaggtttttggcttcccgctccctctctctttcccccttttgtcgccgcgcttttcaaccgccccctaactctgctcccccttttactccgtcgcagcccgggacctcctggtgggggtccgccactgcagcaccaggcgccactgccataccaccctgaacgcgcccgatctcgtctgatctcggaagctaagatgtggccgcatttaggaccccaccggcttggctgtgcctctcccagccccctggcggagcggactaaccctagcatttcattgattcacaataacgccaccccaccccgactgactattttgagccccatttgccaatctgtagtggatctttactgttttggagtagtaaattcaatacacctttatgggtctatttttgtaactactgcattctgggtacaagcttctgattctatttcatggcttcgaatgaagtcgtgcacaagcatttacatattg

SEQ ID NO: 42778 - DNA, 1062 bp, Homo sapiens
acccaggcttgtcttaaactcccggatgcaagtgatccgcctgcattagcctcccaaagtcttgggattacaggcgtgaaccaccacccccggcctcatgtcattcttttttttttttttttttttttttgagacggagtctcactctgtagcccaggctggagtgtagaggtgctatctcggctcactgcaagctctgcctcctgggttcacgccattctcctgccacagcctcccaagtagctgggactacaggcacccaccaccacgcccggctaattttttgtatttgtagtagagacggggttttaccgtgttagccaggatgatctcgatctcctgaccttgtgatccacccgcctcggcctcccagtgtgctgggattacaagcatgagccactgcgcccggcccattctttttaacctttgtgtatttttccataatcgagatttaatatattttaccaattctctgtttttatttgttttccgattttttaatcattgtgaactgtcatcattgaacatcttaatacaagtatctttgtctgtaaatgtgggtattttgatgggattgaatgaaacaatgttgagaaacatagccaagttctaacattgataggaatagagtaataagtaccatcttctacccatttctctatgggtttcatggtcttgctttcacattgcttcttctgatggattttcctaagtcttaaccttcacgtcatcagtaacagtaccttatttgagactggggcacttgggaatgactgccccccaacccccgcccccattatctccttaggtacttttctgtttgtcttactgtgttgtcgtatttactctagaacactttccactctctactgatatgtcctcctctgccatttcaggacctcccaccctcccccactgagctgccttcccagtgatgaaagaaaaaatgtaaaagcctgaaaacccttcttcttgatttttaatttttttttttccctctaagaccttaaccactctggatagtatcacggggtatcagtagagtgtgctaaacagatgtgt

SEQ ID NO: 42779 - DNA, 1025 bp, Homo sapiens
gaaaaccatgattatttaccaagaattggagtttctcttctgtaagcaataaagaaaaataaagttcagccacatcttcgctagagaaaataaaaatgaaaacaaggaaaaacaaagttttacatgttgtttgatgcaaagagtggagaacttggataggaatggatattcactcctgaattctaaccataggctgaaatctacctccaaagagataggctgagtttgcttttggatccaagtgcaccagccatgactgtgttgaccttattcacgtggcttattacagaccagtaatggaccatttttttcagttgctggcctggcagttttgttttggagacaattttttatttctgtgcattagccctgggcacacacctggctaagtccagagttctgtgtctttttaaccttttgctggatttctctgcattttctacagaaagattgtaagtaaaatagatggcgacaaggacgggtttgtcactgtggatgagctcaaagactggattaaatttgcacaaaagcgctggatttacgaggatgtagagcgacagtggaaggggcatgacctcaatgaggacggcctcgtttcctgggaggagtataaaaatgccacctacggctacgttttaggtaggtccctactgtctgggggaaaaagccttgtggagctggcaccttgaaacgtaactgttttgtcttgtagaatgattgtagataaaatagacgcggataaagatgggtttgtgacggagggggagctgaaatcctggattaagcacgcccagaagaaatacatatatgacaatgttgaaaaccaatggcaggagtttgatatgaatcaagacggcttaatctcctgggatgagtacagaaacgtgacttatggcacttacctgggtaaggggcaagatgtcagcctggcagggaccgtggtcttgagtcaaagaaacaaatgggtcacacagtaaaggaaaggaagcttatcttaaatagttcaattcagtgctaagctgatt

SEQ ID NO: 42780 - DNA, 1071 bp, Homo sapiens
atattctgacatattttatcttgaagccttagtcactttgacattcttatttgcaagaacattgtgtatgtaaattgaaatatggaaaatggtgttctgtgatatggctcttaagtgtttttagagtcttctgtgttaagttactattacaattattaatacacaattgaacaaaataacatttattacagacgttttatgtttatatatttttaaatgcatttctttgacacatttttattcaaatagtttcatatccatggatgacaattacttatccctagagtgaaatgggattcagcaccaattcctaatttttattttttagaggaagtactaacagaccttgtttacattagtaaataagttgatggaagatttgtcatagcaatattgcttagttcttggaactccttttgagttacatgccagaaatcatgtaatctatcatcaaaaattatgggttttgtttgtttcaaggtggagtctctctctctcacccaggctgtagtacacaggcacggtctcggctcattgcaacctctgcctctggggttcaagcgattctcctgcctcagcctccccagtagctggagattacaggtgtgggccagcacgcccggctaattttattttttatttttagtagagacggggtttcaccatgttggccatgctggtctcaaactcctgacctcaagtgatccacccgcctcagcctcccaaagtgctgggattacaggcatgagccactgcacccagcccaaaaattatgtttaatgatcccttagctaaaactcaattaggccatttttcaaggtttttttttttaaagcaaagaatttaaaaccttttgacatgcaaacgaatttattcattttttttcaggcatttgcattctcaagactgacactagtatttctttttctttttttttttttttttttttgagacggagtcttgctctgtcgcccaggctagagtgcagtgatatgatctcggctcactgcaacctctgcctcctgggttcaagtgattcttttgcctcagcctctcgagtagctgggatta

SEQ ID NO: 42781 - DNA, 3475 bp, Homo sapiens
tcccagcactttgggaggccaaggcaggcggatcacctgagattgggtgttcaagaccagcctgacaaacatggagaaaccccatctctactaaaaatacaaaattacctgggcgtggtggcgcatgcctgtaatcccagctactcgggaggctgaggcagaaaaatcacttaaatcactttaacacgggaggcggaggttgcggtgagctgagatcgcgccattgcactccagcctgggcaacaagagcgaaactccgtctcaaaaaaaaaaaaaaaaaaaaacaaggaatgtgtaattgctgttttcttccctcttcgtatgtatgtagggggaatgagggctgagtagttcacacttaatttagtagaaatgagaatcttaacttctgattaaccccaattcttctataacagtgtttctgaatttttaatgggaaatatgttcttcttcaattcattgctatctctactttcaggatggcaagcttaccaaggaggagatcgttgacaagtatgacttatttgttggcagccaggccacagattttggggaggccttagtacggcatgatgagttctgagctacggaggaaccctcatttcctcaaaagtaatttatttttacagcttctggtttcacatgaaattgtttgcgctactgagactgttactacaaactttttaagacatgaaaaggcgtaatgaaaaccatcccgtccccattcctcctcctctctgagggactggagggaagccgtgcttctgaggaacaactctaattagtacacttgtgtttgtagatttacactttgtattatgtattaacatggcgtgtttatttttgtatttttctctggttgggagtatgatatgaaggatcaagatcctcaactcacacatgtagacaaacattagctctttactctttctcaaccccttttatgattttaataattctcacttaactaattttgtaagcctgagatcaataagaaatgttcaggagagaggaaagaaaaaaaatatatgctccacaatttatatttagagagagaacacttagtcttgcctgtcaaaaagtccaacatttcataggtagtaggggccacatattacattcagttgctataggtccagcaactgaacctgccattacctgggcaaggaaagatccctttgctctaggaaagcttggcccaaattgattttcttctttttccccctgtaggactgactgttggctaattttgtcaagcacagctgtggtgggaagagttagggccagtgtcttgaaaatcaatcaagtagtgaatgtgatctctttgcagagctatagatagaaacagctggaaaactaaaggaaaaatacaagtgttttcggggcatacattttttttctgggtgtgcatctgttgaaatgctcaagacttaattatttgccttttgaaatcactgtaaatgcccccatccggttcctcttcttcccaggtgtgccaaggaattaatcttggtttcactacaattaaaattcactcctttccaatcatgtcattgaaagtgcctttaacgaaagaaatggtcactgaatgggaattctcttaagaaaccctgagattaaaaaaagactatttggataacttataggaaagcctagaacctcccagtagagtggggatttttttcttcttccctttctcttttggacaatagttaaattagcagtattagttatgagtttggttgcagtgttcttatcttgtgggctgatttccaaaaaccacatgctgctgaatttaccagggatcctcatacctcacaatgcaaaccacttactaccaggcctttttctgtgtccactggagagcttgagctcacactcaaagatcagaggacctacagagagggctctttggtttgaggaccatggcttacctttcctgcctttgacccatcacaccccatttcctcctctttccctctccccgctgccaaaaaaaaaaaaaaaggaaacgtttatcatgaatcaacagggtttcagtccttatcaaagagagatgtggaaagagctaaagaaaccaccctttgttcccaactccactttacccatattttatgcaacacaaacactgtccttttgggtccctttcttacagatggacctcttgagaagaattatcgtattccacgtttttagccctcaggttaccaagataaatatatgtatatataacctttattattgctatatctttgtggataatacattcaggtggtgctgggtgatttattataatctgaacctaggtatatcctttggtcttccacagtcatgttgaggtgggctccctggtatggtaaaaagccaggtataatgtaacttcaccccagcctttgtactaagctcttgatagtggatatactcttttaagtttagccccaatatagggtaatggaaatttcctgccctctgggttccccatttttactattaagaagaccagtgataatttaataatgccaccaactctggcttagttaagtgagagtgtgaactgtgtggcaagagagcctcacacctcactaggtgcagagagcccaggccttatgttaaaatcatgcacttgaaaagcaaaccttaatctgcaaagacagcagcaagcattatacggtcatcttgaatgatccctttgaaattttttttttgtttgtttgtttaaatcaagcctgaggctggtgaacagtagctacacacccatattgtgtgttctgtgaatgctagctctcttgaatttggatattggttattttttatagagtgtaaaccaagttttatattctgcaatgcgaacaggtacctatctgtttctaaataaaactgtttacattcattatggggtatgtatgaccttcattttccaagaaatagaactctagcttagaattatggatgctctaaaatgtcagaatgggaactctcctcgaagttctcccaaactcagagacagcactgccttctcctaaatgattattcttttctccctgttttctggtattttctagcatccttctcaccacagccataacccttttttacttccattaggccgtataactggagagacctgctgctcgttatataattatctgataccaaacacaagcgattctgaatgtacacacacgtttatctatagagcataaggtaaaacaattttgtttaacattttggtattgtttacaaatgttattaaaacatgcaaattcattttgagaacctcgagagaattaaactattaactttagtaaacacacagtttaagacaaatataaaggtttagccaaatgcaacggggaggaagcacctggaataatttgtgcttgctcaggggcttgtggacatggctgttcctgccaaagctgtagcagttatccaaaagttctttcaaactcatatttggggccactgagttttt

SEQ ID NO: 42782 - DNA, 1025 bp, Homo sapiens
aaataaaagggtggggattgaactttttctcttaccaaccactccttactttctcaccactctccccaaaccaaaaagctccatagagccaattagagtttttcttataagggctttaaatcttaaaataccttttatactcaggaatctgtgcagcagtttatatttaggtatttagtccatctggagaaaatgcacctgaagccactttgtaaactacaaaatatatcccaacacaagagaccactgccacttttagcaggtctccatagaagggctcccccgtccccagatgggctctgtgaagtcaaccctgagattcttcagggaattgttcacaacggggatgaggcaccaaggaggcatcagacttcctgtgtgaccaccaccatcccttgcctccttccttctactccgcctcagagtcaggagctactcaccaagttagaagacctgtgtgagctgcagctgctctaccaaggcatgcaggaggaacagaagaagctgatacagaaccaagactgtgtattaaaagaacaattagagatccacgaagagctgcgacgtttcaaagagtctcatttccaggaagtgttggagaatcccgatgattccaaattggctaagtcctccaaatgtaatcgaaacaaggtaaccatagcaagaggtagggagacagttctcctgagcacaacagcatggcagagagagtgggcaccgccgaagggtcagagttgggaaggcgtgtttggccaggggtaaggataaggcaaaagccctgcctttcaccagctgtgaccactcacaggctccattaagaggtggcttttagatacggcctgaggacctcacctagatgccattatcctttatcacactgatattcacagtgcccagttgaagcactatgagcactcagggcagagctgggatgaccagaagtctgtcatcagatcattcgactcattcccagtaagatgtataatatcagtttggtgtttgtttggattcctttggactgactc

SEQ ID NO: 42783 - DNA, 1046 bp, Homo sapiens
acaaggccagccagaggaaattagatggactagcaaaagaggaggaaaagaaagaggagatggaggaggaaaaaaagcaagtgaaagaggaagcaaaggagcagtgtggggatgagctagttgctgagccagcagatcctgaggaagctaaatccacagaagatcaggaggaaaatgaagaggacaaagaggaagaggagaaggaagaagacagtgaagaggaggaggatgacgccgactcttcccttgaaagtcccgaagaaaataaccccctcagactttccgagagcaaaaaggtaaccagagccaaagcctagatcaagtgggaagtggggtcttgggctcagataactccgagttaatgggtggccctgccaaggatggatatctccaggagtggaggcctcgcgctctaaggcacaacccttcggggaggtggagatgcagaagtgggagatgagagcagtctgtctgcacgaaatcatgggctcagccccgtttgctgtggaaccacctcacaatgaccaccttttctgggaaccagcgtggggtctctggagtcctttcatttacgtagtagcctttgttaccttccttatgtcgggagtgttccctcatccctcttttggcactgcaggaaggacattgacagtgtgaagtctacttcaggccatttctgtcggtctgggcaagtcactcagtccagttttcctatggtgccctgttaggtttaacctttgttgttgctgttaggggtgtgtcaggggataatctcttctttgtaggctcatgttgccccctggattctgtatatcacaggacatgaaggtggggcctggaagtgatcaagagtgatagtgaaaatatttcacatctgtacagtaggagcatagactagtccaaggagaccatccctagccttaacccttcagttgctagatcattgagaggttggggtggaggtatcctgggatatatatgccagaatgccagaggtaacttaccaacaatatagaagtacttccatattttaataactggtacgt

SEQ ID NO: 42784 - DNA, 1034 bp, Homo sapiens
tatctggaatttccagcaatttggtcttcagcactggctaaggatccagtgtgcagtgctctgcttaccttgtgccaggggaccattacctaagatgtggaaagtcggaaccactgcagcccctcccactatcatgtttccttgagctcatcatattccaccacgtgctggttcagagcctcacagatgtctttaccttcggtgccacatttctaaagctagacctgatttttctacttcaaatatattctatgtttctatatatggagagatccctttgccccgtgggtcctgcgtcttttgcaggcagctctagggcatgtgtattaccaccttgcaaaatcggtttctctctggaagattgttgcagtgaaagaactagcccttctccattgtcagtttgtttcggtgcatgttgtcttacaatgatatcattagattcctaggggatctaagggaccagagcccaaaatactaagaaacttaatggaaagcaggctagaacaaagggacaggtgacctggtagaagactggctcttcctagagtgacctaggaaaagtcacaagaaaggtctagatgcagatacctcctgcttgacaggatatgagaggtatgtgacgagacagaaagaaaactggactcaccgcctgacttggacctagctgctgcttaacccattcaattttgcaattcctgcagactgccggtggaaagaaccaaggcccaggcagcagaaaagacatgcaactgctctagcttacctgttttttaacctcttgattcctttctcttttccctttgttttctcatcttcattatctgttggatccatgcgtttatgtctcacatctcctggtctctcctcgtgcttctttctcattttggtgtgttgcagtcatcccctacccccaatccccccatcttctccttgcctcttgtaggcctggtggtcatctcggctttgctctggtgctggtgggctgagacgtcgtcctaatgcaggtactggtattgcttcctctccttctgagg

SEQ ID NO: 42785 - DNA, 1030 bp, Homo sapiens
aagatcatagaaaattctgtcaaacaactcaacgtccaaaaacatgattccggtgatttgtcacttaggtcacctagtttaaaaggagagtttgacacgacttcccctttgggacacccacaccagccctttccccatcccatgtagaagcttgcctttgcccagtgtgaggtgcacgggtcacatttaaggatttcagctcctccctcctttaagaacaccagactaacattcttagcaatgcacattaggatagaggcatctgagcatataaatatttttttctagctagctcccttcttagtttttgtttttggttttagagacagggtctcgctctgtcaccgaggctagagtgcagcggcatgatcatggctcactgtaactttgaactcccggtctcaagcgatcctcctccctcagcctccggatctcttggttttcttacatgagttactctgtatatccacctgtaacattgcttggctttccatttcataccttctgttgttcttagtagctatttctataagctcaggagattttctttgctctttagcaggcttaaagtcctctttttagatcaattatcatctgagaaaatgtgttcttagcattaatgggctatattccatttttacttgaaaccatccttctgttacctatgccatagcttatgactcaaaatccaaattctacctttcagttagtagagtaaaaaagtaataaaaataaaacctatttccccaagtatgtattttcttgtctaagattttcatattacctaatggatgctttttggatatcttcgatggtgccacttgtcccatgaatcagcagggttccctagtggccggcagtgtctggaagcctcagcatactctagcacatgcaccaggaagtcagtcaacatacctggtgattaggagtgttctaatgacctaggcccagtgacaggtttccttaaatttccttgaaccaatgtcattctctgtcaaagtttgtctgcctaagaacctcctacttacct

SEQ ID NO: 42786 - DNA, 1031 bp, Homo sapiens
cgttattctccatctgtggtgacggcttcgtgatatatccatagtgtcaaagcttctcaaacttcattctctagcatgtgcagtttgctgtatgtcaatcatagctcagtagaactgttaacaaaacaaaaaggctctgccctgggagccttacaatcccacaaggccagaaagaaaccaggtaattacatagacaggaggcagactcacttgctgtagctgaggtgagggtaccttccagaaccacaggaacacagagaagcagccttctgaccggaagggccccataaagaacttggcatctgagtggggcctcgcaggagggagagggtcaggtaggcagagactagaggcctgaccccagagctctggcccgaggagctgcgcaggtgagggagggtgctctggggcagtggagggtggggcgcccctgagcccgtctgtgccctcccctctgcagacagcaaggccatcgtggatgggaacctgaagctgatcctgggcctgatctggacgctgatcctgcactactccatctccatgcccatgtgggaggatgaagatgatgaggatgcccgcaaacagacgcccaagcagcggctgcttggctggatccagaacaaggtgccccagctgcccatcaccaacttcaaccgtgactggcaggacggcaaagctctgggcgccctggtggacaactgcgcccccggtgagtgggccagtgagcacagcatggagcccttagctcccaaagacagaggggacaagctggggctgccaaggcgtgtggttgtcagaatgcacaccctggggcctgggggccaggatcccctgcagggtttgtcctcctccagctgtggctctccgctggctggtggcaggccctacctgatgagtgtgccagattccgcagaggcaggaagaggtttaaaacccctcattttacagacaaggacactatggcccagagagggctggtgacttatccaagatcacacagcttatctgtggcagaaccacctagagcccag

SEQ ID NO: 42787 - DNA, 1050 bp, Homo sapiens
ggcacagaggagccagtgaaggtgcgggaggctggggatggtgtgttcgagtgcgagtactacccggtggtgcctgggaagtatgtggtgaccatcacgtggggcggctacgccatccctcgcaggtgagtaccttgcgccccccatgctgtcctgtctaggccatcacagggagggacgaggggcactgggctgcgagggagtttgaggggagatggagtttgggctgcgagggactttggggggcacttcctggcatggacaccagctccctctctgcccagcccctttgaggtacaggtgagcccagaggcaggagtgcaaaaggtccgggcctggggtcctggtttggagactggccaggtgggcaagtcagccgattttgtggtggaagccattggcaccgaggtggggacactgggtaagtggctggggggcaggaggagggagtgctgcgggggagggcagcaggggacactgtgggtaatgggtgcagtgcgcatgctggggagcgctggggtgagcagggagataggacatgagggcagctagaggggagctgggggacggaagggtcttgcctgatgctggatccccgaccctcccccaccttgccccaggcttctccatcgaggggccctcacaagccaagatcgaatgtgacgacaagggggatggctcctgcgatgtgcggtactggcccacggagcctggggagtacgctgtgcacgtcatctgtgacgatgaggacatccgagactcacccttcattgcccacatcctgcccgccccacctgactgcttcccagataaggtgtggtcccagctcacacacacctgccccgggggtggggcaagctggttctcctcccctccccaactcagccttcttccctccgcacaggtgaaggcctttgggcctggcctggagcctaccggctgcatcgtggacaagcccgctgagttcaccattgatgctcgtgcagctggcaagggagacctgaagctctatgcccaggtaggtcattgtccagtctctgctgcccttac

SEQ ID NO: 42788 - DNA, 1026 bp, Homo sapiens
tggcggctcaggccagccttgggccttcttgcacgcatcgtctgcagaactcccctgccctctgcagacccagctgcccgggcaggtcatgtcttcaaatattgtatgacttgggactgctgaaattggaaattttttcccttatctaatttcccatctttttattatttcagccacagtgtcagaaatacatttcatttttgaaaacattttattttcacattttattaatttaggaaggccttctcttccaggcctgggacccacatgagtgaggtttgcccagcctcagtctgcagtcaagttcatttattcttgtgtgtgttttcttagcaagttcctagccattttcccatgttggtctggcttccctgtgggcatttcaaaggcagggaaggcctcctcctccgaggctcctcagcatcagggggacccatcagggctggtgggcagggtctaatgtccttctcctcacagggagcccgttccgcgtgccagtgaaggatgtggtggaccctgggaaggtgaagtgctcagggccagggctgggggctggtgtcagggcccgggttcctcagaccttcacagtggattgcagtcaagctggccgggcgcccctgcaggtggctgtgctgggccccacaggtatagaatggccggggcagggaggagggaggtggggcgggacgcccggaggctctgctgaccctgtgccccttgcccaggtgtggccgagcctgtggaggtgcgggacaatggagatggcacccacactgtccactacaccccagccactgacgggccctacacggtagccgtcaagtatgctgaccaggaggtgccacgcaggtgaggaccagccctgggctcctgtgctgcggctgagctctggggtgctcctgctggggtggcactcaggatcactgctggagtcccctgggagagcctctcccagctctcagcctcgtccagtctcgccaccccatcccgctcttccccggggctctctgctgtgaggctttcctg

SEQ ID NO: 42789 - DNA, 1045 bp, Homo sapiens
ccttgaccacacaggaaactggttccagatggtgtctgcccaggagcgcctgacacgcaccttcacacgcagcagccacacctacacccgcacggagcgcacggagatcagcaagacgcggggcggggagacaaagcgcgaggtgcgggtggaggagtccacccaggtcggcggggaccccttccctgctgtgtttggggacttcctgggccgggagcgcctgggatccttcggcagcatcacccggcagcaggagggtgagcaccgcacactgggccggccgggtcctcacggcgggatgggagggtgctgcggaccaggcttgatgctggcagactggccccgaaggccagggcaggtctgagcagaggaggaggtttaactgatgggggagggaagggccagggctaggaggaatcccagtgttgccctgacatcccccaaaccctgcaggtgaggccagctctcaggacatgactgcacaggtgaccagcccatcgggcaaggtggaagccgcagagatcgtcgagggcgaggacagcgcctacagcgtgcgctttgtgccccaggaaatggggccccatacggtcgctgtcaagtaccgtggccagcacgtgcccggcagcccctttcagttcactgtggggccgctgggtgaaggtggtgcccacaaggtgcgggccggaggcacagggctggagcgaggtgtggccggcgtgccaggtaaggggcaggtggccaggagtggggatgaagtcagggcagccagtgtgaggggcgatgatgctgaagtccactaccttgcctgtccccagccgagttcagcatctggacccgggaggctggcgctgggggcctgtccattgctgtggagggtcctagcaaagcggagattgcatttgaggatcgcaaagatggctcctgcggcgtctcctatgtcgtccaggaaccaggtgggcgtccacactggcagtggggctgggcctgcctgaccttccagactgggtttctgcccactggccaggcaggagatgcttggggccac

SEQ ID NO: 42790 - DNA, 1050 bp, Homo sapiens
agaagccaaccctaatcagcgtgaccctccgctttgggatgaaattgattctaggtagggttgacagagggttgagcgtggcagcctttccccttgtcctctgtgccctctgggtcatgctcattcccctccacagcccagcccaacaactcggagagggctgcctgggtaggagagacggcagcccccagagctgtcctggactcccttctcatctctccccacaggcaatttctaaaccgggatgacattggcatcatcctcatcaaccagtacatcgcagagatggtgcggcatgccctggacgcccaccagcagtccatccccgctgtcctggagatcccctccaaggagcacccatatgacgccgccaaggactccatcctgcgcagggccaggggcatgttcactgccgaagacctgcgctaggggactcctcatagccctcagcccttccctcgtttccaggcctctccccaggcttgccatcagccttctttactttttgagcctctgatttccaattccctgctccttcccactccattaagaggctaggtgaggcgcttctaggttgctggggctctgctggttaaggaacaggaagcctgaccatctccctccactacctcttccctgtgctgttacacagtgtcattgttgatgttaaattaaagtcatattcttgcttctctccagatgggttgggtgctggaaaggacatgtgtggggtgaggccatggggcagattcggttggcaaggatggaaaaggtgctgccaaagacaggcatagaagaggtggcccaggaggattgtgccgggaggcagaactcaaggactggtccttggatcagagaagaccagctctggtctggggaggaatgggaggaggcttgagcccagctcctgcttcccccaccttgctcggcattgggctgggaagggggccagatccaaaggacagaagcagaaagcacacgaaacctgggagtctgtgatgccagatcccgcgagggccctgcgggagttttggggggagcagggctctt

SEQ ID NO: 42791 - DNA, 1047 bp, Homo sapiens
tctcccaaccctggggcctagctgtataggaggaattgcctaagggtggcccactcttgtgattgccccatttcctctggcaacaaaagccagagtgttgtgggccaagtccccccacagggcctctgcagggcatggccctgatttccctggtttgagactcacttcctcatctccctgtcctctgagataatatgagtgagcacttaggtatcatatcagatgctcaaggctggcagctacccccttcttgagagtccaagaacctggagcagaaataatttttatgtatttttggattaatgaatgttaaaaacagactcagctgtttctttccttttactactaccagttgctcccatgctgctccaccaggccctgtttcggatgccaactggcccactccccaagcacttgcccccagcttgcgaccattggcactgggagggcctggcttctgggctgatgggtcagttgggccttcataaacactcacctggctggctttgccttccaggaggaagctggctgaagcaagggtgtggaattttaaatgtgtgcacagtctggaaaactgtcagaatcagttttcccataaaagggtgggctagcattgcagctgcatttgggaccattcaaatctgtcactctcttgtgtatattcctgtgctattaaatatatcagggcagtgcatgtaaatcatcctgatatatttaatatatttattatattgtcccccgaggtggggacagtgagtgagttctcttagtccccccagagctggttgttaaagagcctggcacctacccgctctcacttcatctgtgtcatctctgcacactccagcccactttctgccttcagccattgagtggaagctgccccaggcccttaccaggtgcagatgcccaatcttgatgcccagccatcagaactgtgagccaaataaacctttttctgtataaattacccagcctcgggtcttcgtttacagcaacgcaaaatagattaaacccccataaatgttcaaggataccttgccccac

SEQ ID NO: 42792 - DNA, 1003 bp, Homo sapiens
tagtaagtggggcaaaaaagcagagaggcctgcagctggcagtggcgataggtccctgagagccagcacgtagcctccttaaccactgctgtgctctgtgtggtacataagtgtgtggccctgtcaccttgcccacttgcaggtaagtaggagagagacaaaggctgggaggaatttcttgtttgcctctcacacattgaattgagggctgagaggaggaatgtttttggtgatggtgggttattttcagggacggatcaggaagaatttccttagagctatttccaaacttggctggtaatcagagtcagttaaaaagatatatatggccgggcgcggtggctcacgcctgcaatcccagcactttgggaggccgaggtgggcggatcacgaggtcaggagatcgagaccatcccggcaaacagggtgaaaccccgtctctactaaaaatacaaaaaaattagttgggcatggtggcgggtgcctgtagtcccagctgcttgggaggctgaggcaggagaatggcgggaacccgggaggcagagcttgcagtaagccgagatcacgccactgcactccagcctgggcgacagaccgagactccatctcaaaaaaaaaaaaaaaaaaaaaaaaaaaatatatatatatatatatatatatatatatatgtataggctgggtgcagtggctcacacctgtaatcttagcactttgggaggttgaggcaggaggatttcttgaagccaggagttcgagaccagcctgggcaacaaagtgagaccccatctctaaaaaaaaaaattagccgggcatgttggcacacacctgtggtcccagctacactggaggctgaggcaaaaggatcgcttgaacccaagaggttgaggctgcagtgagccatcctcacaccactgccctccagactgggcaacagagcaagaccctgtctcaaaaatacatacatacatatagatatgtgtgtatgtatacacacacacacata

SEQ ID NO: 42793 - DNA, 1290 bp, Homo sapiens
tttatccctacactctttatagtacggtattttcttttctttttttttttttttttgagatagagttttgttctgtcacccagactggagtgcaatggcgatctcggctcactgcaacatccgcctcctggattcaagcaattctcctgcctcagcctcccaagaagctgggattacaggcgcccaccaccacacctagctaatgtttgtagttttttagtagagacgggttttcaccatgttggccaggcttgtgtagaactcctgacctcaggtggtccacctgcctcggcctcccaaactgttgggattacaggcgtgagccaccaccatgctcagccttctttatgtttttaaaggccattaaatggccttgagtccaggagttcaagaccagcctgagcaacatggtgaaaccttgtctctacagaaaaatacaaaaattcaccaggtgtggtggtgtgagcctgtagtctttgctactcaggaggttgaggtgggaggattaactgaacctggggagctgaaggctgcagtgagccgtgattatgccactgtactccagcctgggcaacagtgtgagaccctatctcaaaaaataaaaaaataaaaaaaacataaagagatgttcgacctcactcttaataatacaaatgtggaataaactacaacgaaatattctttttttaaacttttatactttttatcacagtgataaagatcaaaacatttgaaaatgtgatctgttatttgtctttcgcctgtgtgtctatagaattatgcaatttttactgatttggaggagctttgtgcatataaggaaattagctcttgtgataagtattgaaaatacattttttcagtatcttacttttcttatgatttttgtatcgatttttctgaagtcttttgtttaaatcttttatttcatgatgtgtaggctttgtgtcatttcagaaggccttctccactccaaggtttaaaaaatcatttcctggccaggcgtggtggctcacgccgtaatcccactttgggagaccgaggcgggtggatcacgaggtcaggagatcgagaccatcctggctaacacggtgaacccccgtctctactaaaaatacaaaaaaaaaattagccgggtgtggtggcgggcgcctgtaatcccagctactcgggaggctgaggcaggagaatggcgtgaacccaggaggcggagctcgcagtgagccgagatcacattactgcactccagcctgggcgacagagcaagactccatctcaaaaaaaaaaatc

SEQ ID NO: 42794 - DNA, 1034 bp, Homo sapiens
gtgggcacctgtattctcagctacttgggaggctgaggcagtagaatcgcttgaacccgggaggtggaggttgcagtgagccaagattgtgccattgcactgcagcctgggcgacagagccagactctgtctctctctttctatatatataatatatgtttattcatttaacccttaaaccataccataaggtaagtactaccatcttagaaatggggaaactggccgggcgcagtggctcacgcctgtaatcccagcactttgggaggccgaggtgggtggatcatgaggtcaggagttcaagaccagcctggccaacctggtgaaaccccgtctaaaatacaaaatttagccgggtgtggtggtgggcgcctgtagtcccagctactcgggagtctgaggcaggagaattgcccgggaggcagaggttgcagtgagctgagatcacgccactgcactccagcctgggcgacagagcgagactgtctaaaaaaagaaagaaaaaaagaaagaaagaagtggggaaactgaggtacagagaggccaaataatttgccaagccagccctgggattcaggtcctggaagtgtatctccagccaccctgccatgctacctagatacctttccctaaacaagaggctcgtccctgagctgccttgacaccgtcttttcccatccctggtgccagaatgaggtgcagaacatcaagttcaacagttcaggccagtgcgaagtgcccttggttcggacagacaaccccaagagctggtacgaggacgtggagggctgcggcatccagtgccagaacccgctcttcacagaggctgagcaccaggacatgcacagctacatcgcggccttcggggccgtcacgggcctctgcacgctcttcaccctggtcagccgcgggagggcaggcccggggggccctcagcctggaacgtgggaagagagccagagggaaggggggcaaagaggtcttggtgggggtccccagggaagggtcatgatcagaagggtctggggctcagt

SEQ ID NO: 42795 - DNA, 1033 bp, Homo sapiens
agccacagtgcccagcctcacagcttgttaggtggagttgggtcaggatccagccccagtcagctcctggccggtgcacttgtgtgatgaacaccctgagtaacctactctgcccacttggaccaacctaggtcgtttggttatctgtgtgcacattaattcgatatgtactgtcaatcttctggagcttggttttcatcttctttctgtccccggcacacacagctctcacagcatgcgtggaattagtggtccctaactttcctgtctcatgctgccatcccatagtaagcctcagcatctatttagctcattgttgttgggttttctttgtaaacctcagtttcctcaccctgaactgccagccttctgttcagtcacctctttcccctctttttggcatagtgtctggccctctgatttgtgcttcgttatcatgctgtcctagtatggtaatcactagccacatgtgttgaactagtccagcctgggtgcggcggctcactcctgtaatcccagtactttgggaggctgagacggacggatcacttgagctcagagttcgagaccagcctgaacaacatagtgaaaccccatctctacaaaaaatacaaaagttgcctgggcagggtggcacatgcctgtggtcctagctatgtgagaggctgaggtgggaggcttgcttgagcccaggaggttgaggctgcagtgagccatgatcttgccactgcactccagcctgagtgacagagtgagaccctgtctccaaagaaaacaagacaacaacaaaaagaaacaagtccaaattgagatgtgttgtaaaatgtgaaatacacactgtattaaaaaaaaaacttagtgggaaaaaaatgtaaaatatctcattaataatttgttacatggattacatgttgaaatgattttattttgaatatattaggtttgtaaaatatattgatattagttttgcttgtttcttttaactttttttaagtggccactagaaatttgccatatgtatgtggctcacata

SEQ ID NO: 42796 - DNA, 1073 bp, Homo sapiens
gcccctccgaggcggagtcgcaactaggactgagcacggccgccgtgggcgccatggcccccccggcgggcggtggagaccctgaggctccagctcccgccgcggagcggcccccggtccccggcccgggctcggggcccgccgccgctctcagccccgccgccgggaaggtgcctcaggcgtcggccatgaagcggagcgacccacatcaccagcaccagcggcaccgcgacggcggcgaggccctggtcagccccgacggcaccgtcaccgaggcgccgcgcacagtcaagaaggtactggggccgggctgcctctctaggagaggaagggaggggaggggaactgcagatcctctcggcacggcggcaccaccctccacgccctcctttctgatcgcaggaccggagataccccttgtccccttaaacccactctctcagagatgccccccagccggcccctcgtgctgggagcggagactccaggaggcacggccgtacttcgctctgaataacatggaggtagcgctctcccctactacttggaataggcagcgggaggagagacacctaatagtacgtcccgcggccccaacacgctcccgggtgtgattttccagcctatcggggaagagacctcgatagtatagaaaaaccttaccgctcacgggagttcacacagcaataaggatgaaaagatctttaatacttggagaacgagtaaggtgtagtcaccttgcatagaaatcgtcagagttgtctggtttccatacagttgatgactttctgcctttctgtggccaaccgtggccatacagcaacacgatgctgtgcccttcatttccagcgactgcgatattctctcttccctgaatatgtaaaagggtaatggagagattctcctcactctttcgtgttaagagctttgtcctccctgctgggtatagttggtcaccaggattattaggctgtgtatgaagagaatgaatgtcttattgattgctttattataatctgaaagtgataggaagaaatgctgctacttttgggaaagacgatctttgtggggtt

SEQ ID NO: 42797 - DNA, 1031 bp, Homo sapiens
ttttctattttcagtagagatgaagtttctccatgttggtcaggctgctttcaaactcccgacctcaggtgacctgcctgcctcggcctcccaaagtgctgggattacagatgtgagccattagccttttatgtgccaggagttgtcataggggttctgtaatcctcacaaccatactatgagatgtaggtggcattatttccattttatagatgcagaaatgagatcctgggaggttaagtgccttgcccaaggttatacatctagaaagtgtcagaggtagaacttaaatccagggctgtccgtctccaaagcccatgtccttttcattatgccacagtgattctaacttcttagatgctgagttcttgctttctcccagaggtcttttagaatactaagtgaactctaaggcgtgtctgtctggctaaggcttaggtcatcccaagaccaaagtaaggcaggtctgagttagagctttaggaagaggatgggagaaaattgtacaaatgtagaacttgaaagaattgtaaatttagaagaggagaataaaagcatcttatacagaaaagcatttcaagatcaatgatgcagcttcacactggtaatttactgataatctgagaaatttatccatattttaaaagttataaataaatttggagtacctgaggaatataccctttcttcctgttcagctaacactttttccctattctttaagcctcaccatctctatgagtcaatctttgataagagcttttgaaaattgcaaagggaagaatattcctactgtataccaggcattgtacttagagctttacatatactgttttatttaattctttttttttttttttttttttttgagaccaagtctcgctctgtcacccaagctggagtgcagtggcgatctcggctcactgaaacctccgcctcctgggttcaagcgattctcctgtcttgccctcctgagtagctgggactacaggtgtgtgccaccacacccggctgatttttttaatttttag

SEQ ID NO: 42798 - DNA, 1091 bp, Homo sapiens
agggaatgtagacacagaaataactaaatacagtgtagtttgatataagcaatactggaaacaggaattgtagtttgaagaggtcagcactgaaattgaggtgaaacccaagaggtttcaccatgtgtcagaacctctgtggccgggcgcggtggctcacgcttgcaatcccagcactttgggaggccgaagcagcagatcacttgagctcaggagtttgaaactagcttgaccaacacagtgaaaccctgtctctactaaaaatacagaagttagtcaggcgtggtggggcgggtgcctgtaatcccagctgcttaggaggctgaggcaggaaaatcgcttgaatccaggggtggaggtggcagtgagctgagatggcaccactgcactccagcctgagcaacagagcaaaactccgtctcaaaaaaaaagaacctttgtgaggtttccttgttccagctttacaagtctagaaattcacatttttgtgcaatcagggatcatttacctgttaggactggctcagactaaccaaaatcatgggagactcatatttaaaacaaaatggtaactcttaatttacagtcatgtataacactcaagctaatctgataaacgtgtaaatcagaggatattctggaaaatctatatgggaggtctaattatagttagagacagtttattaagtttggaatcatttagatccttgctattcaaactgatccttgcttttcaaaccagaagcattggttatcacctgggagcttgtgagatatgaacaatatcaggtaactctggctctgtactagcatatatctgtcagaacctcaattttgtattcgttgttgagtagatgttggcttagcaattagtctcatttcatgtttctcatttttattaattttttttttttttttagagatgggggtcttgctttgatacccaggctggagtgcagtggtgctggagtgcaatggtgtgatcatagttcactgcagcctcaaactgctgggctcaagcagtcctcctgccttagcctcctgagtagcttgggattacaggcccaagccactgtgcccagcttcatgctt

SEQ ID NO: 42799 - DNA, 1029 bp, Homo sapiens
gtgcaaccatcactactactcatcttctgaagttttttcatcttcccaaaccaaaactccatacccattaaacagtaactctccattccttcctcccccagcccctggaaatcaccattctattttgtcttttatgaatttgacttctctaggtaccttatataagtagactcatacagtatttttccttatgtctggcttatttcacttagcataatatcttcaaggttcatccatgttgtatcacatgccagaatttcattcatttttcagggtgaataatattccattttacatatacgtaccacattttgtttattcatttgttaatgaacagttgggttgtttctaccttttggctgttgtgaataatgcttctatgaacattgccatacaaatatctgttgaagtcaatactttgagttctgttggttgtatacccagaaatggaattgctgggttatatggtcattttatttctgacgttttgcaaaactgtcataccgttttccatagcaactgcactgttttacatttctatcatcagtgtacaaggattctaatttttatacatcgacaacacttatttcgttttttgataatagtcatcctaataggtgtgaagtatgttggatttgttttttttttttttgagacggagtttcactcttgttgcccaggatgagtgcaatgatgcgatcttggctcactgcaacctctgcctcccgggttcaagtgattctcttgcctcagcctcccgagtagctgggattacaggcatgtgccaccacgcccatctaattttgtgtttttagtagagacagggtttctccatgttggtcaggctggtcttgaactcccgacctaaggtgatccacccgcctcggcctcccaaagtgctgggattacaggcgtgagccaccacaccctgccaagtatgtagaattttaaaatcacctccacaatccagtttcagaacattttcatttcccccagaagtcacttttgcccatttgtggtcagtccctg

SEQ ID NO: 42800 - DNA, 1028 bp, Homo sapiens
gagttattatagtggcttatacattttatggtttctagaatctttttgagtgagaatcattgagaatatttgtgtttttaatctcttctgtttatctcttctgttgatgtgctttttgttaattatttggctggcttttagtggatcttgcacaatttaatgctggcacatgataagttcataataaatgtttctgattatcgagctgagccccagtcatgaaccattgatttctaacatactctctccctttagcaacctggttacctctgcccttaaatgaacataacccctgatgccatgacatacatggagacttcagtattaatttttcagttcttgtatgtaacactcttaggtagagtctctgtcagatggcactgataattaatcctttggaaagatcccaagggctttcaggctctctggctagatgttaacaacaggaacagtgagtagtatatagcaacatgatacttgacagttttaaagcaacactggttttatttaagatcatcgggttaaaccagctaatactcctttggcttaaaacctacttgtagtttttactgtttggtattctcttctcagaattgttctttatatatgtagcagaggctgcacgtgatggctcacctctgtaatcccagcactttgggagggtgatgcaggaggattgcttgagcacaggagtttgagaccagcctaagcaacatagtgagaccctacctttccaaaaaattaaaatattgtctgggggtggtggcacatgcctgtaatcccagccacttgggaagttgaggtgggaggatcacttgagcaaaggagtttgaggctgcagtgagctatgatcgtgccactgcactccagcctgggtgacaaagcaagaccttgtctctgattgattgatagctaggtaggtaggtaggtagatagatgattgattgattgattgattgatagataaatagatagcagagatcatgacaagtctgtgtcccacttgaagattagaagactcagcaggt

SEQ ID NO: 42801 - DNA, 1047 bp, Homo sapiens
caaggcttgtaagcgagaagcttaaggttcctattcaaggttaactattgttatgatgttggtgctaggaaaataacttccctcaacctcagtttttctctttgtaaaggaagagtgaaaacgacgactcactctgttgtggggaaatacttacaaaaggaaataaaatttaactagtagtatggtcaagaatgtcagctgaggttggccaggcgaggtagctcacatctgtaattccagtgctttgggaggttgaagcaggcagatcatctgaggtcaggagttcgagaccagcctggccaacatggtgaaaccctgtctttgctaaaaatacaaaactagctgggcatggtggcatgtgcctgtaatcccagctacttgggagactgaggcaggagaatcgcttgaacccaggaggcgaaggttgcagtgagccgagatcatgcctttgccctccagcctgggcaacgtgagtgaaactccatctcaaaaaaaaaaaaaaaaagctgatataagacaaattctgatttttaaggtaatgtgccttagttatgcctgcttagcttgtgccagttaaggctttttactttgattttaagtttccttcctcctacttcatccttttgttgagttgtcattcagatcacaacagatactcttgtataactgtctttgttggcttagtcttcaacaggtggattgatcttggacttcaaatatttgagcatttactatatgcaaagcttggaactgggtgcatagggaataaatataaaatgtatacaagtgtgattcctgcccttcaatatacaatcattcaaatacttgtagacagttctgctcttacttttcctaccccagatagtctcttctccatggaaatcattcctgcttctcttaatcattcttcatatgatgtagtcggccaggccattactaccatcctggctatcagcatcacttgtaagaggtcatgtttcaaattataattctcagggtgttgcttgacctgtttcatatttcaaattataattctcagggtgttgc

SEQ ID NO: 42802 - DNA, 1022 bp, Homo sapiens
aatcttagaatcgttgttcaaccaattgtaaatctatcacttaactagcataagaaagttaatcttgatttcagcaatatgtattggacctactttatgttatttctctgatctcttagtctaatacttttgtcaaaagtaaaatgaggttagcatgattgtttttcttggtgaaccccattctgactcactgtgttctctgtaccccttccctaccccaccgtaggctaacataggaaatctttgttaaacccttaatctatgatttcaataatctagtctctttttttcctttgaaattgagaaaattaaaattgcactttattgtttctagtcttctagcttctcttccatttttcatgagagatcatggagatcttaggctgtaatttatctggttctagatatttgcatttactaaaagctactgggtgctcttttattatcttttctcctatttcaggcttcagtttcctcttaaccatttgcattctcttttcagtatggaaagttactctggataaagaaaatgcaagcaaaataagagttgaataggtttgattttctgtattattttttaacatggtagaagggcctgtctcatatttttgcatataacatcactgaaaaaagactatatgtttgcacttttcataagcttatattgatattctattatgtgccaggcactgcattagattcttgggctccaaatataaataagatatggtctctgttctcaaggaggtcacaatataattggagagatacgtatttatataaatatttactgtatagcaagagccgctggccaggatcagaaaacatactttgagggttagaaaaataagacagggatttatgctgaataaggtggcgaaatgtacattttcaataagctataggaggagtcatgaatatttatgaaaggagaaacatgtacatgcacagttgagcttcttacccctttatgggttgcatgtacagagaaaaggcagtattagcatgatccaagggtggag

SEQ ID NO: 42803 - DNA, 1047 bp, Homo sapiens
agtgcacatttaactagttttcaatacattcgctattttgctcagccaacaaatgactgttaacaattacaaagttgtttcagcctttatcggttaggcttctttggttgcaaaacaaaccaaaattgactttgttcaattgacttaagcaaaaaaggtagtggatgagaaggagggaggggaaaggataatagaggtaagtcacagaataaggaaatgctaaagaattacaccttggggctgggcgtggtggctcacgcctgtaatcccagttactctggaggctgagtcaggagaatggcttgaacccaggaggcagagaggttgcagtgagccgagatctcacaattgcactccatcctgggcaacaagagtgaaactccgtcccccgccaaaaaaaaaaaattacaccttgggagaaccctgaactaaagtatctcactgagatctagatagcataatggacataatggtttttatcagggtaacgtcttctggacaaatcactcatataattgagtatctaatttaataatggtactgagctagatactgagggcggggaataggaggggcaatccaaagctgaataaaatatattacatacctttggaggattataatagagtagaattaatgaatcatgtctatcacttattcaaattagaatgtaataaataccataaatgctacaaaagatattaaacaaagatgattagatgattttgtatgactaaccatagcaatattttaacattttagatacaaatagattttaaaggaaagatagacataagaaaatgtcagataaattttttttttttgcccactaaacgcaaaatatttatgttgtggagacatagtaaattatgatacattcatagagcataatactaagcagccatcagaaatgatgttgcacaagtatgcctaatgagaaggggaaatgatcattttgttttaagtgaaaacaaaaaaagattatgaaatcacacaaatagaaaatctgaaatttaacatgagtggggtgtgtggtgtatgtatgag

SEQ ID NO: 42804 - DNA, 1622 bp, Homo sapiens
agacttgcgatagaaaaggtggatgtggcttttgtctgctggagtgaatcccaataagattcataggaaatccacaagattttaaagaaatcataataataaaagaggaacagagacagtagaaagtgaaaataggcctttagatttccaatcatctataggcaggaaacaagcttataaggccactccattgcaaaaattaacccatctcttatgtaaaaagaaggttaattcagaaacttagagggtggagccaagggttgtggagagtcattctcaaggtgtaggacttggctgtaatagaggaactggtgatatgtgtctgattagatttcagaattgttatgggccagtaactgttatgtgtctcctgttccttctccctttttcctcacattttgaatgagagtgtctattgtgcttatcttaagtcagtctcactattgtatgtttgtatgttgggtgtgtgggagcagataatttgtttctttaattcagatcaggaggaactatactgcagtagctgtacctgaggaactgcatctgaggagcctcaaccacatctggacctgatttagatatcgagattctggacatcaagctgatgccataatgaaatgagacttttgaaggtcttagaagagggtgagtgtattttgcatgtgggagggccttgttggggccagagggtggtctgtggtagcttgtatccaaagtggccgccaccaatttcttcccttcttgctattcagtggtggagtctatttcccttgtccccttgaatctgggctggctttagtgacttgcttaaccaatagactgtaactttctgggacttcagaggctaggtcatgaaaagccttgtgtcttctgcctgtgcccgttggaatcctctctcttggactgcttgcacatagaacccggtcaccatgctgtgagaatccccagccagatggagaggacacatgtaggcactggttgatagccccattgagctaccagcaaagagccagtatcaactgtcagccttaggagtgagtgaaggaaccatgttgaataatccagccctagcagacaccatctggagaagagccaaggtttcagacttatggcacatgttaagacatctcagccatcttcatcctttcagggcatcccacctgagtttcccagacatcgtcaatcagagacaagcggtctctgctgtgccctgccagaatttgtggcccacagaatcatgagaataataaaatgattattgtttaacactactaagatttagaatagtttttaaatttagccgtagataactggaacatggccaggcgcagtggctcacacctctaattccagaactttgggaggctgaggcgggtgggtcacctgaggtcaggagtttgagaccagcctggccaacatattgaaacccaatctctactaaaaatacaaaaattagccaggcatggtggtgtgcacctgtaatggttgcaggcgcctgtaatcccagccactcaggaggctgaggcaggagaatctcatgaacccgggaggcagaggttgcagtgagctgagattgtgccactgcactccagcctgggtgacacagcaagaccttgtctcca

SEQ ID NO: 42805 - DNA, 1029 bp, Homo sapiens
atatttgggagttttgcagatattttcctttgttgattcctaatttaattccattatggttagagaacatactttgtatgactctaattcttttatatttattgaggattgatttatggcctcaaatatggcttatcttggtaaattttttatatgcactgaaaaaatatttttctattattggtgcatttttcttgtgttttttgttcttatggttcatttagcatcttagatctatgagtttattgtcaatatcaaatttggaaaaatttggccactatttctttaaatatccctgtttatcctctctttacttctgggaactctagttacatgtatattaaactgcttaaagtgttcccagaattcactcatggtctttttattctttttccactctggtttactttgggtagtttttattatgtgtcttctagttcactcatctcttatgttttgtctgatctgccatcagtcttatccaatgcatttttcatattagacattattctttttatctgtagaagttggatttaggccttattttctttctcccatgtttctacttagctttttgaatatggaataactttgttaattcccttgtctgctaattctaacatatatgtcaattttgttagcttcagttgattgatttttttcttcttcatgggtcatattttctttgcatgtttgataaatttttgtggattataaacattgtgaattttacctgtttaggtactggattttttttttatttgttctgtgtcacagttaatttattaatacagttgaatcctttccttaagatttgtttcaaaaacatagagagaagagggggagaaaaaaaaatatttgttaggtggggccagagcagttttccatctagggtagttactccccaggatccttggaatactctacctcgtgccttgttaattacggggttttccagtttggctggtgggaacaggcattgttcttgttctgtttgagtgccagttagtgttccctctagttttctaa

SEQ ID NO: 42806 - DNA, 1047 bp, Homo sapiens
tcaagtgatcctcctgcctcagcctgcctaatagctaggagcacaggtgtgtgccacaatgcctagctaatttttaaattttttttgtagagatgggatctcactatgttgcctaggctcgtcttgaactcctgggttcaagcagtcctcttgccttggcctctccgagtgttgagattgcgggcgcaagccacctcgtccaacctgtctctttttgtgtgatgttagtaactattgatgatttttacttagatccattaaatcattaagagctatacaatgatgatattctagttctattattctttcatttattagctggaatacttctataaagagaaacctccccttttctaatcttcgatttacccagtggtataatacatattggaaagtcaggatgaatattttgttctttccccttgtttaccaattttcagaatactgtattggttcactagcattctccaattaggcattggttttggtgggggtttttttggtatcataaactcttgggtttaaacatttttgaatatgtttcaattcattgcatttttttccttttctagtgattttactgatatatttcttctttctttctttttttttttgagacggagtcttgctctgttgcccaggctggagtgcagtggtgcaatctcagctaactgcaacctccgcctctagggttcaagtgattctcctgcctcagtctcctgagtagctgggattacagccatgcaccacctcgcccaactaattttgtatttttagtagagatggggtttctccatgttggtcaggctggtctcgaactcttgacctcaggtgatcctcccgcctcggcctcccaaagtactaggattacaggcaccatgcccagtggcatatatatttcttctaataaactcagcttgatgatgaggacgtgtcttagacatctttctgtccatggtgcctagtgcgtggctttcaataaatgtcaaatgaatgagttgatattctgagcagcatttaaaaataagagctagtggctgggcacgg

SEQ ID NO: 42807 - DNA, 1051 bp, Homo sapiens
ccctgtcagaagctccctgcctctcacccccacccgtatgtaaccactattcagacttacatcaccccataaattaggttttctgtttctaaacttgagccctacttatttaatactgttaggtgtaatactatagcctgaccctcttcaccaatccctgcttctgcacttgctactttttaccctgcagtactttttctttcttctgtctctcttaaccactttctaacatataatttaatatgtttgatatttattgtctctctcctagaatctaagctgtacaagggcagggatttttgttctgctacaaccacccaaaacagtccctaatacacagtaagtgttcgataaatattagtgaaatgaatgaatgagaggtctggtgaatggatataaatttgtaggcaatccagatgggaggattcagaaattgaagaaaatctcatgttgtatttttgtttttagagaataagggataaaattgtcttttgggagtacagaggaggtgataggattggggttttgaagacagtgaaggaagtttgaaatgttagaagcatgggagattgaggatttgggcaatgtagatttattgcttattgttggaggctcagtgttctggccgtgagtgtggttcatgtaataccagccaatgtggttgaatgacttacttcagcagaacttagctcaggtgtagaaacagagaaagttgacagtgttttttgctgtgtagtttcagtggacagccagacagacaaaggagttagccagatactgactgaagtgataataccttgagttttggctagcctgagaaagaagcgatagtcaagaaaaacagattgggatagtacaaaaggatcgtttccagaggtatggttgagttcaaactatttccaaatagacacaatgaaaaaaatagaatgggatattgataaaaggattagcagttgtcataaaagttaagataccatagttgattggttttaaggaatactttcttttccattttaacatttctaaagttgagatgccagtttaattggta

SEQ ID NO: 42808 - DNA, 1074 bp, Homo sapiens
ttttattaaaaactgcaaactggtttttaaattggttgtattgttttatattcatgacaatagtatgtgagaattcccatttctccacattttagtcgttctaatgggtgtgtagtggtttttgtgtttaatttgcaattccataatgtctgatgataaatccatgtgcttttatttttatttatctttgtaaaagtgtgggtgtctttttgcctaatttttaattgggttgtttgtctttttgttgtaagtgttctttatatgttctaaatatataaatacattgccacataatatattttgtaaatattttctaccagtctgtttggcacagtgtctttttatcactgtttgtttgtttgtttgagatagagtcttcttctgtcacctaggctgcagtgcaatggcacgtctcggctactgcaacctctgcctcctgggttcaagcgattctcctgtgtcagcctcctaagtagctgggattacaggtgcatgtcaccatgcatagctaatttttgtatttttagtagagatgcggtttcaccatgttagccaggttggtctcgaactcctgacctcaagtgatccaccgcccatcccaaagtcttgggattacaggcgggagccaccacgtctggccttatcacagtttttaaaaaaattgagatataaataatatgccataaaatcttcctttttgaagttcagtggtttttagtatattcacaaggttgtacaaccatcagcatcatctgattccagaacatttttgccatcctctaaataaattcccctacccattagtggtggtattttcctccccccagcccctggcaaccactaacctactttctgtctctcgatttgctgattctggactttcatataaatggaatcatacaatgtatgatcttttgtgtctggcttctttgacttagcacatatcattacttcattcctttttattgccaagtaatgttacattgtatggatatacattttgtttatccagtcatcagttgatgcacatttgtaaaacacaatgtctgtatcttaaccttgaatcctacaacc

SEQ ID NO: 42809 - DNA, 1709 bp, Homo sapiens
agaggttaaataacttgtctaaaatcacatagggagtgggaaagctgggactcacttttatctgcctgacttcaaaattcatacctcaattactatatttaatgattttataaatataaaaatatggcataatacttacataaaaaaagttataagatgatatcattgttttgaagaaggatttattctaaaatgtcagcagtggaaatagttgagtattgggataatggttaatttttgtctcttcttttattattgttttccacagtgaacatgaatgactttcataactacagtttttaagagatactcatttcatagcagaagggtggagtgtattaaaaaaataaatattccttcttcccctctgtttctgggtgtatttctgagatatatttctgagtttgggtgtattcactcctgaagttgcatgtaattgcctcttggcactagtttataaaaactagaaagttgaaacagtgatgttattctgagatctgaagatgtaggcagatgaaatatgtttaaataatgacattttaaccattattcagtttcctagatctgggaccggggccactggtaacaggattcagaagccagaagcacagtaccacacagtgagcaattccccagactcgtctctttgagcttttcactagaaaatccttcttcacctctcctttctcccaattcctttttattaagagtcttttaacctggatgaacataatttgagccgatcataaacaaatagctctcttttttgcctgactttatgcatttctgttgccatgtaaaccaaataaagctagctgtgagcaaaccagctgctgcctgcagcctccttccctagaggaagggaaagggtggtgaaggtaattgggaaggactataagaagggtagaaattgagggaagagagtattctatttacatttctggtcctgattctcactctgtttatttggctatttagaatatgatgactatagttgacttagtcattcttcccagcagctgagagatatgggtgactaataattttttctctatttgtttgcatgttggaaatggttactattgaggggtggaattaatagagtctaagctatatttcagaactggaaaacttggaaaatgaatggttgtagggaatagcatgggatttatgattttttgtttcaaagagttacgctttgggtactggcattaaaaagtagttccaggggccaggcacggtggctcacgcctgtaatcccagcaccttaagaggctgagtccagaggattgcttgaggccaggagttcaacatcagccctggcaacttagcgagatctcatctctacccaaaaaaaaaaaaaaaaaaaaaatttttttttaagttccaaggtgtctaattgaatgtgccctagaggcactgtgcaaagactacatataggtggtcagtgactgtcaagtatttacactcacaattgaaaggacatgacagctgaggcctaaatcacatgacgtagtaactaggtaagtacttggaatcattaatgaaaagacaatgaggtgtttgcttaaattataaatattgattaggggtagtagaggtaatacgttattatgagaagagaaaagtgagtgtggcagttactcatttagttcagatatggggaaaaaaagtcatctcttctctgagctcaggaaactttggaagtc

SEQ ID NO: 42810 - DNA, 1029 bp, Homo sapiens
tcacattatcaagatggacaggaaatctaggctagaaaagaaggaaaatgaaactgggaaagagttcatgaataggaagacaatgataggatcattggctggagaacacagaattatatactggggccatttctgcaaatgaagtggtaggataggatgaagtgatctcagagtgacttccaggtttccgaaatagaggctcaattattgacataggtaatcctagaggaggaagagcaggtttgggggggtaagatgatgagttcagttttggacaggctgtgtttgaggaacctgtgggatgtataagtggagatgtccaatgagcaattaagtatatagatctgagagatctgggctgtctaagtagagatttagcagttatcagcatatagatgataactgaaacatggtaacagaaaagattatcagagaggatttgtgggataagagaaggtaagggtgtgtaatttcctttttctacaaccagagtggttgtggtggtggttggtatttggttttgttccttttccttcagtattgtgtctcctttttcaaataaatcctaggaaatacaacatggaatgatggtaagagcagagttaaagtcctgtctttgctgtttcctactatgtgccttgagtagttaaacttctcagagcctcagttttttcaactgttaaaaacagtggtatcaaaagaatgagaagacaaaccacagacggagagaaaatatttgcataagacctatatgataaaggactgttatccaaactatgaaaagagctcttaataataaggacacaaacaacctgattaaaaagtgggcaaaagacatggatagaaaactcaccaaagaagatatatagatgtcaaataagcatctaaaaagatgctcaacatcatatgtcattagggaagtgcaaattaaaatcatttgaaataccactactcatctattaaaatgccaaaattcagaacactgataacaccaagttatcaacacctaatgaggatgtggagcaaaag

SEQ ID NO: 42811 - DNA, 1031 bp, Homo sapiens
tgaagtaagccaacctgaaaaggctacatactgtatgattccaaatatgtgaccttctggtagaggaaaaatatggagacagtgaaacgatcagtggttgccaggggctgggagaagggaaggataaataggcaaagcacagatttttagggccgtgaaatcatcctgtataatgctacaatgatgggtacacatcattatacatttgtctaaactcatagaatgtataacaccaagagggaacccaaatgtaaactgtggactttgggtgataaagatgcgtcagtgtaggcttattgattaactgtaacagatgtaccactctggtgcaggttgttgacagtgggggaaactatgtctttgacgggcagagggtatatgggaactctctttctcctcaattttgctgtgaacctaaaactgctctttaaacgtctatttttaaaaacagaacagctgtgatatgaaactgcatggagacaggtcaaataactaaggactactggtctaaattcagaatcaccctcagctgtataggtatttatgtgttcacttgtggcttagcttactgctgcttaatgggaaagttttgcttcccttcctcacctctgttttttgtttttttggtttttttctttacagtgatagtgaacaattacagtccttggaaagactgaattatagcttaatgaatgtacagatacaaatgtctggatgtttatattgccaggggtagaaatgacgagggaaaacatgcaacccccacaattaaaaggcgtttatttcactattctaaggaatatttgaatctcctttcagttgtatcccttaccttgtttactttacacccaagtggcatttcatacttgaaagcttttcagatagatattacagtaccaatctactttgggtaccaggacctccttcccctgtggattccaaaacaatttctgaaaatatgggagaaggatcttcagttatacccacgtatacaaaatagcatatgtctggattaaagatacatctggaaa

SEQ ID NO: 42812 - DNA, 2083 bp, Homo sapiens
acttcttttttaatcagaccgttctcagtgatatatttctgaataagctgtctttgcaatgagttacttggttaaggatgaggaaagaagacagaagtcccttcttcacgattggttctttttgttcccaaactctacaattcttataaagtttgagatattttcagatttttccaaacaacaaaattttgtgtttgtatttgggatgctagcatagctttttacacatttccagagtgttactcatcagtgaagtctgctataacccgacacacaggtccctactgttatttccattaccaaatgaataggttaggcccaagaggaattgcctgacataaaatagtctaataggactaattcagtcagggttctgactgctgcttctcctagcagtaactcacagtatcacagctgctgagaggtaaagcttaatcaggcttgaatcataaaatgtgtatacatgttctgtgagatagattgtggattcttgattcatcatgctgtcttttgattttggaaaataatgaaacaagataacatcccatagtaaagttatattgtacttcatactacttttctacgtagaaactgaacccttttggttatcatctcatttattcgtaagatttttccggtggtagttgggggaaagagagagcatgaggaaagagggaatctgttacagtttacagttggataaattgaaaattggtcacttaaccacttagggttgaagctagatctaggatctcaggactactttagtaggttattggttgttcttgtttatttaaattatgactctgggctttagagtatgctgacaattacaaatattttagaaactctgttcaagtgtgtttgtacatacgtgttgggtttctctaaattttcctaggaacagtccttaatactatctcaactgtcatcatgagtttgttactctgtggcagaaatgagtacggattcaaagaataaatgagtaaatttatttattcatttatttataattcattcatttataattcagcaataacctttccactgtgtttgcagaactaataatatattctcttggtctggatctgtcagccatgtcgtatccacatagtagtacaatctagacaactgatatttttggttcttacctgatagcaggtccgtataaagggctctttgaggccgggcatggtggctcaagcctgtaatcccagcactttgggaggtcaaggtgggcggatcacctgaggtcaggagttcaagaccagcctgcccagcatggcgaaaccccgtctctactaaaaaggcaaaaattagccaggcaccgtggtgggctcctgtaatcccagctactaaggaggctgaggcaggataattgcttgaacccaggaggcggaggttgcagtgagctgagatcgtgctactgtgctccagcctaggtgacagagtaagaccctggctcaaaaaaaaaaaaagggatctttgaaaacaaatacattttggctcaaagaaaaacattggttgaattaactgtaactacttgactcctgttaagaaagtaaaacactgttttttccaggttttagaatagagaagtggtgtaaagatttttttctttgagttggtgtggggaaatggtaaagccagaaattggaatgcttctcttaaggggaaattttcaaattttgttttgctttttggttttcttctgactcattcttagaaactaaagaggcataggaagggcaatctcttctgggtagagttaggactccagtctcaacctctcaaatcactgccagccaaccacctgctgtttgggtagattagtaggagatgatggaggtataaaaaaagataaactgctaaatgattatgtatgtatatcattcttttcccattcaaaatcttaaagctgagtaagaacccttaaagatgttatatctggaactgaatttaaaatatgtgctaaagtgggtaatatcaggtatcatttattgagtgcttaattactgtatgccaagcattgcagtaaacactttacatacattatcttacttaatctgcttaacaacttgac

SEQ ID NO: 42813 - DNA, 1035 bp, Homo sapiens
acagtcctaaccaacacaggacaggtattctccatctggcatgttggttgctcctttcaacctgctatttgaaatggctcccttcaacatctttctgttcccacagtggggcttgctatggctaatgctgtacttgctgtatgtgttccaggcgagtctgcggacaccagaactgacctgggagcgagtgagatctcaagttgaccatgtgatatggcctgatggcaagaggatagtactgctggcagaggtaaggctgagactggcaaaaatactcccccacaacaggagagactgcaatacccaggtcccctcctcctcatgttctcgaatactttcaactcctctgttaagcacaagtttgactactttcccaatggattttacttctaattgtgaaagatcttttcattcagcaattaagaaactattttggttccccacttttcaccaattatcctgtctctccacgtcaatccacaggttgagttagataattattactatagaaggaattcacagatagaaccagtgccactttgagtgatgcatacaaagagataatgtcacttgtgggatgttttaatcactaagcacaaagtagatatgcccgactgtaaccaggactatcttaggcaagttctgggaatgtatgtttttactgatagattccctgtttttgaaggtccattcccttgaattgagccagatgagtagtaggtacctacctagatatcaattgctcaattgatatttccccatcctagctcctagctcacattgacactattgactttcattttattggcttccatgtcagtgtttgaccacttttcctttcttaaaagctcctcttccctagtcctggattcctgacagctataatattagatgccttctattcttaccttgaagctttctcttcttcagagaaagataccaaaatatcaaggaggataataatacttttctcaattttgattttcagttggttttttttctttttttatattaaagaacctgaatatgaaaatg

SEQ ID NO: 42814 - DNA, 1029 bp, Homo sapiens
gggcagtgatgagcttcctgcactggaattggtctttgcatccccaaccacatatgcttacatgaactcagaaaaatgaacccacttcccctcactgccaccttcaaaagactcttcaaggccttaaatagtattccccttcctgaatttgccttttggagatagagaggtggagtttgggtaagtggctatttgcctcattaaataaagttccccttcctcaattcctttccccatttcatcttgttgctatgatttttatctctttatggagaaatattggcctttttcaatgatgtgaaaaggaaacacagttatttcctgtcactgtacactccagaaaagtctctgcctccctgttacacctttaggcaggctcttcatgtcccagcatccccattagctgataacatcacagtctcatctttctttttccctccaggtattaagttcctgtaactcaaaccagaatttttaaggaatagaactccaagccttttctccactactatacaagaaagaattcagcaagctgcttctccaatcaaagctgcctgccgtgctcaccctgtgtgttaggttatttatttattaaaatcaagaatcctgtgcctgtagtgttggcccagagtgtggttactgccctgagggccatgaaagccacagaggatgggctgaggaaggaaagaaatggggttactgctcccagtgcatcatttgcatcattccccattgactgaatcctcagcagtggccgtttttcctcttgtccaggctcacgagttagtccagggattccatactccctattccctggagttttctggaataaattttcagcacctgcttttctcagcttggcccttccccgggtgaggccgtttggaattaacatggccagtgtttcacacaagattgggttcccaatcttgaccatcactatcactgccttctttatataaaggctaataaggaaggagtgttatttatggctttgccaagctacatcaagaactcagctgtgctgtg

SEQ ID NO: 42815 - DNA, 1023 bp, Homo sapiens
actggtgctgatgatgcagaggtgattaagactccttccttgaaagagttcatgtctatgtggggtaacaaacccataagcagaacatttccttgcttttggggaatttaagtaagagactggtacacatgtgaatgaggccctcagcccttgttgatgtcttcttatctttgtcagcacaagtatatctccatcgcagatgtgcagatcaagaatgaagaggagctggagaagtgccctatgtctttggtgagccaaggaagccctacacaggaggagagtagaagaaaacctgtcttcagtgttgtcacagagcatgtgtgcatgcattcattcagcatattaggctgtaactgtgttccaggcaagacaaggtccctactttcatgatatattgaagttggggaagaaagataaaaaataaaaagttaagtaaaccaaactatcagagaatggtaaatacaatgaagaaaatttaaacaggatgacatgaaagaagcatcagtagactacttaagattgggcagttggagtaggtagacctctgagaaggtgacatttaagccaagatctgagggacagggatccagccataggagcatcagaggaaagagcattccaaacagagagaacagccttagcaaggggaaagcaggcttaagagtgtcagaggtagtgaaggaaggctgttgtggctagagcacagggccgagggctgggatcctagagatggagtcagagaggtggcctgaggccactttgccgaggacctgtaagcaaaggtagagagcttgaagttgactcgcagtcaaagggaaggcagcctttggagatttgaagcaggggagtgatatgatctgatttatgtttctaaaaacattagcttctgtgtaaagattggaccagaaaagcatagacgcactctacggagattagttagaaaacccttgaaatagtcaaggtgagagatgatgccgacctggatttggagatgtagctgacaagacttgcagtgcatttgga

SEQ ID NO: 42816 - DNA, 1048 bp, Homo sapiens
ttctcagatcgctctgcttaagattctgctggctgcagctcccacctctaaggctaagacagactctatcaatatcctggcagatgtcctacctgaggagatgccgtgagtgcttcaacgggggcagctgctggatactagctgtcttatctgcaggctctctctagtccccactcaccttgttaacacttacagagattgtctccaaagagatctccccgtctctgcccaccagtaccccctttcccgtacagggctttctgcttggctctttttagctcagaactctggatctggagggtgacaccagtgccagcgactggctgcccaggtatttgggtgaacattgccaagggatgagcttgccaaaagagagacggaaacaaagagatcagtggagcatttcttcagataggctcataagtgggaactctggaggtttccctggcacagaagttcaagtttcccaagttctggctctcttgtgtatattgtatcagacccaaatacctggatccctacagggctccctttaaggccactctctgcactaataccttctctccccattgtagcatcactgttctccagagcatgaagctgggcatcgatgtgaacaggcacaaggagattattgtaaagagtatctctaccctgcttctgctactcctcaaacacttcaaactcaaccatatctaccaggtgagcagctaggagcacttctccacaggtcttgggtgtttgccaggccctatctctcaaaggaaggatgcaaagtcccttttaatcctgatgagcatctttcagccttttctttgtcctctctcagggaatccagccacccattgcatgagcttgaggtagggttatggagtgggaactgtcctagaaaggtgcagatgtctgtgtcccttgtaagttatcccagagttgtgggtaggaatctctagcttctcaggaatatgcccagccagtttttaaacaatgcaagagagaatgtaagcatttcacaaaaatgggggggtggggggagtatgttgaccgtagt

SEQ ID NO: 42817 - DNA, 1051 bp, Homo sapiens
aacctccgcctcccgggttcaagcgattcttctgcctcagcctcccaagcagctgggattacaggcgcctgccaccatgcccagctaattttttatttttagtagagatgggatttcaccatattggacaggctggtcttgaattcctgaccttgtgatccgcccgccttggcctcccaaagtgctgggattacaggcatgagccaccgcactgggcccaaattactattgttttaaagggaaagtgttttgaaagaaaacaaattgatagattgtgcttgttggaaaaaaatttttctaccaagctggctcatctgtcagaaaaaattcatttttaagttaggtgttgcttatgctttggaaaaaattttaaatgcacaaatatttcagtctagtgatatggggcaagacatttattttctccttgcaaattttttctgaccatgaaatgaaaataccgttgatggtttttgtagtgtctttctgaaatatgacgattatggaatactttgagatccaggatgatttaatgctaagaaattgctggcattcacatttctaaagtcgtgaataaaattaagaaattcaagcacattatgtgttcactagatcttacttgatttccaaaatatttctttttgaaattttagataattggtaatttttacttccttctgctaatctttgcatctttgaaattagattaggaggcagttttgtcagctaggccctagtttctggggcagtgatatccatacttttgcttgccaccctcaaaataaattaatgccacttgggattaatttgtgatttttctggggagagggtctacaacttttatttattttaccagtagtcttggtaaatacaagaatgatatgaataaatatgttgggtaatcttaaacttgtgttatgtgatttgtaattagcttgtgtttgtggatgatctttacattcagtaaatctccaaagagggcccagatagaatggagtattttgtcttttcctttgggaactttttttggttctttctttcattaaacaattat

SEQ ID NO: 42818 - DNA, 1032 bp, Homo sapiens
ttgtctgtcagccactctttggagtaaaaattgtattccttgtgaaaaaaagcagctaattcagcttacaacataaaacatagcacacacgctttttttttttttttcctgagatggagtcttgctcttgtcacccaggctggagtacagtggcgcagtctcagctcactgcaacctccgcctcccgggttcaagcgattctctgcctcagcctcctgagtagctggggttacagctgccaccacacgcctggctgaattttgtacttttagtgagacggggttttgccatgttggccaggctgttctcaaactcctgacctcaggtgatctgtcagcctcagcctcccaaagtgctgggattacaggtgtgagccactgcacccggcccgcacacacgctttttgagacagccatttctgaatgcagcagaaagctgaatgcaacacttctgaatgcaacagaagcgctttatgcatactttccatttgttacgcagaatagtagaaagacataactctggggagaagagttaataaaattaataatatttactctcatcaagcacattcttaaataaaatggacttttttctcctttttatcgtgagcacatgaaggtgaaagatataatggctactagtatagttttgtgctgttaccttaaattgtgctaagtgtcagtagttttaccccaccattgcttttgcatcataagtgtaaatataaatgcattgagaaaaggcaaatagcatcttatttattatgaaaataattttgacctcattgatgacttgaagaatctcaaggacccccagggtcccatggtttactttgagaactgctgttaagctatttgagggtcgaactaatcatcctaatatcccctttcagttcctggtccagaactttacacagaaaaggtgctcaaaggatatttgtttaatgaatgtggtatgctgacatttaaacaggacaaaacttggtgagtaaaattaatgtaggcagtctcccatccattcaggcagcttttc

SEQ ID NO: 42819 - DNA, 1067 bp, Homo sapiens
gttttgagcaaaattttttatattatgaaaatattataactttgaagttgatacttaaaatacttgagccaaagtttctgcctttatgtgggacattttcatgagctttcttatatcagtttgcttacttacttttcatagagttgagcgagactatagcaagagacccagggacatcttaacatccttgaatatttctgaatctttctaaggaatttgatttaatttttttttttttttgagacagggtcttgatttgttaccctgatgtgatcactgctcactgtagccttgatctccctgactcaagcagtccttccacctgagcctcctgaatagctgggatcacaagcgtgcgccaccatgccttccttctttttaatttttttgtagagatggggtctccctatgttgccaaggctggttttaaattttttctagaaacgaggtctcgctatattgcccaggctggtcttaaattcctagctcaatcagttctcccaccttggcctcctaaagtgttgggattataggtgtgagccatggaggctggccaggaacttgattttcagggagaagcctattcagtgtttccttggacttcctcagcctggttttatcatagcatattataagatgataaactgaaaccatctgatttgaaatcaccaacctgggaaataccagtcagaaattaattctatttttatgacattcttaaaagactgtttaaaactgaccaaagtaaaaaatcttcttttagagttataagtgtgtaaaaaaaggcatattcaaaataatgtatatatttaagtttactggacagatttaaatttgtgttctttgtgtaaggcatagattggaatgtttgctacaggtattttttggaacacggatttcagattgctgtttgcttataaatatgcatgactgctgaccttcagaactgctttaaatttctcaaaaaattttctcattatatgccaggcttagtggcttgtgtctgtaatcccagctacttgggaggctaagtcaggaggactgcttgaggccagtagttcgagacc

SEQ ID NO: 42820 - DNA, 1351 bp, Homo sapiens
tcctatggtaagactatgtttagttttgtaagaaattgccaaacaggcttccaaagtggctgatgtatatattttcaggttgctcgtgtgtttttcaaaaacaccttactcaggtatattgatggactgcttgccctgtgataggattacaagtaattgaggtctgtggggctggttgtccctacataaataataccagctggttgtacttcgcttgttcttgtttgctttctcttttctttatctatttttttccttttccatgtgtttttactctctttatcttgctttaccagttctgctttgtcctcagaaatcagaggactgcatttgttggaatagtgtataaatttaaaaggcaaaataaaacaagtccaagtcctttctcagggtctctaggcggttggggatggttgagattgtagcattaagtaaggtattgttggagcattaatttgactatatagaatataatcttcagagatgggaaaagggaaacaatacgttaataaaacttgctttcctttgtaatttgttaattatagggcaactgtataaaatgttttaagactatgatagcagaagagttttggtttttttcctacctttctctgggagagcttttcagcttctactgttacagtttttgtttgtttgtttgttttttaagcacaccacctttgggagtgttacagttctttaaagaggaccgagcctttgcttaaggctagcttcatactgtttgtataattctgtttgtatgtgcatttgtacatacccccagctgcagcagaatatcaatagattctgttctcccaggagaagggcaaggactgtatccaatcttatctggggtatgtatccaaatgacctaagacagtcttcctaataaacacttttggaccgcagggttcagactctcctggggtggaatctttttttgttacctttctttctgcctgctcgtttaagtcaggatgcatgcaaggcccacgtctccagtgcccccaagtggttgtctaggttttgcaagaggacatctagtgatgggagaactcactgcttccagccactctgtctatacaccccgttagaaaaatgatctgttgaccagaattttgccataatttcctaccttttttttttattagggtcacagacttaatctaattcctcttcctcataatggtcttttaatattttatgagagagattcctaaagtccttctttagatttaaacacctcttatttttctaactattcattaattaagcattttcatagtcccagtgaaatgtaacgggctttttctcgtatctttaaaagtggagtgcccagggctaagtacag

SEQ ID NO: 42821 - DNA, 1050 bp, Homo sapiens
acccctggctaatttttgtatttttagtagagatagggtttcaccatgttggtcaggctagtctcaaacttctgacctcgcgatcccccagccttggcctcccaaagtgctgggattacaggcgtgagccaccacgcccagcccaaagcttatttttcttaagcattatataaaagcatcattgttaactggattatcgtgttattagtattaaggaatatttacaaagttaacctattggtatgaaaaatatttgattagtcatacaattttgttagttttagatgccgcaaattaggagtttgtcttcctcaaggcaaggccacttctaaacttgaactgtgctgttctcagttcttaacgtaagaagggagctttatttatctagtgacagtttgctctaacatgtcatttaattttaattttcaaaaggatcagtttggaagactatatcatagctatttgtttttaaagctcattttgttaaaagtcaaagtaatacattcatataataaaagatgaaatagaaggacttacaataaaaatcaatagtcttttgccactctttccccatcccgagtcccacttttcagagacaattagctgttttttgtttatagtttaactgttttgtttatagtatcatcaaacagtaatgcctccataactctaaataatatgtctataccactatttcttgatttatcaaatgggcattattgactttttttttttttttttttttttgagaaggagtctcgctctgtcgcccaggctggagtgcagtggcacaatctcggctcactgcaagctccgcctcccgggttcacgccattctcctgcctctgcctcccgagtagctgggactacaggtgcccgccaccacgcccggctaactttttgtatttttagtagagacggggtttcaccgtgttagccaggatggtctctacctcctgacctcgtgatccgcccttctcagcctcccaaagtgctgagattacaggcgtgagccaccacacccagcttgactttcttttatggaatata

SEQ ID NO: 42822 - DNA, 1088 bp, Homo sapiens
ttagtggtacatgcctgtaatcccagctactcaggaggctgaggcaggagaatcgcttgaacccaggaggcggaggttgcagtgagccgagatcatgccatcgcactccagcctggggcaacaagagcgaaactccgtctcaaagaaaataaaaataaataaataaagtgcaaagtttgataatgtttctgctttgttttacgcaaagattactttatgttaacatgaagatgtcaacaactctctttttccccccttattttcctcttaaatagatactgtgtgttggaaggcacattactaagttctttacaggggcatctcatttaatccacctttctgtgtgtgtgtatgtgtgttgtaaaaaattcttattttatagtcaaggaagcagagctcagatatagcttatagccataaagaacaagtacattttactggacattaattctagatttcagaacatgtgggtaatttatggcttccttgaagtgataaaattctagaactatcaaattggactgtaatagagatagacttgggttaaccagacaactctattaatcatcttatctgcacttaatggtatagagataacttgatattgatgaccctaacttagaaatctatataggatcctaagatacattctgaatcatctaaagagagtaaattatattcaatattgttctaatattatgtgttgcactattttgtatctttataaatgagaaggttagcatgatttattggaaagaatactaactcagagtgagaagatctattctctagtctcaattctactacatataaccatggttctcactttcatcttctgatgaaatatatgccctcctaccttaaggagttagaggaagaaaaataaaatttggtgtaggaaaatgttttgaaaactaaagcatcacaccaaggtattattactaattattaatgttaattatatgtattgcctatattcatttttgaataacctgaacataccatctctcagccatgctttattagagaaagttcatgaaccaagaattttaatttttctcaacaattaagtgagacaacacaggtgg

SEQ ID NO: 42823 - DNA, 1774 bp, Homo sapiens
gaaatggaatcctccagtaaaaggtagtttccaaaactcaatgtattgtttcctgcttagttccttctactggctgttgatggaaagatcatctccgcatcattcttcactcctgccgccacccagccccaacaaccagtgtagcctttctgacttccagcccaagctggtcaagccttcccgtttatcctattctgtgtccagtaagcagaagcagtaaggcttgagtgcttcatgttttcaagggatacagaacaaattaagaggcttcggattattgtccttttgccctacaaaagaaactgcattttgttgggggtattaatccatgtttaagcagcaaatggctgattttacttgcttttgagaaaaatgtgttgcccttgcttatcagcgagctcaagataaataagttttggattattggggaaaataatgaacttttttcttcaggtatgttaggaagggtgctgccaaatgggatgctccaagaggtggtttctgaaactcgattgtattattccctgcctggttctttctactggttgttgacaggaaagatcagcttcatatcattctccctcttcttcattcctgatgcaattttatttttaatgggctcagggatttaaattaatggtcaagagtgtgagccttgacgccagactacttgggtttgaagcccagctctgtcacttacaagctgtttggcatcgagcagttgatttgaactctcagtagccaggctctcctattctgtaaaatgggagtgataacagtacattcttctaggagtgttatgagaactgaattactccatgtgaaatccttaggtcagtgtcttgtatacagtaagggctgaactcttgcggcatgccagctctactgggtaaggctgtaaatagagaatagagtgctctagcatatactctgccctcaaagaaatcatactcttattgcggagactgatttaagtaaaacacttagcaaacagtattacttagagtgtaactcactattgaattgtatggtaaagactgtgaacgttgtagaaattcagaggagggtgatcacctcccctaaatataaaatcagtgaaagtttagattgattatgatagatactagagagctgtgatggatttgtatacagttcactgtatgaggctgtatagtatggtggctgagagcagggttccaacgtcacatagattcaggtttgaatcctggctccaccatttgatcctgagaaacataacctctgagccttgttttccccattgttataatgaggataagactcatcacacagaatcatgtatatgagataatatagataaaattctcatcgcggtgtccaacctatagttagcatttcaagaattatagttattatcatttaagttgtattttaagagttgtctattctgaattgattatagtgagaggagattagaagatcagttaggaagaggcactccaggagcgccttgttaaggtcttggaaactgaagtagtaagaatggaggtaaagtgattcttttttttttatttgaaacggattttcactcttgttgcctaggctgaagtacaatggcatgttctcggctcaccacaacctccgcctgccgggttcaagtgattctcctgcctcagcctcccaagtagccaggattacaggcatgctccaccacacacggctaagtttgtatttttagtacagacagggtttctccatgttggtcaggctggtctcaaactcctaacctcaggtg

SEQ ID NO: 42824 - DNA, 1840 bp, Homo sapiens
atacaaaagaatgaagttggacctttacctaacacagtgtataaaaattaactcagagtggttccatgacctacaactataaaactctttgaagaaaacatggggcaaaacttcatgacattggatttgccagtaatttcttggatatggcaaaggaaaaatagacaaattggactttacgaaaattcttaaaatgtgtgcatcaaaagactatcagtagaggaaaaaggcaagccacagaatgggagaaaatatttgcaaattgtatctgataagggattgatatccagaatatatagggaatgtctaaaactcaacaacaacaaaaactctattcaaaaatgggcaaaggtcttgaatagacatttctccaaatttctccagagaagatatgcagatggccaataagcacaggaaaagatgtgcagcatcactaatccaaactacaatgagatatcacctcacacccattaagatggccacaatccaaaaaacagaaaataacaagtgttggtgaggatgtggagaaattggaacccttgtgcactgttggtgggaatgtaaaatgacatagccactgtggaaaacaatatgataattcatcaaaaagttaaaaatgggactaccgtatgttgcagcaaatccacttctgggtacatatcccaaagaattgaaagcaggatctcagagaaatatttgtatgcccatgttcacagcagcattattcacaatagctaaaacatgggagcaaccaagtgatcatcgacagatgaatggatacacaatggaatattattcggcctttaaaaggaaggaaattctgacaaatgctacgatgtggatgaatcttgagcacattctgccaagtgaaataagccagacacaaaaggacaaatactgtgtggttgtatttatgtgagatagagtagtcaaaatcacagagacaaaaaataactcaaaatggatctaagacctaaaactatcaaactcttagaagaaaacatgggggcaaaatgtaatgacattggatttgcctgtgatttcttagatatgacaacaaaggcacacacacctatagttccagctatttgcgtcaggaggctaaagcaggattgcttgagcccgggaattcaagaccagcctgggcagcatagcaagatcccatctctaaaaaaataaaaacaaaaatgaaaaaatcatcgaggcagaaagtagaatggtggttgccaggggctagggagatggtagaataggaagtttaatggtccagtttaaagttccagttttacaagatgaagagagttgtggagatgaatgatggtgatggctgcacagcattctgagtgtatttaactccctgaactgcacacttaagtgttaagaatgtaaattttatgtgcattttaccacaacaaaataatttttcaaactgtacagtacaatcctaattattatcttttttttttttttgagacagtttcactcttattgcccaggctggagtgcaatggcatgatatcggcccactgcaatctccacctcccgggttcaagcaattctcctgcctcagcctcctgagtagctgggattacaggcatgcaccaccacacctggctaattttgtatttttagtaaagacggggtttctccatgttggtcaggctggtctcgaactcccgacctcaggtgatccgcccgccttggcctcccaaagagctaggattacaggcgtgagccaccatgcctggccttatcttatctttttgaagttgtatttaagattagaaggaaataattatgatatttaaaattttcttttatacttaatagagtttgctca

SEQ ID NO: 42825 - DNA, 1049 bp, Homo sapiens
atactttcatcatgtaggcagaaggttccttaatggcattagtggcagaaagaaaagtacctggcactttgtttatggtaggtgcctaagaaccgaatgctctgttagttggaaaagtctttgaagaaagacatagtgctgtgtcctcctttggaataggaggaaacaaagtacctctgtcccgccagagaagaataacataggaaatgcaaagagccatcgtggcttctgagaatcattttccaaagatgccaaacaaattcaattctaaaactatagcctactttttctgtagggaaagaggcttttgtgcttatctaaatctagacagagttgatctcaaccagaatgctgtaggacaaaggacatcttatagccacacatgttcaggatgaaatggaccatggttggaattaaggagaacctctctctctagctagactcctacttctatttttttacctttttctattcctcatcagagtcctaaggcaccctgagcaaagggtaggatatctggcttatgtggcattcatgtgaagtgtgattgctcttattcactatggaactgctaaaaataacttcccatgtgggttcagtaggaaactttattatccattctaatcgacttgacctgtctgggagagaacagactgctttataattctggctcctccccagcatcaccttttcagatggatgaatttataataagtccaaggaccctctggctctcggccaagtagaaccgttcagccatacaataaagttgaaccacacccgctactattgattactggaagctgcctcttttcagtagcattgggttgtgtgaatcatttggtgtgatttcatgttgttggctacatttgtgatctgggaaaattctggttcgcatcctaaaagccagtatttcccccaaagcaggccatcctcagtctgtgactgccagtacttgctgaactcaggccttgagagttggaagttatctctttctgaatgcagcatttctgtatcaaatcagacccttgagttgtgccgtatcccag

SEQ ID NO: 42826 - DNA, 1042 bp, Homo sapiens
aaagaaggcataatacaaatgaaaatcatggcctttattattcatctggttatgctagtacttggtgtggtgactcctttgcaggattattttaaagaatggtggcagctatgttttactcactttagaagtcaaagactcacggtaaatcttagcagaggcaaataaaaacatgataccaaaacctaacatctaaatctgtactgtccagtatgatagctgttagctacatgtggctatttgaatttaaatgcaagttgattaaaatgaaataaaatgtaaaaggtagttattagtcacaatcatatttcaagtgctgaatagccacatacgccctgagatactgaatttttaatttaattataatttattcacatttaaatgtaaacaggcacatgtacctagtagccactttaatggactgtgtagatacagaacatgtctatcactgaagacagttctattgggtggtgctgatctaagggctatatcaataacactgtggtctcctggcaagttgtaccctctctgtacaggggaggacaacacaaatacttcatgagctttgtcttccagtgaccttctcagctcataaacagcatggctttgcttttaaaaaaaaaaaaaaaatctacccatgtgactgcagtaatccgcagccagtaaacagcagggtgggagggttgcgaggagaactgatctatttttatgcactgcagagtccaagcaggaaaacctgagaccggagacagtggtgacatcaagactcacttcctagtgagtttattcatgactcaggccatgtgcatatttccacttggattcctcacaagtgcaagtttctcttctaggctacaggtatctgcagccaggtgctgtaatggatttatagtagcccgccaaaagatcaaatatctgaagcctgacgggtcacaaagctgacaggagccatgactattgcatgaattccagatttcacagtgaaacagagctgctgctgaaaaatgggagcacagagctgttcactggggctcttgattct

SEQ ID NO: 42827 - DNA, 1047 bp, Homo sapiens
ttgttgctaacatgggaactggaaaactgacaaagaaaaagaaggaaaaatgtaacagttggtaaagctgggtaaaaataatactgtagtcttaacttaaaaattttaagtaagtaatgtgtataaaatccaaatgatacaaaaaagtatatggtaaaaggcaagtttttcttcttcctttgaccccagctaattgactgccttccctagaagcaaccaatgatacatttcctgtatattttttccaggttcaggggggacgggagggactttgtggagatggtagcattcctttgtttggatgggtatttaagatgtttacaatcttgctaatacaaatagtgatacaatgaatagccctatacatatataacttttgcacatgagagagtctttctttaggataaatttgtagaagtacagtttctgggtcaaaggatttatgtttactgcttaaattttgatagattctgtcaaatttcaagtttatgtttccctgttgttgttcgagtgctgtcttccttgttcttttggtaacggagtgggttatcaaacgttatttaaattgtcagtttaataggaatagttttcttaagtgtctttccaataggtagataaaagagccatttatttgtttcctttatctatagatctgtttatattttttgttcatttttctattgggatggttcatattgtttataaaggcggtacccaacctttttggcaccagggaccagtttcgtggaagacaatttttccatggaccgggatggtggggtggaggagtggggggaatggtttcaggatgaaactgttccacctcaggtcatcaggcactagagactcaaaaggagtgcacagcctagatcccttgcatgcacagttcaccgtagagttagcactcctatgagaatctaatgcttgatctgacaggaggccaagctctggcgggaatgctcactcgcccaccactcacctcctgctatgtggccaggttcctaacaggccatggaccggtaccaggggtccatggcctggggcttg

SEQ ID NO: 42828 - DNA, 1815 bp, Homo sapiens
cttacccacacaaaatgtaagttaaataaagtgtcgaggtgggaatccaactatacttttcttccagatggctgcccagttatggcagtgtccttcatttagttcagctttgccctgctgattgaaatgttgtctataggtgtacttagttcctacagtttgaggttattactggacttttattctgtttcattgatcagattacctatttatacctaatgactctattccttggttatcatcttccctcattctacttcccagagttttcctgggaagttttctttgtttatttttctatatggcttagaattagctaaccaagtcctgctcctctgtcctgttggcatttttattggtattgtattatatttatagattaatttagagataattgacatcgttttgaggttcaaaaacagggtctatattcatttctttatgttcaagaacagtatatgtggccaggcatgggggctcacgcctttaatcccaacactttgggatgctgaggcaggcggatcacttgaggccaggagcttgagaccagtctgaccaacatggggaaaccccatctctgctaaaaatataaaacttagccgttcttggtggcaggtgcctgtaatcccagctactcgggaggctgaggcaggagaattgttgaacctgggaggcagaggttgcagtgagccaagattgtgccactgcactccagcctgggtgactgaacaagactctgtctcaaaaaaaaaaaaaaaaaaaaaaaaaaaaacagtatatgtatttattgtcattcaagtattgttttgtatctatcaacattaaaaagttgtttatttttttatataggcctcacatttcttattatgtttattccttggtgtttatcttgtttgttgctattgtaaatggggtttctactactttcttttttctttttctttcttttttttttttttttttgagacggagtcttgctctgtcgcccaggctggagtgcagtggcaccatcttggctcactgcaagctccgcctcccgggttcacgccattctcctgcctcagcctcccaagtagctgggactacaggcacctgctaccacgcccagctaattttttgtagttttagtagagatggggtttcaccatgttagccaggatggtctcgatctcctgacctcgtgatccaccggcctcggcctcccaaagtgctgagattacagacgagagccaccgcgcccggccggggtttctactttcttttataacttttatgtggttgtttgaatatgagaatgctattaaattttgagtattaattttatacctagccacgttaagaattctaatattatctataatagtttcccagttgtttttctagagaataacaggtatagctaaataatcatatcattactgaataatgataattttatcttctccttttcatttttttttctttttttttaaataggcctggcgtgttggctcatgcctgtaatcccagcactttaggaggctgaggcgggcggatcacttgagggcaggagtttgagaccagcttggccaatatggtgaaaccccgtctctactgaaaacacacacaaaaaaattagccggatgtggtagtgcatgcctatagtcccagctgctcaggaggctgaggcaggagaatcgcttgaaccctggaggcggaggttgcagtcagcaaagattgcgctattgcacttcagcctgggtgacagagcaagactccgtctccaaaaataaaaaataaataaaaataaaataaaatagagatggagtcttgcta

SEQ ID NO: 42829 - DNA, 1079 bp, Homo sapiens
cttagtaagatatcattaatgtcctgaccaaacctacatctatgtctaacccacatctctctctctggcctgtttgccagcagcctctagatgtttctaccaactgacttatgagtacctcaaatacaacattttcaaaaaacaatttcatcatttttcctggcaaacctgttacttcatcctgtgctccttatcctgactaatttaatggctatatcatcaatttagtgagtcaagccagaaatgtgggaatcacattagattccttccttttactcattccttatagaattggtcacaattcgataaggaattgtgttgttgattcttcctccttaccctcactctatttgtccctttctacctctttaccctccgcatttatgtctttcattttatatttcagctatacagaagtattttcagttagttgccttaaattcttggaacaaggtaggttgagaggagagattttttaaaaacttggaatttcctgtgctacactgttttttgattctgtacataccatttcttctttctaaagtgccattctcctagtcatcttcttagacccacccatgtatactttaatctacatagcattttttcctattctctcttttaatcccagcactttgggaggctgaggcaggagaattgcttgaacccgggaggtggaggttgtagtgagctgagattgcgtcactgcactccagcctgggcgacagtgagactccatctcaaaaacaaacaaacccacaaatgacttatgtgtgtcaagtcaaagggacattttaaaatctccatctgccttgatctcccttcatttttaaacatccttttcccttttggcttcctgggtgtcaggtctcgttttcttatgtgtctggcctcatccttagtcgtctttgtcaactctttcccttctaccaggactttatgtatgagagttctcaattcttggttctgtgtccccacccttctcttttcaacttacttgaggtgttctcttccaaatctgtgattttcaatatctatccatatgccaataagttatgccactttgtaatttcagccca

SEQ ID NO: 42830 - DNA, 1035 bp, Homo sapiens
cctgaattgtatataggagtaggactgtaccacatgttgtagccacctaagtcagaattcttggatcattttctctgattcaatagttttcatttttttttttttgagatggagtttcgctcttgttgcccaggctggagtgcaatggcgcgatcttggctcaccgcaacctctgcctcctaagttcaagcaattctcctgcctcagcctcccgagtagctgggattacaggcatgcaccaccacgcctggctaattttgtattttttttagtagagacggagtttctccatgttgaggctggtctcgaactcctgacctcaggtgatctgcccgccttggcctaatagttctaattgttaaatattcataattgttttagagatatcatttttgaatgtaagctattccatattggcaccatcttttttttcttctttttggtttttatttaatttttataccttttactttgagaattgtagattgatttacagttttaagaaataatattggctgggtgcagtggctcacacctgtgatcccaccacttgggagaccgaggtgggcaaatcattggagcccaggagtttgagaccagcctgggtaacatggtgagaccctatctctacaaaaaatacaaaaattaggcaggtgtggtggcacatacctgtagtcccagctacttgagaggctgaggtaggaggatcgcctgagcccacgaggtggaggttgcattgagccaagatcatgccactgcactcttgcctgggtgacagagcaagactctgtcttaaagaaaaaaaaaaaaagagagaagggaaggaaataatactgagagatccatatacccttccccaggcaatttcttggaatgataacatcctgttactattgtacaataacacaactaggaaattgacattgatacaatccagtgaccttactcagatttcatcagttttacacatactcgtgtgtgtgtgtgtgtgtgtgtgtgtgtatcatattctgtacaattttatttcatgttaga

SEQ ID NO: 42831 - DNA, 1141 bp, Homo sapiens
taaaaatgtcaaattttaagctaatcacttgttatattctgtcttgtattgctaattgttttgtgtgtctgtcttgtctccctaattagaatgtaaacttaagggcaagggaagtttcttatatatttaatgtatcctttgacagtgtggtttacaattttggactctggagtcatctcaacacatactgtattgatttaaaacaatggttctctaagattgttgaatgtcataaacctgtacattaaaaatatatatatacttatatttatccatatatgtatatttatagtagatatgggcttgcaaattttcagtttttccacgaaaaaatattaaaaagaaaaccaactaccattttcttatcagcatcatttcataaagtaaagaatatttaacaacaaaaaggttctaatctctgaaaaaggagcaggcctttaaatggaacattttagctttttgaaaaacttattgccttgtccatatttttctcattttatgttggactggtgaatcttcaccttagcctagcagtggtctgtagaccagcatttgagaatcattgatttaaaagacttagactattaaaagataaatcattttgcaaaataaataattctccttttccatgagtctgtattctctacaaaattaagtgcaaatgtgcaggtgatgccatttcattatacagaatctgtatatctctatgtacaagttctgtagtaagcaaactagaccctgctaatggacatctgaatatatatttccagttgccaaaaataaaaactgttctttttctagggaatttaagacaggataaaatatggtgtagtgggaagaggcaagtttttagagtcagaaggcctcacttgaatcctggctctggcattaagtcatttaattttcctttagcttccttgcttgaaaaattatgatgatactatcttcttcaaagtattttgttagctcctgttacagcaattccttcacagtaacgtaattatttgtttacacatctgccttccttatgagaccatgggctctgaagagcaggaatcatgtccttgttttgcaatctcaggtcctagcatagggctccaggcatagcagatgcttaataaaatgattgttgaatcaatac

SEQ ID NO: 42832 - DNA, 1036 bp, Homo sapiens
aatcccagcactttgggaagccaaggtgggtggatcacctgagttcaggagtttgagagtagcctgaccaacatggtgaaatcctacctctactaaaaatacaaaattagctgggcatggtggtgcatgcctgtaatcctggctactcgggagactgagacaggagaatcgcttgaacctgggaggcggaggcagtgagccaagatcacgccgttgcactccagcctgggcaacaagagcaaaactccgtctcaaaataaataaataaaataaataataatctgtacatttatatttatgtaaattctaatgcatgccatatttaacaataaaaggagttaaatttaaaaagcaaagatcctgcctcacatcttcactcaaccaccattaacaggcgagtctttccagatgtggttctttctgaagagtgttaaaaaataaaagtttgtttttcagcaagtgttaggggtaataagatacagatctttgtaggggaaaaaagaaagcttatttcaataaaatcagaaaagtgggaaaataaagcgagaaagagcggtaaataaaaaatacataagattgcagggacaaatctaaataagaaatcaagatcaaatggaccttatctgtggaatgtatttagtttactattttaataggcttaaagaaaaattgtgactttgctgtattaaataaaacatttaataaaatttgatatttaatgtgttcattttgttacaatgcatccagtacccttatgacatatatgcttttctgtatgttacatttgaatacaaactttgtgttgggcgcacagtggctcatgcctgtaatcccagcgctttgggaggctgaggtgggaggatctcttgagcccaagagttggagaccagcctgggcaacactctgtctctaagaaaaaattcaaaaattagccgggcgtggtggcacacacctgtggtcccagctacttgggaggctgagatgagaggattgcttgaacctgggaggtcaaggctgcagtgagcagtgattacac

SEQ ID NO: 42833 - DNA, 1986 bp, Homo sapiens
cacgatcttgactcactgcaacctccacctcccaggttcaagcaattctcctgcctcagccttccgagtagctgggattacacctgcctgccaccacacctggctagttttcgtatttttagtagagacggggtttcaccatgttgaccaggctggtctcaaaatcctgacctcaggtcatccacccgccttggcttcccaaagtgcttggattacaggtgtgagccaccatgcctggcccaatatttttgacctgagtgagtgagtagagaaatatgaaaccgtcttttcacagacccctcaactgtgtaatccatgtgaattgtatttgtcacagagatagttggcaataaacttataacattactttccctgctgtacagccatttagagaaaatgtagaatagactgcatttcttttcatatttgcccaaaagcagctttaaaaattatctgttggcttcaggtaatacagcaaatgacagagatttttagagttcctgtctgctgaacatagcaactctgttagatttcttctttaaatttgtcttgctaattcttagaaagaagcatttgtgccttgagaagaacattgcataatccaacacccgtgccttaaaccatgtatctgttaggcataataataccaaagtccactgagagttagacactgttttaatcttccctgtcgctgtttactttggcctgacgttaaagtcaaccaaacttttagtacctgtttttaggtactaactgttttaggtgttgtgggtgatacaggataattattatacatgacctttgcccttgaggagcttataaactgtttggaaaagaaaaacaaactgacaaaatgcatagaaaaaattaaatgccaaataaattgattcccgtttcatttagtgtttgctgtgtgcccgaggcttggttatagaaaggtaaatacaaatgtattccttttccctcaaatagctcacagcctcctagaaagttacctgtataagccaataaacatttcaacatgacaaatctaacaaatctttgaagtgcagtaataatatcccaatatgcaaatgaggaagctgagactaaatgaaggtcagtgacttgctcaaagtagcaattagaaagaacctggattcaaacttagacatttataggagctcttattttttcttccacaccacactttctgtttcaagagtcctaaaaagaggaactgagttcttcatttaaggtaaatagtaaatttgccaactgattatagtttgcctgatattcatgtatttacatagttaaggtgtgatcttattaattgtacatgtatacactaatatatgagtagtatggtactgaactggaagggttcatttgatgaaaagggtggtgtgcactagacttaggtatttccacaagtagggattgatgggtaggtaggtagactaggccaaggtgtaagggaggaactctgggatttccaagcagagagaagtatgagaaactgacagtaggacaaggttagtaggagaaaagctctaacatgttgggcaggggacttgatacttgagtggtgaggaaccatcaaagactttcaaacacgactaacaggttggacgtgagtgactcagtgattcactgttttttgttgctctcaatctgtgcacaatttcagctctggtttaaaaatataaccttagaaagtgggattttgattttaaaaagtaaatatagaaggcctgtattaggttggtaataaatgtataacatgtttattaggtgtctagcgttgtcctaaatattaactttatactagtatctattaccaacataaaaaactacgttcatctttagggtcacaactatagtagcttcttattccatccaatatgtatttaagcatctttggttctgaagttgggcaagggtttgtatagattggtataaacattttaaggataacagaaactacaataaagttttttgttt

SEQ ID NO: 42834 - DNA, 1058 bp, Homo sapiens
gaaaacacaaatctacccacgaaatggcctgagaacaaaacgcacccagtggccgtgatattcatgctacttaaaccagaaggcttcgaatgggcacagtgcagtgaggctgagggggctaatcagaggagatattaaatgttcaagaacactagcatgcaagaacaactgtgacccagggagatgtttgctaccaagtacactgtggggccccaccaccccagaaaggcgcatcagcaggtactaaggaagaccgggccatggctccccgaggtcgcgctgtgtgaactcaccaggtgcagttaccgggaaagcttgttaaaaagggcaggttaggaggccccaggcctacaggttctgattcagtaaatcagcgtgggcccagacctgcattttaaggaagggccacaggtggccgtgctgtaggaggggccgaaaccacacttttttttttttttttgagtctcgctctgtcgcccaggctggagtgcagtggtgtgatctcggctcactgcagcctctgcttcctggtttcaagtgattctcctctctcagcctccctagtagctgggattataggcgcacgccaccacaccggactaatttttgtattttttttttttttttttgagacggagggagtctcgctctgtcacccaggctggagtgtagtggcgcgatctcagctcactacaagctccgcctcctgggttcagccattctcctgcctcagcctctccgagtagctgggactacaggcgcccaccaccacgccctgctaattttttaaaatatttttttagagacgaggtttcgctgtggtctcgatctcctgacctcgtaatccgcccgcctcggcctcccaaagtgctgggattacaagcgtgagccactgagcccagcctaatttttgtatttttagtagagacggggtttcaccatgttggccaggctggtctcgaactcctgacctcaggtgatctgcccacctcggcatcccaaagtggtgggattataggcgagagccaccgcgcccggcctcaaaaccacacttctaa

SEQ ID NO: 42835 - DNA, 1038 bp, Homo sapiens
cttaaaggcttaggaagcatgagccttcaatttctctgtaacagaatgcattatttacaataaaaatgtagaggagctcataatcctggtttcagctttaaaacagaaaaaggtctaaaatcattaagaatcctaatttggcaaatgaaagtggatgaatgccatggttttagatttgggaggctgagagtttagttgagaaactctccaggctttcatgatgcaaatctccctgttggagtaaaaagataaagaaaattctaagtcgtggtattaacacttgtataaccagttacgatgtaggtgtatgcatctgttttgtaacgattgtgttgttcagacttattcctaaagggctttaaaacagttacaagaatctgacatattggacatgtaaaaaatttaagctactatccatgttttaaatgtctgggaaactctcattttttaatatccatttattttttatttactgctaagtaaatacatatgtagataaatttaaaatgtttacagcataacgcattggaccgtgcaggatactaacatggatattagataaagtgctaataatgaagtgtgttcctcagatagaaacatctcgccctcccctggtaactgcatattctgctttcaaagttctctctgattacaaaaatctttcaaattcttttgatctaagaaaaagaggaaaccccatagagggggaacaagcccagtgccagggtgatcaattttgcctcatttttatataatcctttttgtggtcatatttctctcccaccttaaatccattattcttctccccatcccctcagatggccatttcttcagtatggttggaacactccctagaatagcagaatggagagtgtccaaaacaacttttactatttgtgctagaccttcaccaaacagtaatatgaatttactcttaataaatttgttgcctctttatattatctctctttataaaagttaaaacaacaaaataacaaaaccaaaaacccaaacattctaggtaggaaaaaaaaagag

SEQ ID NO: 42836 - DNA, 1051 bp, Homo sapiens
agagaagagagaaaagaggagagggagagagagagagcatgtcgtgagggtgcaagcctgaggaagaagacaacagaatcacagtctatttgtaacctagtctcagaagtgacatctatcacttttgacatattccatccattagaagcaaattactaggtccagtccacactccaggggagggaatagcacagggcatgaatgccagtaggtggggatcaaggggaccacagatgaggctgcccagcaagtgaacacacccatttacgccatctcccacactgaaatgagcagtgctgatttaagagcacaggctctggaatcacagagatctgggtttgtgctcctgcttggaaatgtcagttagacgatcttggattatttaattcttttgtttcttcatggcaaaatgggaatgatgataataacactgacctcaaagggctgttttgaaagtcagactaaatgagctaattcatgcaaaatacttaccaagtatctaacacaaaataagagctcaatgatgatgataagctgctattatcatcatcatcaccaccgccaccgccacctgatttgtaattcaaactctcatgttgactagccgtggcattgcaggcaagttacttgactttcctgtgcatctgtttcctcgtgcataagctggggaaatactacccacccttcagagctattgggagaggagggtggtgatcacgtgcttggcccttggtcgctgtaaatgattacttttaatgggggttcagtctgctttgcataaatttactgccctttttggttaaggcacatctgtttttctgtctttgtttgctcttctatgaaatgaggacaacaatccttaattattttgcttttcatggctctctagcctattaaacaattcctgtttatgcatttagaaggaaaaaaaaaaccacatgggtaatccataatggaagatacatcaaaatcatatttatggtctcagaaatgttctttgaagcagggttattttcttccatcttattttggtcatcattggaagtagttt

SEQ ID NO: 42837 - DNA, 1034 bp, Homo sapiens
tttggaagcagtgaaacttgtttatgaattctttccttacacaaaagaagacaggttttttaaaaacaaattaatctttttctctttgtttctttcagcattgatgactgggaagtgagagacatagatttttgaaaagctgaaaataacttctagtttaacaaaatagtttcttccagagcttagaatttcagatgattggaaaattcatacatctaggtctgaaagtttaagtctttcgcatctatggagatctctattttctacaacctaaaatgctatgatgggtgacaggttaaagacaaacctttttaaaaaatgtatatttttattgctatatagtggtattatggcttttgaaattcctatttttaccataaacagattattaggtgcttactgattccagataatagcctaatctattagaaggtagaagagagaatctctggtgatacactgtccatacatggttcaataggaggtagcaaaggctaagtatgagtaagtgacaaaagcagtaaatgctgcagaactgaaattcagagaattgcgcttccactgttgggtaaggcttaaggggagactttgaaagaggaagatgagctatgccttcctttgggtactgatttaatttcttttgccatttttttgcatttcttgaatgtaggaatttatccttacccatgtgcatattcatcagctccaatttaggagattgactagtgtagcacgtcataaccagaaagatacttggaggtagacttttccctaaagtttatacaagacacttaatgggctgggtccttgatcatgtacttctttcttagactttgtgtatatgaagtggtgttcttatccttatttctttccacattcaccctttttaatgcttttagtaagtcttttcagtttttgttaagatttattttatagttacactattgtatttattgaaggtagcttggctgatactgttccaaagtcacttgccactttcctctctgcataattaacatttattctcctcatta

SEQ ID NO: 42838 - DNA, 1034 bp, Homo sapiens
ccactcttttatttcactgttttgtattctgttcctgattgtgtattcatgtataaatatcttgctgctttaattacagagacttcataatatgctttaacatctgacagggtctagtcttctctccttgctcttctactctttttcagggtttctttggctgtttttatccttttaatttttaatgtgaaatttattatttgtgtgaactgtatcagccttatttgttgtatggtcatagggaaacctgtttttatttttgggtctaattaaatttataagttaacatagaattgtatttttatgatgagtctttttatgcaggaacatggcatgtctttgcattttttccaggtttacttatacatacatatatatatgtatatatcaggactgtttaaaacaattttctcataggttttgcacatttttctaagcttatggctaatactgtattttattgttgtaattagaggtcttctcttgcattatatcttctaactgcttttcgcttttatgtttgaaggctctgatttctttaacttgatactatatatatatatatatatatgctttaagttctggggttttttgttttttttttttaaacaggtctctttggtccaggctggagtatagtggtgtgatcatagctcactggaacctcaaactcctgggctcaagtgatcctcctgtctcagcctcccaaagtgctggaattataggtgtgagccaccacacccagccttgatatttttttctaactaaattcttctattctaaatagtatttttcccattgattcttttggcatcttctagttgtataattttttcatctacaaacactctaatttgtatgctttgtaattactttttctatctcttaaattttagactttatcctttagaacagttttagatttactaaaatatcgagcatgtaatacagagagtttgtatatacctcccaatagttcccctattttttttttttttttttttgaggaagggaagaaaaggaaaggagcaaag

SEQ ID NO: 42839 - DNA, 1048 bp, Homo sapiens
taagtgatgatcttttcctttcattttatacttgtgaggcagtcagtaagtatattccaaattccacttattctccattcttctctcatttttttttggttagctctatcttttctacattgttgcaccacacatttatattctgttatgtatgacattcttatcttcatggttagttttagttcggtggttaaatatttttatttcatgtaaccagattttatgctgaagcttctcaaatcatttcttcagtatgtatagtttattcattagtagttttctcagaaagaatggctcaaggaacgctttgttaactatgcctttaaacttgaaagatagtttgattatatatacagtcctaggctcacattttttgtacttgattttcttaaaattttttattttattttgagtataaaatacctgtttattgtatttgggtatgaaatacagtcacgtgttgcttaacgactgggatgtgttctgagaagtgtctctttaggtggtttcgtcattagtgaactatggagtgtacttacacaaacttaaatagtatagcgtactccattatatagctctattataatctcatggggccagcatcttacatgtggtctgttattgacagaaacataatgcggttcatgactgttgtagctgttgtaaggtttttttgacaataaacttttcttaattttatgagtgacttgatatttctatctggaagctcaaggaagtttttaaaaaaagtcttcaaagtctgcatagtttgtactaggaatattgagttgaatttccctagcataccgtgtattctttgagtgtgtagattcaacttttattttagaaagatttgcttgaagcacagtttgatgtatctgtctagttccaattatatatttttttgtcgagtccaattatgttacgttatagacagttgctgtcttttgtatctgtttcattattttcatcactttccaacctcttttcccttactgggctattttagcggtatcttttttgggaggaacttttaaaatttagtctg

SEQ ID NO: 42840 - DNA, 1512 bp, Homo sapiens
tttaaaaatttagtccttgtttctgaaaaaaaaactcttctcacttatatgtaagtcttatcagctcttcctgtcattctggccatactatttttgagctgttttaattttgaattattgcttcttaataaaagtaatgataataaaaatataaactattttcttaatttcatttaggtcattttgaaataattaacaattttcatcttcgtggccacatttttctcaagtatttttatctattacaacatcttagagtggatttttattttattttctattgtttaaacaagttggttttcctgtagttttagaaggaagaacttctgtaggaggaggggatagaccagtgcagtttttgagctgtgtggctccaggccgcatttgtgaattttttttttaattgcacttttgagatgtagtaaagcttttcacctttatgttttccaggtattttgctttctgaatagacccctttaaatgtattttactgttgtggaactttctgagatctgtgtcacttggacctcctgcccacctagaatgtgaatcttatctctcctggagggttctcattctttttgctttgcttaggtctatttctgtttcttgcaatttctccagaatgggtctctgttttcatgaaagtaagagagtatttgttggtaggatacttctacagtcctcttagagtgtagaatctgcctctctcagttttccagttatctctgcatttacctatatcttggagcctgagaaggatgtgttatctaactttacttagttctcagattttctttcccatcaccagcatttgaacttgtttgttcctttgtgaagaatagactttttctttatttttacatgagtggttccttctgattagcataattaaaatattttcagagaggtgatttttttctttttttgtaccatccctgggaaaaaaaaaaaactgtcctgccgtgtcaccaccccgtttatttcttttgtagcacttatcacagtctgtaattaccatgtttacaattctacttgtttattttctgctgcttgtcatttgaatgttagcctcacaactggagatcctatctcatataccatggtgttcccagagcctatcacattgtctagcacaagactaggactcagtaaatatttgtttgataagtaactccaacaaatagtaaaatccccttcttactatgctgttgtcttaaaattgggaaatacttgtgagtctaaacctctgcagtatatgtaagtctaagtgatttgggagaaagctatcatttttatagtatactctttatagctggagatattaaaaattgatttaagagttgatccttactgcattttgaattatagtcttttaagaaaaaaacgtttgtttatttatttacatgtacttatcctttcaaaatacaatgttcttagattttaaatcagaaagccttgaaaaattatcagcattcccccttcccacacatttgtagctataatcaaaaa

SEQ ID NO: 42841 - DNA, 1022 bp, Homo sapiens
ttccaatttaaagttggcggggcttactgataagcatcctgaccagcccttatcagaaaaaatgttaaatgctcaattttttgcccaattgctgctgttatatttaagtattcttaagagtagtaatttagggctgggtgtggtggctcatgcctgtaatcccagcactttgggaggctgaggcggcaagatcacttgaggtcaggagttcgagactagcctggccaacatggtgaaatccccgtctctactaaaaatacaaaaactagccgggcatggtggcaggcacctgtaatcccagctactctggaggctgaggcaggagaattgcatgaacctgggaggtggatgttgcagtgagctaagattgcaccactgcactccagcctgggcgacagagtgaaactccatctcaaaacaaaacaagagtagtaatttgaaaggtatattgctaagcaagcttagggtttaagcatatgtaatcaagaaaggtttttaatttgctgacttgaattaaaacctaaaatgtcaaataaattatcttctcatggtgaattgtaatcgtttgttactgacatttaattggtagtatatacagatatagtagattttaaaatatgcaaaaataaagacatataacttgggaaaaattaaaactgtatcccatttttcagttacccatttgtgtttcattataaatttttaaagttctcatagaagaatttaattactcatagtcttgcttttgttttgtagtctttgtatgagaaacttaaaatgttattcatttttattgctttcagttttcatccagcattggtaagaatgaaaatgtacattttaatattaaactaacctgatggaaataggtagccattttagtcttcagcccaactctattttcaattcttcttaaccagttctcagttattatttgcattttaaatatttttaaatggcagatatttaatttaactctagttggcaaatctttattatttgactcatatagttgataccga

SEQ ID NO: 42842 - DNA, 1034 bp, Homo sapiens
ctactagaagctttctgtgcttttcttactctgttttgttttctattcttattcaagttccaaacattacataactttatgataatttcagcatctggtagattattcctgtttttgcctattcatgttctcttaattttttaatactttctttattccaggaacattttagtggacaaaccaaatgaccaatcttcaagatggtcttcagagagcaactatcctccccaggtaagattacatgtatcccttaatgctgtttagaagtcaccatttaaataaacactcaattgatactagttatctggaatctactaatagtttattctctttttgagattgtgaggtaaatttttattctctctatttttgcttgtttattaaattttggaagaatttttatctcataggcaaatgcagtgtgagatttgatgaaacatggacttttacttctgtctaccagaacagttacgctcaagttattctgtaaatgtttaaggaaatgttagtaaattgaactctgactcaatgactatcttatggggaaaataaacttaaatagtttattttattataatattattatacttaatattaaaataatatttaaatggcatcaggaccatgtgctaaatttcttttccctggcaagtagtgtctggggttgactgaatttaaaatcagtctttcagttatatgcgttcagcattaatatttataatgtattaggcacacgtatgtccatatccttgaagaaattaatgctctgctaggtaaagcaaatgggtaaataatacttactttattttttaattgtagtataattcatggaaatatatatatatatatatatatatatatatatatatatatgtatgatgtatgtatttttttttctctttgcctacctatttggatcccctggtgtttacatgttttattgcaaaagacatgtctaaagaatatatatttataatttttgggagccgcagtggctcaggcctgttgtctggtgcataaggaggcgaggctag

SEQ ID NO: 42843 - DNA, 1032 bp, Homo sapiens
actgcactccagctggggtgaaacagtgagactctgtctcaaaaacaaaaacaaaaacaaaaacaatatatttgtgacatggtatggcccattaacataatattttatataagcaaatactctatactgtatttaagtcatgaaagtatttcaggaaatgtaaagcaacctgagggtgagtgactttcccataaatcattgtgtcagtcctagttgtttaagtagagaggtgatatccatttatttttatttaggataaagcagatgctattaagccaacagagtaaggttggctttgaaaatttgttgaactataaaagaaacattggcatctcagtcagaattaaataactaaattctttggcgtattctaatatgtggttttaaattgtcagatttgactgtgaattatttttgaatttcattcttaccgttgaaaattttatgttatattcagttatccattcaggacactaggccctgtcacacatttttaaacaccgtagctacattctttataatactgaacatttttcattaatcctcgtataattaagagaatccagttataatgctgttgatttgaatgtaccggttttgacctatatgcccatgttcaactacttgtttatattgtcttggtcataatattttgagcatgagtttaaacttaaaacctgagtgtgcattaattcgtgttctagtgcatttactaaattatgaagtcagatttaatagccttatttttttcccacagtggcttaaagaatgattataacaaagaaacattcaccttgaagcataaaattgatgaacagatgttcccttgtcgattcattaaaataggtaagattttagcattctgaaatagaaacaaattcttgatatcatcagtcagcaaactatagcccatagaccaaatcctgcaggcctcttgtttttttaaatacaattttatgggaatattgctgcgctggtttgtttacatattgtctgtatctgcttttgtgctacaaaagtagacttgagtag

SEQ ID NO: 42844 - DNA, 1076 bp, Homo sapiens
tttagaggaagcagatatcaaattaggcagctaagtgttggtaagtccattaattgctaaaaactgttcacaagcctgtaaataatttagttgttgttttttgtttggttttgtttttttttttcctgtcttttaaattttgttctgaagcttggtagcaaacttttttttaagtttctaaaacctaggaaaacttaattaccataatatttagaggttaatgccaacattataataggtctcagattagcagcttaaaaagcaaataataccaataatctaccatagctatattttattattggattttagaaaactttactgcatagaataccactctttccaggcgtaatgaatgctcaattatactgtgtgttatgccaactcatagtgcttcgggaataaaataattgcttggagactcatattctaaaataattaagaataaaaatggttacaatgtagacactaagtcttcttgacatgaatttattttcataatttttgtaagaagagaaattataatttttaatttaaaattaaaagctaaatttctatgataacctctgaactggtttgagactgttattagggtctctttggaaaaggttcatttttaaggtataggaattcactttcttaattttggtccctctttccaaatgcctttctgccctgcagaaataggcttgaattagctatagagtcttaggcatctttttttctgcctgagagtataataaatattcatatgcttatttactaaagagctagatttatatacaaactggttttttatccagaataattatttatgaatatagacatgaaaatttgtttttagattgtctacacagtagcttcccctttttttgaacatagagtagaatttgtaatgcttttcttttttctccatcagtactataaggaaaatattattaaacacccctcccctgcccaacctttttttaaaatagagatgaggttttgccatgttgcccaggctggtcttgaactcctgggctcaagcagtccgcctgctgcaacctcgcaaagtgcttgtattacaggtgtga

SEQ ID NO: 42845 - DNA, 1037 bp, Homo sapiens
gaggttgcagtgaggcgagattgcgccatcgcactccagcctgggagacaagagcaagacttcgtctcaaaaaaaaaaaaaaaaaaaaaaagagagataaatcaggggtgttcaatcttttggcttccctgggccacattggaagaagaattgtcttggaccacacataaaatacactaacaatagcttatgagcttacaaaaaaaatcacaaaaaaagtctcttaatgttttaagtaagtttacaaatttgtcttgggccacattgaaagccatcctgggcctcatgcagcccatgggccacaggttggacaagcttgagataagtggtagtagagccagcaggatggcagaatgccacatttcatgacatgactctgtctttactcaccaaattcttagaagttttctctagtaaaattgatttgggagttgatttttatttacttattttttggtagatactggtgagacaattaggtttggggttcaaactgaggtaggacagtagtgaggcaacttctgtggattccaatgtctggaagcagaaatatgaggaaacatgccctggaactcaataggaaaagctctgaactttcacaagactgaaattatggttcaggttaaattaaacaggtctctagttgtgactgggtaatccaggactctgatcaagagaaaacaaaagaaatcagaaaatactattcagaagtctaacaactttcatgccttggcattcccaatcttttatttcagctagctattgctgtcgattttttgttctgttctcagtcctttggctatttcatgtttgtttacatgaagcttcatgaatagattttaagggagcccatgatagtctttaaacggtgtgcaaaatttttgtttttgtgtagttttctgggaagattcattacatatatatatgtatatatatatatatatatttttgttttttttttttttttgagacagagtctcgctctgttgcccaggctggagtgcagtggcatgatctcggctcactgcaacctctgc

SEQ ID NO: 42846 - DNA, 2902 bp, Homo sapiens
atagatctaaccaaagtaataattccctctacatttatgtaacactgttcaaaccattattactacaataatttccacattgttttagagttgttcacacaagtattgtatataccattgctgtctctccagcttcccagcccccatggacaaggggggaaggacagggatcttgccttatttatttttatgactatagaggctagaatggagtagatgtgcactaaatatttgttggattggatcaaagttttaaaattcattttcctttgagtagaaagaaaaatatttacctggaaactgtattcagatactgctgtaaaccttgataagtagatcaggttattatgtcatttattatactaatattttctgtggtggatctgttttattggttatattcgaacatatttaaattttcagattctacttgttatgccatttagactatgcttcccaaagctgtaattatcattacttcgggatctaggtagaaaaactaaatatagagctttgcatttgttaaagtaaaatttgttgctttctgaacttggtttgggctcaagtgcacaatctggtgtatccttgggtttttctctccaaaatttcttctgtgtttctattatgactattagtagcataatttactgagggctttcatatactctaagtatctatttaatcatttaggtaccatagccctgttattgatcagcagttaccttaattatcaggttgatcttaatcactttcaaagagattgtatttatcatcaatctttgaaagaacctttctagtcagatcttaatgatatggcagccacatataataggtaggtgttaagtttgtgggaaggagagttgggtgtctgacatccctgggattgaatcctggctctacccctgacttcttattcgatcttgaatgaattgtattgattaaaatggtgataataaactaagtaattgtgagagttaaatgaaataatgtattttgtatgtgcatatattatttatataacatgcatttgatatgccatatattaatatgcagcagtgattaattatgctgagagaattttatatgactcaaaggaattttcttttgtgtgttttttgcataatttgacaaaatttcactatggaaatgttttaaagtaattaaaaagtttgtgaaaaagtttaaaacaacttgaaaagcagtgttgaggggaaaaagtaactcactcataattccacattctaaaaaaccaatgttattttggtatatttgtttaatcttttatataattggtgccttaggaagggacaccataaatatatttataatatttttgagacaaaatactaaagtgcatataagaattttcttgatgaagatcaggtaggtttagtagtgaagaataactttctctaagtagagtttgaacaaccaggaaattccatgttaacaaaactggtgcataagtagtaaaatatagtttaaagaagcccagttattactttaagtatgcattttaaagttttctagcacaaggattctttatctgttgaagttaggtgcaacatgttgtctgtttgcaaattttttctaggaagaaaatctgtggcttcagataatcaaagagactcttactaactcacaaaattaagaacactggccagacatggtagctcatacctataatcccagagttttgggatgctgaggtggaaggatcacttgaggctgggagttcgagatcagcctgggcaacacagcaagacctctgtctctgcaaaatattttttttagttagccaggcatggtgacatgtgcctgtagtcccagctctgtgggaggctgaggcttgaggaggatggcttgagcccagaagttcgaggctgcagtgagctatgattgtgccactgcactccagtccagtcgacagagcaagattctgtctccggaaattgttttaaaaaaagaacaccttcactagagtaaaacttcataaagttaatttcagcttatttaacatggcttatattttaaagcaattgttgcttcccggtgtctcatataccttgttttcttagatattagaaacttaatagtacctagcttttgttttctttttttagtctgtagggttttttttttcccatattgctgtcttctctaaggatacagtgaccattttaaaaggtgtatgatggcacaaattttattatttaattttcaaagctttcttccctcctaagggaatcctatcattcatgccatggtagagaaggaatgttgtattctgtcctactgaatttgtcctactggatcagttttattaattgtaatccctatacctggcacctctccacttaagattcttcaactgtgacttgggtttcgactgggaaaagaacagtgaatagaaagagaaaagccacgtctattttgtttcagtgtggaagtctgttgagttagaaatatattaataaatttccattgtgttaggctgttccttgttgtgtaactctcattacgttctgagaacctacgatttaagcctttttcttctttctcaatcagaataggtatgaagacttaggcaaagctctaatatttggtatctacaaaagaagttgatggagagttgcttgtcacttggaagagcctttctgtagaaatttgaacctttaactgttctgtagctattatatgaaagtgcttttattattatttttatttatttatttattttttgagatggagtttcactcttgttgtccaggctggagtgcaatggcacagtctcagctcactgcaacctccacgtcctgggttcaagtgattctcctgcctcagcctcctgagtagctgggattacaggcatgtgccaccacgcctggctaattttgtattt

SEQ ID NO: 42847 - DNA, 1047 bp, Homo sapiens
gttgtaagtaatatttataatgcaataagtaattattttaaaactcatgctggaaaaatatagagattattttgatgagaacactttctgttagttcaaagtcagtacagatgagtaaagtggtgattcagtactggagctcagatttattatagttaattaatagactcataaaaacctccgcctcccgggttcaagcaattctcctgcctcagcctcccgagtagctgggattacaggtgcctgccaccacgcctggctaatttttgtatttttagtagagacagggtttcatcatgttgaccaggatggtctcgatctcttgacctcgtaatccactggcctcggcctccgaaagtgctgggattgcaggcatgagccaccgcgcctggccctcaagtggcatttttgtatagttttctaaatctctttaatgtttggctcaataaaagacatctggattcatatgcttctttattcagttgctgtatcagaaagtcatgtagcctctggaaatgttcacatatactcataagagaataagagtgaaaagacaaatttttttgttagtcatgtaaaaataactttgaccttatagactcccttgaagtacctaggagaccccagaccacactgagaactgctgctttaatctaatccacagttcctattcagatatagacaattatcccaataatgccccagtaatgttttttataggcatcccttgtcactctgcaaccccagcccagaatttagaccatgatcatgtattgctttttggtgtcatgcttctttagtcatctttagtctagaatagttccctaaactttctttgtctttcttgactttgatgatttttaaagagtacagggcagttgttttttagagtatccttcaactgggtttgtatgttttcttaggattggatttagatgacatatttttagcaagaataacccatagatcacattagcatctcctccatatatcatatcaggagacacattacatcagtttgtctgatattagcttcaatcacttggt

SEQ ID NO: 42848 - DNA, 1044 bp, Homo sapiens
aatatctttaattggtggtattattctaatgtacaagatgaaaacagttacacaactacgtaatgacagagctgggatttagaagtttgagtgcaaggaaggtgtttctgccatgctaaactactgcccaagattaaaagaaaaaagtggcggccacgtgaggtggcttacacctgtaatcccagcagtttgggaggccaagacaggtggatcacgaggtcaggagatcgagaccatcctggctaacgtggtgaaaccccatctatactaaaaatacaaaaaattagctgggcgtggtggcgggcgcctgtagtcccagctactcgggaggctgaggcaggagaatggcgtgaacccgggaggtggagcttgcagtgagccgatatcacgccactgcactccaccctgggcgacagagcgagactctgtctcaaaaaagaaaaaaaagtggcaatgcgtgatagtgacagagaactagtaaaataaaaattcaccatgacaagtaggctttaatgactgtcattcaaaacaattttttaatgagttaaaattatgtagtaatgtacagtatcgacaattattcttcaatcatggttatggctagctttagagcagtgtggcaattattctttttatttaattttgttgtggtcataaaagtaaaaatatgctcattgtagagaatttgaaaaataagatgcaaaaaagaaaatatgtcaaactgtccagagataacttgttaaaattttgatatatttctgtctagtctttttaaaacttatttattgtataaaagttgatacaagtttgtattctattttaaaatttacattaaattgtgggattttttccattattgtggttttattaatgtgaactggagatgttattagaaaagacaaatggattcattgtttgattactgctataatcaatttttctaaaatcaaaatcaccattttttactgtgtgtgttcagtgtgtaattggtttacacaattgaattttcccacaatgcaaataaattcattaataatatttgtt

SEQ ID NO: 42849 - DNA, 1025 bp, Homo sapiens
ggacttaacatataattactgtgtttatctgtgattcagtaatgtggcttatttgattaaaattatatttacaatgtgagtatcaaatgggattgtttgagctcatagagtaaatttgtttgaactattgagatcaccgagatggtatagctaatagtaaaattactgctgtttatataattctgtattgtcagatactataaaatcttaagttgttgctctttataattatctgaatgtaccatcttagatttaacatctgaagatctgaagaaactttaatgcttatttttaaactacagtgtaacaattttatgctctcctcagaagaaaattataatttaaatcaatggattggcagctgctttaagggatttattagcattgtgtctaatacatacataattacatcaaaattcagcatatctaaaacttgagtttatttctgagaaacttttggcaagtaagactgtgaacacaaggggtttagcagattccccatatgtaagctctgtatttaacactaattgaaacttatgtgtagaagatggtctgtcacaccaccagagttttgtagttttctatagaaactcagtctactatagtaagagtgctttctcctgttcgtattcattcaaggaagaagcatatattgaaccttcttcatttgccaaatgctaagtcaagtattggtaatactgaggtcttacaacctgatgcttgttctttagtagttatgtatttacttgttttgatttttaaattgtgtccactctgttttcccacatctgccattgtttattccatcctgttctaaccattatagcagattggtaccattgaaagaatagcaaattgagaatcagaagacttggtctctctttgtctgggtctgccactcatccctctgtaattctagaaaaattatataacttctctgaacctgattattcatctgaaaatgaggagattggaccagttgatcataagacctcatctagctccaaaattttgaaaattaaatt

SEQ ID NO: 42850 - DNA, 1048 bp, Homo sapiens
ttggccctttcttctgttaaccaaaccataattttgtttaatggcaagttgcctaaccccagggcatgaatggttaatcatgattagtctaaaccagtcattattatcctttggcaaattatttcactttaccttcctcccatgtgacacaattctggccaatgagacataaagaaagtctactggaggacatttgacaaaaatgtcttccctgatgacagtagagagatgctgaaagaattctttgcctccctgctttgggtgctctatataaggatgtgatgcttagagttggtattggcaagtttcaaaaatgagaaggcggccaagaaaattgcagaaagttaacctagcaccatgatttggttgaactctgaaacaatcttggagctgtctacttgcaaaattttgttacatgagctaattaatctactgttagttaggttttctgttacttggagctgaaaatatcctaacaaatagtgaatttgtggaaagctattttttattagattctgtatttctgtgacagctctgaaaactgttcttttcctttgtcttagctaatcagtaatgaatatgtgcattggaccgtgaagcaaaaatagagttgagattaattcataagttaatgcaataacatatcttcctcaggaattcaaaggacttcgaaaatatttgttaactttttttttatcccccctcccacagggtttctttatgttaaatattctgacaatctctcccatttgcttagaggataaaccaaggaaggaagagaaaagatgtgattcagacatatagataaaatttttttacttcccctttagctgttctattttgagttttaaagatgttaaagaagaaatagagttgaaggattatcattgtaacttcctaaaacaattataaaaataacgagttggcagtgataattgttgtatcattcttattttctgtttttttcagataaatgttctttcaaaatatgttaatgattaacgtttactgatctgcttgattaatttttctttgtgagtcagtttct

SEQ ID NO: 42851 - DNA, 1373 bp, Homo sapiens
caaagaaaacaagacagtttgttcttaaagttaaactaatggggaaaaaaaacaggacagggaggtatctcaagttcatttgagccatttttaaaattttggtagctggtttctgtttttcttctttttaaaatagtaacaacttaggattttgtgtgccaccagcttccattccatttcataaaagcttaatctagcaagaattggtgagccctagtagaagttagaaagaaatgttgaagtgtgtatgtgtgtgtgtgtgtgtgtgtgtgtgtgtgttggcatcagaatcaccttggacactttttaaaacaatgcccttggctgggcgcggtggctcacgcctgtaatcccagcactttgggaggccgaggcgggcggatcacgaggtcaggagatcgagaccatcctggctaatgcgatgaaaccccgtctctactaaaaatacaaaaaaattagccaggcttggtagtgggctcctgtagtcccagctactggggaggctgaggtagaattgcatgaacccgggatgcggagcttgcagtgagctgagatcgtgccactgcactgcagcctgggcgacagagcaagattccatctcaaaaaaaaaaaaaaaaaagaaaaaaaaacaccatgccctcaccctaaggttctcctctgtctgctcttaaagaacagaaaatagaaaacattcctgacattgagaattactggtccatagtattaatattttgttttaaaatttgtgaacatatttaacttttaaaatgttttatatccaacagtctgtttggggggaagaaatcctctggtaacagttcacatgtatactcacgatatttgtcagtgagacatgtagatctcattgtaggaaatcattccactcattgagaaggggcttactgttcttcattttctatagtaacttgtttttgttctgtttatatgttttacagacatttaatgttattaaatgactttctcatttaagtctcaaaacacaaaaagtgttttttagattttttttttcacagttgttatgatcatcatcattgtgcctgttgtcaggacattgacagctgactatcaactatataacaaaaaaatgttattggcttcctccagtcttcagaacatgggttctgaattggtgatgaacttacaataaatcttataaaaaatgatatttttttctagaaaagccatgagaaaaggatgcctaatcaattataccactttcagagaagacttctataatagagaaggaatgagaataagttttcagctacaataacacattttatattcattacacttctgcggagtttccagagtgctggtgtcattcatttaacagttgtgtatcgattccc

SEQ ID NO: 42852 - DNA, 1020 bp, Homo sapiens
gtctgcaaaaaaaaaaaaaaaaaaacctcagccgaactttctgaatgacttcctccagaaataatccaatttatgttcatcccttagtgagaattaaataaaagtattaatattgtatgtaaaattttaaagaatcagaaagatggaaggtgacattatcttagttttggaaaaatgagtgatctcggagaaaatctccaaggatcttgattttagagcttctggtggctataggcacttttaaggttgaactcagtcactttgctaagtttaagagctatatcttatttctagaaagtatgaattggagcaattaaacttattttcagcagggtatgtgacaagtaggaaaaatctggtctgtaaagcatgttgcctatttatttatttattcattcattcattcagacaggatcttgctctgatacttaggctggagtgcagtggtgcagtcatggctcactgcagcctggacttcctgggctcaagcaatccttctgcctcagcctcccgagtagctgggactgctggcatgcacaaccatgctgagctaatttttttttccttttttacattttttgtagagatgagatctcactgtattgcccaggtttgtccttttttggtcctcacaactctttttagaagtttacagtccaaatataaagtttagtgttagaaataagaagtgtacatttaataatgtgtatgctaggaaaaaaatgagaattcatgttatttctcctttaccacaagtaggaaaatccagctacgtgtaggatgttaagttaaaagtatattcctagccaggcatggtggtgtgagatggaagaatctcttgagcccaggagtttgaatccagcctgggcaatgtagcaagactccatctctaaaaacaaaaaattactcctaataggtcactttctttttagagcagtcattgtcatcagtcatactactagtgatatgctgatagctaattaatatttattgagcacttactgtggggccaagtgctct

SEQ ID NO: 42853 - DNA, 1036 bp, Homo sapiens
gaagtgtcggtcgatccagtggctcttaagagtgaatagctttatggaatcaagtatgtccctgagtagcaagattaggcctcaccaaagaagaaattaacctgcactttcaaaaagtaccatgtataggaatgaaacattgaggtcccactttattctgtctttagtacatggttttacttattttggggatggatagaaatatatttttgctagttctaggcttgaatcatgggctccttggctttcctagcatcccaaagcagtcaacagtgatttcttaagcaatttgatctgtacctttacttgtgaaaggtatgctatataattcagcaagtaccaacttgtgtagctgcagaataaccaagtggctatccagtcaagtaaatacagtttgcttacatacttcaacagtttcataaaacgattcccctgagtgacacaagaacataaaatgttaatatcactaatatagcctgttaaatcttttgtggagacaggtgcaaatcagaagattgacaaggaagaacttgagcttgctaaataagacttcctaaatttaaaagctctagttttgcttagtgtgaattctggcactttaaaaagattaagcaagtgaaattctgctgccctccaccatttatttttacagtgctttgtaatttttttcatcagttccttaaatgttatttggaggaaactaagttcttgacctcagtaattttatttttgtttttccctaaatgtttccctactagtctttttggaaaacatgtttgttttaatttcatcttccctcactttatttaggtagaatttttcccccttcatttctgaaattttttgctcaccgccatgtttaaatggggttgaatcatagcgagccatttgctcttgccaaagtgagatagatgtactgaggagataattgaaaagtcagactctgtactgtggggctttaatcggagcactgctggaaatgattgcagagaatgtagtgcttcatatatccatgaccaagattgacatgttgctc

SEQ ID NO: 42854 - DNA, 1046 bp, Homo sapiens
gtttttccatttatttttcttagctaatgtaactttattcttcacttttttttagccctagacttcctagattttctgtggcattctgtaggacattgtattgcttggaaaaaaaaagatcaaaatcattctggggcaaatgctctattatccttatttatgacaagagaataatgaaattcataagaaattaataacattcagatattgctataaatgtacttgagtcattttcatttggggatagtaataatggctgtggcagctttaatggagaaacctgtgttggcctctttttctggcattaggatctcttgtcatagaactattggtaaagtacaggtttgatagcagagttcctgaattcagcatatcatcagaatttccatttaccttttgtcttttctttttattgtattttttaacctttttgtttctattcctacctcccatgagtaacattgatttctgctgaagttagaatttgtgttaagaattgactttaaacttctgaaatagttgaatattagaagtggcttcagttgccatgaaatgattgcttttctttttctttttttttccttaaataaaaataatgcagccttatatatgtctcttcccctcaagaatgtgaatttaggctgggcatagtgactcacgcctgtaatcccagacctttgggaggctgacacgggaagattgcttgagcccaggaatttcagaccagcctgggcaacacaggaagactccatctctacttaaaatatttttgttttttagccaggtgtggtggtatgtgcctgtagtcccagctacttgggaggctgaggtgggaggatcacttgaacccaggagtttggggtgcagtgagctatgattgcgacactgcactccagcctgggcaacagagcaagaccctgtctcaaaaaaaaaaaaaaaaaaagaatgtgaatttagctccaattccaaatgactaactcttaggccagtcatagccaatgaaatcatctgacggtagcttctgtagcccttaacctaaggagtca

SEQ ID NO: 42855 - DNA, 1596 bp, Homo sapiens
tgattaaattagaggaggcgtgtagaataaatcccaatcccattgcaactggcagagctttataaatctttataaattcagttacaacaaaggagaggatcctacaccattagagccatgccatcaggtgtttgcaagtgacagctgtagtgtgttgcctcaaataataccaagttataaataataccaagtaattatcaactcactcccaaatttaataagatatcaaagtccaaaaggttacttaggagtagtcttccgtgggggaagataaatttattaaagagtcatgtactgatctttttcttgggattttttttcctttcccagaaaaaaaaattattttggtgactgatcaattgtaaacaattttcttccttacttacaaatcatccgttcagaaaaataaaagtggacttcctttcctaagcattacaattagcctgggcaagaggtgttatgattgtcttattctttaagccggcttactttttggatttgtgtgaaatgtcttttgaaaagaaagtagatagtatagtattaattaactactttgtatagtcttctgcataatttagagttgaaaataatgtaacattttcctgtgaacagattcctttatgcgtacatactttataaatatacatacatacacatacacatacatttttaaaatgctctttttaaagagattcttatcttgctcccactccaaaagctatgtacagttgagttattagcctcagaggaagagtacaggaaagcgaagatgaggacctccttttcttgtgttggtcttgggaacaaacagtattccgtctttcaaatatggcatatttctaaacagtttgggaaagatgttagaattttttaaaagtcagctcttttataaattggaagtactcagtagtcagaaattaagatcccctctgatagagatagattctcaaaaccaaaattggactgaaaattagattgagaagaaagatacaacttcctccatagccaataaaatctgtctttccaagtctgcttattaatgctgtgaatcgctccttctgtttgtgaaaacatctcctggactggaaatgtggtgctgtaaccagctgagccgaaagttggagaatgttaaatatcttatatgggacttacgataaaatgtattgatgttagtgattgtcaaaataggtttatcatttaaaaaactaggaaattactaagtataaagaagaaaaaccagtattaattaagtgatgagacctgttcattttgttttccctgacttatttccattaccaaacatagtaaaggccagaaaagattaaaaaaaaaattaacacagccattccattgttttttaccacatggagaaaggaccaggctggaagcatatgtccccccacccttatttatattcctttgagcattgccgttttctagacagacaatccgaaaataattgtgttgataggtctgtttaagcctgaactctgggtgtaaaatgttatccagaagctatagggagctgccttgctcaggtcattggaaatttcaaccctaagactcattggaatttctaagtccgttatgcaccat

SEQ ID NO: 42856 - DNA, 1027 bp, Homo sapiens
gtcctttgagtgtggcccttaagtaacgtttctttgtgttctcaaaacaggaaagcatgaggtgcagtgataaggtaaggaatcggcctttccttggtcagtcctccagagaattaactcaaaaggatcaaaatgcaggacactacccttgatatatttgtcactaccttctggtgggaagacagcagtaagtaaagaaggcttggccctaaacacagatgagagccagctgctcccaggtcaagcacatgtggagactgtactacagagcttggaagttgctgcgttaggagcttctgccgccaaaggaagatgaccgagcatctaatagggaaatggctgtgtgcccatgctcctgtaacttctcatataaatgacgactgcagagtccctagaaacggggagggggggggcgtggggggggttattttccctgtaaatgaaggcaacattggtttatcactaactgttcagattctgaaggtattaatatgactggaaagaccatctgaggcttgtacagttctggcgtaagtcaaaatcctggttgatgacattccttctttagcaccacgtatgctacatcttcctttgccttttacattcttagagaaaaggaagaggggactggagacttgggctttctggggcatagggcagttggggcagcagaggatgatgccaccatccttactctacagcttcactattgtcttacggggacttttttcctgtgggctttcacccagcaaaagcagcagccgtcaatcatatccttgccagagagattcttaatataggagaaactgtaataaggagaaactacgtagaagtagcctgcctagcactacgttcgtaagttttaatggttggcaaaccccgagaggtggttaggacccttggcgatgtacatagcagcattgtacagctgccctctaaacttgggacatagaatggagagtccaggaggaattgggaatcctggctttcatttcctgatgaccaatgacttctgcataatattgca

SEQ ID NO: 42857 - DNA, 1034 bp, Homo sapiens
gtcttctaggttgtttgcattttcttacaaattttagaataagctagtcagtttctgcaataaaacctgctgggattttgattgggattaatatatggaattgacatcttaatattgagtcttctgatccatggatggatggtatatgtctccatttaattcttcaattgatctcagcaattgtgtgtgtgtgtgtgtatagattttagtgtctaggtttatatgtctttggtcagatttctattttaggccacttcaagttgtgctacagttcatggaatgttgatgttcattaaaaaatgcattctttttctcttggtgttttgttttatatagtttgtgttgctatgctggttcactagtcttttctgctattcctaatctcttgctaatcctatctaatattatttttatcttagattatacttttcaatctaagatacagaagcttatcttctttatctggaagtttgctttgggtctttttcatgtctctgcttacatgttttaacttttcctgtagctttgtgaacaaatggaatataggtattataacagttttaatgtccttgtgtactaattttatcatctgtgtcatttctgggtttccattgattaatttttttttccctcttcctttacatgccttgtagtttttttttttttttctttttgagacagagtctagctctcttgcccaggctggagcgcagtagtgtgatctctgctcactgcaacctctgcctcccaggctcaggtgatcctccccacttagcctcccaagttgctgagactatagttgtgtgccactgcgcccggctaattttcatatatatttttaggttttgctatgttgctcaggctggtcttgaattcctggcctcaagcaatccgcaggcctcagcctgtgagccaccacacccgggcaccttgtagtttttgagttgatgctagacattgtcagttttatcttgatggtggttggttttggatatttttgtattccactattcttgagctttgttctgagatgt

SEQ ID NO: 42858 - DNA, 1038 bp, Homo sapiens
ggcatacaatacattgttattaactgtagtcaccatgttgtgcaatgggtttcttgaacttacttctcttgtctaactgaagtattgtatcctttgaccaacatcttctcaacccgtcctctcaccctgagcccctggtaactactgctctactttatgcttctatgagtttgactttcttagattctacatgtaagggagataatgccaatattcatctttctgtgtctggctgatttcacttaacataatgtcctccaggttcatatgtgttgttgcaaatgacaagagttccttttatttttgagacagggtcgcactctgttgtccaggctggagtaaatggtgcagtcggctcactgtagcctcgacttactgagctcaggcgatcctcccacctcagtctctctgctatctgggaccacagatacttttttgtggagatgggttttcaccaggttgcccaggctggtttcaaacccctgggctcaagtgatctacccacctcaggctcccaaagtggtgggattacaggtgtgagccaccatgcccaaacagatttccttctttttaaatgctgaatggtattccattgtgcttataccacattttctttatccattcgtctgttgatggacacttacgctgcagtgatcatgggagtgcagatatctttttgacatattgacttcaattccttttgatatagaccctgtagtgagattgttggatcatatggtagttctattttttaattttttgaggaaactccatactattttccacagtggctgtattttccatctttattgaggtatagtttacgtacagtaaaatgccatattttcagagtgcagtgcaatgagttttggcaaaggtatatatcactgaatgtgttaccatcaccccagagctctctcctgcctttttgcggtcagttctctctcacatcctgctccaagcaactgctgatttgaattctggcactactgattagttttccctattccggaacttcgtacattattccctcttttg

SEQ ID NO: 42859 - DNA, 1056 bp, Homo sapiens
ataattgttggagcctggcctcatgctgttcccagtctaaatatgtagggcatgtattttgcaagcctttctcttattctcctcagtcacagtattttgtaatgcacagagaaactaatgtctaatttagatgtagtagttcaactataacttaggtagaaggatgggagaagtgtggagaaaagccaataattgtagtaaaatgttggtttaagcttttggactcccagtatgtcttttcatttggcaaactgcctttggaacattttgactgagtagttactcccagggaacacaggcatttcatttgtggcctctttattcattttattcatgcttctgctgggatttcgtgaatatgactataatgaaactggacttcttagttcttttcttttgggtacaagcataggttaagcagtaaaaacctaaagagaacacaaattaaatgatttttatgctgctattttcttgatgtgcattttattccataaagtgttgctctgagactttatatatatcttaagaatttggaggccgggcacagtggctcatgcctgtaatcccagcactttgagaggccaaggtgggcagatcacgaggtcaggagatcgagaccatcctggccaacatggtgaccaaaatacaaaaattagctgggcatggtggtgcgtgcctgtaattccagctactcaggaggctgaggcaggagaatctcttgaacttgggaggcagaggttgcagtgaggtgagatcttgtatctaccaattttgttgcattattttcaaaattctaatagaatatttgaaaaaatatatttgtatattttcctggattttgtatgtaaacagtcagtgtctgcagttaaggcagtgttgtctcctttttgtaaagattcaacagttatttgccctctttttgtttatttgtttttaatttttgcatagctgggaacctatcatataacttgaatggtagaggcaatagtgtgagtcttgcccttaatggaaatggttctaaaatgtcatcaagtatgatatttccttttcattttt

SEQ ID NO: 42860 - DNA, 1049 bp, Homo sapiens
tgcatcttcctcgtgaatactttccaaactattagccctttggtcagatatgaagctgtgtacaccacaaggcttggcaggaaacaactactgtgggactgtgagctgaatgaagatttcagaagttggaaacttctcagcagtgttggagctcagaccagccagtgtggggaaagcttgctgaacatactgtgctttcagctgtgacctcagaaaggtcacaccttatgagtagggctattctaggagtagaagacaggctactatagatctcatacagcaaagccccaaaccaagcctctattttatcatcttgatccacctgtaaatttattgtctgatagaacaaaactctctctaaagtaagacaacataattcagtttctcaataacaaagcacctgcaatgtctagcatagaattattatgcttgttaaaaagcaggaaaatgtgactcttaaccagaatgaaaaagttgatagaaataaatatctaaaatgaaaaatccaccagggagtggtggctcacgcctgtaatctcagcactttgggaggctgaggtaggtggatcatttgagggcaggagttcaagaccagcctgaccaaaatggtgaaaccctgtctctactaaaaatacaaaaaaattagctgggcgtggtggcaggcacctgtaatcccagctactcaggaagctgaggcagcagaattgcttgaacctaggaggtggaggttgcagtgagccaagattgtgcctctgcactgcagcctgggtgacagtgtgagactcaatctcaaataaataaataaataaataaataaaatgaaaaattcaccagatggatttagctgcagataacatactgtggaagaaaggatcagtgaatttgaggatagatcaatgtaaaccatccaaatcaaagcacagagaaaaaatagacaaaaggaaaatgaacaaagctataatatcttcaaggatattatgcagcttaacaattatgtggtttacaggtacagaaggagagaggacagagagattggggtagaaaaatat

SEQ ID NO: 42861 - DNA, 1210 bp, Homo sapiens
atgtcaatctaagaatgctgaaaagaaacaaaaattgtcaatctagaattttgtgttaccgaaaatattctttaaaatgaagctgaaatagagacattttcaaatgaactaaaacttaaagaatttgtcaccactagactttcacttaaagaaatgttatagaaagtttttcagccatgcgcgatggctcatgcctgtaatgccagcactttgggaacccgaggcgggtggatcacgaggtcaggagttcaagaccagcctggccaagatggtgaaaccctgtctctatgaaaaatacaaaagaattaactgggtgtggtgtctggcgcctgtaatcccagctactccggaagctgaggcagagaattgcttgaactggggaggtggaggttgtagtgagctgcgatcgcgccactgcactccagcctgggcggcagagtgagactccatctcaaaaaaaaaaaaaaaagagtttttcaggctgaaggaaaataataccagatggtaacttagatctacagaaaaaagtaaatagggccagaaatggtgaatatgtggacaaaaaaaaaaaatgcttttcccccccacatttcttgatttatttttattaaaagaatttttaaaatttctaagtcaaaaacaatcatagtgtatgtgggttttataatatattttggaaggcaatatatgacaataattagacaaaagatgggagtagggtaaatgatactatgctgttgtgaatttcttatataattcatgaagaggtataatgtttagggtagcctatgataagttaaggatgcatatttcaatccctagagcaaacattaaaattctaagatagatacgtagctgagaagccagttgaggggataaaattgaacagtgaataaatatttgattaatccagaagaaaggaaaggaggaaaaagaacaaggaagaaagaaacaataaaaaacaaagataggatgaatagaacccaaaagcaagatgatagacttagcaccaaccatatcaataattacattagacataaatcgaccagatactccagttgaaagacagagatcatactggatttaaaaaaaaccaagacccaaccatgctgtttcaagagatgcattttatgatattttattactttaaaaatttttaaataattttaaaattgtagaaaagttgtgagaataagaatagtacaaagag

SEQ ID NO: 42862 - DNA, 1026 bp, Homo sapiens
taaaaatagctagtattacacaaatacatcagacatttttagaatatataaatgtaattatttgtattatactactatgacatttagaacttgaatacatcaaggcctagatagtatgttatggactatgtaattttacttatggcaaggtcataaaatactttgtgaataagtttttatgacccccccccatctttggcttttacttatgttctgaactgaaaacaattattaaatctgttaggatcctatttagaatactaccatgaggaattagttatgataataaacaaagtaagatatcatgtcttccctaactctgcttactttgtaattgtcagatgtatataattcctgtacggctgaaaacgaaacccattatttcataataaagatgattgtaatgaactaagcaactttaaattccatcagttattaacaggtgaaatttacagattaaaaataggtttttctggcatattaaatgagttatacgtttcatacatgtagtttcaaatgagtgatttggccacatgttctcactcataggtgggaattgaacaatgagaacacttgttcacaggaaggggaacatcacacaccagagcctgttgtggggtggggggatgggggagggatagcattaggagatatacctaatgtaaatgacgagttaatgggtgcagcacaccaacatgtcacatgtatacatatgtaacaaacctgcacgttgtgcacatgtaccctagaacttaaagtataataaaaataaaataaaataaaataaaataaaataaaataaaataaaataaaataaaatgagtgatttggggattctgtctttaagttacggaatgagttgtttaaacagctttattgaaatataatttacatgctataaagtttacctatttaaagtatagatttcagtggttttttaattatatttatggagttgtacaaccatcacaatcatatcattttagaacattttcatctatgccaaaagaaaccttgtatctatta

SEQ ID NO: 42863 - DNA, 1046 bp, Homo sapiens
tctgagacatgttgaatggcccaagaaaggttttggagattgatgatgagttgatccttggaggatttgtagaggtagaggagatgggaaatggcactccaggcagatggaaaggctcatgagatagtatttgcaagtggcaaaaaaggaatgaatagacaaggatattcagggataggtaagaagaagagtttagcataaatgaaggtttattttgtggatctgatgaaaagcttggataggtagatttgggtgcaggttgtgaaaacctgttagggttatctaagtggtttgtgatttatctttacagtaatagtttctgaacctggttacacatttgacttatctagggattgattcttagctccatcttacaccttatgacagtcactgtggataaggactacattctgtttttcagctcctaaggtgattctgatatatttgtttaggatcttgtatttggaagtctttgtgttgggtaagtggttctcaatgtatacctcttggaccatcatcagcattatgtgggaacatattaaaaaatgcagatttgtatccccacctttgattgactgaaacaagaactctgggggcgggaccttcaggtgattcttatgcacactgaagtttgaggacctttgctgtaggtaatatgggaactttggagatttatattggagtgtgatgagatgaaggaagattaatgtggtagcaatgaaaaggactgagtagagagggtagagactaagacaggcaaactattttgtaggctagtggagagtctatgcatatattacttgaggtattgtttagtagagaagtaaacaagacaggctttggtgtatgctaaaggaatacaaagaagggagaagaagatttctaaaccttttcagagtcttttagaaaatctgtaagatgatatggtccatctgccagcctagtttccagtatgacagatattttaatgatggtttagtgttaaattattgggaccaactatgtactgagtactggggaatagaaaaaaatacatgaacaccaga

SEQ ID NO: 42864 - DNA, 1054 bp, Homo sapiens
agcagtggaacgatcttggctcactgcaacctctgactccctggttcaagcgattatcctgcctcagcctcccgagtagctgggattacaggcacgcaccaccatgcccagctaatttttttatttgtactagagacggggtttcaccatattggctaggatggtcttgatctcctgacctcgtgatccacccgcctcggcctcccaaagtgctgggattgcaggcgtgagccatcgtgcccggctgcaagatcctaatatttcttagaaggagagaaatcctttactcacaggaactgtacacacatgttcacacatatgcacaagcatgcctgctatccataagcatttgtcatctttcagatgatggaagctgtttgagacccttaagggactgtagtcatgactcctgtcttttcagtatccctttccccttatcactgtgatcctactgcatttatggaaaaactgctggcgggccatcatgtttgacccagagctgaagttcagaacttccttgttgattgtcagtgttagtaggaatgaatttagcccattatagtgattggcaattagaatggtaccaacattatcagttaaatcctgtctgtttgcttaactcagttttgggtgctaaggcagctgtattctccatttcagtaacttctgaatattaccattcaggtgctctgcatcaaaaagccccacattggctgggttttgtggctcatacctgtaatcccagcactttgggaggccaaggcaggaggattgcttgagcctaggagttcaagacctacctgggcaatatagcaagatcccatctctaaaaaatttttttaaaattagccaggtatgatggtgcacacctgtagtccttgctgcttgggaggctgaggtaggaaggtagcttgagcccaggagtttgccgtcagaaaagtcccacatcagttactaaagtctaacagttctacctctctctgtctctaaaatcctcttaagtctctctgtctctctctaagaccacagctttagttcagggcactggtctctc

SEQ ID NO: 42865 - DNA, 1034 bp, Homo sapiens
aatttaaaatgttgaggttatggaaagtttatattaaaatcatacaacattgatttagtaataaagctttaatgatgtatgtagagcaaatatcaataaaacaaaatttgtaattttatattagtatgtaggcaatgattcatattaaatatggaagaggagggaaaagatctggaataataatcataaaaccaataataaatatttgagtaaagatagagatgttgtagaaattgtaaaacgttaaatttttccctttttgtggtttctctatttagatcatggtaaatggatataagtattatcaaaaaatattgatataattttttattttctgaatatgatttttatttgtctttggtagcaaatgtaccacattaaggtggtatttggattataatttagggctagtaaacaggaaggaattgccttaatccaaatatacagtagtcttcccttatttgtggggataatttccaggctcctcagtggatgccagaaactgcagattgtaccaaaccttatatacaccatattttttcctatacataactatgataaactttaacttataaattaggcacagtaagagattaataacaatgatagtagtatgctataataaaagttatgtgaatatgcgcttgggaactctttcatgcacacactgtcttgctctctctcaaaatattgtactatattgaaggtatgtactgtactgtgggtaactgaaaacatggaaattgaaactgtggataaggggggactatccatttacctcacttagtaaatatttgagtgcctactgtgagccagacactgtgttaggtgctgggattataagcaagatatacatgatctgaaagataaactatgtccattatttgcaaaaacaagttacatgtgagtgttctttgctgtctgtagataacaaatatgtgtatagtgatttactgctcatagagctcttttgtgcgtcttattgcctttaattccacgtaacaagctgagggaaacagagactgagagtaatt

SEQ ID NO: 42866 - DNA, 1053 bp, Homo sapiens
aatcttatcctggtatcttttccttccagcctgttttctctttaaagatttcttttactgttgcaagaagctatgtgttcttgtgtgctactgaggatgccaggatttactgaaaattttttgtttctagtttttgggttattattattttttttttgagacagagtcttgccctgttgcccaggctggagcacagtgcagctcactgcagtctcaaactcttcggctcaagcaatcctcctgcctcaggctccttgagtagttgggactacaggggtgtgtcaccacacccatttaatttttattttttgtagagatggggttttgctttcttgcccagtctgatcttgaactcctgtcctcaagtgatcctcctgttttggcctcccaaagtactgggattacaggcatgagccaccgtgccaggcctctaatttcttgaaatgtatcttttcctcactttttcttttccctgtttactcattctcaaatgagaggaaatctacctagaccttgtgtctgctgactgttggaatatgaagactgccttttagcctattatttaaacatatgtgctaatgaaatcattttctgagttttactgctagtaatcaatttcatgtacacatatgccagctcaactccttgttaccatataatgcaaatctgtttttctgagatggaacttcaacctgtatcactatctggcttcctgaaacacataaaataataaatgaattactaaggtaaacataaatcgttttccatgattatttttgtatttacagtattttacaaaagatgattctctttgtcagaattccattgttagtcctctccacttcttagtagattgtgtaattttaagtactatttctaatggatgcaggacaagaagtgttcaggtgggatggtgagttcgggagggccagctgcctctcaggccagcaactatgtggtcgtgaacggttgctcactttggtttggagaatacagacagtgcaagagtgggaaaggctttttgtacctacttccaagtaagcagattacttt

SEQ ID NO: 42867 - DNA, 1031 bp, Homo sapiens
tgcacttattatagcatattatattagactctgcatggtagctgaggctggaaatattggtagggcccacggcacaacctatttctaaagtaccttgcgttaaaaatagaatgttcagcttgaactgcaagtgatcatgatggcagcctggttctatatggagattgcagagctctgtgtgctcacatctgatttccagcttgtaattttggtgtggatgaaaatatgcattaagttacttttggcttctccacaattttaaactggaaaagcccatattacagtaatatatgatagtatgtatgaatgcgacatgaatattgtaatagtcataatataggatgttcattcctagaattgtgatgacatctactgaattgcagccagtaatttgcatattcatgcccacttagctcaaataagtccctgtttgtttgcacattaatgtctgatttcagcaccagctaactcatttacatatcctgttcagttggttagtgatgttcatatgtggaatattggtgcagctctgtttgggctttgagtagcttggggtttagtagaaggatcacctgttactcatcctagcttttctaggcaaggcactttacttttctgagctctaggttattcatctgtgtaatgaagttaatgctggttagttcttagggctgtcatatcagttgacacactggaggttatggtgtacagtcaacatttctaggccaactatattctggggcctgttcctggaacattttctgcgtgcagaggggttctagatgctgtagaagataagacatgcaaacagtcacagtttcagtgaatattagaagtactttggggagtacagaagagaaaacacttaacattttcaagggaagtcataggaggtattacaaaggtggaattcttacgccgaactggtaagatgagttgaccacactgaacaaaggaagggaactcgcggcaagtagggagaagatgtggatgaacacacagatgtttgagaatctcatggaactggaaat

SEQ ID NO: 42868 - DNA, 1020 bp, Homo sapiens
tagtcccagctactcgggaggctgaggcaggagagtggtgtgaatctgggaggtggagcttgcagtgagccgagatcatgctactgcactccagcctaggcgacagagcgagactccgtctcaaaaacaaacaaacaaacaaacaaaaataaaatgtcccttgcttctacccaggttctaactgccatcatctcttggttgttcctgcttctatctctaatccctccaaaccattctttataccagaactagagtgagttaaaggtatttaataatttcgtatgtactagtactaaaccccatgtcctcaatatgcctaataaagttctgcatgatttagccaccactacgtgcagcagcttcttggcctcttttgaaaatcataaccttgtgggcttctcagaacatgctgtgcttgttcaggccttggaggctccttgcatgctgctgtctatacatggaattggcttcctttcatattcttgataattaatgccatctttaagataacgttctctgtataataagaattttatatcgtgcttattaagtacttaccatgtgtcaatcagtattctaaaacattttaccggtagtatgtcttcttcttttattctcttaaccattattttcttgggggagctttttgaaaaaaaaaaaaaaaattaccccagaccaggtcaacttccttctttgtagcacatggcatacttacaattattcagttggcatacttagtaatttaattatttgctgttgtttaaaatgtgtgtttatcattcattttaagttccttgcagtcagggaccaagtcagtatataccaatcactggtatagtaagcacctaataaataatcatgcttattaaaagtaaaagaagttcaatattattaaacaaatgcctgatttagacagtagcttaggtattttcccttcaagtttagagcttttttccataagcggataatatttggggatatttaggaatgtatcatagattaaattatattaagaaggaa

SEQ ID NO: 42869 - DNA, 1040 bp, Homo sapiens
atgatttcttttagatggatgtttttaaaagaccataaagtaagtagatattacagttttccttgggtaatctgttctagtgtctcacagtccttattaactttctcaacttaaaaaaaataaatgtgttaattaacatcctacattagtcgatatacctatcttgcttatttggtactctaaaaaaatttcctattaacatgaagttacaagatttcattaagtttttaaattaaatctcaaatcttttgttactaagtagcaacatgactgcttttcttcttaaaattcatctgttttataaactgtcagcatcatagtatccttctggataatttgtgagtgggcagcatctgtacttttcagaagggaagaatagatatttaataatttactcaaggttgtaccgttgcagaatcagaaattagaatctcagtctgttgagatgtgctctcaagataaaatacatgtgccatgcaaatagggcatagctttcttgtctagcaatggttggcccagtatgtggcccaacatatatttcctgtagaaggaatgagaatcactcctatgttgatgaccatagctgaacatgactggaagaattttagcatgaccagttgactttttttcctatcaccactggctagttctgaagtataaagtgttaagttataaactgcagcgttataattcctcttctggtaaaatgaaaaatcagtactgtaatcccagcactttgggaggccgaggcaggtggaccacctaaggtcaggagttcaaaaccagctgtgccagcatggtgaaaccttgtgtctactaaaaatacaaaattaactgggcatggtagtgcatgcctgtaatccagctactcaggaggccaaggcaggagaatcacttgaacctggaaggcagaggttgcagtgaaccaagatcgcgccattgcactctcagcctgggcaacaagagcaaaactccgtctcaaaaaaaagaaaagaaaagaaaagaaaaatcagtaacaaatacacagattttttttttat

SEQ ID NO: 42870 - DNA, 1769 bp, Homo sapiens
ggactacaggcgcatgccaccgcgcccagctaattttatatttttagtagagacggagtttcactgtgttagccagcattgtctcaatctgctgacctcatgatccgcctttctcagccttccaaagtgctgggattacaggcgtgagccactgtgcacggcctggaacatctttatacttaaaacaagtaactttctttttctccatgtaatttctgataaatccactcctggaatgaatgttttagaaaatttgaccaagaggtgcttttgagcagcattagataaccccttcagtatctaaatgattgatgagaggagagactccttaatctagatttagagactttccatactggcagcaagatgtaccagagttcttaagaggagactaatgaaaatataaacatttgtacagaagaataggttaacattttttgagttgattacatagcaaggaaaacttgaggttttatacttaggagtgctaggaactaggcattgtaatgagaaaaatctgggccctgcaggagaatgtgaattatttttgatccagtactttatgctcattgtactatgataaatgatatcatttcatataagggcattttaatctgatgcattagactaaggatagtctgaacttttttgttgctaccaccacttcagtctttatcattaatgagaagctcagattgataaagtaatattaaactattattcttaatatattaatgtcaaaataacaattttttagagcacttttttgtatacatctctacaagatagtttattttgcttactagctgctcagcttttttatatgtggaatatggatttacttgattgttttagattattatactgagaggaggataaagaactggaccaatattgtttgtgcaattagttaatgctgatgcacagtgcagtatattgcaagaacttcaggacatacttttttaggtgggtttgtaaaacctgtatatcttccaaccatggagattactccaatcagtagcccaagtgtgcatacacacacacacacacacacacgtatacatatatgtgtaattatgtataaatatatgcacatatatacatatatatacacgtgtatatatgtacacacatttatacgtgtgtattttacatatacatatacatatagtgagagagaaagagagagagagactgtttcattctgttaccttggctggattacagtgacaaggtcatagattactgcagggtagaactcctgggctcaagtgatcctcccacctcagcctccccattagctgggtctgtaggcaagagccaacatgtctggctaattttcaaattttttgtagtgacaaggtcttgctacattgcccaggctggtctcaaactcctggcctcaagcgattctcctgccttggcctcccaaagtgctgggattccaggggtgagccagagttcctgaccggcactgatttttttaatcaaatcaagtttttacagaagtaaaaacagatgcttcactatagccagtttctaaagaattcaccaacaacatctcttcttatatagtcattctttatagtcattatcaaaattgtgtacaaatgtattgaagagctttattgtaattgtggtttcatcaatctgaatagaaaatttgtcacctagttgctcttcagtgttaattgacttattatctgtgtatctgcgaattgaaccattgctcaatggcagtgctttaaaatactggaagactatcgatg

SEQ ID NO: 42871 - DNA, 1046 bp, Homo sapiens
tttatatatctcttcatgaactgttgatgggcatttgtgttttttccaatttttgggtactatgaataacattcatgtgcaggtgcaggattttatatgcacatgttttcattctgcttgggtaaacacctagaagtggaaagtctggatcatatggtcattcggggtttattcttttgggaaactgccaaactagctgctcattttttttttttttacagaatttataccacttatttacagtcgaaaacatttagttaagatatttttactttaggccattgtcttcaaggtgagttgtttattcttccctctttgatgtgtgaacttgtccatttgtgatgtagattagtcatcacatcacaaatagtaaatgtaaatataccatttatacacatccacctaaatctattctttctaaaatgcatatatctatttatctttctgatgaaccaagggacataagtatgccataaccataatgagattgatactaatttggacaatgagagtaaatgagtccttcacagagcaaaaggaattctatacatttatttaaaagacaaatatttgatttgtaaaaataatattaagacagttggaagacatgtttgaaactgcatgggagggagtgtgattaatagaaagtgtagggttgggaaggaggattagttatggcagttccacaatgagtctggaagtttaataaaggaagtgtgcagggaataacagaaaaatcaaggaaaaggtagtacctgctactatcaattgtctgttgagatgggaaaatgaagcctacaaatctattaatcatttgaagatattaacaaagataatatataatttttgttctctgagttccttcccccgctccatgtgtattagctcattttcatgccgctgataaaggcatacctgtgactgggcaatttacaaaacaaagaggtttaatggagtcatagttccacatggctggggaggcctcacaatcatggctgaaggtgaaaggcacatctcacatggccacagatgagagaagagagctt

SEQ ID NO: 42872 - DNA, 1045 bp, Homo sapiens
tgagaattcaaaatagtttagagaagttgagcatttgtcggaagtcaagttgtccagccagtaccgttaggaagttttcagatgaacttcccagtgtaaagcagaccatcagatcaatggaaatgaatacacatctcagtttctataagaacagtaggttcttactggaaaggatgtagtcagtaaatggtactacagaaatttggaaaaatctcacagataatgtgtggtttaattcacctcacattagctgataaaattaattacagatagctaagtagtaaaatataacaaatgaaacaaaaaaattagaaggtaaaagtaaatatttattaaatgcttggatatacaaatacttcttgcgtaatgaaagaactctaagaggaaatgatagcttaatattaccacaaaaatgtaaaacttttaataatccaaacatataaaattaaaagccaaaaaatttaattgaataatgttgccacaaatatgacagaaaggctaaagttcttaccagataaaatcctcttttgggtgaaaacctgagcatgtatcttattcctgttcttgccacaatattttatagttactgtttttgtatcagtctcacttggggtggggtgtgtgtgtgtgtaccttttagatcttggtattttcagggacaaacacaaagtctagtccagaaggcattttgtaaatgtctgagtatgaacaaattggattctggggctattattttactgaggtctgaaatgctgacaaatgcatttgttaatcgatgaagcagatttgagaaggggatagaaaaatgttcagttaagttactgtgcaaatgcagcatacattaactttcttggtggaaaatattttaaaagatgaaatatatattccaataaaatatttggtggctattgaagtcacattacaaaatgcagctaccacacattgttagtttatatgaatcaattacaggggagatctttctggtgccatttttaatttttcctccttccagttgctgaagccctaccttcattcctcttgtctt

SEQ ID NO: 42873 - DNA, 1056 bp, Homo sapiens
ggctctatctaaggctgttactttataaaattggaaagtatttatttgttaacacttatttatttctgtagtctttgaaatttgtattctcccccaatgtattttagcaaaatgggagaaatgaaggataacctagaattacattcccagagcaaaatatactgtatttattatttgtgattcatttcagttccgtgttttttttttgttcgtttgtttgcttgttttttgagacggggtctcactctgtcagcaggctggagtgcagtggtgcagtcttggctcactgcaacctctgcctcctgggctcaagcaattctcctgcctcagcctcccgagtagctgggactacaggcacgtgccaccacgcccggctaattttttgtatttttagtagagacgtgatttcaccatgttagccaggatggtctcgatctgctgacctcgtgatccgcctgcctcggtctcccaaagtgctgggattacaggtgtgagccaccatgcccggccccatttcagttctgttttatgtatgtgtttgtaactttaacaatataataataatggtgtggattcagtttttttttttaaactggatttgagtagtttatgactcctgtttattaaatcaaaatcagcaaaagtatttcatcaatatttgtcctcttcaaacattttagtaaattttagaaagttaaagtggagttgaataccagtcgtaaagctagtaatacctcttccaaaacaaacatacaaacaaacccctgaactacagttgtggaccttcattatctttctgagtgttgtgccttaatgtgtttgagtctctctgagatgcataatacgtgttatttgtttgagtttcagccataacttagtagtgatttttctccattatagactttgcacataatgaatttcaggaaatacacaacaacagcttcttccgcttgtagataaagacagtaatatgatggagtgatcaaatacaaatgctcctttaatttattttaccaagacatttatccatgttttatttataaggcaattgaagtc

SEQ ID NO: 42874 - DNA, 1058 bp, Homo sapiens
aaaccaggatggcatacggcacagagtagtatggaaaagagaaaattctttgttggaagagagggttttttttccctccagttgaagagcattttaaatgcacaaaatctgtctcagaaatatccctttgaaagatctttgcatacacaagatttaaaatgctttcattctgtgggtgactagaatgaaatgggagcctacattcccaagaatctctgatatgaccatataaaaaccatgaccaactggtttgtttttaactcttaccatgtacgagcccatttgaagggcatgggcaatacttcgtttctgaaccaagtcaagttgactgctggcatttaactcaccaccttgtgtttgctgttgcctgatgccagtaagaaatacatcgaaagctgtaatataatgataaccattatttgccctcagttaaaaatctagctaatgggtctgatgtgcccacagcttcatattgcttgagactgcccccttctaggatattttagaataaaagatcagaccagaaagaaaagtttaaagctcaggatatcatagaataaatggaagataaccagctagttctgttaaagcagactctatattttaaattcagtaaggatttaagtatattaatggttactagtttcctataaattagtttggggaggtccatgtaacattgaagtcatagttcactgccatgtttttccaaagtatgttcacaggtgtttggaatacgtatgatctaatctgaaaattaagagtatatatacctttcagttcttttttttttttttaattatactttaagttttagggtacatgtgcacattgtgcaggttagttacatacgtatacatgtgccatgctggtgcgctgcacccactaactcgtcatctagcattaggtatatctcccaatgctatccctccccccttcccccaccccacaacagtccccagagtgtgatgttccccttcctgtgtacgtgtgatctcattgttcagttcccacctatgagtgagaatatgtggtatttggttttttgttcttgcgat

SEQ ID NO: 42875 - DNA, 1033 bp, Homo sapiens
gcatctagcatggtgaatcctttccaaaaggttttcaatttactttgcccggatccatcagaagaatcactatttatagcagctatagtcttatgaaatgtgttttttaaaataataggacttaagaatccaaatgactccttgatgcacgggctgtagaacagatgctgtattagcagacatgaaaacaatctcgtttttatgtcaacagtgttgacatttcactagtgtttacagcatcttcaccagagtagattccatctcaagaaaccactttctttgcttgactataaggactctttgtccgttcaaattttgtcatgagattgcagcaatttagtccatctttcggctccacttctatttatagagaacaagcagagtagatttagcataattcttgggggccctaggatttttagaatggtaaatgagcattagcttcaactttaagtcaccagctgcattagcctctaacaagagaatcagcctgtcctttgaagctttgaagccagccattgacttctctctagctctgaaaagttctagatggcatcttcttccaatagaaggctgtttcatctacactgaaaatctgttatgtagtgtagccaccatcaatgatcttggctagatcttctgaataacttgctgtagcttctacattagcacttgctgcttcaccttgcccttttatgttatatagatggcttctttccttaaacctaatgaaccagcctctgttagcttcaagcttttcttctgcagctttctcacctctctcagccttcaaagaactgaagagagtagagccttgttctggattaggcgtttgcttaagagaatgttttggttggtttgatcttctatccagaccactaaaactttcgccatgtaagaaatgaggctgttttactttcttatccttttttcttggttcactagagtagcacttgtaatttccttcaagaacttttctttgcattcgcaacgtggctgtttggtgcaagaggcctgtcttggctttctacgt

SEQ ID NO: 42876 - DNA, 1031 bp, Homo sapiens
agctagggcaaaatgactttgcagtgccacgactgctctgcccctatctgagaaaatgcttcttgtgctcggtagctcttgttaacttgaaaaactctagaattacataaataatgaatggatgcaaaaattcattggtttttgtaatgtagatgaaggtaagatgtcctgtcagaactgaaatttgcatagtagaaaaatttagttatcctatcttgttctttaaagcaataaatgactatgaatattcatggtcaattaaaatattaatggtatactgatactttagttttaggtctctagccatccataaagagtttcatttaaacttgactaacagtgaagggatactttagcatagtgtataatatattggcattttgtctctgaaatgaaaatgtagtacctgacatgagtaaataatttgcttactcttataattcatcatttcttttgataagaaaatattctcttcttgtatagactaaaacagggacacagtatgtatatcttttggtgttgaaatactctaatgtttttaagcactagtatttatctttatcatgtagttagagtttcatttagttgcttcaattgacttttagacttaaaaaaatttttaagtgtaaagtgtacagtacagtgttactaactccatccatattgtagttcaaccatcaccaccatctgtctccagaactctttttcatcttacaaaactgaagccatatccattaaacaataattccccattctccccttcctcaagtccctaataccctaataatcacaactttacttttttttttttttttcttgagatggagtctcactctgtcgccaggctggagtacagtggcatgatctcagctctctgcaacctccgcctcccgggttcaagtgatcctcctgcttcagcctcctgagtagctgggactacaggcacgcgccaccacgcccagctaattttttgtatttttagttgagatggggtttcaccatgttggccaggatggccaggatggtcttga

SEQ ID NO: 42877 - DNA, 1657 bp, Homo sapiens
ggtagctgggactacaggtgggtgctactgtgcctgtgtaattttttgtatttttagtagagacagggtttcaccatgttgcccaggagattcttgaactcctggcctcaagaaatctgttggccttggcctcccgaagtgctgagataagtcaggcataagccactctcccgtgacttttgaggtctttgaatgttgcttgcattgcctagcacttttatttattttcaaccaccaaccatctgtgaggatcttgggcaagatgcttcaccttttggtatcttggttttctcactggttgcttcagtaatatttgctttacctcataatactttgaggctcagaggagaatataattgcaaaggcaatttggacacttagtagctacgttattataagctattatttacatagacctattttcttcttcagtgaaataagagtggtgtagttttctactttcccaatcacctaggtgcagtgtaccctctattacttgcactaatggagagaatcgatgttgcaaattttccagaacgccaaataattagaaaatcattcagaaaataattcagcatttacatttacatatgggtctctcttgtgttccaagaattcataattcagaaaagaaaagcaaaataaataaataaataaataaagtctgactcagaagaaaataagctttacaacttgccatctttgccctttattcccagcggccttttgtgggacagatatgtatctatgtctctaaccggtgcagagttctagcttacagcattgttggcttatttttatttttattttttaacatttcaaacctttagtcagacaggaactgacttgtgtgaagtgtctatcttgttttctcagcttctatagcagtatcaactatgtatagattatgctaagaaagtatgtaattaaatactgtcaatgtacatttgaaagcaagtttgcagtgaatcacctatccagggaataatcctgggttgtcctgtaagagtacttagaaatgcaacagatgtacactgcgttgcccagcttcccctttgtttatatgctgctttttaaaaaattgaggaataagttgtttggcatattcttttcgtagacctctttgtgatcgggtttttttcaagggtaaaaatctgattgcttttttaattcattgaaatgctggattttgttgttttattggtgtcctttggcttggcatacttactgatagtcctgttatttttatttggagacatagctttctgtttattagtggaaatatatagtgaaaatctttggaggcctgtatgtatgtatgtatgtgtgtgtacatgtatgtgtatatatttatatatatatttttggaggaagatacatatttttcaaaaattaaggattagttcattcccttcaattctaataggccataaatcactctgaattgttatgcatctgtcccaccattatattcacatttcctggtggacatgatctttataaataaataaaacatttcaatccagcctctccctccccatcttcatgttcctttcccactgctactttccctacttctttcatagttggaaaaagagaaatcccctagaagtgggagtggagcagacaggatgggctagcagtttctgccttcctt

SEQ ID NO: 42878 - DNA, 1025 bp, Homo sapiens
tccttctggtccctaacaggcagtcactaaaaatgttttgagtaaatgagcaaatgaattgaaggtaaaagtgatgggggcagttttaaatgtataaggcaaattggatggatattgaatattctttcagtatgtctacagtacctttcattgtaattcttgaatattaaaagatactttttaaatctctacactgtcctgagcacacatatatatatagatacacacacatacatatacgtacatacaaacacacacactcattgccttcactttagctagttgattattagaatatattctgtacagtcacatttgttccagccactttgtttttgaagttttagtacatctgcagcctctcctggtggctgccagtatcgctgtcacctgcaatgctttgccaaccacctgaagctctcttactctgtccagtgtgctgaaggtgctggcatccatcaatatcttttttgcatattctatttagttttgctttttgcatctgtgaaaaatagtagaacatcttctcaatgtaagagtggaaataagaatagtaaagaaaattgtacaaaaataggccactaaattcattctttagcatgaaattagaaatgctgaacaggttcgatagaggtgcatcaatgctcagaaatgcatctaagtgaatctacagctctttcttactttgaagcttttaagaaaattgatacgaggatttcactgaagattaaaaagaaaccaacatccttctctgaacgttggaggtctgtctgctttataagcctcaactcattatattttcttttttacatgtttttgattgacatgttgattttaaaaatgcaacttcaacattcagtgggagttgacagtatttaaactgaattttggggcaaaattcttcaatatagtcatatttttctgttatttttaattcattcttttttttccagcaaatactcgctgagtgcttactatataccagacactgtccttggctttgtggaagctgtgttcctaatgag

SEQ ID NO: 42879 - DNA, 1049 bp, Homo sapiens
agggatggaatggtgtaccccatcagagtgtttctcttggctttcctgtatgtaaacctcactaatactttcagtcaccaccttctgtgtcattccttttaagcaaaaggagaagaagtggaattgggttcaaggccatgctttgcttttcacaagagagtgctctcagaagcgctggtgtagttccaacaccttatttctactgctgcctgatagtggcttgaagtggttatttagagggagagggtggcttggtaggaatgtacttcattcagtatttttgttgatgctgtcattggaatgaacctcagtgaatgattttaagagcatagttcttagaagttatgatgataaatgactgaatgagaacctatttaatattatgtcactactttggggaaaaataattttagctgagtatttcaggagtaagagaaagtttatattcctaagatttagttattttctaggtttttatccttttataaatatacaaaactactcaaaacagacttggttaatactctgaaccagcttggaatacattcttttgtttgatcatttttcctctatttttcagtttggtaatttaattttacggtcatatgtatgtaccctggtctggagagttctctcacatggcatgattagcaattgtgtgtgaaatgattatgtggcaacattactagtgaattacagctagtctaaatactttgtgttttcacttgagaacattggctctggaatgtatatctggcaccgagaaggaaaaaggaaaaaaggcttgacgataaaatgcagccagagtgtaaattgtgaaatggagctctaggctcaattgatcctccactgctagcaacttgagattgtgcatttcctttctagaatgaaaattatgcccttttaagaatacttagtcaatttttaatcttcaaattggtgggtttttttaaataaaaaaagccagaagtttacatggtgtgtgtttatgtctgtatattattatacaaaggatctaaattataagccctaattcatgccacttcaaa

SEQ ID NO: 42880 - DNA, 1046 bp, Homo sapiens
gatgtgtggggtggatgtgtgatcaactgaagaggtttcctaggaaggtagaaatcaaatgagatcttgagtaaaggtaacagaaaggaatactgttgcaataaggagtaaagatgtggtgtttaataatcctgtttaatctcaatgcatagtttatggagagactagtgtacctggaacagtggctgcatgttgatattgttgcaaatgatattgcataggaaagaaatgatcttttggtttagtttcaggtaaaacaaaaacaaaagaagtaaccttagccaatcattgatttggtgaagacttcagagaagctttttttttttttttttttttttttttttgtggttcatataaatgggaaaaggggctggtttctccaagacagaagtagctgtggtatctcctctcaggtaaaatgccctcaaagcattagtcattgaccatccataggtaatagagacatagactgtgatgtgagggcagtttagttccatgatttcttggctgtatgatatagggttggttgtttaatctatcttcatctttctaatgtggatagtagtagtggcagcaccaccagcagctatttcatagagttgctgaagattatttaagtatccgataagtggtaactatggtgacagttgtctgcctgtgtttgctaatgatgaacgtattcattccctcactcattgattcactgagcaaatatatactaaggatgctctaagggccttgtcccatgcctgcgttctggggaaaaattactggttttatattgttatttgcatttcttccctttttttggcaaaagcaaatgttttcttattttggtttcatttatacttttgcagtgtttgtcaaagtgtgttctaaaaactgcctgcatcaaaatcagcaggggttcttattgtaagtgtggattcctggtccttacgttggacctactgaatcagaacctctgggaagggcatggagaatcagcattttgagcaggctcttaggtgatttctatacatattgaagtttacaacctgttaggg

SEQ ID NO: 42881 - DNA, 1100 bp, Homo sapiens
aacatacccgtattaagggtgagagaagtgttgaggtagcacatgatgagatagcaaaggacacagaaagaaagccagtttcgggaaaccatgcaagggtattatttagagaagaagagagttattaaaaactacaaagaactcaaggagaatgggagggaaattatcagatatagagattatgtgtctttagggactttgacaagaacagttttgagtagagcatttagtcatatctcaatatgccattcattttgaagctttggattagtttattccatgattatcctcacctatcacgtatggctagtttaagagcgttatttaatctagagtaacagttctgaatgttttttaacaacaacaacaacaacaaaatagcgcatgtgacacttcctttacttctttgtcccattcctcctcttttctaaaataaacaaatatgtgtataaaacaagaaaaaaaaagtgtgggatagtatctgctttactgagaacagcagaagtagctatttttctctattttgcctaggaagtattttgctaagaagcagtagatagaagatggcagtaggtaacggtaaatgtgttagtggactctcttgaaagtggaatttcctatactttttactaaggtactcaaaacatctcacagacctgcttcgtttttataagtatgtattgtgcaagtgatatggctgttaattttctttgttttcccttttgcagtggagaaagtgaaacagaaaggagtggtgtgggacaaatgcaacccccagttttccttttctgtgcagtgtctcctagtctgcatttttcctgctgatcagaacaaagtgtcaccaccattgtgaccagctattctgacttgttgctaaatccatctatagtatttgatgtggctcactggtatatcctctttgaaagactcccttcacttagctgccaggatacgcgctcttctaatttttctcctgcctcattgtctcctcccaactctgtcccctccatctccctgacctcttactagcctgtagtacccaggggttagtcattggccaccttttcttctttcatgtacactcacttccctggtaatct

SEQ ID NO: 42882 - DNA, 1049 bp, Homo sapiens
ccatgcacatattttatctgttatctggaaatagaatataagttccaaatgggcagggatttttgtctgttttgttcactgtagttttcgtaccacttagaatggttcctgacatacagtaggccctcaattaatgtttgttgaatgaatgaatgaagtttcagagcctaaaatagagtggttgagtcagggtatgtcagtgtatgttggtctgcgagtacgatttttctactgatctccaaactacagtctcaagacaacagttttccacctctgaacagaggtgcctctgaatacccagatctttatgtctgtgaacaagcactgcctattagagccaaacaagagaaacacatattaccatctccaattctttagaatccttttggcccagaatgacttcaaaatgctaacccataaaggcaaacaaatccagagacctttgtagtttcccttagcctctgctgcattagctgaagataaatctatgcagaattcacttaagggaacagacaactacattaagctgtgtaatgatgaacattaatggcctgtgacaaaatgggtctctgtaggctgagcaaccatgcaaggtggggatttttccctgtttttggtaaggtaatgaagaaggaaaaaaaaagtctcatccaaagatgcaaagaaacaatctgctggcccaggtcattttcatggtatctttttgtttctcctttctttgttttgtaagtacatgcattttggctgaaaaagatacaggcaccattttacagtggtgggggaatctctactttgttaaagaaaaatgcaatgctctttatttccaacctggtatagttcattcattccttttcctgtggtattcacatgtcttgcaaattgttatgttgaattttttagttccttgttatttttacttgtagacacttacaccatggtcacaggaatctatactgatttcttccactttccatgcatttgtttccattattaatttaagtgagaagcatgtgtgtcattccccttcccatttgacttttacatggtta

SEQ ID NO: 42883 - DNA, 1016 bp, Homo sapiens
attcagaatgtcactgtgacacacatactatattttcagtatttgcttctcagatattcagaacactttttaccctacagcagaattatttgacaacacatttccttcctgccctctgaatctccctggatgatctacaaaaatatagcatctccatttgtgacaatataaaaccctggtatgactcttttctataaattcagttttattgccttcttccaaagtaatttctgttaatccagccagaaccttcatttttgttttgtcattttcaagctagattctgaagtaacagaactgactacaattttagcctaagaacaaaagagtttcaaggcctatttcaagaccctggttttgctacctcatctactaaatttatacattctaggaatccatttactttttaaaacatttcttttcttattttcagtaccaatttgtttccttcagctttcccacatgcatgacttttatagcatggcataaagtagagtgctctgccatattgatttaatggtatgtttcaataaatttcccctgttacagttcttgctccataccaggcatccaagagggaaatagacggatgtgctggttaactaattttaaaagcgaaaaaattccattttctccatcctttaatgtcatagctgtcctgccaatgacctgatactgagatatattaggttcctctgacatatgttacaggaagtagtgacctgaccttttaaaaattttattaacatttataaatttgttttagtgtattatgttggaagcagtgatttttctccagaatggattggggtgactggtgtacagattgatagccatgtcatatattaaggtggtggacattttgtagagtccaccatctctatactcacaatatattgtagagtatagagatgctgtctttttttcccctccctcttctctcctgcctttaagggttatgctaatggggatggaaacattcaaaatcttactttaatgcagtttataagcaacta

SEQ ID NO: 42884 - DNA, 1037 bp, Homo sapiens
aggtgcataccaccctcagtagctatattaacttatctcaggttgcagagtctttggggttgtgcttgggttaaaattctagccatgcagctttgtgacagggaaagttctttaatcatttgaacttgtttcctcacttgtacgatggagcaaatacctagctcaccgtgttgttcaagtgtcaactcaaatgatattatgtgaaagattctggcatttcctagctgcctagccagtgtatggtttgtttcaatttgattccatgtgtgactgcatgctcttggcctattgctaacgagcaggcagagaaacagcagcagtacagtctggctagagggcgtctgttgagcctccaaacattgaaggctactttgcctctttgtcaggggcatgagcctccagaaactctttcctagatgcgctaattgtgtttcttcttcctcactgtgtaacatgttatactgggaatctctcctgaatgtttgtttgtgtctctatctctatattttctatgacagtatttgcctgactgaggtaatcccaactggagggctgaggtgacagatttggagaacattcttacaacatgctgttcaagcatttaccaccatgatgtaataagtgtttgtatttaacagtatttatttagttcctgttatgtatcaagtaatgaaaaaaacctgctttcatggagtggacattctaatgggaggggcagacaataagcaaatgtcaaatgcctcaggtgtgttaagtactgtgaagaaaaataaagcgggctaaggaggagtcagataggatgctgcttgccatagggtgctcagggtgcgtggtcaagcaaagacttgaatgaattcagggaacaaaccatgagatacctgggagagacgcattcctggtagaggacaacagccctgagacccgtatacctgaagacaagtgagcaaggaagggagtgtgtcgaagatgacatcagagagatgccagggcaagattatgaaaggtcatgtagatggtaataaggactttgaatttta

SEQ ID NO: 42885 - DNA, 1092 bp, Homo sapiens
gtagttctaatcactttatgacacccgttaaatatttcaatcacattagcctcaagtctagactgaatagcaccagttcttcttctaaatagtttggctgcccttctgtgagtcttttctagttgactcttgtctcttttcatgtgtaggaaccaggactgaagacagtaattgtgagaggatctagcatgtacaaagtggaagggagggtgttatgtttctgtgatttattactttcccaaaagatgttttatcagctaccaccctatccttttttccccaaggcattcttttctctctctaattaagtaaataaattaattaataggatatctatgtggtatctaactgtgtatacccttgagctatttattttcctatttttctggtcattttcattagttaaaagtctgttcttaagatctcttatttacagtaggagtttcttatgtatattatagaaagctattcaaaaagttatattcatttaatcaaaaaataaattattggggggtatgtagtaaactctgtgtgtgtgtgtgtgtgtgtgtgtgtgtatgtgtgtgtgtgtgtgtgtgttgagaacaaagtgatgaatcaccaaggcttcagagttcttgcctcctttattctgacagtcattcttatttatgctgataacatctgtcttatccttacaaggtattattctgttttattagagctccctgtttcatatacatgagaaaaaacttagtggtttagtaattcttagtgtctcccttgtctctaatgttttgagttttaggaaaaaagaacagaagattcttgttaacatctttgttaccgttaagatgtattgttgtttctaggaacaaatgacaaatcccatgtctttgtcattccataagccttctaccaaatccatgggtcaaagtgccgtatgcaggtgatttactgtgcttgatttgttccatgatttcatctttagacacttccatctttgtcaaggccatgctaatctcaccacagagaatgtatactagaatttctcaaatgtcaaatatattgtgtacacttaaaaaaaagattgtcatctaagtttatcaatca

SEQ ID NO: 42886 - DNA, 1034 bp, Homo sapiens
agttttccaacagcaccttaacctttctcctcctccttagaattagtatttctcaataatattgtcaatgaagtagaaattaattatttgccacatgttcggtactgtgctaagcgcttcacatgttattttattccatttgtaccttggtcctatgaagtatgtcctgttgtatcctcctccttgttttggatagggaaactgaggtccagagaatttaagtaccatgccccttgtattagggttctctagagggacagaactgataggatagatgtatatatgaaggggaatttagtaagaagtactgagtcacacgatcataaagtgaagttccacaataagctgtctgcaagctgaggagcaaggaagccagtccgactcccaaaacctcaaaagtagggaagccaacagtgcacccttcagtctgtggccaaaggtccgatagcccctggcaaaccactggtgtgagtccaagagtccaaaagctgaagaacttggaatctgatgttagagggcaggaagcatccagcatgggagagggatgtaggccggaagactcagcaagtcaaaattcttccaccttcctctgcctgctttattctagccctgctggcagctgattagatggtgcccaccctgcttgagggtgggtctgcctctcccagttcactgactcaaatgttaatctcctttggcgacaccttcacagacacacccaggaacaatactttgcatccttcaatccaatccggttgacacccaatattaacccatcacactcctaattacacagttagaaagtcgtgtagccacgattcaaacaaacccaggcaatctgattccagggcccactctcttgataatcacatggatttaaatcaataaaaaaaatataaaatgctgtctatattctcggcatgggtgatagaaaaatagccgtgtagataaacctagcctccgtagtccctggcagagaaaggctgtaaggaaagtgtcttttctgtaagaggaaggggaagcaggataggaag

SEQ ID NO: 42887 - DNA, 1398 bp, Homo sapiens
acaatatttgccctttattttttatttatttatttattttttttgagatggagcctcactccatcgcccaggttggagtgcagtgatacaatctcagctcactgcaacttccacctcctgggttcaagcaattctcttgcctcagcctcctgagtagctgggactacaggcgcacgccaccacgcctggctaatttttgtatttttagtagagacggagttttgccatgttgggcaggctggtcttgaactcctgacctcccaaaatgctgggattatgggcatgagtcactgtgcctggcctcatttttgtttttgatggaatggaattcctggattttgaaattctgaaactctggttatcatgagtgacagtgaacaattacttagataatggaatgataaaaataccagaaatttttaaggtgctctgtggttcatattatttataatgtgcttttttgaaatcttcaagatagaatctaataaaaactttcagactcagaagttggaagtaggagtactgacttcttagtataaggtgaagcagaagtatatgactccttgttacaaggagaaaaagacacaaaaaggaagaatatgtggtcaatacagaaaaataggaattcttcatacgtgacttgataaactaaaataaatgaagaatttgaggcatttattatcataatctcttgttgagtttgtgatgctgagtttgggaaagaacaaacattttagttggctagatggggaacattgatatgaaacaattcagtgggttacctagtcctaataaaagaattccattccacagcatggagaaagagagatcaacattaattgacattgaatggattggaagaagacaatcaacacatttattcatttatttattcaataaatatttattggacatttattatttgctgcagaacagacaagattccctgccgttgtagaggttaaattctgatgagagagaagtgtccattttgttgtgagcactgtgatgggttcttcccgttcattctctcatttaagtcctgcagcaacttatggcattatcattatttcccatttaaagatgaccaaactgagtctcagtaagttgctgaagattacacagcttgtaagtaactggaaaggtaattgatgtatacttattaacagattcatcaagttacatgcattaaatatgtacagcatcttgtttgtctgtcagtcatatcctaataaagtggtttcaaaaaacaaaaatctcagttggtctgaccccatggatccatagctccactactgtactgtctccttccatggtcacactttttataggaatcccttaccaaatgtccacatttaataattttagaacatgtgagtttgctcatcattcagttgc

SEQ ID NO: 42888 - DNA, 1061 bp, Homo sapiens
gttatcactaggctgtgtctgccaaggtggacattgatggaggtgctgtagaaacatatagattttgtggaggaataggacgtaggagatgacatcaaggaggaagaaaagataaaaaggaagcaagacagttccatgcacagaccagtcagctacagtgaagcatcctgcaaactggcaaactgattatcagcagtggctgtcaccaggctctgccccagcaggtgagagttgctacctgccaatttgtttagacaccttgtttgttattagattaaggttttgaatacatctgatccaagagaatggggcataatcatatttaatgtggatttggccagacctcagactacatagctggaagattatgtctattcattgcctaagtgagtttagcattgttttaaaacattctctgatggactcatcactatcataatctgttttctttttttttttttttttttttcaaagtggtatgtggtttcagtgtcgtcgtgaagactctgtggctttttagccaaatcatcttaatgccaatctcttactacttgtgaaaccttggataaatgacttaatctcttgtctcagtttcctcctctataaaatggggatagcaatagaacctacttgatagcatttttgtgagtaaagcactttgaagagtgcttggcacatggtaaatgctgtaggcattagctagactgctattactgtgattattgttattgctgtagttattattacacatatgttattacaccaaacttaaattggtcaccattatcctcttagcatcaaatgacagatgaacaagagcatttacttttagattcctggcactttgcctatgagtgttgtcatttttatcagccataaaataacttatgagtttaataaaatatcgtatgccatagtagccaggcatttagagaatacttgggaggaagtgcagcagaagcagcaatggtgatagtctgggcttctatcacagggtgggacagaccttggagatatgctgtctcctctgtacttgatctttcatgtgccatccggagtct

SEQ ID NO: 42889 - DNA, 1019 bp, Homo sapiens
cttaaagagtacatgctacaacactacattcaaaaaggtttattctagcatgatacttaagtattctttttctagatgcatttcattcatttaggcatccattcatcaaatgtttattgaatacttacaatgtgcagggcactacagagtgctgggcatgtagcaatgaaaagttgacatgggactctgtctttaagtggctttcactgtgttggagaaaacaaattgaaaaatgtaagggcttgttatagagctgaaatacttgtatatgggagcgagtcttgggtgaatgcaacctatgtatacagataaggatttagaaaaatgtaagagcaaaaatactgctttagaaggatctgtaagagacattctgcctattcacagaatagtgtatacttattacatctaatcttgcctgatagacttgaaaacataaaatggtttttaatatagattatgatatggtctcctgtcatgacatatagaaatggaaatgcccccaaaaaagagcttacttctagaatatgtttgtaattataggatttatttgttttacactacttagaaaatattctttggccgggcactgtggctcatgcctgtaatcccagcactttgggaggacaaggcaggcagatcaaaaggtcaggagattgagaccatcctggccaatatggtgaaacctcgtctttactaaaatacaaaaattagcaaggtgtggtggtgcgcacctgtattccaagctactcgggagtctgaggcagggaaatcactagaacctgggaggcagagattgtggtgagcccagatcacacccctgcactccagcctggctacagagcaagactccatcttaacaaaaagaaaaaaaataaaatattctttaaaagtacatttcttcaattggccataattcataccagtcctgtgttctttgagctcaactataaattaagaagcaagaaatttagtttttctttcatagttacattttttaaaaaaattggtatcccgaatag

SEQ ID NO: 42890 - DNA, 1052 bp, Homo sapiens
taagaaaggaaggggctacccaaacctaccccagagatagttatcaatagcatacttgggaccagaacaaggccctttctcccaataatcagaggcatctcctcatgctcatcttccctgcaatgttttagattttaaacaggctttgttaggatggctgaactccagtctcctttattaattgctgcccacatgttgtaggatatcctgtgttctgaatcaggatgaggattttaaattcttcttagcgtagggacgtgtagccaggcagaatcaattcctgtcactcacacacaaatacagaggaatgggattatggatcagggtgaagctgcagtgctttaatctcaaaatcaatacagaaaaggaagttgaacttctggggattctatagagactgtaatttggcttcctatgaggtttgccttatagaatatagctgctccttccttttcaccttctgattattttactggggtgggaaaaatgaggggaaggggaaagatgacaagaaacttctaccaccaaatcttcttgaataagcatgcaagtgtaactcgtaattcaagctaatccattgtgttgagaagagctatacacctttgtttattcttttagaaaataattagccaaaaccctgtaccccataatctgtatttaagcataataaaaatgcctttgatttattcatagttcactgtcaagactggaaaagtattttttaagcatacttttatggctaagcttaccatagcctatgtaattttatataaatacaaaatcaacaaaccagttattgaccgaaggattccaagctgctcagcctgtgattaatatttaccccagtgtatttctgcttcttttgaaagaggcatgaactaatggtttaaacaactcagtcttttcttaataaaaaatttagaatttgttgactatgcgtctttttcagatataacactgatttgctgcacagtgctgtcggcatctagctttaagatgggcttatttttcctttcagatagtttttttaattcagttttaaaatatgtctg

SEQ ID NO: 42891 - DNA, 1032 bp, Homo sapiens
tcttgcattcatgtggtgtatttgttataattgatgagctaatactgatacaatattaatgactaaagtctgtagtttacattaaggatcactcttcatattctaaatatatcggttttgacacatgtataaggaatacatccaccattatagtattatgcagaataataattttgctgccctaaaaacttcctgtgttcctcctattcatccctccctccctcaacagcctgaacccctggcaaccactgatctttttattgtctccatagtttcgtcttttgcagaatgttatatacttgaaatcatacagtatgtttcctcttgagaatgacttattttgcttagcaatgtgcatttaagtttcctccatggtttttttattttgtggtattattgctcatttcttttttatctctgaattatgttccatttcataggtgtaccactctattcactcatctattgaaggatatcttagttgctttcaagttttggcagttatgaacaaaggtgctgtaaataatttgtgtgctggtttttatgtggatgcaggtttttaactcatttgagtaaataccaaagaatgtgattgctggatcataagggcaaaatatgtttagttgtataagaaactgccaaaatgtattccaaagtggttgtatcatttcacattcctaccagcaaggaacaagagctcctgtttctccacattcttgccaacatttgatgctgtcagtgttttggattttagccattcttatgaatgtgtagagatatctcattgtattaatttgcaatttcctaatgacatgtgatgttgaacatcttttcatatgctatttgctgtctctatatctttggtgaagtgtttattcaaatcttttgcctacattttaattgggttatgggtgttcttgttcagttttaagagttatatgtatattttgggtagcagtccttcatctgataagtattttgcaaagattttctcccagcctgtagtttgccctttcattctcttcacgatgt

SEQ ID NO: 42892 - DNA, 1043 bp, Homo sapiens
tttttttgagatggattcatgcagtggcgcgatctcggctcactgcagcctctgcttcccaggttcaagcgattctcctgcctcagcctccctagtaactaggattacaggtgcccaccaccacgcctggctaatttttagtatttttagtagaggcagggtttcactacattgcccaggctggtctcgaactcctgatctcgtgatccgcccgcctcggcctcccaaagtgctgggattacaggcatgagccactgcgcctggccgaaaattattttcatagtagaatatctcttcagataggacagtaggagtctcatccacctgaacatttcatgtcaggtattacatttagaagaaagtagagaaaaaagttctacattttagttgcagagcatggctggctatacattgttcaggaggttaaaactaattatttttttcctaaggtaattttttcatctcttttagtgtttgcctaaatgtttctctatctcctttacacataaaagggtctcctggttgtatctagctcctgaccacaccaaaggtaccactcttgcatttcccctaccacacagtacacagttccctgttccttctcctctggtattctcccctcagtctttctgacactgtttctgcttaagattctttcagttgaaagtcacagacttaattgaaggaaaaagaatgcattgactcatacagcagataaatcaaaggacttcaagagtggctggatccagaggttcccaaaatatcgtcaggtcccaggcatgcttacagattctctctctctctctctctctctctctctcggatctaagtttctacatgttttcctgcattcatcacaatttcaaccttgtaataaaggcacaaataatgctggctctttgtaatgcctgctgtttgtaagatccctaaataaagactccaaaattgttatcattaagaaaattctcagaacaatatatgacctacataaaaattgttagactatttttcagtttaacagtagtgattttcttttgcatctt

SEQ ID NO: 42893 - DNA, 1044 bp, Homo sapiens
gtggacatgtagtgctacaaatttccctctaaacactgctttagctgtgtctgagagattctggtatgttgtgtctttgttctcattggtttcaaagaacgtatttatttctgccttcattttgttatttacccagttgtcattcaggagcaggttgtttagtttccatgaagttgtgtggttttgagtgtgtttcttaatcctgagttctaatttgattgcactgtggtcccagagacggtttgttatgatttccgttcttttgcatttgctgaggcatgttttacttccaattatgtggtcagtttttagaataagtgcagtgtggtactgagaataatgtatattctgttgacttgggatggagagttctgtagatgtctattaggtccacttggtccagagctgagttcaagtcctggatatccttgttaatattctgtctcgttgatctgtctgatactgatagtggggtgttaaagtctcccactattattgtgtgggagtctaagtccctttgtaggtctctaagaacttgctttatgaaatctgggtgctcctgtattgggtgcatatatatttaggatagttagctcttcttgttgcattaatccctttaaccattatgtaatgtccttctttgtctttcttgaattttgttggtttaaagtctgttttatctgagactatgattgcaaccactgcttttttttctctttttttgctttccatttgcttggtaaatattcctccatccctctattttgagcctatgtgtgtctttgcatgtgagatgggtctcctgaatacagcacaccaatgggtcttgactctatccaatttgccagtctgtgtcttttaaatggggcatttagcccagttacatttaaagttaacattgttatgtgtgaatttgatcctgtcattatgatgctagctggttattttgcccattagttgatgcagtttcttcatagtgtcaatggtctttacaatttggtatgtttttgcagtggctggtaccagcttttcttttccatattt

SEQ ID NO: 42894 - DNA, 1050 bp, Homo sapiens
attgtatatgcctgtggtcttctctgcttcccaattgtgtataaagaaaagcgggatttcctgtgtacttcaacagtttataataacctggcctcttctctaaggccttggcatggtggcagtaggtgtacatggcaatgctggagatgtggctattaccaggctttgccaccaacatgaagtccactcatttgtaactactaggacaatgtagaaataccctaaaattattgtcagatcagcagatgcaaccatcagaggtagattttctttggtcgtttaaatgtatagaggattagaagacagcaattctgtgtgcaagtttctgcaggaatgcctctaatctgtcatccgttttctttgccccgcactgtgctgacccctcaggcctgggccacctgatctcctgcatcctcattaatggtgcccagtacttcaggcgcatcagtgagtctggcatcaagaaaatgtgtaggaacatttttgttcttcagcagaatttgaccaacatcaccatgtcgcgggaggcagacctggactttgcaaggtaggagggaaaactgggtttagtttcttatgccaaagctaagacctcgttgcctgtgaagtcatttttaaaaatagactcttggtgcagaaaaagcttagtttaaaaaaagaaagaagcacagatagatgtttttaggtcctatagagaaaataattccacagaattctattgaattttgttactttggcagatagtttttcctgatgtctaacccaagttcttcttaactacaatacttgaataactctttttttctgcatgtaaaagtatacatgctcattgcataaaatatataagataagatacaaagaagaatataaacctttgatctagaggctaagatatttggtatattttctcctggcttttttgcatgtgctgtgttgtttatgtgacttttcacacatattcaagcatgtgattgccctttttccaaaactggaactgtgttaatgcaattttatattaatttaattttgttttcccctatcaataacgtt

SEQ ID NO: 42895 - DNA, 1029 bp, Homo sapiens
tctcaaagtttccttgttttgcttggtgaggtggaaacagaatgcaaactagagcttgaatcccacattttactagtagctgcttagcccccagtagtttttaaccttttaatacttcggttaccttacctataaaatagagatgatttctttacactttagggtggttgtagataaaatgaaactgcaagtaaaatgcccagtacaaatagaagggggagattagtgattatttattcattcttattcttcctattgtaatgtgtaagaggattctagcacttagtttcccagtttttatatttttgatagtagcttcatgttattgaaaagtgagtcaaattagggggcaaggcagaggaatttaattctcattttaaacagcaatatagtaacaagaggagagatgaaaggcagcaaggataaagaccgaaggtacaagatatcagtggttttgacgaagttttctcaatcaaagactgcaagctgctcccacgttgcccagatccggatcctacagagctccattgaaggggatttcagtggaatggtttcctcacagaaggagaccagggtgactttatttcttcactgaaacactttgattataaaaagaaatcagatgatcaaaaagcatgagatgatgggtgaaatatgttatatgattataattcaataataattgaatttctctagcatttttcccttgtgggaggctcagagaagttcagatgtattatctgaattcgtttcggcatacattggtggagaggggccctgtgttaggctttccattcttcacaccctacccaggccatgagaccggagcaatgttcctgtagctttggtacccgtggctttataaacatgaacgtgaacattttaggcacaatttagaaggggattatccgcatccctcctcagggagagtccttgagtagaagtgtcatctttccagttccttctgaatccccttcgagcaattgctctaggttcaaacagttcatgaaacagaatgccacaatgaaa

SEQ ID NO: 42896 - DNA, 1031 bp, Homo sapiens
cacttatcacaggagaacatggaactgcagcaaacatctcaattaatggatcaatcctcacaacagtattggctgcggacagatgtcttctgtatagttaagaagtcagggttccagtttataggatttgcatttttataacagctttatcaagatataatttacataccataaacattaacccttttaacgtatgcaattcattggttcttagtatagtcacagcgttgtacagccatcatcaccagctagttttggaacattttcatcaccccgaaaggaaaccccatatccattagcagtcactcctcatttcccccaaacgctacccctggcaaccatacatctactttctgtctctgtgggtttgcctcttctggatagatcatagaagtgaaattacacaatatttagtcttttgcggctagcttgtttcaattagcataatattttcaagatttataaaattagcacttgtcttaataacagggtatgagacagttaaaaatatactcaggtacacatcccaacacctggcctacagcctgctctctttttcatttcctttttctgtaggggtggggagaaggaagctaaagtgtttatatcgaagtatggcatacacacagtaaactgcacagatcttaagtacacagcttgattcctcttgacaaagagaatacacccttataaccatcactcctataaaaatacagaatgttaaaaccacctcagggccgggcacaatggctcatgcctataatcccaccacgttgggaggctgagacaggcggatcgcttgaggccaggagttcgagaccagcctggccaacatggtgaaaccccgtctctaataaaaatacaaaaattagtcaggcgtgggtagtcccagctacctgggaggctgaggcaggagaatcgcttgaacctgggaggcagaggttgcagtgagccaagatcgtaccactgcattctagccaggacgacagagtaagactatgtcttaaaaaaaaaaacaaaaaaagacggct

SEQ ID NO: 42897 - DNA, 1054 bp, Homo sapiens
acacctggcccctttaccatttcttgatggaactaatggattcccaccccacagcctttatgaatggactgaggccattgaattcaggattcttactttggtgtgtagctgtggctgcctccctaggaccagggcacagaaatttcacagtaaccaatgagagagaccaggggccagctccaagccagagtcatttcattcagggcagatgtgatcagaagaccagccaaggggctgtccctctagcaggatgtgaaaacaaggagagtcctggtcaacacaattttgcttggaaagcaaagtgggtgctgaaatacctacacctgagagcgattgtcttaatgtggcaggaatgtaaaacaaattggacataatttggagggagggtaatgaggtaccacgaacaagaaaacataaagaatcactaggctcggcaaggtgtcaaccctgtcctaattaggcacagttgttataagaagtacataattaataagcgtgtgaccagatgtgaaatacagcagaggtttttcctgaaatggagggtgtaatgaactgcgcagctggaagtagttgtcctaatttggcgcaggcggaaggcctgcctggaattttgaagaggtgtagtaagatgcacaccacaggtttacacctgaaaacaactaatcctattccaactggactggggtgtaatgagatagagctacttatcaagagtgtaatgagatgcaaaagccattggaactgagctggaaatttctttaaaagtgaactaagacgcaaacaccaggaaagaatttctgctaatggaggtaggtgtgagtgtgatgaaacgtacaccatgtgaggagaggctgctttaacatgtctgggccaaagacgcgtctgtaattaaaaatattgccaggacatttacacacctggagcaagagtccctgggaacctaagaacgcaatgacttgtaaaagccacatgcatactattaagatgtatgtgaccacttatgtgtgtacaaataactggaaaaaaaataaaaggaacttaggtgttttcgggt

SEQ ID NO: 42898 - DNA, 1012 bp, Homo sapiens
ctggtttacagtaagcaatgaataaatggaagtgattattgatgtttttgtactaatgagaagagtttagaataaatatttcctcccctcaccttctctccctctgtctaattctgtcttctctgcctgataaaataacttgttttatggatacaacgccttgtactttgatgcccagaatcccaaagtagggattctgttagtaaaagtccagcctagtgagcagtttggtgaactagcaagagtaaaaattgagcaacaagaggtctagacactaattcctgctctgctgctaacaagccaggcaatttggggcaagtcattagcccctgaaggctataatttcttctataaaaagaattgggataagatggacttgtaggttccttctgttttttatattttatggttctatatgaaaaggtttttctctgaatgaattcttttattgatacttaaaaaaccttggctgatgtattttttcttctgagacctcttattgcgtagctttatcttgcctcattttttttcacacgcaaaaggggtagttgaaggtgaactgtggagttgatcattctaggtttggatttcagtaccaccacttggcttttggccagttatttaacctctctgaggctcagtgttctcatctgtctaatgaggatggacagagggtagatgtgaagatgaaaggaggcagaattcttagactaacctcaaaggctatagtttgattgtcctgtaggacattaaccagttttgtctataacttggcaaacttatttcagaatgtcttttctcatggactctgaatgcctgattactatcttcctgatttcttcattaattagtgagtctaatagaatctttcacatgtgcttcattctattttttatataagaatcctgtttttaactttttgaaaattattctttgactgccttcagacactctcctcgatagactgacataggcgaaactcactagaaatgctgattaagttactgaaaaa

SEQ ID NO: 42899 - DNA, 1029 bp, Homo sapiens
ctcttctctcctcttctctttctttcacagggtcttactctgtcacccagactggaatacagtggtacagtcatgactcactgcagtctcgacctcctagtctcaagtaatcctcctgcctcagcctcctgagtagcagggactacaggtgtacaccaaagcacctggctagttcttgtaatttttgtaagagacgggggccttgccatattgcctaggctggtcttgatctcctgggctcaagaaatcaggccacctcaacctccctaagtgctggtgttacaggcatgagccactgtgcccagcctaggatattttcagtgctctcattctgtgatattcttctggtttcccctctttacatctttgcatctattcacagtcaccttttctctttgaggccaaacatatttctgtgttatgcctgttccctttcaccaactcctttcctcatttgtcttatttcttcttattctcccttctctaacctgcggtgtcttctgttactctgattcttctattaaccacttgggttccccttcctttgtaatgtccttctgttcactttcaacatttggcctgtttcttttttcccttcctcataccccattttgtctttcctctttttttacttccttctacatgagctagttcccattagttttgcttaaagttgaccatagaaagctattaattattctattcgttattacttcttttgtcttttgttggtttactttgctatctttaacagtgactgttgcaaaactatagcagtgtttttgcaactttgagatgtttgtatggtttccaccagcttccccccccccccagaggaattcacaaatgaaccaccagtgtactttgttattctaattaacacatagctctttggctatggggttcattagcaccattgttaatctgtcttcagtatgccattaacaaaccatagaaggggttgtcaagaactagctattcctttttggcttgtaagacacatgtggaacaggttcattatttcttcca

SEQ ID NO: 42900 - DNA, 1009 bp, Homo sapiens
ttctctcctaccaaagtcataagtttcttaagggcacaatatagctctcttccatcattgcatttctcatcatgccaagcacaatgccttgtaaatagtaaatattcagtaagtgtttatttattattactgttctagcggccttcattaaacaatcaccattattctatatgagaacgtgcttataatgactcttcattggtttgcttgttttctgactccgccatcacgacataaaacaatcatagaagtctttgttccactcaaccaaattcccctcaacctcatctgaagttgactagaatcaagatatcctggaaagaattttggacaaggattcaagagacttagatactgcttctctataactaacttgctgtgtgatttcaggctgttaacctacctctctgtacctcacatccctcatctctaaattgggaataagctgccctacagatttcacaggtgtgtttgatcagatgagattattgtgaaagagctttgaaaatgaaaaggtgaaagtgtaggtagtattgttattaatgatttcctgatgaggtgtgaattctctttaaaacttcatttaaattctagacatttttttcttctactaggtaaaggccttgtctttattgctattgtgtgatttattaaaagaaaaaaaagactctgttctaacggtctccatgaacactgctttaaattggcctttcatgttgtatttgtttttgctaacaacactaacgttattaagctattattttcttcaaaggaagggctttttttttatggcatctgttttgagatcctattagtagcaggcttcagattttgttctctctcttcttctatacttgtgaaagaaattctggatttctttccatcaagagttattgcaagaaggctgagtagtaacctgataaagcaacattaaagtcttttaccttttgttttctcagggttgtaatttaattgatgttagcattctctgtggatatgttcatctaca

SEQ ID NO: 42901 - DNA, 1031 bp, Homo sapiens
gtgagtgttaaaaaaataagaaaaaagtgggatttggagttatcttgaagaatgggtatggtttagaaaggagcaagaaaaagaaagttcttggtacattccagaactattgtgaaattgacctggcagaaatagggaattctcattggatgatgatgtggatgaaactggataaataagttttgtttatagtgaagggccttagatggcagagtgaggaatctggaattctatgagaattttttaattgaaacatgatattcaatcaatatttaaaaaaaattaatctgcctacagtgtgtagagtgactttagggcagaaagtaatggatatttgtgtaactattgatgttaaaggtgagttaagttggcagaggaatgaataaaaaggaaagaaatcattaaagagatattttaaggcaaaaaaatggcaggtcttggtgattggatgcctcacagattatgagtggctgagaaatggagatgtcatgggttacttgagaggaaaaactgagctttgatggggaaatgacattaaatcctggaaattggtcaaagagattgagaacagagagagctgaacagaattatgactttgaaattgtagtgttaggtgactacaagatggaacacagaaggtaagctaaaattttcacaataaatggaatttaacggatgaagaaagtaaggcagagtttaagcctcattgattttatgattgaatgattttatgacctcattgattgaatggaggtcaatgtagacggaaagaaagggctgttcctttctctaacagggtattggtctttggaccacccatttgctgcagatgacatctcccaggctcttagcccagttatgaggatgataatgcatggtgcatgttgcccctgcagggtgatctggtagtcagaagttctgcctgtgggaacacacatgagtttctcatggagacttaactgatcgagggaaaacacactgccaatgaggcagctatgagccacggtgatttttctttccgtactgattaa

SEQ ID NO: 42902 - DNA, 1066 bp, Homo sapiens
tgagtcactttggttgtttgaagcttgttttctagtattttccttaggaagggatatggcatcagtatcctctgaattcttgcatgttataacaatgtatgccctttatacttgaaagtcatttttgctaaatataaaattcatgatccacacctttttccttgaatatattaaaaatgttactccattgtcttttggcataaaacaaaatctgatgataatttaattttctttcccttatatgtaatgtgctttttttttttctaattggaagtttttttctttttctttaaagccaagtaattttactagactatgtcctggtttagttctgagctgatatttcaggtataatgtgtgccctttcaatgcgtagtgttttttgtttgtttgtttgtttgttttaatttcagggaaggtttttttgaagtatagcctctgttttctgttcctttggttttcatcttcaggaagaagctctcttttgcttattttcaatatttgtcactttctttttcttagttatttttttgaaaaaatatattttgaggtaattgtagattcacatgaagttgtaagaaataatacagagaaattccatataccagtcatccagttttcctcaatgttgatatcttgcatagctatagcagaacattaaaacaaggaaattgaccaggaaatccaccaaccttatcggatttcaccagttttgcatgtgctcttttgtctttagttctatttacctctgtgcaattttatcacatgtagattcatcttagcaccactacagtcaagatatagagcagttttatcacaaggatcccttgtaatactctataatagccatagcacctccctccctctcatcttccctaacccctggaaaccactaatctgtccctgtctctatctataatgctgttatttcaaacatgtaatataaatagaatcatacagtatatagcctcttgggattggctttttttcactcagactaattccctggaaatgcattcgagttgttgcatgaatcagtagttcattctttcttattgccacgtag

SEQ ID NO: 42903 - DNA, 1963 bp, Homo sapiens
aatcagtgctctctgatcgctaaacatgatgggcttctattagagagattacagtaaaaaataacaatcagctctctgatgatcctgtgaggagggaacgggttgggaggagtagatttggctgaggacaagcccagactttcgtcacagggacagaccaacgtgttaacacaaagggagaacacgggagcatcctgcaccgtgcatttcagccacagatcacatggcccctccgcgggcccagcccacgccctgaccgcccggcctggccaggtctccgtatctctctgccccgccgccccttcccaactgcggacatgctgggtggatccggatcgcatggaagacgcagcctggccgcgctctcccagtgagtcctcatttcgtctctttggttttttcctttcttttttttttttataaaaaacaaacgaattgttgtaaaaaaaaaaaaaaaaaaaaaaatgtgggagtgggaggggagaggaggagacaccaggcaggaaaggaatgcagtgagtgtgtgagtttcagacctgtctgaaactttctggtttccacttcatggttgctctgattcgctggcttttctcgtttccattttaatggtggtttgtggaccatttgccaggagtttatacctaggcacgggtttctccgtttcaaataccaatccataaagcattgtgtttctaaaggtctgctgttaatttagaccttagccctccgttcagaatgatccatttgcagggctcagagattttggctaaagcacacattgcccaatccttagagtaaacagccaaagccctcaatatactgaccatctgactaagacagaacaagacccagagcatatgctattgatcagggaattgttcagataacggactccaagggtttaggatcatgaaatcctggaatgttaaagccagaagggaggcctttagactctttggtgcaatgctgtctttcaataggcagggaaacagaaaccagaggggcaactcaacttaccccaaagcagacaacagtcggtagcaaagccatgtctttgtactctcatgcaaagggccgttttcacactggtgtttatgaggtttgaaaaacttactgggtcttgggaaaaggtaccgcacaagaattagaacaccaaatggcctttcagtaaatcttttccatttttgagagttttggcaccgattcagcatgacaattgttgttccagttgttccagcgtttgtgcaacagttaatcaaataaacagagaaactcatcagggtcctaaaaacaagacccatgtccattacattagcagatctcttggagagctagtttccgtaagtgtggttggttattcacgtgggagagctcaaagggactttagacgttatctgtatagtccagtgcttatcaaactttttaaaaaatcaaatttaatcttaaggggaacgctattgtataaaggagatgttctggttaaagaaaaggtttgggatctagagctcctcatcctcgctctactctgcagtcatagcccactgcacaattctacccctctcctcatccctcttctaccccacctccccaccctcttcatcaaaacttccttggaatcctaggtctccatggaatagttcagaaaccactgatctcattgaaagccttcatttcagatgaggaaactgaggcacaggaagggcttgcccagggtcacacagctgatcagcaatagagcgtgggatgctaggaaaagagcccagtctggctggctgtctctctctcaactcatggtcctgaggcttgtttccactccttcatgcctatgattctatcagtctcctttctctgtgtctctcttctctgtttactctgccatttcctggatttcaacagctattacctctcaccgggatggttgtcattgcctgccatctggtcctcggcctctgtctctctcccc

SEQ ID NO: 42904 - DNA, 1042 bp, Homo sapiens
gagagaagagtgagcgaaggaggaacttgccaaacacttataaaaaccttgagagaattcactcactgtcacgagcacagcatgagggaaccacccccatgatccagtcagctcccaccacattccttcctcaacacctgacacgggggattacaatgcaagatgagatttgggtggggacacaaagcctaaccctatcaatagggatgtcccatacggagttttatgcctcttgcttgtcttggaagaagaaggccccaagtaacagtcatgacctcatggctgatccagagatgtagaaaagcaaattgagacttcctgtttgattagtttaggaagcagttattaaggattgattctccctgttgcggttaaagctgtctaccaagaaataagccaaaggaacattaggccaagaatctgaagggtgaagccaaaccactgggaagggctttctacttcaactacaatgtgattgaattagaaaggaacattcgaatcctgtcatgtcacctcaaattcaacaagtctaaaattgaactcatttttcctcacgaagcggctccttaactgaactttcctaataacaggaagacactgcagtgtagaatgctttgccacaacatatctatctattatttcatttgattgtcacacacaagaaaatttaactctaaaatttaactttaaatttaactttaaaaggttaatcaaagggctgcaaattagtaagagaccaattctaaaacccaagttttctgaatcctaatctagtcatccattatcaactatatcacattgcccccccatatttgtgaaataaaccagcccattttatagaattactaagtgacattttatttgtattggcttttgaggattgcacatgagcagattttagtaaatatgaagtcagattttctcaagtagcaaagaagaaaccaaccaaccttcggaatcattaatcctgttttttatgagatacctcagtgaaaaaacattcatagcattcttattattgaagtcaaaagatgacacagat

SEQ ID NO: 42905 - DNA, 1034 bp, Homo sapiens
catgggtttgacgttgaattaaaaaaatgataaaagctggggtgggaaagagacatgaagaataatggtcagacatttcatcttaagaaggcaaaaacaggctgggtacagtggctcacacctgtaatcccagcactttgggaggctgaggtgggtggatcacaaggtcaggagatcgagaccatcctggccaacatggtgaaaccccatctctactaaaaatacaaaattagctgggtgtaccggcacatgtctgtaatcccagctactcaggaggctgaggcaggagaatcacttgaacctgggaggcagaggttgcaatgagctgagattgtgccactgcactccactgggcaacagggagagactccatctcaacaacaaaaacaacaacaacaacaaaaaggcaaaaacaaacccctggaaattaactggtaataaagagggggaaaggaactggttggaaactttccttaaaaaaaaaagtcaaaaccctgatttgccaacatgtagacctcagcttaatgtagacttgcagaaagccattaatttagggtagtattgatttatatttgactggtaattaagagcatacatgctgcttctttattatctgggtgacacaaattcatgtggcctgaggaagggtggaaatagtaggggggaaatgtttgtaagctttgagaaagattttttttctgtctgcaagactgcattgaaagcactgtacctaatcaccaccacaccaccaccaccactcctaaaaaaagaaaaaaagagatgctttcacattcacctttccagagcaaattctctgtcactaagcctgcattgcactgaaggtatctttaactcctgcttctgtacaagaggctcatgaacacagctaaaattgagaccatgagcaaagtgcaccaaaccacacacgaggtttgtaaacacacgaggagtgccacatcatgctagatttcagtgagcgcaatggcaggcacacgagaagatgttggggtgggaagaaaatatcccaccttgct

SEQ ID NO: 42906 - DNA, 1032 bp, Homo sapiens
gccccttctgtggataattcagatctcagttctgatctgtaagcctttgctatgcttatttggttctttcccatgccagtgtagttcaggggttttgagacttgtatagatggttcaaagtcctgtttagttctcttaagttttccttgtattggtttgggactatcttgcacatgtgtaattcagggattgagctgagacatttgtgtgtgggtggggggggggttggttaaaatttcagttaagttttcatagtctctgagagtgtgtctgcttgcatagctcagggattaggatgagacttttgtgcactcatacacaggattaggagatacctttctctggttgctttcttcccttcagattccctccacactgtaaggaccccttttcctgggtcttctgttaagaaagactgggtttctgatttggagaaggaattttttttgtttgttttcttgtatgtgtacatattgtcatttcttagtctaggccagaatttctcaacctctacactactgaccaccccaccatgttctcccatgacatcctgtatatgcctgcatggttgcccttgccatatcatatcacctaacccttccttctttctgtctgtactgagaacgccttgatctcagaggctgtcttatcaatgtttgtatctcttccaagcactgggtctggcacatagtaggtaatcactaaataggatattatcattgttagggtggtgtgactaaattattctgctcaagagaaaaagaaaaggctactctcaagcattttggaatcaaacatttataataaaaaataactccaaactttagtaaacagaaaaaaaaaaagactcagtttctatctgagatttagccatttgcaccaccacacttctctgtgcatgaggcctgccattcagcaggccagagcaaacaaggggctggactcaccttcctgtgggggtgcttctctaagtattaactctacagtctgctcttgtttacttttcaaattcttcagatagttatgtttttg

SEQ ID NO: 42907 - DNA, 1024 bp, Homo sapiens
ttgattgaggcacgcaaacatatgttattgccaggtggagatcttatggacactcattggtgaataaaaaaaaattacacatacatactttttataactacacttattgcagtgcctactaggagttcttaaaaactaaattttcttcatatatcatctggcatatagatagatagacatggggagaaaggacgggtggagagagagaaagaacactgatttttgttcatagaggacaaaggtaatttttctcaagaattccaaagttatagggttaaaaatatattaaagaattcatgcttaatagtactaaacagaatcacttccttacacatctcttcaaagctgggtatatatttatcttctgtagtataggacatctctctctctttttctcctttcagtccttctaccatcatccccacctctcctctgctaccaccccctccaacctcatttttcctacagcaccaggtcaggaaataaaaaagtccaacagagaaaacactgccatgctactgaatttaaaccttcccccaagcctttctttttgtactttggttctgtttcctagcctcctcatgacatatctgtgacagagggaatggataaggagcaataaaggaaaatccctactgctcctactgtgacttctgcctaatttctctccagtaacagtgacgagagaatgagagcagaagagacccaaaaggaagaggaaagcaagaccccgtcgggccactgcttctcagtgtcacttccagccgcatgtgctcattccactcaacttggttccacctcacctaactagaaaacccttctgtcacatctttgccacacctttctcttccttaaatttcctagccctcactttcagccgtcattttgccctcagtcacaggagtcaccatcagcagctcagagtggggagagtttctattttccttggttgcttggtaatcccccactgttactgctgaggttctttcagatgtgggcagctgtgtttctggcctcttctatt

SEQ ID NO: 42908 - DNA, 1025 bp, Homo sapiens
tctatatcttttaagtggggaatttaattcacttacatttaaggtttttattaataggtgaggacatactcctatattttgttgttttctggttgttttgtacatccattgatcctttccttctctcttattgtttatcattgtcatttaatggttttctatactgataaggtttaattcttttctctcttttgtgtatctgttctgccagtgagttttatacttttatatgttttaatgatagtgattattatctttttccttccaaatgtagtattccctagattatttcttgtaagaccagtctagtggtgataaattacttcagtttttgcttgtctatgacagactttatttatctgaaggatagctttgctgggtctcatattcttgactggcaattttttttcattctgcactttgaatttatcatcccattctcttctagcctgtaaagtttctgcaaagaaatctgctgttagtctaatgatgattcccttgtgtgtgacttgatgcttttctcttgctgtttgtagaattctttgttcttgacttttgacaatatgactgtaatgtgccttggtgaggacctttttccagttaagtctatttgggaaactttgagtttcctggatctggatctcatatgtctccccggacttgggaagttttcagctattatttcaagaaattggttttctatacctttcccttctcttctccttctctaactcccatgatatgaatatttgtttgcttaatggtgtcccatatgtcttgcaggttttcttcactgtttttcattctttttttttttcctcttactgagtatttcagactacctgtctttaagttcagagattctttcttctgcttaaatctgccatcaaagctctttattgtaatttttatttcattcattgaatgtttcagctgtgatatttcttttttattatatctatttatgttgaatttcttattcacattatgaactgttttcctaatttcactgaattatctgtctg

SEQ ID NO: 42909 - DNA, 1096 bp, Homo sapiens
ccacttgatatagtttggctgtgtccccacccaaatctcacctttaattgtaataatccccacgtgtcaaggcagggtcaggtggagataattgaatcacgggaacagtttccccatactcttctcgtggtactgaacaagtctcaggagatccgatggttttataaataggagttcccctgcataagctgtcttgcgtgccaccatgtaagacatgactttgctcctcctttgccttccgccaagattgcgaggcctccccagccatgtggaactgtgagtcaattaaacctttttcctttataaattacccagcattgggtatgtttttattagcagcgtgagaatagaataatacaccactctattgaacattgtgctagaagttctagccactgcaataaggcaataaaaaaataaaaagcatacaaatcagaaaggaaaaaataaaatgatccctactgtgaaagatgttattctctatgtagaaaatcctaataaatttaccaaaacacacacgcacgcatgcgtgcacacacacacacacacacacacacacacacaacctttagaattaataagttatgctaggcctcagaatacaagataaatgtacaaaattaattgctcttctataaataagcaatgaacatgtgaacaccaaaattacaaaatatctcaaaaaaaatacttggttttacagggtttctatgctgaaaagtatacaacatgaataagagaaattttaaaatatctaaatgagtggaaagatgtagcatgttcataaattgaaagcctcaataaagatgtcagttcttcccagcttaatatacaagtttaacacgatgcctatcaaaatcccagcaagatcttttgtatatatagacaagattattccagaatttatctgccgatgcattaaaatagcaaaaacaattttgacaaacaaggataaaatgggagagatcagtctatctgatttcaagaacttttatatagctagagtaatcaagacagtagtattagaggagaaataaacatacacatcagtggaactgaggcaaaaaccaagaaatagaccacataaatttgctcc

SEQ ID NO: 42910 - DNA, 1030 bp, Homo sapiens
ctctttttctcttttcccattttctatttgattgatttccattgctttattattttcttcctcactatatatatttatttatttattccttttttttttttttttttttttgagatggagtctctccctgttgccacactggagtgcagtggggcgatctcggctcactgcaatctccacctcccggattcaagcgattctcctgcctcagcctcctgaatagctgagattacaggtgcgcaccacaacgcccagctaatttttgtatttttagtagagacagggtttcaccatgttggccaggatggtctcgatctcctgacctcatgatctgcccgcctcagcctcccaaagtgctgagattacaggtgtgaaccaccatgcctggcctcactatatatttaatttgctttgcttttccaagacgaataatttttattcagtttaaaatattttctgattttgcctgtgattttttttttcttgaagccttttggatagttctttctcactcgatctcactctgtctcatgtaccaacttttttctcctgtaaatttttcattcaacaaataattgttgatcatctaccacaaggtgctaggtactgttctaggtacttgagtgacgtgagtgaataaaataatatccctgcccacatggatcatatgtgctactggtggttacaattttttcgtttggtctatatttatccctaaccaagggttctcttccatttgaagtcttgacatactcctttcttcctgtatctccactatgacttctagtacttatttgcaactataaaataccctaacaactgatacagatctcctgtctagtgtatctcctgaatttatagtcatctttttaagagagatggtatttattgggagatgtgttctcctctgtcatatttatgccttgtttggcttgaagtcagaaagactaattttcataagcatctttctagctttagctagctttagcatcactaagatttcctgacattatcaataaaaaaaaaatta

SEQ ID NO: 42911 - DNA, 1050 bp, Homo sapiens
ttttctgtgtacttgttccattgaatattgagagaggagtgttgatatttccaactgtaattgtggatttgtctagctatgttttttttttttttaacagaatttgtttcttatttttgttggcatttagttcacacaaatgttgtgaagcagtgattctcaactgaggtataatgttcttcagagtgtgtttgggaaatgagtggggccagttttgcttgttatgatgactctggtgttgttattgatagttggtaggtagttccaaggatgctaaatgtcctggaatattcaggataatccaacccagtgaagaaacattgtgcccaaatgtcagtaatgtccccactgagaaatactacagttaagttcaacttttctatagtggaaaatgcattcaagttttaagatattatacattatgggtagtaatattgcaaataagattcctggcatgtttcttcatgtcacctaaagtggaatagatatttaaaaaatatattcttgtatgtagtcactttaagacagttgcctgatttcattattattagcatgtacaatacatttacatattaaaactatatctaataaatttaataggtgaaacagctgaggaatcgggcagatgaagatgctcgaatgattcacatgagtatgcagatgggtaatgaaccccccatttcacttagaagggacctggaacacttaatgcttttggtaagccattatattagaaagcttgtcctctttccctcctttcattattttttcccctaactttggaaaatttcaggtgtaatactttaaatgtccttttttttattgaaagtaatttttcagtcatagacatttccctacagtctttgcttactctttgcagattggcgagctatataaaaagaacccttttcatctggagcttgctctagaatattggtgtcccacagagcctcttcagactccgactatcatgggctcttatctaggggtggctcatcagcggccccctcaacgccaggtgagtctttaggttttcctcttttatactct

SEQ ID NO: 42912 - DNA, 1047 bp, Homo sapiens
atttctcactgaattaaaatggaaatgggaggggaggatagggaaaggttggttaacatacaaagttacagatagagaagaagaaagttctagtgttctatagcactacagggtgaatataactagcagtaattcattgtgtatgttcaaaagccagaagagaggattttgaatgttcccaacacaaagaaatgagaaatgttagaggatggatatcctaattaccctgatttgatcattacatattgtatacatatatcaaaatatgactctgtaccctataaatatgtatagttattacatatcaactaaaaatgaaaaaaatgttgtgatacttgatactgtatatctctatatttttttttgagaaaaggacaaggtatttttttcatccatactttatattgcagtataatatattgttccagaaaggatttaagatgcctaggtaagatttatccaacccttgcggaccatttatctctgtttgtattatttctcatacttggaactgcaaaagtaattctacaaagtctatatctcctccagttttttacttcgaataaatgagtgatctgatttgatgtgttggtagacttcaaacataaatgataggcttatttttgttttagtatatattaagcccatgaggactcagtataaatgatagcaatttagatgattgctggtcattttaataacttttaaaaatggaaagtctcattctttttgtgtcaattcttagagtgaaaatgctcgcttggcactctgtgaacaccctcagtggacccctgttgtggtgattctgggactcctccaatgcagtattccccctgtcctaaaagctgagctactgaagacactcgcagcttttggaaaatctcctgaaattgctgcttccctctggcagtcattggaatacactcaggtagggctctgaagtcccttatttatattatcccaatgtggaaagttgggcttgataataccatagaagcaagaacatgcaattggaacttatagtatatcatgaacatcccaactaga

SEQ ID NO: 42913 - DNA, 1056 bp, Homo sapiens
ttacccttttacgtttccataattatcaaatttaatgtatttttatttgaagggttttctgatcagtgttgaaatagagatgaaacttttaataaaaggaaccaaaatattttgtgtttcagagttggaaaaagatgttacatggcaaccatccaaatggaaaattcttgattttaactcaatttaattagattacttgagtcaacctgaaatgagagttaattattttcttttctctctaattctccctctcttttaaaagaaacattaaagatttctgttttaaattcaagtttggggacagtaagtgggaatttggagttcttccatctgactcatctggattcatataatacttttttatcttttcctctaaatgaaaaacagaaatatctgttatatcttttggtgtgagttagcactattaatatgttaatgtctgcataatactcttcacttcatagctaatagtttttattaccaagttttctttctttttctttggaaggttgaactaaatgaaatagaatcccggtgtgaagaatacccattgactcgggccttttgccagcttattagtactctggtggagagctcatttccttctaatttgggtgctggactgcggccccctggctttgacccttatttgcagttccttagagactctgtgtttctacgattccgtacaagagcttaccggagagcagctgaaaaggttatgttcagagaaaagcttttttctccttatgcatttactgctttttcttttatcaaaagtatatggtgctaaattcatgttagcttttgaaaggtagtaaaattcacagtctttgttttgaaatatctatgaagtggtctgattagtttatgtgcactaaaaaataagtttggtcattaaaacccaagcactgacattagtcatcagtaatctaattgataggagttcatatttcatatccttagtttaacaagttttgactaaaatggaacaaaaagtgtcacatttgttggaaacacactactactgcttattggaatggtttaggttaggga

SEQ ID NO: 42914 - DNA, 1049 bp, Homo sapiens
ggaaggagtattgtaatccattaggcatgtctgccatggatggaggctgagagagcactgatctttatgacacatttgctctggttgcaagacactaaccactgagcttatatatatcattttatataattccaatattaccacgtggcaggtactatttaatattcccattttacagatggaggcttagcaaggttaaggaacttgcctaaggtccaggaccaggatttgaacctaggactctgattccagatccaagctcatagccactaagctatgtaagagactcttccaggttctgatgtaattcacgttagtctataatactgtttattaaccttacagaatacccttggttgtatcttgtaggaatgtttctgctttattttggtagttggcgcagatcaagactccatctgaaaaaaacaagtgtatatatatatgaagaaattatatcatccttaattttgttgccaaaggaaggataactacttttagtctttttcctatgcctgtagacttaattaacaattgagataattagttatattactttgtatttcttttttgtcacttagcatcatggggatttttttcatgtcctaagatattctttgaaaatagtctttttagtgactgcataaaatctgttacttgtatctagcatagtttattcactgccctgtcattggatatagcttgttttttatatttagtcacaaataattgaagttctttttttttgtcaattgcattagaatttttgcttgccaggttgtaaaaataaacactgaggtggggtatacactttacttaggctctagaacttaacatgtatttcctgatgggaagaaaacaataacagcaaccatgcctcattaataaagtcatttcagatgaataatgagtgctgataattacagcactcatttcatcaaaatgttctgatacttttttacagttgttttaaatgtcttatatgctttttcttaaaaaggtcattgtgatctgagtgtttagagcattagttagccatattctctccagat

SEQ ID NO: 42915 - DNA, 1465 bp, Homo sapiens
tctttaagaataatgcattgaaaatattttaccttgaaaatgagccaattcattatcttttagcaaaataaagcaaaatgaattgggatttctatattgcttagcgtaagtgaataaagtggacaagaaacttcactcattttctggaaaaagaagtgggaagagtgaaaagccttgcaaggccaccaccttggtctgttttattgttattgacctatttatatctttctatagtgggaagttgctgaggtggttttggaggtgttttataaattgctcagagattatgagcctcagcttgaagattttgtagaccagtttgtggaactacaaggtaatttaattctgtcactttcaaacaagttgtcaactatttataatttataaattatggctatgttatatataaattaaaaattatacttttaaattagaatttaatcttttgtttcattgttttaatcattttaatttttctgttcaagagaaaaaattattgaatggaagatcaagaacactgcattacaatttctctaatgagttaatagaatagctgactaactgctttgtgcagatttgcccttaggagaattactgctgtgtctctaaattgaaacttgcctttatctatctagatgccatctaatttacaagtctcatacatttcatataaatcaagggtgtgacaaaaatactaacccatcatctcttggaatatgttatgttctatttaggagaagaaatcatagcctataagccacctggatttagtctgatgtatcatctgctgaatgagtcaccaatgttggagcttgctctcagtttactggaagaaggagttaagcagcttgacacctatgccccctttcctggtatatgcttaaaagccttcatgtcttgcaaacagctttgatgttttcatcttttgtaaactgagaatttgaaatagatgatctctgaagtcatttttcactgtaagattctctctctgtatctgaagtggtgttttcagtgaatcatttaaatgagagtattgtaagtaaaaacagactaaagtacagagagaatctcactgtcactgtgtttcactgcagggtcttttgtaggtaaagtgatctttctatcattttaacatctttaacatccctaactttaaagtacttttttgtccatcccccacctcataatatttttaaaaggacttactatagtgcttgatacatagtggtcaataaattttacttgttattattaccactaattattatttattgaatgcttactatgtatttggctcttttaaaagcacattgcatatattaatgcattcaatctattcaaaaatgtgttagatcttcttatttccatttaacaaataaagaagctgaaatacaacgaagttatactggctttccctatcaagtgtgggagctgggatttgaacctagtcatcttggctccagag

SEQ ID NO: 42916 - DNA, 1334 bp, Homo sapiens
atgtggctgtgatcaaaatgagaaaagagattctaaacatatgaacaataactgtatagtcagaatatacagataagacactataggaagaattaggccacaattttaaatttgattggtaagattataggtgatccttgtttctattttctgcgttattttccacagtgatttggtcttactttagatcagagtttctcaattttggcaccattgacagtttgagctgaataattctttgttgtggatgatgtcctgtgtattgtaagctggatgccagtagcacatttccagttaggacaactagaagtgtctccagacattgtcaaatgtgccctggggctcagccaccccattctgagaactgttgctctaaacaataagggaaaagataaagaagtgatttgagaatccattccatgggagttttctggattgcaaaataacgatgacttgcatagatgaatggttttgtgaagttggagctgaaattttgaaacaatgagagcataaatctctaggttttgctgctgaaagttggaaacaagagtctgaatctctagatctgaaaatctaaaacttgtcatttgtcttgttttcctaagaattgactgtgagtttttaagataaatttagaactttctaactttatttttggttgatagggaaaaaacacctggagaaagcagtacagcattgccttgcacttctcaatcttactctgcaaaaggaaaatctttttatggaccttctaagagagagtcaactggctctaatagtctgtcctttagaacagcttttgcagggaattaatcccagaactaagaaggcagataatgtggtaaacattgccaggtaagttacctttgtaggtagagaaatgaagtaaacagatagacattctagctttgattttcaaatctggttaggtatctagtgcatcacctttttttttatttttgcctcattttactttttttttttttttttttttgagatggagtctcgctctgtcgtccaggctagagtgcagtggtatgatctcagctcactgcaagctctgcctcctggattcaagcgattctcctgcctcagcctcctgagtagctgggattacaggtgagtgccaccatgctcagctatttttgtgtttttggtagagacggggtttcaccatgttggtgaggctggtcttgaactcctgacctcatgatctgcccgcctcagcctcccaaagtgctgggattataggcgtgaaccaccgcgcccagccttattttactgttgccttctttagctaccctgattttaattactctgaactttacaatttc

SEQ ID NO: 42917 - DNA, 1024 bp, Homo sapiens
ttattagggcctccttaatgacctcgtctgaactcgattgactatatgtacaaagaccctactttcagataaggtcactgggttagccagacttcacataaggattttgggggcagggatatgattcaacccctaacagactgcatctatttagaaggggacagctttttcttatttaccttgaagtgctgtatgggcaggggaagccctggttctaaattttctttattgagaatagtgagacaccaaaaattttatcactgttcctcaaatgttttcttttctttaaagatacctatatcatggcaatactaatccagaattggcttttgaaagtgccaagatcctctgttgtatctcttgcaactctaatattcagataaagttggttggagatttcacacatgaccaggtaactgattttgttgctcttgttattttttggtgcattttgcattttgactatatatggaagttctagtgtctatggaggaatcatattcttggttgtggaaaaattcattaagagtaagtatatttgtataggatgggtgaaaacctacccacgaacttggctatgacttatctttgaagataatgctattcacagtgatactgcataattatggtatgtggcacactgctactctgggtacatgaccactgctactctcagcacgttcaaaatgattaggtttgctgttaacttgtttgtttactgctcccgacctgtcagttgcctgtgttctaagtgagccctctgcaagttctgaatatttcgttgttgtaagttgtctacttcactggttttcttgtgatccacctgtgtgtcacttcatttgatgacactgtagagtgtttttaggagttcctctttttattcaagttataatagttctgttcactgaatacctacaattgcggaatctgcttttttttttctttatgaacatttcatcccattgtatctttatgttggaaatcactgctttagctagttgaagaatttttttttttcttcttt

SEQ ID NO: 42918 - DNA, 1050 bp, Homo sapiens
gtagctgggactacaggcgtgcccaccatgcccagctaatttttgtatttttagtagagacagggtttcatcatgttggccaggatggtctcaatctcttgactttgtgatccacctgcctcggtctcccaaagtgctgggattataggcatgagccaccgcgcctggccagaaagcactttttaataaccaaataaattaagaagtcctgtatacaactatgttaagtggtagaatgtcagattaacatttaaactataatgagggctgggcctgggcatggtggctcacgcccataaccccagcactttgggaggctgaggtggtctggatcacttgaggccaggagttggagaccagccggggaaacatggcaaaaccttgtctctgctgaaaatacaaaaattagctgggcgtggtggcacgtgcctgtaatcccagctacttgggaggctggggcatgagaattgcttgaacccaggaggtagaggttgcagtgagccaagatcatgccactgcactccagctgggtggcaaagtgagactctgtctcaaaaaaaataaaaataaatacataagtaaactataatgataatttataatttcgcttgttcacttttgtttattgttttattcattttataagtgttttaaaaactaggcttggccgcgtgcagtgactcacgcctttaatcccagcactttgggaggctaaggtgagcagatcacctgaggttaggagttagagaccagcctggccaacatggtggaaccccatctctactaaaaatacaaaaaaaattagctgggcctggttgtggacgcctgtaatcctagctcctcaggaggctgaggcaggagaattgcttctacccgggaggcagaggttgcagtgaacctagatcgtgccactgtactccagcctgggcaacaagagcaaaactccgtctcaaaaaaaaaaaaaaaaaaaagaaccaggctttataagctgtgactaatttctcaatttaagtgttaccctaaatttacatttttaggataagaaatggt

SEQ ID NO: 42919 - DNA, 1111 bp, Homo sapiens
tgtctcggattcctgacaagtgctccacctgcctctgcctccctaagtgttgggatacaggggtgagccactgtgcccaacctagttattatttttctgtgttttctgtaatgagcattataaaacttcacagtgagaaaaaacagctgttaaaaaaatttcttttctctaacaagcaatgttagagtctactaaaatacatctaatgccactagtttaacgtgttaggttttgttttggaaatacatctttacctgagagctttcctttattgataaattgaggttctggagccatagtttttaacttctcaaaaaaaaataaaaaggaaattttgttgcaagtaacattctctttatgaaaaacattcttcatatttcatatctgatgtcagataaattcagttactgttgttgattttggtagcatctacatgttttggactttaatttattcttccttcagatgctggccctggctctacttgatagaattgtctccgtggataaacagcagcagtggcttttgtatctttctaacagtggctacttgaaggtcctcgtagacagcttggtagaagatgaccgtactttgcagagcttactcaccccacagcctccccttttaaaagcactttatacttatgaatctaaaatggtaaggctttctagacatttgatgttagatcaagaagtcgttttctcttggctatagatgtattaaagaaaattaatgtggcatacattctgaatatttctatcataagctggaatccttttttaaggagttttaaactttggaatcttcctagtgtgcaaaagatgagtgaaatgatcctcaaagggatagctggataatgggactgctgcttccctcactcactcaggttgctcatgatggcaatatgacagccagtgctccgtgaggacagagcaaaattgtcctctcacaatacaatttagactatagtagttgcctattgaaaatttccatgtagatatgctagttctattctaaacacagcattttcaatatagtatataattcattgtttctttgcctgcaaatctgttttaatttctttttcctcctagttaaaaggatcacaaat

SEQ ID NO: 42920 - DNA, 1057 bp, Homo sapiens
cagctacttagttttagttgtatatttacatggattcactgcaaaacaccagttgtgttccccaccatggcgtcaccattcacgagttctttcttttgatttatctcttggtatttttttttttctttctttctttctttctttttttttttgagacggagtcttgctctgtcgcccaggctagagtgcagtggcgcgatctcggctcactgcaagctccgcctccccgattcacgccattctcctgcctcagcctcccgagcagctgggactacaggcgcccgccaccacgcctggctaattttttgtatttttagtagagacggggtttcaccgtgttagccaggtcttgatctcctgaccttgtaatctgcccgcctcggcctcccaaagtgctgggattgcaggcttgagccaccgcgcccggcctatctcttggtatttttaatttgtactgaggttccttccctcaagaaaaagcatgctgtctcatattcctgaaattctctaagaatgtctgaaggttgtctttgttctttaatgacaggacggccgattatgattttcttttgcttagaatatgtaatataaatgatagtagctggcatttattaagcatgtatgtgccaggtactgttttaaatacttgacatgttaattgattggaagacacagcagtcttatgaggtagaactgtcattatccacattttacagctgaggaggctgaggcacagggaggttaacttgtccaaagtcacacagataacactgcatagtatagagtttcccaggcagtacgtcttttgaatctatatatgtaactacgaggctacactacctccatttttatgttgctttggagatgtctgaggcaacctctgaatccaccctataatccccaataattttttttgtctgggctgtctcggtggctgagccctctgggttgagagacgttgagagttggccagggctgagtacagtgccagctgagttacttggagcctgtgcttcttccaaggagatcccagggtctattccacccagcctgtggt

SEQ ID NO: 42921 - DNA, 1077 bp, Homo sapiens
gcaggagaattgcttgaacccaagaggcagaggttgtagtgagccaagatcacgccactgcattccagcctgggcaacagagggagactccatctgaaaaaaaaaaaaaaaaaagaatacacagatgtgagtcattttacaaattgattgataaccttttcttcttcaaatctcgattttcatgctaattgagacatttcagggtcttaacatttttgttactgttttttgattatagatttgtgccaatgtaatggaatattgccagtcactcatgttacagagttcccctaccttccagcatgctgtgtgtctcttcactcctagcctttcagaaacagttaatagagatggaccgcggcaaggtgagcttagtttttcattctgtattgaaggaactaagttgctatggttatgacatagctctccagcttggctccagtaagatgcagtattttcttttaagtgtcattaatgggaaacattttaaataagttttaaagttgagcgggaggtattattattagacctatgtacaagactggagagaatagagaaattcaggatttactgagagtaaatctagaggaaccatgttttgaatagcacttgagggctcaaaggatctaaattggggagtcaggtggctgggtggaaaagatgaaaatacaacaaacagttttatatgttaaatcatgttaagctgaattcagtgtctaaactgggttttttattatagctccaaatttctataacataacgaaatacaatttagatactaattaggccaacttaccctataattctttaatgattcagtagggaatgtttgaatatggggcaggataatgggtaaagctgttatcctatggaacactcagaagaaaaagcccattagtatcttggtggggataatggaattgactgttggtgatttcaggaagtctttgtttgagatctgtgagaaaaattttgtcacattttcatcttcttcaagatcttactatccctgaaaattacttaatcacaaaaaatatgtgtttagtataataatagtataaaatgacattatgaaaa

SEQ ID NO: 42922 - DNA, 1044 bp, Homo sapiens
catagagatattattctgaatgccagattaaaggcatagtctgaaaattctaattttttcaccctttgtagctacattacactattaacaatattcagggttactaaaatatagccatgctcttatagaatagtgtactcaatactgtgaaaatgtctgaaaaagtcaagctttttcctaaaattatttaggttttccttttttttgtttttttcttttctgcacgtaagttgacaatacaattgtcccttggtatctggtgattactggttctagggctcccacggataccaaaacctatgttttggcatgcatgttccttatataaaatggcattgtgtttgcatataatatagatacatcttcttgtatactttaaatcatttctagattacttacaatacctaatataatatgaattctatataaatagtggttaatactacgtttttaaatttgtattattttttgctgttacactggttttttcccccccaaatatttgtgatctgtggttggttgaatctgcagattttgaacgtggggatatggagagctgactctacagtaatttgtgtttgttccttagaaatgattgtgaaatttctcaaattaatcatctgccaatatttctcatataattaatatgatggctatcactaggacaaaacatttacatgatcaccactctatttcttacccagttgttttcatgttcaagtaactacatcatccgaaactgcaaatttccttttccagacagcaattacttcagcctaatacataggagagactgctgagaggaagtctttgctttcatttagtaacagaataaacgctataacactatagaataaaattgataattattctatagtgtcatagtgtttttttgttttgttttgttttttgttttgtttttgagaaagagtcttgctctgtcaccaggctggagtacagtggcatgatctcgattcagcacaacctctgccttccaggttcaagcgattcttctgcctcagcctcccgagtagctgggactcc

SEQ ID NO: 42923 - DNA, 1102 bp, Homo sapiens
tctattacacaaaggttaaataggtagttgggatggagaactgtgtgagccttggggtaaaatggtaggaaatgatggggagtacaagcaggggggcagactcttcttagctatagcaatttgtcatgtgagtgcagggcaagtattgaaggatcttttatttatttaatgcaaattctgaatctggatttttgaacaaaatttttctagtattagatattgtcaactaattaaaaatgtgtgaatatttatacacataaatatatatacacacacacaattaatttatgggcccatgctataggccaaacaataggtttgttgaggccaaatatgttatatttcatacactttttagatttcaaaaactggagattttcaaactttaacaccactaaactttaacacctaaaaaaaatttagatttttaggcccctccctcctgaaaatctgattctacctaatctggcgtagttgcagaatgctagggtataatacagttacactctagaattgtttctttaatgcaagcagtattctaaaactgtttcagatctagtttccctttctataaaatacttttcatgctctctttgtcatcctaaatgaatttcatggggaaaaaaaatcctaacacatttttcttacaaaagtaaacataatgtttgaactgttttaaaggagaaataaaatgaagcaaataacagcagaaaagtataatttataaatgctcagatacaattacactggccaccaagctcccattgagaacatttgttttaaaacttcggtttaactgtccttttttctcaggctacatgttggaaggaatgagggtgaatgaccacaagttaaaattggatgactccttcagtcttgactgtcattttcttagtatgcagttatatctaggagagaggcaaaactttaggaaatggattttcttttacgtatgttaagaaaacaaactgatcttagagaaatgttataatattgtgtagtattttgtgttgttaacgtactgttcagctaatgagtagcaaactgggagtttgagagcagttttttcctctctacctaaaagacaatattgaagagctat

SEQ ID NO: 42924 - DNA, 1048 bp, Homo sapiens
cctcccaaagtgctgggattacaggtgtgagctgccgagccctttcttaattttactccagcattttgaatacacacttagaccagtagtctccaaaatggcatgactaagtgccattatattttattctgtaatgtggtgtggcacaccacatatgcaataaaatatccattcaggtgagggaagacattagaacttcttttcagaaattgagctttaaagtacttgatatatagtttgtcacagtcacatgaataagcatgtcaaatggctacatttcacatatgctgtatggagtatcctgagagaagggattaaggctgcctcaagcccaaatggtatttgtgtgagttagaaattaagagtcctcttgacatacaggaccaaaggatgtgtgccttaggaagtggaatgtggacccccatttgcctgtaagtctacatttcccctccagtcaggcagttccttgtactgtataacctatcttaactgtacacagctgccctagaggtcatgggatttcgatactgcagactctgttgtttgtttttgcctcctacaagtataattttttttttttttttttttttttttgagatggagtctctctctgtcaccaggctggagtgcagtggtgtgatcttggctcactgcaacctctgcctcctgggttcaggcgatcctcctgcctcagcctcccaagtagctgggagcataggcgtgtgccaccacacccagctagtttttgtgtttttagtagagacagggtttcactatgttggtcaggatggtctcaatctcttgatctgcccacctcggcctcccaaagtgctgggattacagatgcgagccatcgcgcccagtctttgtaacataattttatatgtacttgtaaaaataggtttatgggttttaatatctgtttttaactaaatgtctgtcaaaaaatagaagattatggtaggccattaccaggcctctggcataaaacccttaatctcatttcctagggaagtcccatatggaggctgctcacaaaagcccctta

SEQ ID NO: 42925 - DNA, 1045 bp, Homo sapiens
tggaataaactatggtatattactgtgccgatgtaaaaaaggaatgaaaaagatatgaatactgctgtggagtgaattccatgatgtactgttaagtagaaatcaaggtgcagaagaatgagtattatatgctaccctttgtgtctctgtgtgtgtgtgtgtttcttagctctatccactaaaaggatctaaagcaacagtatctccatgacaataagaaaaagagaaaatatgtgcttatatttacaaataaacaacggaggccaggcatggtggctcacacctgtaatcccacactttgggaggctgaggcaggagaactgcttgaacccaggaggcagaggttgcagtgagcggagatcaggccactgcactccagcctgggagacaaacagagactccacctcaaaaaacaaacaacagaagaataaataattaaaaatgactgctagcgaggcaagaaaaagttgggaaggaattagagaagaaaattagacctctgtaaatgtaactggttcacagtattgactttggaactatgtaaatgttttatgaaactgaacaaatataagtaactctccctgcttccccagcaaacaaaacaaatgaacgttgttctgtatcaaccagatagttttacctacatagtaaaggatttttgaaactgatttttaaatcacaatattgattgtgcattcctagtatgctatattgtaagcacaaaaaaacttatattgcattcagtggtgtgtttttagtggttatgttggtattttgaaactattcaggtttcatgtgaggtaaagcaagcagatacttgtggtaatatcattaggcatagaaattctcaggataatgatgaaggaaagctccaggatggcagcttgcagcaggcttgaaaaggtttggagctggatgaaggacttcatatttcagagaaggatacatttgagggcacaaatgtaaaactgtttgattagctgatatatttgaacatattgaaaagggtttgcagttctgtcggaaagtttgctgctgatttagt

SEQ ID NO: 42926 - DNA, 1782 bp, Homo sapiens
gtttgaattttctaaatgcaacttcatcattctgcaagtcaacaaagactcactgcaaacacataacccttgagaccatcagatgcaatttttgttccttggttttggtgattagtgtctttctgatatttcttggacatagcaggagctttcacatcataccaatctttctaagaaaatggatcaactacctttttggctccctttgctgcctttcataaggtgcttgttcttgacaactgctatcgtgctgctcctctttccttctgtccttgggagtttgcctattctagaacctcataaaaatagaattatgcaatatttgtccttttctggtctgacttatttcctttagcatagtattttcaagttttatccatagcatagcacatatcagacatcacttcttatgggtgaataatactccattgtaagggtatagcacattttatttacacattgatcttttagtggatatttaggctgcccactctttagctcttacgaataatactgctacgaacattggtgtccaaatatctgttagtccctgttcttcagttctttttgggtgtataggagtagaatggctgttagctttttggtgaactacaaaactgttaccacagcagctccaccattttgcatcgtgtcagcagtgcacaagagttatagcttctccacatcctggacaacatgtatttttccttttatttatttaattttttggatgagagccatccctagtgggtgtgaagtggtaatctcattgtggttttgatttgcatttcccaaatgatgttgaaaatcatttcatgtgcttgttggttgctgttttttttttgatcttctttggagaaatgtcagataggcacagtggctgaacacttataatcccagctatttgggagtctgtggtggcagggtcacttgagcccaggagttcgagaccagactgagcaacaaagggagaccctgtctctacaacaatgtaagtaaaaaaatttagccaggcatggtggtacatgactgtagtcccagctactcaggaggctgaggcaagaggaacacttgagcctaggaggtggaggctgcagtgagctgtgattgttatcactgtcctctagcctgggcaacaggataatactctgtctccaaaaaaaaaaaaaaaaaaaaaaaaagggaaagaaaataaatgtctattcaagttctttacctatttttgaatttttgttgtaaaagtttatatatcctggatactaagcacttacaagatacatgatgtgcaaatatattctcccattctgtcggttgtcttttttaccgtcttgataatgtcctttgatgtactgtagttttaattttggtgaaggggacatcctgcaaagtagcagagtaggaatttctaggagttaatccttacattgaaacaaccagtaaactggaaaaaatgaccagaatcaacttgcagtctgtggtgccaggggagtgcttgatgaagggagaggctactgctcttgcagaatagtttggggaaagtctcaaatggactgtgccagccatcaacaagcaaaaataagccatcccttagacgttggaaaattatagttgtaaagttaccgcagtaacaagatctgagtttatcctgcttggagcttattgagcatcttacatgcatggattcatgttcttcatcaaatttaggaagtttttaggtattaattattccatatgttttttgcctctttctcttctaggacttgttcaatggtgttccacagg

SEQ ID NO: 42927 - DNA, 1023 bp, Homo sapiens
gcaaataggttttgtttggccagcactatgctggcctgtactggggtttgtcacttttgacactattgatgttttgggctaggtaattctttattgttgaggactgatctgtgcattatatggtggtcagcatccttgacctctaccaactagttaccagtagcaaccctctaaccctccccagttgtgacaacaaaatgtggctccagacattggcaacgtcctatggagcaaaatcatcctgagttgagaacactggccaacacactgttttaaaatatatagaactagttgccagcattgtaaaatggggagattttacattttttaaatatctagatttctggcttttttgagaaaacggaagctgttctagccctgggtctgtatacttcatgtcaacatttgaggcatgccttttccagttcattatagttcctagcaaagctcacttttaaatctgatctcaacagtcattcaaaggtcagcaacagatgatttagacagtaagattcggattgatacaaatataattgcttatgatggtctaggctcccgataatggcagactagataatttggatcaacagtgagaatgactagaaaacctgcacaaaatacagaaattgtctatatgaaatgctagagcaaatagtaaagcattattggacaggattgggttggagttggggctaagaatggtgggggcctttttctccccttgaggtatttgcccagagattgaggagtaattttgataggctcacagggctgagaaatcacagcttagagtgcaaggatcatgcatggtgaatgtgtctccttgtcttgagttgggaccctgaaagtctgcactattatagtaaagataaattagctagtaagttgttcctcacagggactaaagctcagcaactaaaattggattaaagtgaaatcatatcgctggctcctcaagtttccttgtagaatcaaatgtaaatccttgctagaaagaaaaagaaaacatctaggcctccaact

SEQ ID NO: 42928 - DNA, 1068 bp, Homo sapiens
atccaggcccgcccaggcatgtctcatgactttcactgagctgcttagataaaacaatgcttgaagttactagttatagaaaacaagaatctataaactcataagtttactcataccataggagaaagaaaaataaagaaaatttgtttttttcttctccccatgttgggggagtgctgggagagtcttcagagcacattcctttgagccctagcttcttagataatattatcaagactttcctgggtctgggctgtgcctgtttctgcctctgggataagtcagcctaatacatgaaagcttgtttttcaaacttgcttttctctttttaattttatttttctttttttttctttaatttcccacctcaagagaagtatgtggttgataaaacatagttatttggctgctaattttgcaaagaatgggttaagtagcaaactactatttttgtctttttctatttaggtgtatgaatactgtagcagttaagaatactaagaaaagagtgtcacatatacacttttctagctttcggttgcaattaatatagtagaacatgttcagaatcatcatggtttataaatcctttttggtccacccccacccccccccccatccttttaggtagagcattgattttcctgggtgttctcataatttttccaaaccatattttcttaaaatgtactcattctcttctaattttatatatatttttaagattcaagacttaattttaagattgagtggtgatatctttcagaagaattatatttctgctgtctcatcttcaagacagtcaatttaaagtgaaggactcagaaatagagcttctaagggctgaaaacattttggtctaatttagacattaaaacgtcaattttaaatattatacaaaaaaactgccttatgtttttccccgttttaattttcagaattattgaagtaaatcaaaatcaaaagcaggtggaacaggatattaaagttgctatatttacactgatggtagaaataaataaaaaaggaaaagctctactgcatcagttagaggtaagtgactgccca

SEQ ID NO: 42929 - DNA, 1049 bp, Homo sapiens
gtataagtaacttattgccacacctgactctaccaccacacattcatctgaactctgaacccatcacaagatataaatccaaacaagtggtcatatgtgctatgtacttatatcacaataggtaaatacacccacatatagacataagtacatttaagaattatatttaaaactgtacacacataaatggatatagtttcagataaatctagtttagccaaaacaaaaacaggatctcctagtctaatagtttgtgaaaccgacataatgaagttaatatattttactgtaggatttcttagagctgtcatttacagcactgtaaattcatatacaatgagatttgcattgtaaatctctaaagaaggagacaagtttcctaaacttgttacccatggcttctgagaaacatataaaagcgctaggggaaaatattgatctagatgaatattttgttactgtcttgagtgactttagataagttttacaacctctctaaaccttagatcccttatgtgtaaaagagaatgttattgtttcttctaaacatacacatataccttcttgtcatagtgaattacacacagtaaacatttaatgaataactgtatatttttagaatgcatatgattggtaaatcataaacatttaagtttctactgttgaaatcaagcttgattcaggcctttcaagggcaccgttaaactcttaaaactagttttaagccagtcaatgtattctgtatcaaaaagttaacatagtatgcattgtaaaggtataggaaacttgagagatcacaacttgttaatagtaaagattcagaaatactttttgggattgtttttagagccaatgttaggttcgcttgttttgatatatgacagcagttctcaaagtatagtctggtactctttcaggggaccacaaaggccacccttttccagctacacgtctggatgagtgttgtgccagacctctgttgacttcagtagggataggaccatgtttgagaggcccaagaagagacctggagccagtgaatgagacac

SEQ ID NO: 42930 - DNA, 1050 bp, Homo sapiens
cattaagtgtcatttttttggttgtcaatatgtaaacattagtctggatgaaggtggcaaaagacttctatgactacctttattctcccttaaggaccattttgggctaagaaaaattatcccttagataaatttaaaagcttttccatgtaatttcctaagtatgttctgcttgtatttctatgatataaaacccttcaattcataaaattttcatagaaaaataaaaacattgctatggcttttaggtttatacttttttaaagtttcgagattttcttatttttctctaatattatttttctactctttacctacagaatttcacttgcttagaatcagcttctaaatgtatttttcactgggtctgtaattgctggccactcttgaaagttaatgagaggtaaacccagtgccaactaatttttaagagagaagcagttgacccaggtgaggatagtaaattccaaaaataggaagaataaaaataataaagaggataggactgtactttatagctgtctgccttcacagtgtcaaagtttcaggtgttgctgcttcaaccttaaaagattatttatttgtcccctgtgaatgtagggggaaataggctcctctttgagaagttgtgatcatacagttaagatatactaaaaagaatatttattttgcaatacattcccaactgtagagaatcagtcaagaggagactggcatataaggttacctttttcttctaggactggtctcaatttccagggctagtatttatgagcccacagagcaggcttgctttctagcctttgccttgttgcaggaatcagaggaccagagagaccaatggatggaacaggaggattttatttaagtggccactggcccaacagattcacatccaaaggctaggtcccaaacaaagacagggcttgacttttatacacacttctgaaagggtgttggctaatttaaatggcacaaaactcgtggtacaggcaaggaggcttacagaggcagaacaaaggcagtttgaatcaaacagtgacagatttt

SEQ ID NO: 42931 - DNA, 1025 bp, Homo sapiens
tatctgaaatcattttccatttgaggaatttcctttaatatttcctttagtggtgatgaattctctcagtttttgtctaaacatatttttatttgactatggttttttaaaggatttttttctcagtgtagagttctaggtaggtaattatttttgcttagcattttgaagatgttgctttattgcttcctaggtccttgtctctactgagatgttagccatcagtctaattgttgctcctatgaagattttttttctgatcatgtttaagatttatacattggtttttgttattagcacttttcctataatattcccagatatggttttctttgtattacactacatcaggttcatagtgcttgctcgaggtcttttctttttttaattaaaagaatccttggtcattgttacttcaaattttgcttctgctctatactctcttctttccttctaggctcccagtaatatgtatgtatgtatgtatgtagaccttttgtttgtatcgcatgtaaacactttgtcacattttctgtatatttccacagaaatttattttactaatcatcattcttcagctgtgtctaaccagctattccatttatctatttcgttcttaatttcagttattgtatttatttttagaatttacattttattactttttaaatttctaatttccagttaaaatttcctaatttttaatttaatttcttaaatatattgataataagttatttttaaagtccatgtctagtaattccaatagtgtatctctggacagctgtttcctggttttcagtcaaatgttcttatctcctggtttgcttggcaatattgtgtttaatgctggctattgtatattaaaatatagagagataattcgagtctctggatgcttttgtcttcttccagagaggatttagaatttacttttacttctggcaggcacatagaaaaggggcaaatcaactgatacctgtcagagattgcaacaatttaaagctggtctatttccattttac

SEQ ID NO: 42932 - DNA, 1028 bp, Homo sapiens
gatgcagaacagctgctctcaattcagatacctgggagcactgggcaaatcatctaatactactgagattcttcatccagaagtggcaataataataactatgctttttccttctgatttctctattcctttttgtagtaccaattcttccagtaaaccacagctgttttagactccccttctctttatctccaatctctattcagttactaaatcctattctcttcttgttggcagtatcttatatttactccatttcttatctaattcaggcttccatcacagatacagttttatttggatagttactactatgagtttctgcatctaatcttttaacttcaaatttagtttctaaattgaaacccgattaatttttctggataattatgggttacataatagtctggaatttaagcttggagaaagataaagacttgagaatagatttaggagttattgtaagagtcttgacagattaatatggaaggttttcaatcgctgaagtgaaataaatattgtagaatggattaaaaatagaaaaatatggttccaaaacagcatctgtatttatgggacaggaagaaggagtatcaacaaatgaaacaagaaagggcaaacaagaagaagcatctagataatgtaatgtcatttacaactgcacattttagtcacctgggaggcttttgaaattaatgatgcatgggccccatccccagggaatcttatttaatggttggtctggagcccagctatcagtattttttttaaagcatcccaggtggatacaatatacagctaaggtaaagaaccactatataaatatatgactgaaaggaacatatgaaatagggataattcttagagagtgggattagaaagagaagtaacaatatggaaatttttctttcataatactttatttttttccagtgaacacatattacttttattttttttttaaacctgaaaaatatcagggcaatataagtggttgttaaaaaacatcaacttttgaagttagattt

SEQ ID NO: 42933 - DNA, 1051 bp, Homo sapiens
gattagagcataggaaaagagacacagccttagattctattcaaaatagtcagtgtagaggccaggcacagtggcttatgcctgtaatcccagcactttgggaggccaaggcaggtggatcacctgaggtcgggagttcaagaccagcctgaccaacatgaagaaaccttgtctctactaaaaatacaaaattagccaggcgtggtggcgcatgcctgttatcccagctactagggaggctgagacaggagaatcgcttgaaccccagaggtggaggttgtggtgagccgagattgcaccattgcactccagcctgggcaacaagagcgaaactccgtctcaaaaaaaaaaaaaagaaaaagaaaaaagaaaatagtcagtgtaggccaggtgcagtggttcacacctgtaatctcagcactttggaaggccaaggtgggaggatcactttgagccccaggaatctgagaccagtctcaaaaaataagtaaataaataagaaaatattcagtgtagagagatatctcaagaaacaaagagtcgctctgtttaaagtctcaagggttaagaatgtggcccgttgcggtggctcacacctgtaatagcagcactttgggaggccgaggctggtggatcacctgaggtccggagttcaagaccagcctggccagcatggtgaaaccctgtatctactaaaaatacaaaaattagctgggcatggtggtgggcacctgtaatcccagctacccaggaggctgaggcaggaaaatcacttgaacccgggaggcagaggttacagtgagccgagattgcaccattgcactccacctgggcaacaagagcaaaactctgtctcaaaaaaaaaaaaaaaaaaaaaagtcgctgggcacggtggctcacgcctgtaatcccagcactttgggaggccaaggagggtggatcacgaggtcaggagattgagaccatcctggctaacacggtgaaaccccgtctctactaaaaatagaaaaaattagccgggcatggtggcgggcacctgtagtcccagcta

SEQ ID NO: 42934 - DNA, 1047 bp, Homo sapiens
tttttaaataataataaatggaaaagtcttgattttatcaattttataaaaaattggggagttatttctggaattaaaaattcatttttattttcatttgcttcattttctttgaacttaagattaaatctttcttcatcctttgtcatctctacagtctgtcagttctattttgttcccagagatcttcctgtatttcattattgattgcaaaagaacccctatactgtctaacaaataattggtttgtcagcatgaaggctacttggcaaagtatgagtttctgaagactaactactccctcctggttttcttcctctcccaaatggctttatgatttggagactgaagtgttcctgccttcatatctgatcttttttttttttttttctgtcttactggtttgactgaagaaaagattaataattgaataaggtcatttctaccctttggcgaaagtaaggttctttttgttttaacatagcgtctcaataaagtcttaccagctatcttgtggcctctagaacctgtctatagctctccaacactgaaaacagagttcctatctatgcctgtaaagcattcaccttctgtctgaaaggcatctgtgggtgtctgctcatttgcagagtgaaaatgacaggtcctttaacaaatggcaaaagttaaactccttctgggttcaggttgttagctctgcttgctttctgtttaataactttccacacaggggtttcctcctctttcttacccttcaacttactgattttctgtgaatcctgtctttgccactttataattccaaacatcattcattcattaagcaaatgtttattgagtgtttactatgtgccaggcactcttctaggtgctggggatatagggatgaacagcatactcacacatatagtctaggtaggaagacaaggaaaaatacaagttttttcaaaatgtggtaaatgctgtgaaaaaattgtaggataatatgataaaagtgattgctgctaacgtaaaaaaggttaagaaggtttgaggaggtaatgtttg

SEQ ID NO: 42935 - DNA, 1038 bp, Homo sapiens
ggttgaaaacaacttattggacatgatttttaacccaggatatttttttcccaaagcagatctaaattgtttactacccagggttggaaagggcaggcacctctaatctagtctttgtcctctggttgccctctcccacacccctttccacctatacttggttcaagacattttctgaaacgaaaattctgctgttgttcaaactgccattggttatgagaactctgcgtcctttgggatcatctcttagaactccagtgatctatcatatttgctgctacatttgtaaaatgaactttgcctgtattggttgactttaatttacagttctttatttctaggatgttttgtcctctagtttgactcatgtatagaattaggatactttattttaggagtgtaccgtaaaagcacactggtccctttgttgtttttattatttaggtttggaatttgtttgctttttttttgtttgttttttgttttgtttctgtttttgtttttttttaaagttggaaatagaagaatgagaaaaatctataatcaggccaaacttgagaactttcctgtgcttcagcactgtaattctgctgacctaatgttctcaaaagaggcacttttactttctattgtgcatgtatgattgttgttttttgcttttgagggggcttttgtgtttgtaataatgaagcagaagaaaagtgcagtagtagataaatgatcacaacatgttatgcaattttattttataaaattttaaggggaaaagtttaactctttgtaaatcatttcttagctctggtaaaatgcttatattactcctctaaaacatgctcaattcaggcctttgtctttgttaagtgccttttttctttcttttttcctctcttttgaaactgttgtcacattatcttaaagtacagactgataagtcaggggattcaggaggaagaatctcacacttgtcaacatcatgtcatgctgtgtaaccctcttcctttgctttctatgtatatggatatatgtgtaagatacata

SEQ ID NO: 42936 - DNA, 1382 bp, Homo sapiens
ctcaaacttaaaagaagaaaatagatctccagctggtgaaaattttgtgccccaaataatatattaatccaagtctaccaaggtaactaagtaatggatgttttctctcttttattacaagcaagaaagttcatttgcagttgtaaaaatgattaccgaactccagacctatttgctataactgattggaaataatgattctgatttttagtctgggtaaacacatacttcggtgtgaattttgataagggaaagacttgtttggtagcccaaggaaaaacaggatgtatttatacagtgaatgttcactctgcagaggaacttccctccagttacatcttcctcatacattagccacctccacacttgacatagatgccaacatgtttcaaaaccaatcttgaaggagcctaaagagttgatggtcctctaggtgaaagacaagaattactgtattgcatttgcttatagggaggtgtgtttttgctaacttgaagggatatactgtatttcaaataagtgtgtgacttaatattttgggatttttttttcctcctttaaaaactggacctgaacacaagctttgagttgatgtttgtaataatctcaggacctgaaagattgtagcatttagtgtgtcttaaaaattatgtactgtaccagccatggatttttgtaaatatacctgtctcccttttttgtattttagtaaaaaaaaaaaaaaataaatttaaataaaagggggtggtgatgacatgtgaatgggtgcgggtatgtgtgcgtgtgtgtttgtataaggctcttttgagatgaactggtgcttgtttaatttccagctcaaatcggagcaggaatatggacaaactgctgctactgaaccctgcactgagccgaggtatttccatttggttaactaaacgctagctaccaggaaatgacgcagaagtcacgttcttcttcccactgccatcttgcctttgcattctcagttctacgtgccctttgaactttaatggtaaaacatttcacactttggatggtttgcttgtctctagtttttagaaagctcttatcactccttcctaagaaaaaagaagggcaggtaaatttttttaaccaaaaaaaaatcacacatttcataaaaccctgatgaattttggatatgtgagagggcataaacattcctaaatatggacctgtgaatttagtaaattacccccatgaatatactccttcagtgcagggatttttgtgttttttttttttttttaatttttttgcaacagccttgctcatattccaggtgtagctagcaaacccctgtttttgaagcaagagccttatttgattcagtgtagatgtttcctgtctatcctttgtga

SEQ ID NO: 42937 - DNA, 1089 bp, Homo sapiens
tcaacgcttcaaccggaagcagaaattgaccgcggcaggcgccatctaacggccgctggagcaaagctcctcctggaaattcgcaacaccggaaaaggtccggctgcttccggtaaaaacccaccagagctgacgttcagagggcgagtctcgaagatccggccaatttgcccagcgcgctgtgctccgcgacggcgcatgcccgcttttgcgcaggcgcggggactacggcgcaggcgcggagactattgcgcaggcaagcgcgtacgcagaagcgtgcgcgcgcccgttcaacgtccggagcatcggtgcagtttcgagggtaaagcctttggcgcggtgatgtggacttttgttctctaactacaactcccagcatacgtcacccctcacgtgggcgctaggtgtggtttcgtgggatagggtaaggcgaaaatgaagtgacgatgacgtaccaaagaggaaaatagttgaatatgttgtgtgagcgcgtcgtttgcagaagccccagtggcctaatggataaggcattggcctcctaagccagggattgtgggttcgagtcccatctggggtggcctgtgacttttgtccttttttcccctttctaaacaaagcgaaatatgccaactttactttttttttttttaaatgggaagtgtgtgtgtgtttttactagctggtgggctgcaattttcgagaatctgcacacacccatgtcctttgtctgagccgcaggtcccctgggatttggggagacgtcaatacgttgaattttgatatcccttttataaatcatttaaaaatgtcttctcagcgtgttccatatcaaatccacacccacaccccccgccgggcccgcttctcctgagactcagcggttggtcggctaacgggcatcttcaatgacgcagtgaagaaaagcccctgtttccccaaacccttgttctgggttagaggtcctggtaccttcagttaacagtcgggtttcgtttgattttgttacggcgcccctgggccttcgattaataaggttcggtcaacggacaagtgagcggttccactgctcgtcagtcgatagggggagtc

SEQ ID NO: 42938 - DNA, 1048 bp, Homo sapiens
ccggctaatttttttttttttttttggatttttagcagagacagggtttcaccgtgttagccaggatggtctcgatcccctgaccttgtgatctgcccgcctcggcctcccaaagtgctgggattacaggtgtgagccaccgcgcccggccaagttttcaattttcattgtaatgaaaggtatatgccacattaatcaaagtcacagaaatataaataaagcagtcctttatttgcttgaaagggagaaagttctacataatattctttaggtgacattaatgatgagtgacctaattataatttccatatctaccattaaccaacctctgagcatctctggactttagtttcctcatctgtaaaattaaggaattgaaactagatgacttcttgcagtactgactgaatacagggacattcaatgcaactccttttaaaaatccgaactagaggtcagctttactaataactatagagtgcctctatagatgtattaagtatacatgtatatacatacatgtctgtatttcctctgtgcaatttactttcactctagtgaatgcttatttattaaatctttctctgtggacctgtatctctagctgggttaagaatttctgacttgctgcttctctaggtcaccagtgaaaagttgtgcagagcccaacatgagcttcatttccaagctgccacctatctctgcctcctgcgtagcatccggaaacatgtggccctacatcaggaatttcatggcaagggtgagcgctcggtggaggagtctgctggcttggtgggtctcaagttgccccatcagcctggagggaagggctgggagccatgaacatggagaatatccttggatgctgcattcataggagaattgaataatttctatcaatatgtatttatcattaaattttttttaagtttaaggtttttctctgtaattttgtttactagttcttaggggaattaactggacatttcatctttactctcagtgaatttactgaactttttgcactagactgatgttgtttttctac

SEQ ID NO: 42939 - DNA, 1562 bp, Homo sapiens
ggaactgctgccaatggggtgaggcggggcctggaggcagaaaggagagtttgtgcttttaatgttgacttggctgagacgggagagcccgcgtctctgttgcgtagttggggggcccgttttgtcgctggttaggtacctgcggaaagctaaggcctccacccccgatataattccttaacccagagctttgggatcatccctcgccgccgtcctccagagtacctagagagaagcttccccctcctcttcctgggtcaggaggaaacctttattactaacccagtctcagagatgcaccctcgagccccacagaaacaaccatttttatggaaaatctgacccaaaccatggtttcttaagtgggtgtgtttggccccattttgtgagaaggaacatgttatggcctgtttttccgagagacctccattttgttagacaatttaatagaggctttgttcagtaaatattgacaaatgttgcatgtccctaacagaacgattttgaaaatttggtacccagtgaagtagaatagaggagaacaaagatcctttcaggcgtttagtttagaatctgtatagagagcccttaattgctggattatcctttgtcataaagagaatttctaaataaaatgatgaaatgctgttgcttttttggtgatgttaattagtaatgtactctcaaattcaacttaaatacattcaaatatgtaggaaaggtctagttcattactttcttaacacagcaaaatccttggtagtttttatgtgttgcttctttaggcagatagtttcttagccactaaggaaatgctttttttcttgagaagttatttaagtgtattgatttaagagaaaaggcacgtcttaaatttagtttttaagttactcttttaatttacatgagtgctttacagcaaaatatgagtaaattttaaaaattttattgcattcaaatctttcagcagtgcgtagagtggcttttcagtgttcacattttcagttttaataaaaacccatattgggaacttttatttgtagaatatatagacaaataggtgtagatggcaaacctacttgtggttgtgtagagaggaaagattgggaaggaaatgagttttgtatggaaagttaacattaacttaaaatgccactggagaaacttttaactgttatcatttctcacgtttagataagaatggttactttatcactgcagcatgtcttaacattcctccttttccaacatgagagagggtattgggaacgggtttcattggatcctagctaacagaataactaatctgtgtaataaaattaagttatttaagacgtgctttacatgatccttttaatccttgatggataccatttttgggatcttcttcatggattggatttcttagttttactgggagggtagttggatcaaggtaaaccatctcctgataagtttctgaattaggcagcccgtctagtattgcaaagctaaatttaaatatatatatttctgtgtgtgtagtcagcagaaacatggatttcttaaaatccactttgtgt

SEQ ID NO: 42940 - DNA, 1050 bp, Homo sapiens
tttttaaataataacaggatatttcttagtctagagcttgtaaattctttaatataaggagttttataggattaaacagtagtttctctgcgtttcagttaactatttaactttatcagagtttcaggcatatccaaaacactgaaagcacctgcatagtgaatcaatgaaaaaagaaaagttttcctcattttgcattttgaactctgaataatatttctatctacacagcagcccagaaaacaataaaagtatcacttcatataacattgcatcgttcctggattctctacagttgtttagttctcctcaagtaagcatatgcttctgagacattcttttacttcaggtaaatataagcaaaacaaagaaaaatcattttgtctatttctgcatcagttctataaggagcaagtaaattcttttattttcgtttaggttggatgttgtcatataaggatagatggtagtgttcaacgtgttcaagatgggtagtaggaattcaatggccatgaggtgtcatggatcaaggtcaggtttagtgaatcaggtactcttcagtaacaggtggttcatacaaagcattgaagcttaaagttgctgtgagttcagcaagcaggagggttgagaagacaggcagatggtttaaaactaaaggtcaataagtgggcaagactagttaaatgaggcagatactccccaaagatggaattccagaaaggtgcttgaaaaggactgaattcttaaagcctactgctgttagtatgtagagttcttgaggaaacaagcagtttggcataacttaatctactaagaaactataagaaggtgaaggaagttggaacatcttactggaaaaagaatgagggagtgaagagggaatcttgtgaattcaaaacttgcagaaaagctattctgtttcctttttgtttaggttctcatgcactagcagctgctagaatagatattggaaggcagggccaaaataggtcagttgttcagttttgcaagattattgaggatatagagaaattaatttgtgaaaactct

SEQ ID NO: 42941 - DNA, 1045 bp, Homo sapiens
actcaacatgaaaggaatttaaccagctgcccttgctgaatcttgtctcctgaatatggtaaatggtttttgtttttaatcttaataccttagatttctgcagaccccagttttctcttttagagttaactgataattattggatagtatctataatatacctggctgttctgttctgtactgtgctctagtattagtttaaatggtagacttttctcttaaagtaactttaatagtttaatagttaaagttacttgaaggtatgttttagatcagggactggcactatggcctcctgcttttggtaaataaagttttattggaacacatccatgccgattcatatacatgatgtctatggctgctttggcttacgacagcagagctgaatggttgcaacagagtcatatggcccgcaaaccgaaaacatttaccatttgactctaacaaaagcttgttgatcaccattctggtttagttattctaaaccaagtgtggtccttggagcagcaattcagcatcacctcagcatcacgtcgtattgttagaaatataaattcttggacccacctactgagtcagaaattctggatatgggccccagcaatccatgtttttagaaaccttccaggtgattctgatacacattaaaagtttgagaaaccctcttctagatcagtgtttcccaaatgtttgtcacacttattgcctttattattatttatttttattttttattttttggagacagagtctctgtctcccaggcgtgaaatgcagtggcctgatcttggctcactgcaacctccgcctctcgagttcaggcgattaccctagcttcccgagtggctgagatgacaggcatgcactgtcatgccctgctaatttttgtatttttagtagagatgaggttttgccatgttggccaggctggtctcaaactcctgacctcaagtgatctacctgccttggcctcccaaagtgctggtattacaggcgtgaaccaccatgcctggccttgcctttattattatttactgttttc

SEQ ID NO: 42942 - DNA, 1791 bp, Homo sapiens
gaaatacagaggtatttatatctcttttggcaccaatagttcttgcttcagtaattcaccagtaggttttcattcatcgataatatatcagtttaaggctaaaataaaacacctacatttcttagggcttatcattctatatagaaagaggaaacatcctaatgagttttttcttttgtttttccaaagagattctaagcaaaaaaattttaactaacatctatattttgttattggagctagttacctttctttttcttagattctttaacgttttgagtagatagccatatttgataagcaggttggatgcttctgttgcttaggaggtaggtgtattgtgttatatgaagacagaatgaatttaaatatacccagtttggcagtatgaaaaagctcagactacataaaacttggaggtatggaacctttggacgcattaaagttaacgtttcattaggcaatgtgcctttgtttgactggtgtgtaagtccttcttccaggtttgtacgctcttaaacgcgttattctaccctctctaactcctcccagcagcaaaagggagacacttcagctggaacaaaatagtggaagaaatggcgtctggggttcagtggggattcgcagtgtgtatgcaatgtttgcaagattattttttatgtttttcaattactgtaaataaaaatatatcaatgcttagtgtcaagaagggaacattgtataccagtataaactctcttagtgggtctgcaagttgcttaacctctcggggcctcagttttctcatctgcaatatgaaggagttggactcgataatctttaaagtccattcctgctctaaaatcctatgcttttctgaagtactctatttaacagaatgcattgctttctcactttgactatttgaattatgtatgcagtacacttactgcaactgcatgttgtctaaaatagtttttctataggatgtatataaaaactaatccctcttgagctgatttataatgtgtgtatatagccacacataaaaagctagtaatagtagggctctcagaaaatactttccagttgtctaaccttgaatgttattaactcttctatattacaggagatacaactcgtcaacgaatcaaattcagtgatgacagagtatgcaagagtcaccttctcaactgttgtcctcatgatgtcctttctggaactgtatgtatttactaaatgtattgttagattactgatatgctgcagtaatgaactacttgataaagtcttaattctgtgtcaaaagaattgacttgtgaggggagatttgcatcctttattgtttgtttattcaggatgattacttaaatcttcagtaatgggtttcctcacaaaagtggttgatacgttttgttttataattttttccattcttcagagcagttttttaaaagcatgttttatttggaatacagaagtagttatatagcatttgtacttttagttcagaaataaaataatttatttttaaagttccttttactgttaaacagagtagacttttatctagtacggtatacatttttgttaagatttgtacacatttgtggaatcagtggggaaatatattagtaaatacttatatccacacagcttaatttgggagtattgtcacttaaaatattgctcctgctaataatgtaaagctcaatttagattctatgtctgcagagatgttgatcttagagtatcatcgttttaatttggaagataaactgcatgatgatggacctgttggaatgtggaaca

SEQ ID NO: 42943 - DNA, 1029 bp, Homo sapiens
taagaaaattacaaaaaggtagaaaaatatcatgatttatctttactttgggaaaaataggtttggagctggaacatatacaagtgggaagaggcagttaagaaattgggaagtggtagaaaagcagcagcgttatgtatgcacaatgtgccccatttctcttcaccctatactcatgtctaaggtatacttgttaacatgggggtcagactccgtgttcttgtgtaattcgttagagcatcttctggaaaaatgcttgagctgtaactatggggaggaatatgtataactttcatcctggaaaacttggataaagaaagcctgtagtgaatgtagtcatatatctgtatcatactagatgctgctacttagatttcctgttattacatcaaaatcatcttgtccagaacaagacattttccctcatagatcagttttcccatttgatttagtcagttctcttggtggcatcattgttttctcatgtttgaaatacttgaaaccctgaagagactcctgacttttttctttccacacttaatttccatttagctaatacctgtaggttgaaagttattgtgttattgaaagaatattgagctatattaaagacctgttgagatttttactctgctgccattagcttatgatcttaggcaaatattgatctgtctgagtcttgatttccatatttgtaagaaggtgtgatgggattcattattccagagacacttcacattttttaaatgattttttttttttttaattcttcggcactctggtttacctctgtcacctcctttcttttttctcttctaatttgaccccagtggctttattcctaggttcttgtaatatcttttcttgccctttgtctctttcttctggtcaatccatctagtgttaatggttctgaaacatggattttattgtgtcgtatttctgcctgagtagtcaagcattcttctttgcctacagaataaattctgcattttttttgactcattttcagactctttcaccatctag

SEQ ID NO: 42944 - DNA, 1049 bp, Homo sapiens
agtctttgggaggtaggaattgggactgttttttaaaagcttccatcaatattatgtaaaagttccccaggtctaagttgagaaccacagtggatcaaaaagtctttccaactgtgacatcttgcattttatgaaataaaatagaatgtagcatcatgtgaacagctatagcttgtggaaataaaatattaaggaagttgttggcgtgattgatgtttagaaattgttaatttcagaaacgtactgcctggcatatcaaagacaatgacagcatccttctgccattagcttctttcattcctgttatattttctggaattctttcttaggaatatttaagtttttctgcattttcttaataattgtttaatgagcaccttttaaatttgaatttctacacatcatagaaagctttactttttgtttattgtcactgaaaaactccttagcttgttaaaccagactaatgaatcggggggtaaggattggagcctggaaaaatctcagcatgctcagtaacagtacagtactttaataccattaagcatgatgaggacttttataacagtgatgagtcctcattatttcccaaaggataactgggggcagaatttatacgttcccattcattccattatataattaagaactgaaggtaatatagttttacagaaaaacattttctgtttgtttttacttttgagacagggtctagctctgtcacccaggctggaatgcagtggcatgatcacagcttactgcagctttgacctccagagctcaagtgatccccctgcctctgtctcctcaggagctgggaccacaagcatgggccaccatgcctggataatttttttcttttttactttttgtagagacggggttttcttatgttacccaggccggtctggaactcctgggcttaagtgatcctcccaccttggccccccgaagtgctgggattataggcattagccactgtggccagaaacattgtgtgttttttactttttttaatagtcacaacatctaagagtccgaaggaagaa

SEQ ID NO: 42945 - DNA, 1036 bp, Homo sapiens
aatgtgtgttttggagagcagtggtttgcttttaaaaccagccttcagtagagagttcctactttgtttatactgtgtcctctttgagttagttttagacaatatagatttttctcagttgtgccatgctgtaactgttactcttgactacttacatttttaaaatgtctgattctctgctcatacctacttatttgtaaatttattgtcttggatatgtaactataggacttcatatttatttcttttaaattttatctggtctattaatacttttgaatcttgatctcgtgcattagctatcctttttagttgggatattttataaaattaattatcatacgtttgttttatacatatttaggttgttgacaagttaaataggcatactcatttttagatactgtatacaaagctaaggctcagacctgtgtgccatactctattcctgttccctgttaccataaacttccctgtgattaatagtggcatataaataaataaatattttaaagatctgccttctaaatcttctgtacaacctggaacattactttttgccttttcctaagattcatttgcttctccctctttagatccagtttaattgtatcctcttcagaaaggtcttctctgaccaactcatcccaagtaggcccccataataatggggaacattgctattttattacatcatctgactttgttcatagacatgattcttgttatttgtttcccctcaaatagaatgtaagctccatgaagtcagactgtctgtgtcacttaagtctatatccctagcacctaaagtagtgcttaccacaagtgggaacttaatagtcaaaggaaggagaatgacttgtactccctttttaccaaccctccagagattttgaggtattccaagggtggtcacacctccagttggaaaatctccgccttgctttcatcaccgattaatcatacctgtaatgatccttgcatcttgccaattttttctcatattttcccccaaaaaagtttcatgaaagatctt

SEQ ID NO: 42946 - DNA, 1150 bp, Homo sapiens
gggaggtggaggttgcagtgagctgagattgtgccactgcactccaacctgggcgacagagcgagactctgtctcaaaaaaaaaaaaaaaaagtcatggagctgggtatggtggcttatgcctgtaatcccagcactttgggatgccaaggtggccagatcacttgaggccaggagttggagaccagcctgggcaacatggtgaaaccccatctccactaaaaaatattaatagaaaaattagctgggtgtggtgatgcacgcctgtaatcccagctcctcaggtggctgaggctggcaggtggaggttgcagtgagccgagatggtgctactgcactccagtctgggcaacagagtaagactgtctctaaaaaaaaaataataagatcataggccagtctcagtggctcgcacctgttaattccaacactttgggaggctgaggtgggaggatcactggagcccaggagttgtagacccatctgggcaacatagcgagattctgtctctattttaaaataatttgttttcacttaaaaaaaaaaacaaaaaaaaaaaccaagtagaaatcatggagaaaggtgaaattttacacattttccacaaaatggggaaagattatggaaagaagacttgtaggcctaatgattatttctggcagtacttcaaattgaattattaaacagattttgacagcagttgtactgtattagaaaccagataatataaagtttaggataaagctgtttaagaatggactcagtaaatattctcctcatttattactgtttttaagagagtcgtagctgagaagcaggagaaaagaaaccaggaacggctgaaacgaagagaagagagagagagagaagaaagggagaagctgaggaggtatggagtaatgggccaagtaattgaagttgaatctctgtggttctaaaaagagatataattgattttaaattttagatggtgataaatctgttatgggacgtgggaaacttctgcttactttaaaaaatattactgtgcgaattatataaatgtttaattatacaagtatcgtaactcttggccatttaacggaatgtgatttcctttaaaatgtgtggaagagtgaataaagaatgcttcgtatcttgtaagatttata

SEQ ID NO: 42947 - DNA, 1031 bp, Homo sapiens
taatcccagctacttgagaggctgaggcaggagaatcacttgaacccaggaggtggaggttacagtaagccgagattgtgccactgcattccagcttgggtgacagagtaagactgtctcaaaaaaagaaaaacaaaaaccttacagttctgttagcaacatctatcaatgatatttctgcctaaaacactaaaaaaactaaagaacattaataagtggggccagttgtgtcagctaatttatattattggtgaatttctctgatctagcatgataagtagaaacattaaactgtgatactgttattgtttactgtttgattaatataagctggtccctttgttgaaaacataaagtattgcacatagaacatctttagatatttgggccagaaatttaatttctattcctctagtcctgttacctagataatatgtttgccttgtaactgggctccttagttctctgtgcttgcccaccccccttcttcacctcattctatttttcacacgtcagccaggatgagcctttaaataaatgaaatacatcacatcagccctctgattctccaaaggtttttcatctcattcatatgagaagttaacatctttaccaaagcttttacatagggtgacggtgtggcctggggtgtccaatcttttggcttacctgggccacacatcagatacactaatgataactgatgagctggaaaaaaaattgcaaagaaatctcataatattttaagaaagtttacaaatttgtgttgggctgtattcaaagccatcctgggcagcatgcggcttggaggccgcaggttggacaagcttggcatagcccaaactgccctgggatagttctggtttatgtcttttatcccagaatatgtattaatagcttctcattacattcagtaacttattcagagccttctagtttgaatgataaagtacctggtcatcctgcctgtaagaccctgatattacttccttttgctcacttcattccagccacactggtcttttccttca

SEQ ID NO: 42948 - DNA, 1028 bp, Homo sapiens
taatatagcccctggcatatagtagtggttcaaaagttgctttcacttgaaaaactatttctgataataaatttatacattactgattgctctctgagaattatcaatcagtgtcttgtttttgagacagaatttcactcttttgcccaggctggactgcagcgatgtgatcaccaggtcattgcagcagccttgacctccctggctcaagagattctctcacctcagcttcctgagtagctgggactacaggcatgtgcctctgtgtccagctaatttttgtatgttttatagagacagagtttcgccatgttgcctaggctggtcttgaaatcctgagctcaagcgatcctcctgcctcagactcccaaagtgttgggattacaggtgtgagccacggcgcctggctgagaattattaatgttttattttgaattctagtatgtagttattaacacaccagcaattcagtgtagatttagctgacttggaatataattgacattaagactactgaaaaaaagtttctctttaaagaaaaggctttaataaatgagaaatatagtaattacaaaggtagaaacaaaatcaaatcttgtctggtagatccaggtccagagagcatcgcagacatcgatctcgctccatgtcacgtgaacgcaagaggagaactcgatccaaatctcgggagaaacgccatcgccacaggtcccgctccagcagccgtagccgcagccgtagccaccagagaagtcggcacagttctagagataggagcagagaacgatccaagaggaggtattgatgtgtcaatcagaggatatggagctaccttaatgttttagagttgtttatgtttacttatgttacttatgtttagagttcagattattggtttgaaacttttgcatctggtaatatgtacacatttatgtgtgggtgtacaacatttttctgtgattatatgggtagttttgaaagaatatacttatgagccagagcaagaaattggaaccaatatgtgtaga

SEQ ID NO: 42949 - DNA, 1354 bp, Homo sapiens
ctcctcaaattaatatttttcagatcctcaaaagaaagattcagagaccaagacttagcatcatgtgacagagacaggagttcaagagacagatcacctcgtgacagagatcggaaagataagaagcggtcctatgagagtgctaatggcagatcagaagacaggaggagctctgaagagcgcgaagcaggggagatctaactagctgtgtacatttcttcagtccttaagcttcctacggagttacgtactattgtttagttcacagctgttcagggtgacagtgagcagatccagacaccagatccagctaggctagatgtacagtatctaacttgatctgaactgaacctgttttccttgatgatgcctaaaactacatccatagtttctggtgaacctgtaatacagttctgaaagtacagttttatataataagatgctgatctctttattctttcaagtaagagtgctagtgaacaaattgtgttacttgccttgggattttttgaacgtttgtaaaatgctgtcttcctagtccaaacagctgcagctttgggcatttttctttttaattattcttcctctgactttgtatcccttaatacctacactctccaattgtaagagaaagggggcagggaagcaatatagcttccattctaaggctgtattcccgttatgaattactagctgattacagttcagagcattgatcctggaatgtgtgctggagaaatttaaaatactggggttttttgtttaatggtgcctatttagagttggaagttgaacagctgttgcattacatacttttgcttttttattgaaattttgaaatcaaacgtcttgatttttctgttctgttgaattgctatgttcaggatgttctagggggtgggggcagggactcttttcgtaataagcacttgttttattttgtgtgtgtggagtataaaggctacacccttattgtaaaaaaataataataataaaatgaaagaaacaatcaccaccaccattattaaactgtaacttgtctagtaaattgtcactagaactatttgctgtgggcatttcctctattctgttacgtcattaacagtgccttactgtgcaaggcaccaaaggacataaatacgtacttgcaaagattccagatgagctgttcatgtgggccccttgctgactatattccagccacttcagggttgtttgtaatgaccgttatagagaagggctcgacctgcagaagaaactggggtgtttttattctcattcaacaaacccaaataaaaacagtatatgtaaccaacataatgagacttaagtttctgccttgaagagttgtata

SEQ ID NO: 42950 - DNA, 1095 bp, Homo sapiens
acacccgggcttctgcttacagctggaggcactggccacctaccttccttccttggctgggagcatcaacagccaagcccctttacacggcagtcatcttgatgagttgctggggccaaagcctgccctccctccctctgtaagcagtatggattccttgtggccttctgagccttctccttgctactcaagagtttccaaatcaaaagacttgcagcctgttcctgttttttaaaagtatttataaaagctgaatgtcaattttctacttagagttataaatagaagcagatgctctggtttgttgatcagcacgctgtgttcttacaggggaagtcaaagaatccgaagtgtgcttggagcatagaactagcgcaagagggcgctagtgaggcggtgcggcgcgggcggccaggagctagggtttgaaaacagacttcggtttgagccctgaatctgccacttagaagctgtgtgcccttgggaagcgataataatacatttaccaaagtcagactagataaccccagcactgaggagttatccacatcatctcttcgtccttcacaacaataaatctataagctagaagttaccatctccagacttacagatgagattgctgaggcttaaaaaagtcaaaaaggtactcaaggtatcatgatagggcctgggggagttgaatgtagtttagattaaccccaggacctactactttatttttattgcgtttattcaaaggcaaaacctgtaagagatgcctaaaaatgataatggctacctttcttaaaaaaactttattgagatttaattttcccacaataaaattcaccaatttcggctgggcgcagtggctcacgcctgtaatcccagcactttgggaggccgaggggagtggatcacttgaggtcaggagttcgagaccagcctggccaacatggtgaagccccatctctaccaaaaacacaaaaaattagccggcatggtggcaggcacctgtaatcccagctattcgggagggtgaggcaggagaatcgcttgaaccctgaaggtagaggttgcagtgagccaagattgtgccactgcactccagcc

SEQ ID NO: 42951 - DNA, 1027 bp, Homo sapiens
catgtgccaccacacccggctaattttgtatttttagtagagacggtatttctccacattggtcaggctggtctcaaactcccaacctcagatgatcccctccccccccccaccccgccccgcctcggcctcccaaagtgctgggattacaggcgtgagccaccatgccccgcgtggcaatttcttaaaaggtgaactatatacttagcacctgacccagtgatctaatccccaggaatccgggagaaatgaaaacacttccatacaagtacttgtactgacatgttcataacagcttaattcataaccaccccagactggagacaagactaatgtctatcaactggtgaatggataaacacattgtagtactgtgtgcccatacaacagaatgagctgctcatatgtgcaacatgaatttccagaagcattatgctgcatgcaatgcacatgctgtgtgactccgcttctacgaactctacaacagggaagatggacgtggtggaacacatcaggacagtgtctgtctctggagtggatgtggggtcatggggaagggccttgagggagctttctggggggctgtcaaggggaaacagttcaggtggttggagcagggagagaccagggcgtgcagttagaggcgaggtttgaaaggtgggtgaggccaagtggcaagggccttgtgtgcatgatctgcttcggctgttatcctgagcagagcagccgacactcatgagggttccaggctgggccagagactcagtcttcctctttttgcccaagctgccatccctcaagacacttagtagttccctgcttcctccccaatttctggcacgtgatgctctggaaacgtaaagcttgcagggtaacatgaacctcctggacccctgcctcagcacaggaggggatgcagatgttggttgggaatagcggacacaaaggtgatgggttggtttcccaggactatcgtaacaaagtatctcagactgggtggcttaaacaacagaactttttttcacca

SEQ ID NO: 42952 - DNA, 1050 bp, Homo sapiens
tcgggtaattgctacagattcttcctctcaattttggcacttatatcatgatggacaagtaacagtttacagacaaacattgagctgcagaggcactgttttcatctatgatttatgtataacattgactaaaaaaacactttcaaagtgggggcacaacaatgtaactgtacttaactgtgcactcaatggttaagatggtaaaaaaaaatccaaacaaaattgtaaagggaattcacacctgctaggagggctgtaatcaaaacaatgcaaaccaacaagtattggtgagaggatgtggagaaactggaacccttgtctgttgctggtgagaatgtaaaattatgcaaccaatgatggagttagtctttcctcagaaagaactaccggtagcagcggtggtgtcggcagcggctgtagcaaagagtttggcgcgatgtctcacaccattttgctgatacagactaccaagaggccagaaggcagaacttatgctgactacgaatctgtgaatgaatgcatggaaggcgtttgtaaaatgtatgaagacatgtgaaaagaatgaatcccaacagtccctctatcaaatatgacatcagtcagttgtttgatttcatcaatgatctggcagacctcagctgcctggtttaccgagctgatacccagacataccagccttataaaaaaagactggattaaagagaagatctacatgcttcttcatcggcaggctcaacaggctgataaataattgtattggaagcattaggggggttgggggtgggcttggaacacaggtgagtacggtgtgctgtagcggaagttttgtatcatagtaatcctgtttccactttgttatactctagccaagattggctgtattagatgaaatgtgaagttctttttccatttggaaacccccgttgccccctctttttttcttttcttcctttttttttacttaaacatttttatgatgatttagatggaagttgttcttcctcaattaatgttggttccagtccttccactgtttatatctgctttata

SEQ ID NO: 42953 - DNA, 1050 bp, Homo sapiens
caggagaatcgctggaacctgggaggcagaggttgcagtgagttgagatcgcacaccaccgcactccaccctgggcgacagagaaagactccatctcaaaaaaaaaaaaaaaaaaaaaaaagatcacattcagtcagcatttattgagtgctgctgtgtgttaagctctgggctaagtgctaaggttaaaaaaaaaaagacgaatatgacactgtctcctctgtccaggggtaagtgcaataatagaggtattactgcccagtggcttcccagaaggaaaaaacatgtgcactgaaccctggagaatgaataggagttatccagagattaggaggtagagagtgctagggaggaaaaacttttcctgtgccctcttaagttcagtgtctgggggcctgtaaattgaactatcaaagacaaattagcaggagaaaaggtaaccaatgtttattaatatttatgttcatgggagttcacagataataagtgaaactcaaagaagaatttagactcaggggcttatatacctttttaacaaatgaaagagggtttgggtttcaagggctggtgaattgagggaagtgactaggaaacatatagaggaacaatgggagataaaggctattttggtaaggtttgcttgtgcaaactaatcctggtgttgattccttggcatgtttgatgatgagtcactcttccctccctggtttagggtgggcagtgggggtatgagaggggatggggtgagggatggggagtagggcagcaccctccccaaagggaaatttatgccctacttttagggagatgagagggcagagaacccttcctgttgattctgaattgccttcggcttaaaatgatccatatgtcaaagtggcatattttagggtggcatattctggaccccatcaaggaaatagaacatgctaagtggaagaggcctgagaaacatagagtgtgtgtggaactgaaagggttggataaatgaaaaaggtagaaactgcaactaagaacatgtgaggctatatgaacagggaatctgattac

SEQ ID NO: 42954 - DNA, 1073 bp, Homo sapiens
ctctggaagaacctcctgacagttcctgctcccctctggccccgtcaatccattttctacacagtggcccagaatgtttaaaaatgcaaatcaggttgtatcatgcctccagtggcttctcattgcacctagggtaaaatccaagatccttatagtagcttccaaggtcctgcatggcttatcctctccctccctcctcgaagacctcaatgcacctgactgaactgatctcagcacgtttccacctctggccaggctctctacctaatgaccctcctccctgctttttgatccattccacctctcatctcctaggtcttggcttaaatatcttcagagaagcccttctggacttccttcagtagtgtcattcccacttcccgccactattcttattacctgtttatttccttcatacctttttatcatttgcaatgattgtgtttgtttcctcatcttttttctgcctcccccagacctgaagctccgaaagaccccggagtgtttgtcttgttaaccatcgtttctccagctgtccacgcaatggtcaatatgttagctattataattactattttaatattactgtttcttgatgatttcagactctttggatagaatattctcccttctatctgagagtgtttgtgaccttctcatatttcctcatgtcctctggaatcctgacctaaatttttagtcttttcctatcagttatcaattgcttacttgttgttttcatgtttaaaaactcattcaactccatccaaactttcttcttcttcttacaaaatagtttatagctaactatatttccttactctcatttgttccttccctgtattcagtgtctccccatcaatatcttttattactccagaataatttcagaaacagtttgagacagttttaaaaataatgccgctggcattttactagggatgacattaaccttatcagttagtttgagggaaatcagtatctttgcaatatcaaaactcttcctaatcaaggacagaccacatttttccatttatgtgtttttaaataaaataatgttttctttgtattgg

SEQ ID NO: 42955 - DNA, 1028 bp, Homo sapiens
atcacagtcttaaacatatatgcacctaaaactggagcttccaaatttacaaaacaattaaaataggcctaagaaatgtggtagacagcaacacaataatagtggcagatttcaatattccaccgacagcaccagacaggttagcaagacagaaagtcagcaaagaaacaatggatttaaactataccttggaacaaatggacctaacagatatatacagaacatttcatccaataaccgcagaatacacattctattcaacatcatatggaactttctccaagatcgaccatatgataggccataaaacaagcctcaataaatttaagaaaattgaaattgtatcaagcactctctcagaccacaacagaataaaactggaaatcatctccaaaaggaactttcaaaaccatgcaaacacatggaaattgttaaataacctgcttctgaatgagcattgggtaaaaaacaaaatcaagatggaaattaaaaaattcttctaactgaatgacaataatgacaaaacctatcaaaacctctgggatatagctaaggcagtgctaagaggaaagttcatagccctaaacacctacatcaaaaagtctgaaagagcacaaacggacaatctaaggtcacacctcaaggaactagagaaatagaaacaaactgaacccaaacccagtagaagaaaggaaataaccaagatcagagcagaactaaatgaaattgaaacacatacacacacacaaaataaaagataaattaaacaaaaaactggttctttgaaaagataaataaaattgatagaccattagcaagattaaccaagaaaggaagagagaaaacccaaataacgtcactgagaaatgcaacaggaggtattacaactgacaccactaaaatacaaaagatcattcaaggctactatgaacacctttacgcacataaactaaaaaacctagttgagatggataaattcctggaaaaatacaatcctcctagcttaaatcaggaagcattagataccc

SEQ ID NO: 42956 - DNA, 1033 bp, Homo sapiens
agcgcctggcttcctcctcctccccagtggataaaatgctggaactccgtcaggcaggactgccataattagaagaggcccctttccagcagctgaagctgactaggcagatagagcccaaatttgtttttagccaccacatgcccctgagctgacccctcgagctgtggacacatctcacaacctcacccggaggccattctctcaggccagtcacactctcccacagagagagcgaagatgatgtcaaatctatggccaccttctaccagcagagggaatgaatgaaaactgacatgtagaagagtaagaccactactgttttcatttttggtattttttttttacattttaatttttttatactctatttttagtaaaagggacacctttactatttcaaaccaccaaaatataagccctatttggttcaaatctttgtacagccagatagcaatagatataaattgacaatggcctcaagtatagaatttggggttatacaagtgacagaattcttgagtctcagttgattataatataatgaggggacagtgccaggtctttcacgtctccaggtgggaaggggacaagttgcacgatggctgtcctcatctgtgcctggttgtgtgagaattagaaacaacgtttgtaacagtggtacctagtctttgtgaccgtggtcctctttttgatattaatatttttgcagactagttggcataaacaagttggctctctgtactcacattacaaccactgaggtataacactatctcttggagtccttagaagcacctcgctctgttcagctggcctctcagccttgtgtggctgtttcagaactgttgatcatctgtcaagtcatcccagagatcatctagatcttgagtccatttcttgcatgttccagaacacaagaaaacatttgtggctatagcttcatattctatcatgcctttcatccctttctcccgataatacatgaacccggttacagcagaaatgcattccatgcatttgcaacactctg

SEQ ID NO: 42957 - DNA, 1073 bp, Homo sapiens
ctgaggccaccaacctcatctccgtggcagtgaaagtaagtgttgtgagagctcacagctcacctacccactgagctatcccagatcagaaacaaccgccatgcaaatcgcccccacgtttatttctatttgcctgaccaatatctgagtgcttatttcatgcaagctgtttcatttattggcttgaagtggcggtgtgaatagtctgatagaggaaaatgaactgagtctggagtgaactaactgcttgggtgtcgggaccacatcctcttttctttgataagaagccacctggctcttgcttggatggtgggacccagccctggctgggtaaaatgtgtccagcaggtttctcctgtctcacggttcctctttctgacaggtgttgcaccctggcctgctcgctcaggtgcatatggacctgctgctgatgaagattggcagccgagtcctgggagttttgccaggcatcaagtggcttagcttgcctgagattgtggaggaatttgagaagctgatggtccaacaggtgagttctcctcccctcagctgtaaatagcacctaacatagttcttgccattagctgctacttagtaaatgttgaatgaataattttctggtatgtcataactcatgtgatgtgttagagctggtaacactagctgataaagaacatccaaatctcagtggcttaatgcaacaaattaattttttgcttatatcaaagttctggccgggcgtggtggctcatgtgtgtaatcctaggactttgggaggctcaggcaggtggatcacttgaggccaggagttcgagatcagcctggccaacatggtgtaaccctgtctctactgaaaatacaaaaattagctgggcgtggtgctgcatgcctgtaatcccagctactcaggaagctgaggcatgagaattgcttgaacccaagatggaggttgcagtgagatgacatcatgccactgcactccagcctggcgacagagtgagactccatctcaaaagaaaaataaaaacaaaaaacaaagttctatgcaggtgaactgaggcagagaaagggag

SEQ ID NO: 42958 - DNA, 1076 bp, Homo sapiens
tggggtgagctactgcatggtgctcttggagagacgaaagcacttagtatggcttggaagagagtttgaaggagggggcagtgattgctgaggctgaggaggtgagaggaggctgaggaggtgagaggggcctgaccacaaagggtctagtaaatctgtgaaagagtttggactttaatccaagggcagataagttcattttgaagatttttgcccttaactttaaaaaattgaattccaataatatttaaatataaagtgctcagatcttaaatgatgcttagtgaatttttaaaaagcatcccagtgcccagattaaaacataggagagttttggctgggtgcagtggctcacacctataatcccagcacttcaggaggctgaggcggggagattgcttgagcccaggggtttgagaccagcctgagcaagatgccaaaaccctgtcactacaaaaaaaaaaaaaaaaaaatacaaaaattggccacgtttggtggcagcatgcctttagtcccagctacctgggaggctgaggtgggatcacctgagcccaggagatggaggttgtagtgagctaaaatcatgccactgcactccaacctcagatacaatgagactctgtctcaaaaaaaaaaaaaaaaaaaaaaagccaggcgcagtggctcatgcctgtaatcccagcactttgggaggccgaggcaggtggatcacgaggtcaggagatcgagaccatcctggccaacatggtgaaaccctgtctctactaaaatacaaaaaattagccagacgtggtggtgcatgcctgtagtcccagctactcggaattgcttgaacccaggaggcagagattgcagtgagccgagatcacagcactgcactccagcctggcgacagagcgagactccgtctaaacaaacaaacaaacaaacaaacataaagagacataggaggtttttatgctgaggaatgccctaatgtcacaacctcatgtccactgtgtggagttggagtgggagggtgagacgagaggcaggggagtcagaaggtggattttgattcttggacatttaaacat

SEQ ID NO: 42959 - DNA, 1127 bp, Homo sapiens
tgtctctgattttttttatttttttgagatggagtttcactctgttgcccaggctggagtgcagtggagccatcctggctcactgcaagctctgcctcccgagttcaggccattctcctgcctcagcctcccgagtagctgagaccacaggcgcctgccaccatgcccggctgattttttgtatttttagtagaggcagggtttcactgtgtcagccaggatggtctcgatctcctgacctcatgatccgcccgcctcggtctcccaaagggctgggattacaggagtgagccaccacgcccggcctgtgtgttgtctcttaaaaaggctattgtagaccagctgacatggctcctgcctataatcccagcacttggggcagccaaggtgggaggattgcttggggccaggagttcgagatcagcctcgtcaacattgcaagaccctctgtttacaaaaaagagtcccagtctcaggaggctgaggcagaaggatccctgaagtccaggagctcaaggctgcagtgagctatgatcttgccattgcactccagcctaggtgacagagtgagaccctgtctctaaaataaataaataaatacatacatacataaaggttactgtaggtttcgaagaattacctgtatttaaatgtatagtttctgggatgtgtgtgaaagatttatttggtcattcattcatacacacatggacacaaacctagaaaagtatattccgcacccctagatttttccttagtgtgtccagtagatgggaggctgggcgagtaggtgagatggttggggagatgacgcggtagagaagagaatgtcaggtagatggtaaacatcccgtgggcaggtctgagggaggctgagagtggacagcaaggtgattatccagaacacacgtccctgtatcagcatgttctgagatgaactgttctgtttttctgttccaggtaaagcttgagagcaactttgcctccattgtgtttgccatcatggtgttggaggggcttggccgctcactggaccccaaactggacatcctggaggcagcgaggcccttcctcctcacgggcccagtgtgccccccgtgatggggcagtggcctctgtgggccctt

SEQ ID NO: 42960 - DNA, 1050 bp, Homo sapiens
tggattctgtttagtgtgtggaatacttcgtagccaaggctcttcattcattcagcagaatttttttttttttttgagacagagtctcgctcttgttgcccaggctatgtagctgggattacaggcacatgccgccatgcctggctaattttcgtatttttagtagagatggggctttgccattttggccaggctggtctcgaactcctgacctcaggtgatatgcctgcctcggcctccaaaagtgctgggattacaggtataagccaccacgcccagcctattcagcacatttattgagcacctactatgtattaggcacaaccaaagtatgcttgggatgcagaagttagtaaaacatgaaattcctgccctcgtagggcttacagctaaacatttttgagccttagattttttttgctttttctgaacagagcttttaaggagtaccaatatataaaacaaggaaaactaatgaatacatcccttgggccatttaaaaatcattgaatggtgaagaacatttcactgaacttatttaaaaaatgtctattaagcaccaacaatgccaggcacattacttgaggtgaaagattttgagtgaaatctgttgtttctgtcctcatggagctaaaaagtgaggagataggtaaactcacaagtacaagccccctggttggttctatgggagatttctgtgctgggagcctggatggctgggccccatctgggagccgtcagcgcatgttttgcagaaaagcggacatgtgatcctaagatgttcttagagagagatttgtggattgataaggtggaatctcagcctcccttaaaagttatgagccccgactaggtaatgcttgtctagtctccctgccacccctgcttgtcccccagatgcctgtccttctcctaaaaggcagccattgctgcccaaattttataaatcatatcatatcagagatcgtatattcatgatgtttaaaaacagcaagtataaatataagccgggcagcaaacaggtgattcaaagatgaaaaaagtgtattg

SEQ ID NO: 42961 - DNA, 1030 bp, Homo sapiens
ttttagtagagacaaggtttcaccatgttggccagactggcctcgaactcctgacctcaagtgatccacccacctcagcctcccaaagtgctgggattataagtgtgagctaccacaccccacctaatgtactttaacatgctaaagatacattccaggaggtcttgtgtccactgttatagctgaattccatacaaattcagcttctgttaatggaagaattcccagaccgagaaagacaggattagttcccttggcctcaaatatttcttgattatagtaattcttggttaccctaccaatttaaaaaaatcttgtaatctgaacactgatttttaagagacttgggtgggcttggatatagcatcagtgaggaactaggaaaagtaaacgccctggaaataaagtgatatagatggaagtggagggtaatggaaacctgcagaagatagcatgaacctccttggctgagtttcttgacttgaaggctggggacacttacagtctacctgtgcaaaatgtacttatgtacaggtgaggtcctaggtccatatgaactgagggaggatggtgactttttccagtggggtaacaatttctactttatgcttctccttcatgatgcatgggtaaattatatagattatatattcgcttgttcaacaaatatttgatgaatacttacatgtcataatttgtacagggggcttaggatgcagtagttcactaaataggcaaaatcttttgcctatatggagctcatattccactgagaaaatggacaataatcagataaataagtaaaacatataatacattagataaagcttagtgctaaggagaagaaaacaaagcatggaaaagggataggaagtgtgaggtggtgagttgaaattgcagatgggatggccagagaagagtgcaccaagaagctgacatttgagtcaaggtctgaaggacatgaggaactagctatggggctctctgaggaagaggatttcaagtggagggaataacaagggcagtgact

SEQ ID NO: 42962 - DNA, 1063 bp, Homo sapiens
tgtttgcccactgaacagacagtgcctttccttatgggtgtacagccaggctattttactcagcattctctgcagttagagttaggtgtggctatgtgactgggttctggacagtgatatgtgagtataagtggtatattccacttccatgtctgtcccataaaataattctgtgtgattgcctattttcttctatcttctctctggatgctaatattctgggtgacgttagaaggcaaggactgaagatggcaaagccttgagaagcctgagtcctcgaatgtcagaaaacagtgacctcccctgtgttggtggccaattggactttagtgaacaagaaataatcttctggagcttctggatagctgaccatgtggaggttcctagaaggcggtgtaaccagggagggcagggaagctccataccccttcccttatactgcactctatagtctcttctgtatcttttgtaatatcccttataataaactacaaaatgtaagtaagtgtttctctgaattctgtgagctgcctcagcaaattaatcaaacccaaaaggggatcatgggaaccttaacttcaaggtagtcagacagaagttccagagaggctgggtgggtggctcacacctgttatcccagcacttggggaagcagaaggatcactcgagcccaggagtgtgagaccagcctgggcaacatagcgagatctcatctctacaaaaaattttaaaaagttaactgggcatggtggcacgtgcctgtagtcccagctactcaggaggctgaggtgggaggatcatctgagtccagaagatcaaggctgcagtgagctatgattgcacagctgcactccagcttgggtgacagagtgagaagttgtctcaaaaaaaaaaaaaaattcttagcgaagttacagagattttaaagtttatctgttacagtagctagtattccattagttatacatgtatataataatgcatcccctttcaactgtaatatgaatcctatatcgcagctaacattgtggcgggcgcctgtagtcccagctactcgggaggc

SEQ ID NO: 42963 - DNA, 1040 bp, Homo sapiens
cgaaaaaaccattcatgcattttcagagtgaccagttattttagttgaacctgagccaggtcagaaattttatgagttttgaatgtaaaacaaacatgatttgcttttccccgacctcctgagatgcaggagcttcatcctgggcagctagtaaggcctttacctcacttggagactgacggcatgtgggctgtcctggcccctgctgtagaggtgaaggatcctctgttttcagcctgtatttcgagcacagtgacctatggaaggctgaggtgggcctcctgtggagctctagaaaacattctactgccagcaagagagatgacactcctctccaggtgcaagaatatattagaagatgtgaggagggaactactgcagggcaaagccgggattctttctagggctaaaaatgcaatttggcattcagagttttatcctccctctatctgctgctctgtctctgccctctcagccctgtcatcagctacctctgctgctttctactctctcgctcattgagactgaatcatgtctcttatttatgggctatattagtttgcttggactgctgtaccacagactgggtggcttaaacacaaaaatgtattttctcacaattttggaggctaggagtctgagatcaaggtgttggcagggccggtttctccagaggcctctctcctgggcttgtagatgctgtcttccccctgtgccttcacgtggtctttcctctgcacctgtgtggtcttcatctcctcttataaggacaccagttgtattggattagtgctcctttaatgacctggttttaccttaactacctctgtaaagacccaaatacagtcagatcctgaggtctctgggggtaggggttcaacatgggagttttaggagaatacaatttggtcataacatggcctgaaagtcagaactgtttgtgaactttgaagacagttgcattgaatgagagtcacagatctgacttaagtcagagaattaccccaaccccagggtggcctttcatcccaaagttgaca

SEQ ID NO: 42964 - DNA, 1057 bp, Homo sapiens
aaaaggagtaagacaaattaatgccgttgtgaattgtgtttatatttacttttctattgccagaaatgagtgtttgcctatatcaatattttcattctgattatacccctcaataaactgaagtgtgtgtattaatttacagtagttgaagttaacaatcttggcatttcctgacaaaggcagaaacatttgtctctagaagtattaaggatacacaatttacaaagtcaataattatttttcctgctatttgcttatatttgatctttagtttttgcctgtatgtatgtgtatattagcctgttcgctggtagtcatgaagaacgaacacacataggccattttcatgctttttgggctaattttaatctgagagatttattcacctcaaagtggtttattttcataaactacctcatgaactcatgaagtctattttttaattttttaagtttttattttttaaccttttttaaaggcagagtcttgctctgtcatcatgctagagtgcaatggcatgaccacggctcactgtagccttgatttcctgggctcaagcaatcctctcacctcagcctcctgagtagctgggacaacaggtgttagccaccacagcctggctaatttttgtattttttgcagagatggagtcttgctaggtggctcaggttggtctcaaacttgtggactcaagtgatcctcctgccttggcttcccaaagttctgagataacaggcatgagccaccacgcctaaccgaagtcttttattactggattagaatttaacaatctgttaatagtctcaggccaaagtatcagtaatttcttctcttccttgctttgctgccctacatattttgcaaggatacctctccatcatctccaggcatgtgactctaggaaatctaagagggtaagtattgctgatcacagcaaagagtggcgctctctcttttttatcagagagaggagaactcacctggacacctctcaaaaccatgcattttgttctgcaaatagccactcatccacttggccagggtgataaatggcttt

SEQ ID NO: 42965 - DNA, 1072 bp, Homo sapiens
tcctcagactagagtgacttagtgtgattttacagcatgtgtactctctctgcctaatgtcgattgctcactacacagagacggttcaagcctgtgttctgtgtaacatctacacctcagggtggcactcagcgcatctttatgaacatgctttgatgtattttgcaggtatatttgttaattgtcttcagtggggaatccctgtcttttttgtttggttcagcctcagaaatagggagggtaagggtgagatggaggaaaggctggagaagggagccggggttatgtcggttgagagaaggcaatgaggcccttggaatgtgagagggctttggattggataccctctggtgcagctctcagtgaggcagaatgagacctcagagggcattgcgggctctcttttcctcctagtgtttggaggcctggagcagggcagagctctgccatcaccatgggattaaaagtgttatcatcaaggcatagtctgcttttattggatagtccaactgtaatgagaaagtggccagatcttagataagaatggaagggtgaggtgaggtggagatgtatcttgtaaccatagctttgggaagggcaatgtttttctccatatctgtaggcaaaatttggtgacttagcattgagggatctggcttagaatagtgaggcgatatcaacagtgcgtgccatgtggacctgaagtcagaagccctgcatggagtctcaactcttccctttagaagtcttgtaaccttgggcaagttcaaccttcctttctttttatctgcagaaggaaggaaatggtaatatgcaatttatcaggttgttgtgagaaaatatatctgtttgtgaatggatagcattcatatccatgttagttttttaaaaaatggtggactattttaaaagtttctattcaataaaatgcttttagtaacataatgcaataccatacaattgtgcaagattatacaagataatcgtagcttttataaaatgttaattcagaatatatattaataggacacaagcttttaaatctagttttatttttattaataccttttaa

SEQ ID NO: 42966 - DNA, 1029 bp, Homo sapiens
ttctttttgttgcagtacatcctgtagtagcctctttaaaaagggtgtgcatttttgagtcctgtttgcctgaaaatgctcttattctctcagtcttgcctgacggtttgattgggaagagagttcgaaattaattatgcctcagtttgaaagcacaaatctctgggtaatgagagatgcgatgactcttagattgtttctttttatgagacctgatcttttcctccccatgaacctggtatcattgtcttaggctttccttgggtctctggagatgaatctcccttctttttagcaccccctttttgacttgctgagcttgttaactttctttgctctcttcagtcagctactctcacctgttctcttccttccaaaagtttgttgcaatctttcatctgttgaagtctcctttcccattctttgtctttgtgggttgcaggcatttcccccacttaaaccctttccttccattggtagatttcgtgagggtaggagaaaaacaagtgttattggatttgctctgtccaattagaagtctgttattattagaaataaatgaaaatggcctgaatatttcactggaaaactggaacataatatattcaaggtcttctatttaataaataaataagacttttgctggataagcaaagagagaacagtgaaaaggaaaaaaggaatggaaaaaggaagggagagagctcagtagaaaaaatatgccttgaggagggacttcataaagacttttcaaaaggggaaaaaagcggaaatctaggccagttctgtctaatgcaggctattcagacactgtagattagggaattattattgataatggatttatcaatggacaattattgtagcatctttttcaagggctgtcacatgtaagaattttatgcttgtcagtctcagagcgtcttaaggacacaagattgtgaaacaaagggatgttgattctgcaaaacaaattccatcctgtcctaggaatggtggttcacctctatcagagagagaccaccagca

SEQ ID NO: 42967 - DNA, 1059 bp, Homo sapiens
gccttcctccatgattgtgaggcctccccagccatgtgaaaaagagacaaagaaggtcattatataatgatgaaggtatcaattcagcaagaagatataacgattttaaatatatatgcactcaacactgggtgcacccaaatatataaagcaaatattattaaatttaaagggagagagaggcttcaatacaatcacagtaggagacttaaacaccccactctcagcattggatagatcatctagacagaaaatcaacaaagaaacactggacttaaattggactttagaccaaatggatgtgacagacatttacagaacattttatccaatagctgctgaatacacattcttctcatcagtacatagaacgttctccagaataggctgtattttaggccacaaaccaagtctcaataaattttaaaaactcaaaatcatatcaagtatcttctcagatcaccgtggaataaaagtagaaatcaataacaagaggaactttggaaactgtacaaatgcatggaaattaaacaacatgtccctgaacaaccattggaccagtgaagatcttaagaaggaagttaagaaaaaatcttgaaacaaatgaaaattgaaacacagcatacccaaacctatgggttacagcaaaagcagttctaagagggaagcttatagcaataaatgcctatatcgaaaaagtggaatgatttcaaataacctaatgatgcacctcaggaaactagaaacgcaggaataaaccaaatcccaaattagtaaaaggaaataaatacctaagtgaaatagagactaaaaaaatacaaaggatcagtgaaatgagaggttttttttgaaaagataaataaaattgataaactgctagctagactaaccaaggaaaaggaagagaagacccatataaataaaatcagaaatgaaaaaggagatgtcctagaattcatatggaaccacaaaaggccccaaatagacaaaatgatactgagcaaaaagaacaaagctggaggcttcatagtacctgtcttcaaaatatactacaaaact

SEQ ID NO: 42968 - DNA, 1041 bp, Homo sapiens
tatttttagtagagatggggtttcactgtgttagccaggatggtctcgatctcctgacctcatgatccacccgcctcagcctcccaaagtgctgggattacaggcgtgagccaccacccccggccgaacaatttattttcatttggatgtattcccagtaatgggattgctaggtcaaatggtagctctcttttaagttctttgagaaatctccgaattgctttccacagtggctgaactaatttatattcccaccaataatgtataagcattgtcttttctctgcagcctctccagcatctgttgctttttgactttttaatagtagccattctgagtggtgtgagatagcatctcattgtggttttgatttgcatttctttgatgattagttatgtggagcattttttcatgtttgtttgttggctgcaaatatgtctctttttgagaagtgtctgtttatgttttttgcctattttaaaatgggattatttgttttttgcttgatgaattaagttccttatagattttcgattttagacatttgttggatgcatagtttgcaaatattcttccattctgtaggttgtttacaccgttgatagtttattttgctgtgcagaagctttttagtttaattaggtcccacttgtgaatatttgtttttgtagcaattgcttttgaggacttagtcatacattctttctcaaggccaatgtccagaatggtgttttctaggttttcttctagaattttcataatttgaagtcttacatttaaatctttcatctatattgaggtaattttttgtatacggtgaaaggtagtggtccagttttatttttctgcctatggctagccagctatcccagcaccacttattgaaccaggagtcctttccccattgcttatttttgttgactttgtcaaagatcagatggttgtaggtgtgtggctctatttctggtttctctattctgttcccttggtctgtgtgtctgattttgtactggtaccatgctgttttggttgctgtaggct

SEQ ID NO: 42969 - DNA, 1274 bp, Homo sapiens
attgtaaatgggattgcgttcttgatttggctctcagcttgaatgttattggtgtctagaaatgacatggatttttatacattgattttgtatcctgaaagtttactacacttgtttagcagttccaggagccttttggcagaatcttaggattttctaggtatagaatcatagcgtcagtaaagacaatttgactccttcttttcctatttggatgccttttatttctttctctttcctgatggctctggttagggcttccataacttgttaattaagctttatgatcagaaaaggtatctgtgaattctagctgagtattgctttctgtaggtgagatatctggctggtatttattttattttatttgctgttaggtataataaagactaaagttttttcttatgccaaaaataaaataaaaagaatagctgagggcaaagaagtacaaatagaggctcaataaatgtgctaattattttttctctgttgaaggtaacattttggaacaaagctagagatgtgacatggtagagcacagagggctggatggggctgatggagtgctctccttacagtgctgaacccagacacaaacgatgctgggaggcctgagcactgggggtcggaagtgtttctaaaggatactggcttgcagagagcaggactctaaattcaggcaagggacacaggaatagtcctttatttaaggatgggggcagaggtagggtaagctgggctcagagatttgggcacaaaggaggtaggagctcctttcccagacatgcagttcaaggtgggagcaagagtgaagggcacaatgccaggactggaccctgcaagccagacccgaggctgaattctcagttggcccacaacaccgacgttgctttttttcactgaccaggctcagggtggctgaggctgcaggggctccaacttgggtggggaggatggtcatgtcatcctagctctaggttgaggggaaatgctgagtctgatgttggagtctttagttgctatctgacctttagctctggcataattacttttctgaggaaattattctaaggtcacttttggttgcatactgagtcagtcggcaagacttgccccaggcctgtgactcaaagctctgttcctgtgcagcataaatacctacatcctaccaggcctggtggaccctcggttgccccttggctctgctccctcaggccttgggccatgctgctgccctcggtcagtccctggctcctgaggagggcttgaagagg

SEQ ID NO: 42970 - DNA, 1060 bp, Homo sapiens
cgtcattctccattaattcttttgttctccttgttaaatcctgattaaattattccttatagtattgtacagatgagatctgcacagatgtattgtggtgtgtgtgactatgtgtgtgcatgaatatcagaatatcactgttgaagtccagattctacgtctgaacagggtgaccagctaagtctcccagagactgctgagtattatacttggctctggggatccaggaatccatcactagaattaatgtggtattgagaaaagtgagtaggtacttgaaaaattggttagttttggggtctgagtctatataccacattgagaattctatgatggatcgtgtaacgaatggtgcaactggaatgaacattatagagaagtagtctagtttgaagctgagtgagagtttgcctttccccttaaggaacttgaaacagaggtaaatactgcaaggtagactgtaagctcctcgaaggcaagaacaatgtcatgtgtaaatttatatccccagtacctagtaccatgcctgacacaaagtagatgctcagtaaatgttttctgattgagctgaatcaataatatacaaaatgttatggaaacagagttgaacgagtcagttactccctgaccacgctgcctccaaggaaggcttcactgaggcgggagtatttgagtcaagactgaaagattggcctgcagtcacaactaaggatgtgaagatatcaaagaagatagcctatctcacatgagaaacttgcaaccctgacaatatataaatcaaatttaaggtcattgaataataacttatgcctgggatcatttccttctgaatgtcaacctcaatcaatcataatgtttgtctgaatttgtgttgagggaaggattctgaagtcttatactagttttggattggttggccaagtttgccatgggtgggggaggattacttgtgtcatacattagccattgccatattaagtctctggactcttcaaagtaaccccttctcctttcttttgactcaactccatatatagacttaataggggccagcattgtg

SEQ ID NO: 42971 - DNA, 1028 bp, Homo sapiens
ccagctacttgggaggctgaggcacaagaatggtgtgaacccaggaggcggagcttgcagtgagctgagatagtgtcactgcaccccagcctgggcaacagagtgagactctgtctcaaaaaaaaaatttgtagacaggatctctctatgttgcccaggctggtcttgaacccctgggctcaagtgattctcccgcctcggcttgccaaagtcttaggatggtgggtgtgagccactgtgcctggcccatttttatttcttagttggaatgctgaccaccagatgatgtggaagcataggtagaggtggctttctagtgggcctgtcctggttgccgggggagacaggatggcttaagggagctgtggaatgcaacggtgatttttctagtgggctgtcctggttgtaggggacatggtttttcagaggtggtttttctagtggggctgagaggtggtttttttagtgggtctgtcctggttgcggggggagacaggatggcttgaaggagctgtggaatgaaaagtgctgtgagcctggaggcaggtgaccggtgtctagattttcaatgaaagagagcactatcaggggattccgtgaatatggacaagcagcccagttagagggagccctggaaagctgtccaaaaggcttattaaacagatggtgggtgagcacacagtgagaaagtggtgatgccggcagagtgaacaagccatgccaagctgacctcattccctttttggatacggttcttagacatactgataggggtgaacagtgtgggcaaggtctctcatgacatccaggtggccaaaagaggaacgtacggaggcagatcagggagggagctgagttcctggcagcggaatgatggcacccaaagtgctttctcctaactgcttgattttgggtcatgacaaggctttgtgtgtgtgtttgggtagagttctgcctccagcaccgccctgtggaaagattttagcaatggcttggcgaggatggggatggcctgctgatgcagcatg

SEQ ID NO: 42972 - DNA, 1104 bp, Homo sapiens
tccagacattgtcaccgtggaaaggtgagcaacatataggacatggacgatgtcccttcctccctttctttctttcctcatcagtggatgtattgagttccttccatgtacaaggcactgtggctgcaaaaataacccttgttcccagcaaatcttccacccaacagtgaatccttgtagccgtggtgtctgaaactgctgcactcacactggaaagcacatacctgggttagtaaggccagactctgcatcccagcttttcccctggctggcacagatgaaggcctggaagcctcttttgtgaaacagggctggtcctagaataccccttcctgaggttgtcatggggacagcatgagataatacgggagcctctggcatgtggtcggcattgaatagatttttgtttgttttaaaaaaaggaactctgggatggaggaaacacacggactctcagaagtggtccagtagtgtgtcctggactaatagagtctatccctttgcctgtagatgggtgaataccaagagaggaaagggccttgggagaaccaaaaaggaagagaaagcctgcctcatccaacagtgctgataggacccttcaaagtaaccgcaagactaaattgtaccagttcgtttttcaagcatgtaaacctgtctgctacactcctctaagtcattgttcttagtttgggttcttccaaaagtagagcttgtgacagggactctgagggaagcaggtgggcaggagctggaagcgtgagactggaaagaggggaagccagtcaagaaggtgaggttgagccagtgactactgtgagcgtcaggttcaattccagggggaccctctgagggactgtgagaaagcatctcataattactctcccaaaggacggggctgttgctctccatctgccacccctgtcacccccttagttgagagctgctttcccatagttgctcagcgtgggctcagtggacttgggaagggagtggaggtagggagggctgctgggtgcttgctgtgggcactatcagctttcccaggagcgtccactgcagcttcagccggaatcggaggtgaacggaggggatgtggcacaggac

SEQ ID NO: 42973 - DNA, 1021 bp, Homo sapiens
aggaaagcccagcagctacttaaatgggttcaggaacatttgggatttttctctcttgaagttcttttacagcttggggaactcccaagaggactgagacattgtcctgtttgcctctgcatttccagcgcctagaacagagctggtgcatacagaaggcaagcagctcagtgcatatttattgaatgaacaaacaaagccttctcaaagttcaggtttctttgccatgctttggggctcctgacctagagctcaagagaagaaaaaaaaaaaacacgacaaggctgccaaggaagtttgaaattaatctacattttgcaatttgtacaaaaatgtaattagattccttctccagaggcaatccattaatgtaatcaatgattgcagttactcagtatgtaacctgaaaaaaaaattgctgatgcctcagaaaaataaacacttgcttagtaaaataattccgcacccagtgccagccatttcctgttttctttttctatttgacatggtatctcctctgcagcattcctatttagagacggaagcaaagcctgctccctgggggctggaagggccctctctgccactgcatctgcaaggtggagacttgctgctgcttggtggaaactgcacagtggcatggctccctccactggcagttctcccacggtcaactagctgggcttcagataactgaccacatgatctagcctaggcagcattgctttttctttctttcctttttcccatcaacttttattttaagttccggggcacatgtgcacgatgtgcaggtttgttacataggtaaacatgtgccgtggtggtttgccaaaccgatcaacccctcacctaggtattaagcccaacatctattagctattcttcctgatgctgtccctccccttgccacccccaaccctacaggccctggtgtgtgatgttccccacccatgtttccatgtgttctcatcgttcagctcccacttataagtgagaacatgcggtgtttggttttctg

SEQ ID NO: 42974 - DNA, 1030 bp, Homo sapiens
aatgaggacaagaatttctgtgattacaaattttacttttaagaatatttctgggtaaaactatttaattgattagattgcattttaataccgaagagaacagtattataaatgagttagatctcctttgcctttggcaaacaccaggatggattttctaggtataaacacacagctgtgtgcactgttttgctattatttatatgaagccaattgctttctcatcctctactgctctgagtttgtgtgtgttccttttgcttttccatgtctctgtttctttcctcctccttgtgatttggtatctgctagcttttgttaagttttctgaaaggtgggtgctgggaaggttgcacttctggacttcctgccttgtgactccacctggtgggaagcccccatgagtggaggttccatgaattgagaacattgtcatgtcctctgggatccctttttttttttttttaaatttatttcatagcttttggggtacaagcgtttttttttgttctgttacatggatgaattctgtagtggtgaactctgggattttagtgcacccgtcacccgagtagtgtacattgtacctaatgtgtagtttttttttttaatccctagccccctcccatcctcccccttctgagtctctgaagtccattatatcactctgtatgcctttttttggttgaagaagtttcctgctttcctggttcatctcatcctaggcaccaacattacagattatttagaatttatcaggttctggcctggcgcggtggctcacgcctgtaatcccagcactttgggaggctgaggtgggcggatcacctgaggtcaggagctcaagaccagcctggccaacatggtgaaaacccgtctctactaaaaatacaaaaattagctgggcgtggtggcaggcctataatcccagctactcgggaggctgaggcaggagaatcacttgaacccaggaggcagagtttgcagtgatctgagatcccgctgttgcactccagcctggggaacaaga

SEQ ID NO: 42975 - DNA, 1300 bp, Homo sapiens
tacttacagagtaatgacccatttccccatgtggatgcaagtggcaaatcttttcattcatgatttcagcatgtatttatcaggttcagtacgatgtttctgagactacgaaagggtatttggagtaacgtccatcctctagggggttgtaacataggtagagagacaagaagatcttcaataaaatgatttaaaagtaatttggctaaatatgtaagacactttgtagcctatatgctaagaattcaaaataagtatttttttaaggggtagagaaaccagagatggcttcctggaggaggcggatcaagaactggatcatgtagagttaaaactggaaaaaatttgtggaggctggaaaagagtgtgtgcaggtaagcaaaggcgtagaggtgggaacaagagacatggtgtaggtgaagaatttgtgttgtagagaaacgaaggatgagatttggtaaaggggccggggtcagagtacagaagggcctgagtgccagactcgtaaatgctgtgcacaccttaggggctacggggctgctgtaggatctgaataagggagcatgtccagccacccccagcactcttttccccattaccaagcattccttctttaaagagcttattgctctctaaaataaacgtctggttatctgtttgcttctttgtagatcatctctgcagctagaatgtgagcaccatggggtcagggaacatgtgtctctgattcgcgataggacttttcccagtatctagaacaatcctgacagaattatatatgtatgtgtgtacatatgtataaatctttcgctctctctttctatgtatatatagagagagaactttgtggaaatagatatttatctttatacatagatatctctctatatataggtttctctctacacacacacacacacacacacacaattcaaatcaagatatatggctatgtagatatagatatttatatatacacagatatagatgtagataattctttatatacatggatatatctctctgtaggtctctctgtctctctatctatataagcttcctggaaaataatgcacacttagaattttttgcctacggttttagactggttacctccctatcacagtagtccatccccagacccatgagggaccctgaaatgggcttaagatcacaggttctgctcgagatgtttgaattcagctgcctccaagcgacatccatagcttctccctctgtcacgtgggaaagggattttctttgggctttcattctttttggcagtagggaaagggaaaga

SEQ ID NO: 42976 - DNA, 1042 bp, Homo sapiens
tggaggtgaaaaatagttggatttgggatacattgtcaagatgttgctgacgtgattggatgtaggatgtgagagaatggaattatcaatttctgaaatgtgcaacactaagaaatgcctatttgacatccacattgggatgctgagttggacagtacaatatttgtatctggagttgaggggaacaggatcagtgtgcatgatattgacagttgtggtgctggacgagatcaccttcaaaggaagcgtacagatgagagcagcccaacaactcgtattgagacatcccaacatagagtcatggaaattggaaggatccaagaaaggagactaaaaaggaatgtccagtgatgtggaaggaaacccaagagattgatgttgcagaagcaggtaaataagatatttcaagaaagacgaagtgctcaactctttcaaatgtagtgaaagcctggatgaggtgaaaattcagaaccagggaaactagctggttgttggtgatcctctaataatggaagaagtaagtccctcactttcttctttctctggttctaacttcaggttcagtccaagctgtcctcctaatagctcttgctgttgagagttatattttcaagatgttgacacaaaaaatctgtaggatctatgtttctgaatactcaaattcaagttatgtcatgtttttcaggaatatgactgttggaatatgtggggattccacagttcgcagctttttaagagctgaatgaccattgaagttttaaaatccagtcctcagatcacagactgctttctaggtattcccactctgactgcaaaaactcccctctgacagtttccactttcagctcctcagctcttgatatgtgtgctgtaagaacagtgaagccagaagatggagcggggaggcaaggcagctaggcaagaagctctacggcatatagtggggtctttttatcttttatttttaaatttttatttatttatttattttcttttaaatctagatggacagtctctgccttttgattggaatgtttcatcc

SEQ ID NO: 42977 - DNA, 1026 bp, Homo sapiens
caaaagtaattgtaccaacctaataatgcttcctctaatctatgagggagggactattactatccccgttttggcactgaagaacttgaaggccagttggtcacaagtctggttccatggatgtcaccatcccaactgggcaggcctggctgtgtcctaagagcatagactcagctctttcccaaatgcactggctctcagcttatttgtcagcaaagggaggttggttcaaaatgcctctaacgtgctctctggctgtaacattcaaccaacttcttcctcctgtggttgcctttgcctctggccccaggaatccagcaaatgtgctttagcccaagctgagagtgaccagtgggaatgaagatatcagtcttccagactggggaagcagacggtgaatttcaagtgcaccagaggaatatgggagtcccagcagtggcttccttcttaaacatttaccatcctgtgtcctgcagcaaggggatggcattccccctggatggactctgatttgcttttaagtgtgcatttctctagaaatctttttttcttattcttcaccttttaattttgtatgtttcacttttcacgtgtcttattgcaaagacaaatgtttgaagtgtttgttgagatttcctgttgttcttcctgaggcagccacagcataagctctttgaccctctacttctcagcacataagctttcttaccatctatcactggagtcaggggtgaggggaggaccgcatgacagttggttaatatacacttattttttggcaaaaacgttttctctgggaccagaatgatcttgatactgaaaaaatttctagtgctagatcctctttctaagtgtgaaaggacttatctggaatgctccagaatgatcccaagtgttgagctgagagggacctggcagcagaatctgattattgaaaagtggcaattgttgatttattgaagacagaataataactcagcagaactgttatgttgagctgaacccgacctccttcagccgaatcat

SEQ ID NO: 42978 - DNA, 2800 bp, Homo sapiens
ggatgtgccttccccctctcctcccaccagatctagacaaaatctgagccttttcaggtctctggcatctctttgaaaatgtccccagacatggacctgtgagccccaccttcagtgctgggcagtgctttatcggggcctgaatagttgaactcatttaaagaagccaactgttctcctattatcctttcactctcttgtgcttcacttatttctttatggtgtttattctaccttgcttcctctcaagatcattttcctaaggaaaggcaaacaaactaagagttttgccttcttattgccatctgtgagcattaaattatcttctctgagcagtggattcatcatttcttgcttgtttttttcccccccaatacgtagctcaaaaattcttttaaaaatgttctagcactttttgagcctgcagccctgctgacagatgccctgacccctgtggcagagctgtgtgcccgtgcggttggggacccctcctccccacatttgtccctgtcacttcaatgctccaactctggcagacagctggtgactgtgtggccctctttagatgcctctactctttttttttttccccctctgggattgtttgtgattgtcgcgctgaaacttgacctttcatgatctttcttgcttgaagggcttaccctgttggcctgcctagccatgggattctacctatttttctccccaataatgttttccattcatttttttctcaagtccaggtgcctacccagtgcctcgctccatcctttattcctcatctgttgcagcttcagtttttcctgctggctccttagcttctacctacaaagataagcagagcatccctgtccggaaaaaaatgaaaaaaaaaaaagatttaaaataagaaaagaaaaaatgatagaaagaaaaaccctctttgattgtgttatcccctctggcatctctcttacatcttccttttgcatttgcacccacattccttgacagtcccgctgccctatcatttgctcccacccactctttccttggtcctttgcagacggactgctggtctcctgatgctttgaaactatgagctccagtgcggttgtccgaagagccgttcccacacaggcagcgaataccaggctctacagtaaagagtgacgttcctcactgtgtgctggttgactgcatttcttggcttgttccttaccttgcgttctgctccagtgctttttcttaccttgctgctgacctagcagttcattcaacctctctgtcctcacctgccctatcagactgacaggttctcatccctctgggctaacagccttggctttcctcccagttttgttttcatttctttcccaattaggctcaatgcattcaaagataaccctggaaaaaattttctcctgctggtctgacccccaggatcttcctgcctatggactattccctgcttgcatgtatcattccctgcttaaaaatcttcaactacttttatgatataaaggatgaagtccagcatcatttgccataagctctggtcgcggaacacatgcctttgccaagacatgggggaaaatagtaatagggtcgagagcaccagctccaaatcactgtctgggctccagctctggctctgctgtcatcctagaagctaaatagccttatgcaggttacttacagtccacaatatgtacctacaggtttattgcaataactctgtaaagtgctcagttcggtgcctggcatatattatcatgacctttgggtgcagtctcagaacccatgcaatccagcttgacttgaaaaggagaatgcggctgggtgtggtggttcatgcctataatcccagcattttgggagaccgaggcaggcagatcacatgaggtcaggagtttgaggccagcctggcaaacatggcaaaaccctgtctctactaaaaataaaaaattagctgggcatgatggcatgtgcctgtaatcccaactattcgggaggctgaggcaggagaatcacttgaacccaggaggtggaggttgcagtgaaccaagattgaaccactgcactccagcatgggtgacagagagagaccctgtctcaaaaaaaaaaaaaaaaagaaaaaagaaaaagaaagaaaaggagaatgcatcaaggtgcagggctttcatggggctcccacacaaggagagcagcctgaccccagagaactcagatcaggatggaaatggaacaaagttggccaggcatggtagctcatgcctataatcccagtgctttgggaggctgaagcgggaggatcatttaaggccaagaattagaggccagagaccagcctgggcaacatagtgagaccttgtctctcctccccgcaacaaaaaaagaagaaagaagaagaaatggaacaaggcaggggctagtatggtcccttctgtcctgatagctcatctctgcctgtctgcatttgtctgcttcattctactcattctgcagactgtctttcacttcttttggttcttaggagcagatggtctccttgtagctcctgagtttctgcacccatagagcagcagaccagcagataatccaaatcctaaactcttgggagaaagcatctgtttggttcagtttttgtcatgtgttcaccccaattcaaacagctgtgctggggtgaagtgtgaatggtcacttagaacaaatatggttgcaggaactgattctgaggacagagaaggaggtgtggcttactaacacttaaaagacatttactaccttctgtcttcaatctcatggcttagtgtgtcct

SEQ ID NO: 42979 - DNA, 1397 bp, Homo sapiens
tgcaccaccatgcccggctaatttttgtatttttagtagagatggtgtttcaccacgatggccaggctggtctcaaactcctgacttcagatgatctgcccgcatcagcctcccaaagtggtgggcttacaagtgtgagccaccgcacccggccagatcttctttttattgaattctctgactactgctctgtggaagtgttgagcctgcaatagtgagattgccagggtcatggcaaaagggtcctgtgaaataaaaatgttacagagacctataggtccaccgcaatcccagagattgttctatttttggaggcaagactagggagaaaccaaatcactcttatctggacaggaggactcatctggggtttggagatgaaacacacttgaaatggcctcaaagatacaagacctgactttagtctatcatactggggacccctagaaaaggacccacctgggggctcctctgcttttcccagacatggccagacctgagcatcttccaggtagtcacctgtttccagctcttcctctctccctggaaggcctgcaattcactaggagtatggtctttggcattcctttcatttagaatgatatacttggctgttaagacccctgacttgtgcctttttgtttgcttgctttttctgggtaaaaagtgacttttggaattggaagtactaaggagcttatgcatgacagctgtatctgcaggcccctaatgatgagggggaagtggaatggtggctaagagtgggatgcaggcagaggaaatggaaaaaagaaaaggaagttgagaccatgggagagctaagaatcaagaatgtcagcttcactcaattcagtcttctgttggacattcaccaggaactgcttgatgttgttctgcatgatgaacaacagaggttctctttgcttctctctaatttgttattgggagggcagaggagaaagttttgtctatagcagaaaggctttatgtgtaatgcttgtcaggtttacgaacctgtaaccagcaccatgcctggcatgtagagagtgagtaggaagtctttataaacctataataatagaaggcatctcattgtcccatcaaaaacgtaggaaacccaaaagaatatgaagttgttatgttgttatttccttcttaagcttttaatttgaaaggtagcaaaggttctgctgtttgacatttctaccccctgcaattctgtcaggagaaataggtcacatcatggtgggaagagcagagaatttgaatggggagacaagggtttgagtcccaagtttgccacttggtggtaagggatgttgggccagtttgctactctctctaaactgtgggtaatggttcttgctcactcccaaagtgctgtaagataaaataaa

SEQ ID NO: 42980 - DNA, 1064 bp, Homo sapiens
tctataacattctgtggtagagatttgatttgtatccccttttgaagatgaagaagccggggaaggagggatgaataacttgccccaagtcacacatcaaataaatgtcaggggcagaaacaagactcagattctctggttctaagacccaaactcttaccatctgcctactatgaagtggaactccagctgaaagagataattctgagtcatcagacttgtagttcagtggtcagatgagatagaaccagtctgctgacaggtggggcgggaagctctgtgggaaacattggaaatgtgttgtacatttttcacctgtagtttcaaaaaattttttaaaagcagaaccatttgtgtgtaattttttttagagacagggtctcactctgtgccccaggctggagtacagtggtgcaagcatagctcactgcatcctcaaactcctggactcaaaagatcctcccaccttagcctcccaaagtgctgggattacaggcatgagccactgtgcccggtctcaacacatttttctgtagaaccccaatatgtaaaacagatacatgtggggctgctttggttgagagtggggttcagggcctgaaatcccaccccagttggtctcctatcaccgtagagtagctccccaaagaacacagcatgaaaaccatgcatccggcccaaccttcttgttttaaagatgacaaaactgagttccaaagaggctgtgcaacctgcccgacgctgggccatgagctgggtggggaggggccaggaccccggctcctgaatccccagcctttgttgtaattggccacctttgtcatatttgtgtttcccaatttaacattacagactgacccaaaaacacagaagtcaaacaaacatggtataaagccatgctgattactgagtactccaggggaggactcaggaagtggattaagtgaattttttagaggaaaggagcccagagcttcagcttgaactacaagaggctttattttgttgtcaggaagagtaaaacacttcaacaaacacattttattttttatgattgcaacaat

SEQ ID NO: 42981 - DNA, 1065 bp, Homo sapiens
acaggccctggtgtgtgatgttcccttcctggaacggtgattattaagaagttaagaaacaacagaagctggcgaggctgtggacaaataacgcttttacactgttgctgggaatgtaaattagttcaaccattgtggaaggcagtgtagcaattactcaaagacctagaaccagaaataccatttgacccagcaatccattactggatatatacccaaaggaatataaatcattctattataaagatacatgcacgcgtatgttcattgcaacactattcacaatagcaaagacatggaatcaacccaaatgcccatcaatcatagaccagataaagaaaatgtggtacatatacacatggaatactatgcagccataaaaaggaatgagatcatgtcctttgcagggacatagatgaagctgaaagccattatcctcagcaaactcacacaggaacagaaaaacaaacactgcatgttctcacttatgagcgggagctgaacaatgagaacacatggacacagggaagggaataacacacaccttggcctgttgggggatggtgggagggagagcatcgggataactagccaatgcatgtggggttgaatacctaggcgatgggttgatgggtgcagcaaaccaccatggcacacatttacctatgtaacaaacaggcacatcctgcacatgtatcctggaacctaaaataaagttttaaaaatgtcccatttaataagtgaaaaatggcctcttgttttaattttaaattagtagaaaggttaattttttcatatttgatcatctatttacatgagtgcttttatactggctaatatgctttgctcttttttcaattagattgctggttttctaactaatttattagagtttcaaaaatataaattctgaatattaacattgtaatatttgctacaaatttgtttctcatcttgtactatgaattttatattagatttagtgttatttgctattttattttgtatggttaaatctaccaattctcttctctgattttctaccatttgtctttatgcttagac

SEQ ID NO: 42982 - DNA, 1041 bp, Homo sapiens
aagattggctggctggtggggctgggcctatttctctgcttggcaaattcagaagcttgatttaattgctcacatttttctgagggggaaattgatattcatcaaacctataaatgctggttataaaagcagcattccgttgtattaactcacagttaacttacaaactttaggaatttgtatgtttatatccatttcctaggattgtatgtggaaggtatcaaggcatctaggcaaacgaattctaagtcagagagttgatttatgatgattataagtgaatcagagcagtgatctagggggagtctttcaaactctgggacagcctggaaaaattgcctctggactgctgtgtgtgtgtgtgtgtcatccacacacttacacacatacacgaatacaacacacatttcccacacgtttacctctgacatttgcaagtatctattgagtacctactaagggctgaggacacaggcactattcctgctccatggggttcatagacaggtgtctgttttcgatgtcattgagtaaatagtagcaaactcttattcatcaagatgtttttcctaactccctgcagctggacattttccttgtcttaaaactcatttcttaagttggtatgtttataaaactggctgttctcatcaattttgtgtcactttatttttgtgacacacaactgcctctcctgcagttttggatgctgctggccttgcatgcaggtacaaacactccagtaatgggaatgatggttaggcatttgccacagttccccagttctggctttggtgctggatatccttgttcaactcagatatatcaaggaagatgacccaaactttccaatctaaatatttccttttttttcctttagtagacatagaccatgtgactgtgagtttatcctacatctgtcttgaaactttgctgtattgcatacagaagcaagaagaagctcctgttaaagcagccatggtcaaggcaggaagtgccattgtattcaaaagcagcatctagtagcacagctgtttttgg

SEQ ID NO: 42983 - DNA, 1049 bp, Homo sapiens
aatgttgagcctgtaaagataaagtatgatgatggctggccattctttcttataacccattttgagagtgggaatggggctgcgaaatcaataattgggtgttttaatgctacaaagcttggttgttcacatatccaagctggcttgaattaatctagtggggggaaaacccaagtgtttggtttcaggaaactgttcaagtttttatttagctttcatttctttgaatacgtgttttatctgattttaaaacttttcactcacactaaggtaaataccatttgtcactcaatgagaaataaagatgtattggagactaaaatattcctcatctcttcaaacccgtgctgtgttgcccagttgtttgatagctaaacctatgccaccccttcagaagcctgtaccaagacacttagaattttgctgctttaagtctgtctgattcacagctcatcttgatcttacaatatctgctaccttatagagagcaacaacagttctatcacatgtgctaagaataatactgtcgaatattgttaaactgctaggaatcaacttttggaaaagagctaaatgaatgtgtgtttcccatgttgtctcaattcagttaaagagatctttttttaaccatatgtgccagaaatgcttaccttggatccaagcttgaatatgagatatttctgccaaaaaaaaatgaacaatttttaccaagtttcaagtgattgaaaaaaatagtgactgtgatggttggagagaattgtcaaaaactgcaaaatgtgattctagctgatctccaaaaaagcaaagtacaaagcagaaggcttagaagtagcataaaatcaagagatttggcaatcctagtggaccactgtatttagaacaagagtataggagagtcactctagaaataaattggcttttaacgacctgtctcaaaaagcagtgatttacattaggtttcctgtaggaagatagtgcctcattgacagactgcacagccctggccagaaccttctggccatttgtagcactgagcttgggcccacagg

SEQ ID NO: 42984 - DNA, 1150 bp, Homo sapiens
atataggtcagtgcatactttgtcattttgacagtgaggcccatggggctcttataaagccttttagtccactgcaaacaaaaaaaggtggaaaatattcaaaagagatccagcagatagcataaaatggtttgatttttttttttttgagacggagtctcgctctgtcacccaagctggagtgcagtgacacaatctcggctcactgcaagctctgcctcccgggttcacaccattctcctgcctcagcctcccaagtagctggtactacaggcacccgtcaccacgcccggctaattttttgtatttttagtagagatggggtttcaccaggttagccaggatggtctcgatctcctgacctcgtgatgcacccacctcggcctcccaaagtgctgggattacaggcgtgagccaccgtgcccggccgatttgatattttttaaagcgaagttatttttgaaaatctgtgatagaaattagagcaatagaggtataacaaagggaaggaaagtagaattttggtcatgatgtagttaaagcctttattaataagtctattttgtttaaaagtttattataatcagcggagaaatgctgtagattagtcaattatgtaattgagcattctctgaacttttatttattctcaactttgttttcttccctgtcaatcaaagcagcatataaaagcaatctttggggttcgagctggagggcactcttattctggccagaaacatcttattaaaatagttaagaatgaaaacgcctggaaccctagagtgcctgccctctatttgatattggatggggatgggagaaaggcaggggtgatgtctattttcttaccttatttagaacaaaagaaaaagaaaactccctttttagtgatttcagacatcagtaccacaatggatggcttaactgtgagtgagtttgggacactgtatgcagtatgaatttgcagggagggcagtgaccaaactgtccccctggccagccactggcctatgcagcagtgtggtgggtggggtatgcagagggtatggcagctgacttgataattccacctctcactgtcaaaaccacttcaagctggccaatgatgacatctctgcataaaaagtcacattattttatattttag

SEQ ID NO: 42985 - DNA, 1052 bp, Homo sapiens
tctctttctttgccaagctacagtaaagatggcaccgttgtagtgaatgatagagttatcacacagcaagctgtgttgtgtgcctcagggtcatgttatccttgttatgttcaagtattaggtgattttgtcattctctttaccctgcaatgggcttggtacagatggttcgtgtttcacagaaaatgcaaaaggagatctcatgtgaaaacgaacacttatctctcgaagaaaaaagttaaagaggttagtttaactactaactcaaattataagtatttactaaaaaatgcttactgattgttttatactaactaccatttttaacattagactggcatttttaacttttaaactttaagagagttgttaactaaatgagacctgcaatttgggcatgccgtcaccagttcttatcttccaccaccttataagggacttataaaaccttataaaacttttgttttgtggcatatgattcagatcttatctatgaaatttatatttatttaatcctagtactttgggaggctgaggcgggcggatcacgagagaccatcctggctaacacagtgaaaccctgtctctactaaaaatacaaaaaattagccgggcgtggtggcgggtgcctgtagtcccagctactcgggaggctgaggcaggagaatagcgagaacccaggaagtggagcttgcagtgagccaagatcatgccactgccctccagcctgggcaacagagcgactccatctcaagaacaaacaaacaaaaaaaaccaaaaaacaaacaaaaaaacctctttacccaaatagatgaatataaaaaacagtaaatcatgctatagaaaattggatagagaaatactaaaaaataaagacctaggtgtaattttggactattttcaacaacttttacttcaaccctgatgttatcaccagacttccttctttcctaatttatctaaatgttacctggaaaaattagcccctcttaggacagtacctaccttcagggcttgacttatagtcagctttgtgtaagatttgttaggac

SEQ ID NO: 42986 - DNA, 1050 bp, Homo sapiens
ccagtggttggatcactgattttcttaaagaggggaagaagctataataacagtgtcaaggccttttaattcttgggtgaggtagggtgggcatgtgctggataggaagaacaaggcagagccagggcagaatgtagtgttaaactgcatggtcagggtaagcctcatggagaaggcagccccctcgttgtttatttactgagttctcactatttgctgaaaccctgaggaagaatccatgcatccatccatgcatccatgcatccatccatccatccatccatccatccatccatccatccatgcatgcatccatccatgcatctatctgtccatccatccatctatccatccatctagtaagattgagtgcctcctatatgcctgacactgtgctgggcttgaagttacagagatgaataagacacagtatctaccttccagatgtcacaatgaaccgaaaaaacacaagaaaaccagttgattacattgtagagctctgtcttctagtgtcctttcattcaggcccagctgaactcttccttccttcaccaatgaggccttctttgaccatcccatcgagaaaagccctctccatgcctttctaatccttgaccagggttaatttcactctatggtatatatcactcctggcatcgtaacatgtttatttgtattttatcttcccccactagaatgtaaggtctgagaggagggacattgttttgttcagggctgtatcattattgtccgaaacgatacctagtatggagaagataattaatatttgttgaaaacatgaataaataaatgaagtgctataaaagagggatatattaaatatggtgctgctgaccttgtatctcctaacatagcagtgagcagaaaaagcaatattcacatagaatctcctgggaacagtgtaagggagatgattaaagtaatgttattatagtaagaaaatgtaatatatgtttaccaggttaaattttttaattttaaattacaaaatatttcagacaaacagaaaagtgcatcaaatggtcatat

SEQ ID NO: 42987 - DNA, 1202 bp, Homo sapiens
cctgtggcctgacacttgtcttccatctccacatgtctcacccacaactgttctgtttctgggcctctcatccacccactcttgctctgttcttctgtcacagaacccagaactcctgcagattcctcctcgccttggtggtcatcctgtcggccactccccctttcccgcaggcagcccactccctcactctctccccacctgcactgaaacctgccttcgtccacttacctgctgtcacctgctctggctgccaagccgcacaccctttgagctttcatcagcagattctggggtgtgtgtgtcttcctgggtgtgaggttgtgaccgcagatgacattatacgacatgtctgtcagtgaagcagctttctttactcaaatagtattatttcagcttgagcatggtatcaggtggctgtaaagttcctggaggttaggaggaggaagcccaggtgtgtctttggctcctccagacttgccagaatgccaggctcatcgtagggtctccgtaagaactcgccctggaccaccccactcatgtcactaatagtcaggcttcgaatggagacatctgcctgagataaagcatgtgcacgctttctactcaaagaagacggtctctaataataccgcctgttttgctgtgcatatcactgtgaactcactaaagattgatctactttcctctaggtaaaaaatattcttgtcactttaattgattcatgctgaattcttctaaacaatgagaaagtagattaattctttcttcctcctgaggttgttttgctcccctccctcagcctccacacccattcctgcccgtcagaagactcaggttgtgatctccaaaacctaatcctagaaatggttaaagagctaattgaaaagtactagagtaataactactccgggttggcattaattttttcccaccaatcactgcaacataagtggtgagcactggctttcacatgttcaactcctttgccatttggaagttacatgatgctggatgttttatacacagtttggggctgatttatatagggtcagaagacttactctcatttccaaagatctacatacataaacaaacaaaaatgagttaaatcaaataacctggagcttcctgaaatttttattaaggaaggtgcaatgttaccactttggcaaactcatctgcatgagtagtatcctggg

SEQ ID NO: 42988 - DNA, 1031 bp, Homo sapiens
caagcttttagtactgagggtcccaggtaaatctgctttcttggggacatgcaatctattttttaagtggcaaaaccatcctgtaagatacagtgttagcatcacagaaagatctggggaagctgctgttctaaaagctgcctcttgctgactgcggcaccttccaggatggagcaaattcatctcatccacagatcaggtcgccttcttatttgtcctggtgcgttgttacttgtgtccataggtaaagccatgtcttcctgaaagagtctggggaaaaaacggatgtccacataccttgtgagtaccattaggcactaacagaaggggctggagaacaaagccactaagagctggtccctcgaagtgtggtctttcttgaagatgactctctcaggggtgggagggcactccctttcttctctagttagggttctttccaactgggttagacacagctatgggagtccagaagtcccaggcagctgccatctgctgactgtgagctagggactagggaaggagcagactagaacagaagctgcacttcccgcctctttgctcagcagatagagcaaactgagagcctggggcatcaacccaaaaatgatgccttgacctctagaaccctgtatgtcagagagacatgtcagcaccacccctctcagaacctggccagtccctgctctctaggagttaatctttaggggttggcctgttgaagaatttggagagtaagccacctgtgacagccatctcatagatagagcagagcaatcagccactcgaaccatagagagttatcacaaagtgggacagaaaggccccgtggccttagctttcacccaggctcaggttgctcacccaggctcaggttgcaggcatctataaccgagcaccgacaggagcctgagggttaaaatggggctacaagtgagaagggtggggggacaacatcagcagtgcctggagctggccaggcctggatgtggagcaggtacagcaggaagaggcagcaagaatgaagaagg

SEQ ID NO: 42989 - DNA, 1031 bp, Homo sapiens
tgcccaggctcgtgtgcaatggcgtgatctcggctcactgcaacctccgcctccggggttcaagcaattctcctgcctcagcctcccgagtagctgggattacaggcatgcgccaccactcctggctaattttgtatttttagtagagacagggtttcttcatgttggtcaggctggtctcgaactcccgacttcaggtgatccaccgcctcggcctcccaaagtgctgggattacaggtgtgagccaccacgcccggccaatgttcatatttttagttataagctgcacagcctagaaatcccatttgtccaagtgacatggattgaatgctcagtgctgtgtgggataccaaaggagacaccaccacgccagttcttgagaaattcacaggctggctgagcacaagctcaaacagaggataggaggtgcaattaattggtagcttgctgtttcggaccataaaaattttaaagattcagaaaaagtgtggataatctcgtgctaggcatacttggggaagatgtcttgggagattcaggactaggattagaacataatgggtaatttcaaagactgtgtagactgcatggaggatgagaatttcagactccagtctaggagacaggacaatggcactttgaccttagtaaattcccattgtaatgaaaccctttgaacacgctgccaatgtccccttccatttgctcagtccttgggatggcttcagaagtttgtaaaggctctagcttcagtgtagagtcttccagggccactgatcttgtgatccaatctaaacttacacccaaaagaacaaatggattgaagggagctgagtgggagtgagcataattacctgggtgagggagaatagatggagaaaaaaaaaaaaaaaagaacacaagatgcctaacaggtattattttctgtggctatgtcagatgcatgttctggctagaggatggccacaaggtctggccacacagatattcttatttcatcctgtgttgcaaagtaatattaataagccaa

SEQ ID NO: 42990 - DNA, 1027 bp, Homo sapiens
atttttcaagggcaaaattcctgtgtttccatggccatccgtagatgtgtaaaaaccaagggagaagactccaggttctaggataggaatctggatgtattctctttggaagtgaggccagcctctatggatggaccagtccctgtagtcgcttgagttgggatgctgtgttgctgtggaaagctcacacctgggtgcagagcagtcgtgtcgtgtatagacacagcctcaggaacacaaaccctgcttgccccagaggcttgactcccgagttccactcctggcagagtcctcctggagtctttgcacagcttgcagaatgatcagtgatttttgccccaactcagagccccatcccactcagcatgttatctttctgaacacatccaccctcccctgcctcatcccgacaaatccctaaggcgcctttgatgtaaaaccctgtgacctgcctgttgagtgctgatgatgcaatcgtgtataattcagcagtaatttatattccgtgcaggtctgaacaaagctgtaaaatgctctcgagagctaaatgcggctgaagcatttaatctaagcaaaggcagggttttgtatcatctacttcccaggacggatgtgccactgttgaaggaggaggccctctccttctgtttgctgatttggttcttgttggttttaaagattggagagggaatagagggaggtgtctcatggaggacttggctgcttcttctctgacctccctgatacacagccacgtgggtgtttctgcagagcctgccttgcagcgacctgtagggctccagtcagaacataggccctctctccacatagcaacaagagaggaagccaggattggggatccgcagacaccgttccacattcctgggagcagaaaatgtcacacagatggatatctggatctagaaacctgtagaaattgtgcaccagtgaagttgtgggcataacttggtcacataaggattagatatttgggcaaatgcctgtgcacacaatgtgtaactgccct

SEQ ID NO: 42991 - DNA, 1093 bp, Homo sapiens
ccctactctactaccttgagattcaggaaagtgaggtattctacctagagagaggtcccatatctttttctccttattttgggagttacggtttcttcttctgtttccgtttcctctctctctactcactcctactttctcctgcatcaactttggtcaattaacatagacaagtgattcatctgtagagaggctcctagactccaagcagcccccttccttgttcattgtggctgtaggttttataaggaggtctgtggctccctggcatcaaaatatgaaaaataaaatctgtgcctgttccagcttcaatcctcctccaagccttagcttttcaacaaccctaccctttcaacttcagggatcatggagtcacagagactggacaactcctccaaatctagacaaagactttcttaagcgccctgagcccaggtgcatatcttcccatcagggatgagtggtcccacctagcaatgcttgcctctcctgtgacaagagggtaggatatcctaggactctgagactgggccctatatctcaatattcatccacactcatgataagatgccggaaatgaatgcactgtgtgtagctgtcttgatttagtgggaggatgtgctgcttaggtctccaaagatgcccacctgggtcaaattcagaataatgaactcaggtacatcacccagaggcatttagaatggactctctcttcacctggattatgtgctgagtgttaagtgatttttcaaatatctgggggaaggagtgggaagagatacactctggtcatcctttggtgtggtttgtgggggatacttggttgattcttgtagttaaagtgaagttgcttttctgaaaatgttccctgtcttcaggggacttacccatcccaggggacacatccatcccaggggacacagccagccctttccagggaaatacgatgtttctgagtgagaggtgatttcagtgcagataggaagagctggtgcacaccagcagggttgccttccatgccatcttccagctggtgtgggatagactaagggggcagatttttaagaaccccaccagagttgacatacacacg

SEQ ID NO: 42992 - DNA, 1059 bp, Homo sapiens
tatgtcctcacatttcaaaaccaatcatgccttcccaacagtcctccaaagtcttgactcatttcagcattaacccaaaagtccacagtccaaagtctcatctgagacaaggcaagtcccttccgcctatgagcctgtaaaatcaaaagcaagctaattacttcctagatacaataggggtacaggtattgggtaaatacagcctttccaaatgggagaaattggccaaaacaaagggtgttacagggcccatgcaagtctgaaatccaagggggcaatcaaattttaaagctccaaaatgatctcctttgactccatgtctcacatccaggcaacactgatacaagaggtgggttaccatggacttgggcggctctacccctttggctttgcagggtacagcctccctcccagctgctttcatgggctggcattgagtgtctgcagcttttctaggtgcaccgtgcaagctgtcggtgcatctactattctggggtctggagaacagtggccctcttcttacagctccactaggtggtaccccagtagcaactctgtgtgggggctccaaccccgcgtttcccttctgcactgccctagcagaggttctctatgagggctctgcccctgcaacaaactttcacttgggcatccaggcgtttccatacatcttctgaaatctaggttcccaaacctcaactcttttttttttagatggagtttcactcttgttgctcaggctggagggcagtggcacgatcttggctcactgcaacctctgccacccgggttcaaatgatgctcctgcctcagcctcctgagtaactgggattacaggtgtgcatcaccatgcccagctaattttatatttttagtagagatagggttttaccatgttttccaggctggtcttgactcctgacctcaggtgatcctcctgcctcagcctcccaaagtgctgggattacaggcatgcgccaccgcgcctggcccaaatctcaattattgacttctgtgcacccacaggctcaacaccacatggaagctgccaaggcttgg

SEQ ID NO: 42993 - DNA, 1055 bp, Homo sapiens
tactttgtgtcagtgagtcatatagtatttgtatttttgtggttggcttatttcacttataatgtctataatgtttatattatctttaccttttcttttttttttgagacggagtcctgctctgtcacctaggctagagtgtagtggtgtgatcttggctcactgcaacctctgcctccgaggttcaagtgattctcttgcctcagcctcccaagcagctgggactacaggcgcgtgcaccatgcctggctaatttttccatttttagtagagatggttttttttttttttaaccatgttggcccgctggtctcgaactcctgacctcaggtgatctgcccgccttggcctctgaaagtgctgggattacaggtgtgagccactgcgcctggcctatattatctctaaatgtaaagatatattctttacgtttaaagaggtatggtctttacatctgtcaatggacattttggttgcttttacctcttgactattgtgaaacatgctataattaacttgagtgtacagatacctcttggagatcctgtttttaattattttggatatatgcccagaagtggggattgctagatcatatggtagtctatttttaattttttgaagagctttcatactgttttccattgtggctcatcattttacaatcccacaaacggtgtacaaggttttcagtttctccacgccctcatcaacacttgttattttctgtttctttgatatgggctatccttatgagtgtgaggtgatatgtcattgtggttttggtttgcatttttctaatgattaaggaagtcaagcatcttttcacatgcatgttggccatttaaaaatctttggagaaatgtctgttcaagtcctttttccatttttaattgagttttgttgttgttggcctgtaggagttctttatggattccagatattaatcccttgtgagatatagaattttcaatatattgtctcctattctgtagctggcctttttacactattgatcatgtcctttgatatatattgtttttagtttcgttaag

SEQ ID NO: 42994 - DNA, 1044 bp, Homo sapiens
ttgggcttgagctggagactgtgtgcctacaaggttttgcccactgctgcttctacttttttatttcacagagtttcctaaatttgttccagctctaggtaaggttaaatccttctcctatgatctggattttcaaattccccagtggggatgtgtgttcagaggtgggttttcccccctcacactttggggaatcacggtttttcgtctgtcttgcagcatttgcaacagtgtgttgcttctttcaaagcatctgtgaattctttcagttttcctggtacattcctgtggtggttcttggaacaaaagatcacagtgtgattctccacacactgttctgtctgtccaggtgggagatgcaatgcacattagccctgccttttatctgtcatcttgctcccatctctgtcctttcaaatgggatcagggtgtaaggatgttgggattctcctggcccttcagtagctattccaaaccatttatcttccatcttatacatcttccatccttcaagacttttatctggctatccaataaaactataaatcttccagccttctgggatctcagttacattcagcttaggctttggcgcctggcttatcaatgccattttctttctaagtcctgttatcttcccggacaccctgagtgtccatgtggatgacctacctaacaacttgcccccactttccttgacttcttctgtatctgtgactttgacccactactccaccttcttccaacttcacccccttctcattggttgaatgctaaactttatcatcacttgctcctgttccacttctgaaatatggaacttcagtatcccattctgtcattacggccttctattattccagtttttcattccattacttctgctcttcagtgttattaggatttcttgtcccttggctcctctgttttcttcccaatccatcactcttccttgcttttcatctttttcatatcgtagattccttgatccaacacatcatacgttcctcaactccatttttcacatgtcattcctgggctttt

SEQ ID NO: 42995 - DNA, 1070 bp, Homo sapiens
tgcatagctgtgcagagccatatgggagcctgaggcaagaagaaaaaccagtgatactggccctgactttatttaaaattgtgttattatattcattataacttttttgcattcatttttgattttggaaaatacctattaaaatatttatctccagtactgtattttttggcacacctttaaatggtgcccttgaggcaagtgcctcatcactgtgttctagccccagccatgagttgcttaatttgttcctctatccctcctgtgtcttgtcagctggtgattagatccacattctggagctttgctattcacagtgtggtcccgcagcataagcatctcctgggagcttcttagaaatacagactcttaggccccatccagaacctactgagtcagaatctgctttttaaccagatccctagatgatgtgtttgctcattaaagtttgagaagtactgagtggagccataattagattccagtgcaatttatttggcaaggatgcttataggcctgtggtgaattgcttattgtataactttaagaggcatatattgtctaggtgtcctgtttttggtgatactaagattgatcagtagatcctcatgtgatcagcttgacccatccatgaaagttaagaaggatcacttcttagagttcactagagcaaaatggttaagaaagggggctctagagcccaatagtatggatttgaatcttgactttacacagcaaagcaaccctggatagttacttaactgttctatgtttcaagtctctatctgtaaactggagataatagtagtacccatttcactggtcatgcagattttttttagaacaatgcctgacacaaagaaagctctcagacagaaataacacttcttttcttcttctttagtcttttccctcctcatcagagaaagcatccttacaaagatatcatttgagttaagtcctgcagaatgagttggacagtgttctaggtgatattaattacttaattataagcagaaaatgggaattcactccatatttttggagagtggcaaagaattagacttgac

SEQ ID NO: 42996 - DNA, 1029 bp, Homo sapiens
gcccaaatgagaattattgctgtattgaactttgttactaatgggatattgtcatatatttgtttcaggggtttcagggtgtgtagagaggttgacaagcattggactagataatttctaaggactcttccaatctgaaaaactaagatttccaggaaatggaaattgggcttagatgccttttacaaaggcctttttttttttttttttttttttttttttgggcctggctgcttctagggctttcaaactttcacagaaaataaaaataattatagtaaaaacagggattttagacctgaaaattgctgtaaatatttggaagccatggttaaacagtgggtaaattcatatctctggggtgaatcacaatctcatgtaatgaggtaaaacatattttggcaaaaggctgctgggaggattgactttattgagacacaagatgctgcagccctgtttgtgttggttcattcctcattccttggaatagctattttgtcaatttaaatgctgaattaaacaatgaacttgctaactatgaacttgacttcctcccttctttccttaatgcttccccacttcttggaacaaaaatgctcttggcttgctttctattaatattaaatatgttgatcgttgccttgttaaatataccactaactaaagaaattcattcagaggagccatttgtaaaccaaaaatatatcaataaattttcagtgccaccaaagaaatagcactggaacatacatttaattttctcagcaaggcaatttttacttctatagaagggtgtgattcatggatggagcaatggtgagagcacacctgaacaaggaaggagaagggattcttattcctgatgcaggtagcccctactgctgtgtcattcccttgttgtctagggttggaccacacagtctaagctaattccgatctgctattttaaagagagcaggggtaccagccagagtggcagggtgagtagtttggcaggaagggcagttacagaacaggtaactcaggatg

SEQ ID NO: 42997 - DNA, 1035 bp, Homo sapiens
tttgcttataatacactcaggcccttggtttgagatattcttttggatggttcttgtgaaaatttgtgcaagcctctcaatttctattttaattcacaataagaagtgatttgtgttctatatgccatttggtggttctttttagtttaaagaatattgagcttggcctgtgcataactatacgtgttcctcattagctgcctttgtagctgaatataaaatgtctcttctataaaatatccttaaattcttgtataaagtatccttaaggtcaaaggatacagccttagtttaaaaataagacagaggactgagtaaatgtggatataaaagttaggtgtttgacattgattgaaagtactggatttttttttccttatgtaatagttgaaatatttgagtaaaaggtcaactaattggtatgttttaacattagtttgactttgagactatgccattggtggaagagattgttttgcaacttctgtgtccctggattcctagactgtgtttttgaattctgacctgaattggacaagagttcactgtcagaatgatatgcataatacttttgaaatatgcaaactctttgaaggctgttttttctcttcttataagacatcgtgttgtttccttttcctcagaatttacatgtctacatttggggcaggtttattcattcgtttgtgcattaattcatcagatacttagtaagtactttctaattgtgccatacataatcctagaggtcaggggattcaaggattaataagatttggtatttatttttagaacgcttccagtctagtcctgacaacagtcttggaagtctctaatcaccatacagtatgaaagtcactaacagagatgtgtataaggtactaggggagcacagagagggcatgactgtgcctgggagtttcagactagcttctggtgaattagtagtttggtctgctttgttatgttgtattcctagctcctccacctgtgtctatcacacagtaggtgctcaatgaatacttgagtgaatca

SEQ ID NO: 42998 - DNA, 1103 bp, Homo sapiens
attttctctctggtaaggaattatctttggtgaagaattttaaatggtaaagctttagaatttgtgagatttagttaagaagaaaaggaggcaagcataaattacaaggaattgtactatttcgaagatgcaggactctacttgttgaattttaaatgagatatatgtgggtaagtacatacatgtgtatatagtgaaaacctctcttactgtggttataagtctgttgaccaatttctaatattgtacacttccaggaaatcatagaagttaaaaaggatcatttagtctagtttaccatgcaatgttgaaccctcttttccaacttttctgtcatgattttccagttgtttgcccccgggggtaggagaaaggggaagaaaactaacatatttgagtacctgtaatgtggcaggtatgagagacccaagtatggttatgtgagactgatgtttgtttcttcaatgattggtgaaactcacagctaaaaccatctggatctggagctttccttgaggggagattttcttgtgtgtgtgtgtgtgtgtgtgtgtgtgtgtgtgtgtgtatgtagagacaggagctcactatgttgccaaggctggtcttgaactcctggactcaagtgatcccccccaccttggcttcccaaagtactgggattataggtgtaagctaccatgcccagccttttttaccttttttaaatttttaatgtacattaaatttctttaacagttctagaagtactcaggtttcattcttcacttaatttttgtaaggtaaattcttcaaggaatttgtttcatctaaattttcaaattaattgacatcaggttgttcataatatcttctatttaacttttaaatttctatagcatatgtaatgtctcattttcattctcaatattgtttatttgtaccctctctttttcccctcagtaatcttgtgagaggtttgtcaatttagcccttgccaagaaccgttttttggcttattgatcctctcatttatatgtttcattcatttctgatctttttttattgtttcattcattctactttttaaaaaaatttttctgctgtgctttttctgacatttt

SEQ ID NO: 42999 - DNA, 1040 bp, Homo sapiens
tgccgaaagtggaaacaaagtccagtaggttgtcaatgtggggaattagcatttgtgggtgagcgagactgggaatgaaaaatttatgtgtatgctataactttcttgagttttgatagcctgaaacttcaaataattaagaggaggacctagatcagagttcagcctttcagttcattgggaagtctcccaacttggttgtgggactcttataataagtctccaggtcaggtagggaggtgaatacttgatgtccttttgtcagttatgaagataatatccctgacctaaaccgtttttgtgcttgtacattgtaagattctttagtgaagacatatttgtgctgctcatttgtttgctttaagtatatgcaatgacaaataacaagtcccttgtgaagactgaactagtagcctggcttcattatcttgatattaaaaatagctaaaacaagtaaatatagccacatccttttgggaatacttaaagtggtagacagtgtagacaaagtagactgggaaagcagtgtagctctgacatctaaattaaattgctgtgagtctcacagtgtttttgggagtcaagcaaattgttgttattattgttcttttttgcttgaaggcattatgtaaacaaagctctgctctttcaagaagataggaatcttgaatttgagctttgacagtgattaataacatcattttgagcaaatagttgtcaagaagacccaaataaatggagagatagctgagagatcagttgcctgatggttaacgtaagctttgtgacacattggaggaagtcaataaataaatatttgttgcatgatttaatgaaaattttctcatgatttttctggttataatcttctagaataaataataataatacccaagtgattttctgttttggttaaggatttttttttctgctttggaattctttgattaggctggcttttgtgaatttatttttgctattgtaatgttaggagtcaactgtatctcttttaacaattctatattttaataagcatctta

SEQ ID NO: 43000 - DNA, 1044 bp, Homo sapiens
gaaatggtagccactttagaaaatggtttggcagtttcttgtaaaattaaacatatacctaccatatgagcagcaatcacacttataggtacttattcaaaagaaatgaagatatatgtccgtacaaaaacctgtacatgaatatttatagtagcttgattcctaactgccaaaaactgggaacaatgccaatgtccatcaactgatgaatgggtaaacaaattccagtacatccatacaatggaatatggatagtctactgatacatccattcataaacaatagtgtagatgaatttcaagctcatgctaagagaaaaaaactgaactggaaaggctccatacttttcgattctattttatgacattctgggaaaggcaaaactctagacgcagaaaacatagtaattgtcaggagctgaaggtgcaggcagtgggttggctgcagagggttatgaaggaacttcttgggatgttgaaaatgttatatatatttgtcatggtgatagttatatgactgcagcttttgtcaaaatttataaaacagtgtacctaaaagtatgaattttactgtgtatatatcataccccaataaatctaactttaaaaaagaagttacacttccagtttccagttccacatgtaaggagcttggaagttgtcactctgtcctaacaataaacaaaaagctgaacaacctgaaaactcagcaactcttcttgtatctgaaggagaaggtaggacatagggcaaactgctgcccccaagattggagagacaggggaatacaggggattttgacttaacgaagacacacactggaaaccactttggaaaccactttggaaaccagtgccagggtaggaaaacctgacctgtaattgataaattgctgaagctcagtgtgattagctctgagaggagtcccagtctactgggatccagtcataaggagtcccccacaatattgtaagatatgcctccaggagctcaaccaggagctcacaataaatatcagagaaaaatcgccttatacttctggcac

SEQ ID NO: 43001 - DNA, 1032 bp, Homo sapiens
tccagcctactctagccattctgtccacctaagggaagagaaaaaactgagaaacatttgttcaaagtccagagacaggctcattaaagcctgagacctaatcatcgaacctaatcattgcttcccctcccttcacatgctacatggatgtcaatagtacatgccttttgatgatactttttttaacctatagactttccaaatggctctcagaatgtagataagaacggtctgtgttcaaaagaatcagcaattaaaatgaagcgcatcctagtagtcctggaaaataagagaaatatgtctcaggttctggattatattttgctaagataactataacaaattctgccctttagttactcttctggctgttagagcaagaataagtattgtttttggaaatgcctgaatttcttacaatgaataaaaaaagttattaagtgtcatattttccaatggtaaataggagtcaggcacaatgtagagactcagtaaatgttaaatgaatgaatgatcagtgccttgtatgaacttctccttgccaaagctttctctttgagtccctataaactactagtactttggcaggagggagggagagagggaaggagggggagagagagagagggagagagagagaatgagagagaatatgtgtgtgtgtgtgtttgtgcatgagtgcatgtggcagtgtggtgggggagatgttgcctatttttcataatatgatcatttccttttctcttttagacatattactgatgccacacttgccattgtgaaaggagagacagttccacttgatgtcttgcagatcaaggtaaatcttttcatcacatattggaaaaattgtgaaagtaatactcgcttacatgttaaagaaaataaaatgtagcagttcaaatgaggttataatgaaaacaatagttgctcttccattcctaccccaagtattagtccccagaggaaataattttacctgttaattctagttgttatcactaattaatatgcttttgctcctatttttaa

SEQ ID NO: 43002 - DNA, 1022 bp, Homo sapiens
gtttacacatttttaattgagtgtgcatatgtgcatttgtgtgtgtgagaggacatggtgtacaggatctagtcatttagcttgggatcagcacatcagagcatgcagtgtttgcatcttagtgtggctgtatcatcctttactcatagctcttttgaacgtacacttgacccattgtatccatagatgtaaacaaatgcagatagagaatatttggggaaaaaaatattccacaaaattccaaaaagcaaaactggaattggctgcacaccgagtactgtgttgaatccgtgcaaataaagtgatgtgtaggcactgtattaagtgttataagcaatgtagagatgatttaaaatatacaagagaatgtacataggttacgtgcaaatatgccattttatatccgggacttgaacatctgcagactttggactgagggacaactctataccaaactgtattctatggcttaaaggatgtgtttaaaggatgttgtgaatttagtgactcaaggagcctggttatatatctctcataaattgcaagaatctttactgcgtaactaattacatataacttgacaaggcatcaaaacgtggatttaaaattgaatgtaatactcttttatactaagccataacctcctagctaccagaatagccactcatagcagagatgtaattctaatgtattgtctgccatgaatggtatctatcacatgatagttcttttgatattcttatcagatttttatcttggtcttttcacaggtactggtatcttgggcctctaaaaatcaaagcagcccactttttcagcactcttaaggtaaatgtgatttacagtgtagaaatttgctgtgttattttgttgtttctctgtaatgcatatatttggtatttttttttaattccttgctacagatgaatgtggcatgcttcaacactaaaacagggcatgtttgattaaatacaaatatagaacgcattcctgttttgataagcaatcaccctttatctacc

SEQ ID NO: 43003 - DNA, 1123 bp, Homo sapiens
agttaaggggagccgtttcccgcagcgctagccggcagtatttccaaggcgcaagttgcggagtttctgtttcctttttcctctggcgagctttgcgttccctgtgcgccggaagtgatcccctgcgtggctgggctgctcgggttagatcgtcaggtgagggaggaagggatagccagcgcgaaggaagtgctggagtcgtgtgttttggctgcgcgtgatcctgcgtgggtcgggaggtgtttctgtgtaggtgtctggccctttcatcagtcgtgcggaggaccgcgtgatttccttccagttctcctcggttttcaggtggtggcgccatcttcggtaaagggtgtccacctctccctatggtgtggctggctagcccgggggtctctacgctgcttggtctttgttaacggagatgaaggcagtaatttttcagtaacaggtttcagatataagtcccttggtgatgctaatatttatggaggccttactatgcattaagaacttttttagaagtttagaaaatggcagtgaataaagcagatacaaatctctgctctaagggagcttgcatagtaatgaaatttgagaagacagtggattggaagtgggattaactcagaatcaaaattttgtcgatgggttggaggaagaggaagttatttgggaccaaaaagacatacaggtgtgagtttatttgggagggaggaaggaatcctcatcagatgtgcaggaatgttggtacgttgtggtcacaaaattggagtgcataaaaattatgaatatagttaggaatttaggactggtgagttgtacttttgccataagaggtaatgtttttttcttattttgtttttttccttcaggaaaagcctaaagattagactgtaagaaaagaaaatagaagccatgtttcgaagacctgtattacaggtagtcacttgtctgtattaatactgagatgtattactatcagccacagtgatcagaagacttctttaggcttttaactacaggggcaaaagacctttgagctcacccacccacctctatactcatttgatatggaggattggggacgattttgccagtgtaaattatgttcactaaaacaaaaaaa

SEQ ID NO: 43004 - DNA, 1034 bp, Homo sapiens
tttttaaacttttgaaaatgctataagaattttgaaaataatatacccctctggatgtctgcaagcgacattaagaaatttttttcaatacaaaattgtgttatttttaaatgtatcaatggaatctaaatagcatagcaatgtgatacctactatcctgtaaaaaaataccagttcagcatttggaaattttccattattcttttttctttgaacttgttttactgtttttattttcccctcagaagtgtatcttaatagtatatggtatagttaagaactttttattaccctgtttgtaacaaaaatgcatgcataaaagaaactttaaaatatttaaaagaattctatgacaaattcttctcaattgacttatcattaaagttgtttttagtacctaattgatcaaaacaattttaatgtatttaaattatattggaaatatgtctttaaatgagatagatggtgcttttttcacttcttgagtaaattgctaaaattagacattgtgaattttgtgcttttgtttgcttttatggacataaatactaagaaagctttttaaaataaatacatggcaataaactaaattttactatattaatgtttctgtgtttatgaacttctgagatatgcccaaattagattttttttttttttttttttttttgagacagcgtctcactctgttgccccggctagagtacagtgacacgatcctggctcactgcaaccttcgcctcccgggttcaagcgattctcctgcctcagcctcctgagtagctgggactacaggcacgcgccaccacgcccagctaatttttgtatttgtagtagagatggggtttcaccatattggccaggctggtctcgaactcctgacctcgtgatctgcccacttcagcctcccaaagtgctgggattacaggcgtgagccaccgtgcccggctagataatattttttaaaaattgatttttgggctggatgcagtggctcacgcctgtaatcccaggcctttgggaggctgaggtgg

SEQ ID NO: 43005 - DNA, 1024 bp, Homo sapiens
agtgtgttgtgtacagtactcagtaagtgaaggctattattgcgctaatattggattgtgcagcaacagcaatttccatatgattccagttcccacaaacacattgtgtaatgatgaaaacagtggaaagaaaatcaagacctttagattctagattccaattcaatcttgcatttcatgatcattttgctaaagtacattttcaagtaattattttgtagattgggcaaaagaccaagtagttttgtttttatttttgaccaagatgcctacctggttttaaaattacagttttatcaaatgtaatataagtgaattttgtaagtttaatcacttttatttaaatagaagtatataggcattgatttacttcctgttatttacaattttgacatgtcaatgaaaagatattgcttaatatcctgaagaattctcaaatttgtaaacatattcagttaatacacatggcattattcagaaatgtgtatttctagccctaatgggactctcagaagtggactgttgtggctaagaatgtagaccctgaaattagacaatctgtgtttaaatctggctttggcccttttgaactgggtgaccttggggaaacttcttaaccagtctctatttaactttcttcacctgtaaaatagaaatagtaatttgtgtgtgtgtgtgtgtgtgtgtgtgtgtgtgtgtgtgtgtgtgtgttgggataaagttgttggaaggaatgagtgaattaacacatgggaagtgcttagagttctacatggaacaaacacacaataaaactgctatcgttgttgttattttgtgaaaaggagcatactttgacataataaaaaggagtatatttggacatagcatgaatgtccattacattactggacatttggtcatatgtaaccagaaattgacattagggttgttctgggatttatatgttaattcctaaaatgatgggaataaaatttcctttggtctgcacagtttgcattatcccattggattaaacacctcc

SEQ ID NO: 43006 - DNA, 1988 bp, Homo sapiens
gatacaatttctataagaactaaatgaaattcttaaaaatttcaaggattttaagagcttgtttatatcacttaagtttcacttaaacatttctaaacatgtctggctttaggtttccctgatcattgctacctgcattctgttaatgaaccattttcaattttttaaaaaagagaaaagattactggaaaggagtcttttaaagcatgaacggaatgtaacttttaaggtagcatcaaaagctacagtcttcaggtgaaactgaagcttactgaaggcatttaaaataaattttccaataatataatttttttttacaagttaaagctggagatggatcatctactctagttcactggttctcaaagagcgctgggagggtgagaatatgtcagagtccattgggaatttttatttttcacattttatatacagtctgtgtgggtttctcagctctatttaaaatatacgtgtcttcattcattctgggtgtgggagtggaagggggaagtggaatttgacaaaactccctagggatttggatattgtggtctaagggaaggcacaggtataaatttatttctccttctaagagaagagccaaggccagttttactccatgaggaaaaaagtgtgaaaataaattccatgtttgtataataatttgcctggcatagaaattaacaagagagtgatacgggttaatgggggtgggagaagaggagaggaaaggggagacatgagggtaaggtcaacagcaggaggaggggtgcagtctgtacaccctcctccccatgcctggcagaggtgtgaggtcaacatcacttcaccacggtatgattgtcctctgtgttgtctatttggatatatggggtctgggaaatggggtgactgtaactctgccttgagtcagcaggaaggagccaggagccctgggcaaatgactgagtgtgtgcacagctagcttgcaaatgagatatctaaacacaggtgcatacttgattggcctgacaacatttctgacctattttaaatatggaaaaattatttgtctcaattttgctgctttcacagatgggacaatgactgtggttataatgatctgaactccaggtacctcaagagaagaaatagctaaacattgatattactcagaaaagacctctcctaactcctacccacccctttacatctttgacttctatgtgttttaaaggtctggattaatcagtctctcatctttattcatgctttccagacattctggaattgtgcagaactggacacctgtgtctagaatcagtagctcagttcatcctggatttgcatactgtgaataacagacttcaggtgctttctgactttattgaaagtagtagttagggagagaaatcaccagggaaggaaagaaaaataacagtaattagactatttgggaagcaacaggctgggtcattcgttttatcatcacgatagctctgtgacgtaacattatcatcatcattttatagaggggacactgaagctcagaggggttaattggcttgtctaaggacaagaagtggttgagttgggagcacccccaaatctgtccaacttcaaacacattgcctttctctgcatggccacaagtgccccattgattaatacatctaacagaaagctaatcttgaggcctaacagaaagctatctaacagaaagctatctaacagaaagctatctaacagaaagctaatctaacagctaatcttgagtcctgtgtcccattgagagctggtactagcatgaacatgtgaactctttgccttggatgggcagacacccagaaagccccgtctgtagcctgtgctgcttgaccctttccttagcgtgattttgcaatattatgggaacacctcagtgtcttctggatacgcacaattctcattgctaaatgctaaaaatgtaattattatatctgagttttatttaaatttttaaaatgttt

SEQ ID NO: 43007 - DNA, 1047 bp, Homo sapiens
tgggactacaggcgctcgccaccacgcccggctaattttgttcttgtatttttagtagagacggggtttcaccatgttagccaggatggtctcaatcttctgacctcgtgatctgcctgcctcggcctcccaaagtgctgggattccaggcgtaagccaccgtgcccggcctcgtttttcacttttaaggcctatgtggtgatgttggactcatcagataatctaggataaacttccaatttcgatgttcataaccataatcacatctgactgtattatattcacgagattagagtgtggacatctttgcagggccattattctgcctactacaaaactcattaaagtgtagattatattttaaaccataagagtagaaaatattacccaaggagaatgtgcagttttttcttgaatcttcacctgctggaaggttactttacccatccttgtcctacatgtcccagtcttttggatatctggaattactccatcacctataacagaatactgtagactgtgtgaggcttataaacaacaaaaatttatttctcacagttctagagtctgcgaaattcaggatcaaggcaccagtagatttggtgtaaggtgaaattcacttcctggttcatagactgctgtctctcgctgtaacctcacatggcaaaagcaggaggtgagctctctgggctctcttttatgagggcatgaagcccatttgtgagggttctgccttcatgaactaatcacctcccaaaggccccacctctaaataccatcactttggggattaggtttcaacttatgaattttggggggacataaacactcagtctgtagtagtgctttaccaatttctcaagcatataggactattttaggaccatggtctatggctaagcccaatttctgcccttcacctcatctcagccatctctgcctttcaagctctgctactgcctatatcttctttggatttacatgacatcttcacctttcactggagctgccaaactcccttgtggacttgatttatgattgttgacc

SEQ ID NO: 43008 - DNA, 1037 bp, Homo sapiens
cactgcatgagtacagggatgcttggaaaacatgggcaaggactgaatacctattgccaagaagccaagatattaaagtatgataatgatagtaaatgtggtgttattgcaataaggctggctaatcacaaatcattagagcaggaaagggagaaagggtagaaactccagcagaagctaaaaggcatggttttctaatcctccagctggttacatattatggccctttcttgtgtacattttaaaactgacgggcaaattacaacaagaaaaattcagagctcaaatgtttaatctacaactatagagttaagtagagtcttctaaagctctctatttctctttccttttctgcctgctttgaatctactgttaataagttactggtattgagataaaactcactaattcaaggtcaatttgagattttttttttcctcatatggttcagccagttctagctaaaatgtaaagaattaaactcatttggaactgaaaaaaaatggataaaggaggtttttaaaaatcaaactgccatagaaactgctttacccaaattattgatccactgctttccttgggttacctattggggcaaataaagtttagccatgtgaacaggtcccaattttatcaaaaataatctggatccagctgtcttttatatagtaatgagtttgtgaagctagaattccaaaagctattggtaaaagctatcggatcttgcatgtatatgtataaacatgtttaaatgtgttatgtgtatgtgcatgtattatgctatgtgttatatctagcatggtaccgaatagcttataagtaaatacgtactcataaattaaataagtccagatgctcttcaggttcacgtgaattcaataatctttggtgaataagctggcttcaaaatttttgataaaataaaagtagaaatgtcttcaaaagtgtcagcatacatttttgtctgagtttcttgattagataagttgtatatttgcccctcctagatagtttaaggtgtcaggtttctgacatga

SEQ ID NO: 43009 - DNA, 1058 bp, Homo sapiens
attgcaacctctgcctcccaggttcaagcaattctcctgtctcagcctcctgagtagctgggattacaggcgcatgccaccacgcccggctaatttttgtatttttagtagagacagggtttcatcacattggtcaggctggtctcaaactcctgacctcaggtgatccacccgcctcggcctcccgaagtgctgggattacaggcgtgagccaccgcgcccggcctttgttttcttctttgagcaaaattaacttctttaactattaaatgttaaattctattagcatcagctccagaggaacattcacagttatgtattctcttgaaattatatattcttgaaagaattttttgattatctgtcattaccttaagatttctattattatggtttgcttctacttagaaaatacagatacttttcaacaacaccagtctctttatttctagttatattgcagactttcaaatattttatgtaattgcatctcaattatctacaaacagaagtattccgaacagatcaattagtagctctcaaactttaacatatcacagtgtcctggagggcttgttaaaacacattttgctggagcccaagatttcacgtttcttccaagttcctgggtgatgctgctgttgctgctttaggggccactctgagaactactgcaatatgttatattatagaagtgtgctttttattttggcagtgtgtgtgattaaatatatgtgtgttttaactcttccacccagataacttacttattttcattacattttattcaagtttataataaaatgaacttgttttctttctgcccatctcagaagacccagacatcgtgaattatagagggaggcataggtttaaacatgtgtgcccaattattatgctctttaggtacacagtataaccttctgatggatggaccaaatgcttaaggtagtgctcttcatgtatcgcaacttagtgcaagataaacaagattctccaggcatggtggcacatgcctatggtcccagctactctagaggctgaggcaagaagattcc

SEQ ID NO: 43010 - DNA, 1098 bp, Homo sapiens
aagtgagggtagtttaaagagattttttagataagataaggcttaatttgtacctggagtaatttgatttacatagttatagagtagtatctagagtctgtcgtaggaaagaaacaatacaatatgataagtacactgagaggcagagggcatgttgtgtctcccctcctcccaaacagatgctcggatctgattttaaaatagcatctgtgtgagtatgtgagatgtggctggtcacaatgaagtgggttcacctccttacaaacctttagtcataactgaggttttggacatcagcaggtaaaagtaaggaacagttgggagcttaagtaagaaataatgtgatgaattgtttttccagcaaggttgccatggagggggctgcactaaggaaagaggttatgggtcagcaactttacttttcattccctgctctatccccaggcccagggcactgcctgatgcatggtagcacttataaatgttcaatgaatggatgaaaattaatctgcctgaaaaactgtaggtattatgtaaaaaacaaatatgaggatattgtgacaaaagaaccagtgacatttattgattgatggatctgtgatataaaggtgagagaggaattctcctttctctttagcttggcctgtttcctttaggcgtctttactaacaaaacgacgttaaattgtgattttctcatcctatatccagggatttaatacactattggatctggataaggagtaattgctcttttctggagtaatctggatcttttgctctgtctctctaacttttctgaaattaaatccttcaaggaatgaccagtagccaattgttccattgaaaatttgagttcacctgtcttcctgctgtatttggttaatataattaatgtctagaaaaagctccacccccctgccccagtcagcttctaaactggagtgtaagctccatgacggcaggaattttctcttcactctatccctaggccttaaagtaagacagtgcccaacacatggcagttgcttgacacatttttattaaacctgtgctttggtccttttcccccaattcttgaagcttcccttctttccta

SEQ ID NO: 43011 - DNA, 1084 bp, Homo sapiens
tgacttgctttattgccatattcactttcttaagctggtctggaaacagacctacggtatctccaaagtatgccaataatccaaaagagtaccctcctagacttagattcttcatgctgggttctctgactagggagggtgcaggtgtcatggccgagtctagtttgggaagtgcagctgtgtgatggcattcacactgtgattaatgcccttttggttgcagggactgccgccatgcggaacaccaaacgaggttcctggtacatcgaggctcttgctcaagtgttttctgagcgggcttgtgatatgcacgtggccgacatgctggttaaggtgagccagcgggctccgtgacccctgtgtgtctccacagtgctctactttcctcctctcttgaatgctctttcatagtccgtctccccttcccgtttgctgctctcctgaagcccgagattctcagacttgggcctattggttctgcccctccaggtgaacgcacttatcaaggatcgggaaggttatgctcctggcacagaattccaccggtgcaaggagatgtctgaatactgcagcactctgtgccgccacctctacctgttcccaggacaccctcccacatgatgtcacctccccatcatccacgccaagtggaagccactggaccacaggaggtgtgatagagcctttgatcttcaggatgcacggtttctgttctgccccctcagggatgtgggaatctcccagacttgtttcctgtgcccatcatctctgcctttgagtgtgggactccaggccagctccttttctgtgaagccctttgcctgtagagccagccttggttggacctattgccaggaatgtttcagctgcagttgaagagcctgacaagtgaagttgtaaacacagtgtggttatggggagagggcatataaattccccatatttgtgttcagttccagcttttgtagatggcactttagtgattgcttttattacattagttaagatgtctgagagaccatctcctatcttttatttcattcatatcctccgccctttttgtcctagagtgagagtttggaag

SEQ ID NO: 43012 - DNA, 1047 bp, Homo sapiens
gtctagcatggtagtggggcacagtgacactgtgacgctggagggtcagggtcggagcggaggagcttcccagggagtgcagacagcggggaccaggaggtgcgggaagaagagtcaggaggagagtcagggtgcacttggagaagagagctgagctcctcagtggggtatttgagggagtgaggactcaaggctagagattagactgttgggaaatcatcagcggtcttgggatggcctgtttgtgccctgtggtgggaacacaatgtgaggagttgaggagagagtgggtggtgagaagtggggctgctggtgtagcctggtcttaaaggactaagggaaggactgtgtgtcagtggtgtgtgtgtgtgtatatatacacatatgtgaatatatgagtggcgtgtgtgtgtgtgttagtgtgtgggtgtgggtatggtgtatgtgagtgtatgtgcatgtgtgagcatgaatgtatgagtggcgtgtgatgtgtgtagtgtgattgtgtgaaagtatgtgtatatgagtacatgtgtgcatgtgtgagtgaaggtgtgtgcatgtgtgagtgtggctgtgatgtgtatggtgtgtgattgcacaagtgaaggtgcacatacatactttcttacaaatacacacaagtggcgtatgtgtatatatgtgagtggtgtgtgtgagcgtgtggtgtggtatatcttttttttttttttttttttttttttggagacggagtgcaggctgtcgcccatgcttactacaacctccgcccccctggctcaaacgattctcctgtctcagcctcccaagtagctgggattacaggcacgttccaccacacctggctaatttttgtattttttagtagagatggggtttcaccatgttggctaggctggtctcgaactcctgacctcaagtgatctgcctgcctcagcctcccaaagtgttgggattacaggtgtgagccaccgcgcctggcctggtgtggtattatctgaatgtgagtggtgtgtgtgtgtgtggtatggtatatgtgtgagt

SEQ ID NO: 43013 - DNA, 1020 bp, Homo sapiens
ttgtatttttagtagagacatggtgtcgccatgttggccaggctggtcttgaactcctggcttcaagtgatccacccatctcgggctcccaaagtggtgggattacagacatgagccaatgtgcctggcccaagtggtggagtattggtcactcagttgtttgatgattattaatttaatatttactctcccatttcgcagtgtggcctaggaagaagggcattgttcattttgatcaccactgtagctcaagagcctagaacactcccaggcctgagctttcagacgatatttgcagaagaaattaatagctttcaattgattaaatatactaatacatttgagaatgtttataaaaaaagaaactaaaatgtttcattatatctaagtttggggcacactacttcagatttcctcttccttttactttattattagaaaaggtattaaatacggtgcaactgtgagctaaaagtttaacagcaggcttggcaactcaatgactcaaaaactcaaagacaggaaagaaggttttaaaatcttattaattttagttgaacctttggaaattgaatgatattttttccttttcttttcagggacaaaaacaacctaagaggccaggaagtttattcctatgaaatgttgcttctccaaaggccatctcaactcgattacacattttccaaataaaatctcttatataaaagcttttcttggggtttatctttctcgaaagtgatataacttcagatagaagctgatttgaccaaccaaatgactttgactcagtcttctggttgatcattatcatgtaagaaaactcaggtaattccagataaaccaatgtttttttaaaaattgtttagtcgtttatttatttatttatttttattttactttaagttctgggatacatgtgcagaacgtgcaggtttgttacataggtatacatgtgccatggtggtttgtggtgggggaaggggagggagagcattagagcaaatacctaatgcatgc

SEQ ID NO: 43014 - DNA, 1035 bp, Homo sapiens
caaatgtgaaatttttgtcctcaataaagagtcagaaatgatgaccattctgccactttcatcattttaaaatctgtattcctgaaaactggcctcgaatttatttctgtatagtccaaggtattgatttgaaagtgagaggctagcatgaaagccaacacttctcaactttaaaaaaaaatgccttaatatttagtattttctcattctaatgtatcctgtaagtgttctttctgtacttcttgttaaggcatggctgtgtaaacttcagagggttttgggaacagcctccattgtcatccacttttcattctaaaatcttggtatatctgtgcatacatgcacaaggcctcccatgattgcactgcttttacgaataatcatagtcaaaattcattttttaatactgctagctcaatttttatttcttattcctttgaaattgatcatcatttggacagggactgcattaaagctcaacactgaccttcattgtggccacaggaagaaaagatctgctaaatgaacaaatactgtgatcgatattgtgcaatggcttgagggaaaaaggaggttttaaccacttaaagtaagcccttttagaaacaaaaactatttcagtgaaaatgctaatcctacacctctccaaagtaaatgtgcttagaggacaccagccagagtttctttacaatgggaagttgccttccaacaagaaagggttttcaaagtgcagaagaaaactttatctggaaaaggtgagaagcagagagcctccaggctccagccccacacactctcatcttcaattaatactccacaaagggaaagttccattgtgggccacagcactccctgcttgagaacctgtagggacttaaccgctgggtttatccaatgaagtgtctgaggtccccgctgtttagcttggccctccactctctgttcccaatttcgtaaccactacctcagccagtctccccagcagagcacttttatcttatagccatgaggcatctgtgacatgtcccacaacac

SEQ ID NO: 43015 - DNA, 1047 bp, Homo sapiens
atgcaaacacaagactggctcgctttaactctattaatgcccatttttggaggtttcaggagagtgttccttaagcttgagagggatggctgaattgctttctaaatatgttaaactttttttctcattggcttcatcttttaaaaacgattttgtcaaaaaacaaaccaaatttagatatgctagggtttttcaccaatttataaaagcctccctccctgagagccacatgctcaggtccttatagccagccccaccccccactcctaatgtgtgtaccacatcagaagacagacacgcatgcctgagctgattctgcatggtttccttagatattacagttcattagactcttgccacttactgaatattatcttctagctgtaattaactacatgacagccttatttcccatacatttccgattgtgaattcctccagcgcaggagatattccttatttgtttttgcgtccccagagtaacagaacttggttgtggtggtgcctcagttgcttttttttaatgaatgagttttctggaataattctaacttaaacttaacgtttgaaaacatgcgctgatttttggctacagaaaacacagtcgttgtgcttaagccggttaagaattcaagctttattatacacttctcgagtaaaattgatcgtctctctcatccctccttttctattcccccttccctcttcacttcccttctccctgaaacaccccagtatctagtacagggccctaacagaaaaatgcccaggttttctatacctatggaagtctgggaaagtgccaagaaaacaggttgtgaaactttaacttttttcccccttaaaactagttttaaggtgtggatgtttttactttttgtgtttggtgtttttttggaaacacgatcaggtttttccccccaggttgagtatccagccttgcctttgcaatgaagcagtttggtagttaaggctcctccttgtagatgaggcaagccccatggttctgctggagtgggataggaagttgctgtaggaggaaccatc

SEQ ID NO: 43016 - DNA, 1033 bp, Homo sapiens
ggaattttagagaagtgccacctctggtgtcatcagttatcaaaggtattgtggagttttcaggtaacgttaatttacttcattttgacttcaaaaataagcatgggtggtttaacatttaaatactatcttaggaattgcatagatattagaaaccctttatagtagtgttaacatgaatagtagcaaatgcttaccgtgtgtcaaggactctgctaagcattttattttcgtaactcacttattcctcatagccaccttatacaacaggtactacagtattatctctagtacagatgatgaaatacaggcgcagaagttaaggaatctgaccaagctcacactgccagtgacttgtggagccagaactgtgaagttcacagacatcccacgcatttccatattagctgtttgcaatttgtcactgtgtactgtcaatcagtgcctcttgaattatttctttagtaaaatattttttgtgggataacccagcacccacacagacataactgggaaaaaaaaatgcactgagtaatacttaaccttgttacattctatgagctctttttctttatttgattttttaaaaagttccagttcccttttactaagttggtttcatgatctacacaataatgaattgcagccctcagtttgaaaagcatgtgtggtgtagatgatcatgatcaaatgtaataccgttttttcttgccctaaagtgaatgcaagtacttggaaacaaaatacacgcaagtaccaatctagaccattgagtaagcatgatttaatctaggtaattgagtaaaagcattgtgctgaaactgagaactgatactcagtcctcagcagttaaaactagtttatttggacaaactgggcagtctttataacacctgttaaatataatgtgattgtgattttctgtaagttttcaggttttccggagcaatttataccagtgacgcttgtggcatcttacttggaagtcatgtagtaaaataggaagaatatagatgttgacttaattaagatt

SEQ ID NO: 43017 - DNA, 1064 bp, Homo sapiens
aagatttacagctagcatgctttaagtctgttctttgttttttcttaacaactttattgagatttaatgcacatgctataaaagtcactcatttaaaatgtataattcagtgatgtttagtaaagttagagttgtgtggccatcactacaatgcaattttagaacatttccatcaccctgtaaagatcctttgtgtctctttgccgtcactccccattcccaccatccccacaaccccaggcagctactaacctgctttgtctctatagatttgcctattctggacatttcatgtaataaatggagtcatatgatacgtggtgttttgcatctggcattcatttagtgttaatatttttgaggttcatccacgctgcatcagtacttgattttttttttattgccaaatagtctgactacttggcattattgtgtgagtgcctcacattttgcttatccattcacctgttggtggacatttgtgttattccactttggggctattataaagtgctgtgaacattcatgtacaagtctttgggtggatgtatgattttttttgtttttggggggtagatatctggtagaataatggggcatgtgacagatttatgttgagtgaacatggtttttaatgccgcagatgtttaattattagctttgggtaacaacaggaaccaggcaatgcaagcatatgtgataaattcaagtcttgagaatttgacttggaattcgttatttgagaagcagaaaccatttcttaatttgagtatgtgtttatttttatttctctgactttagagccagtggacttaaaggtttagaatggctttaagtaagtagagagaaaacttagctactgttggccgggcgcagtggctcacacctgtaatcccagcactttgggaggccgaggcgggcggatcacgagttcaggagatcgagaccatcctggctaacatggtgaaaccccgtctctactaaaaatacaaaaaattagccaggcgcggtggcgggcacctatagtcccagctactcgggaggctgaggcaggagaatggcgt

SEQ ID NO: 43018 - DNA, 1356 bp, Homo sapiens
gtgtgtgtgtctgcacgcgtgtgtgtctgtggtaaaaactcatgcgggctccgggagccagcagctagtgtgtgtgtggaagcacagctggctctgccattgcttcttgtccttgactaattgcatcttctgccttggtttcctgtcaagaaaatgataatccctctccggggattggccgtctagagaacactgaagttgtgaggggccctgtggctgcccctgctgtcgtcctgcttcactcaccagccacctgtgtgtccaagtcaggaggtggcacatctgcagggtacacgcccgaaacgcgtggacattcataaccacacttggcaactcctgcgatgccaaggatctcctatacctgagtacttttgaaaactacctgatttcctaagtatattttgtttttttgtttgttttttgtttgtttttaatatctttaggtttggggacctcctaggttttctagctatgagacatgatttatgaggaaaatatttttaccccttacctaaaaaccatttgaacctctctgacttatgaaatctgcttaagagtgacattttttgatggcttgattataagatatggatatatagtttgtaaagtaaaattcaacattaacagagaagcaagtgttttgtgggcacctgtattctattttattgtcccaggcagttttacaatcagttcagttcaccagacacttgagtgacgcatcaatagattaagcatgggcatgcagcgcacatgcgcgcgtgtacacacacacacacgcgcgcgctcacacacacacacacacacacacacacccgtacccctctaaactggaaaacttcattgcctgagcctcttgtatccattggagcaggctggtagatacacaggtgacacacccagatgccccttcaaggaaggacttgactcccagtgttagcgccatcgggcctcagctgcagagctgcctggaccgggctgcacccttctcagcccagcgggagttaaaggcctggcctgcagcccatgtgagaccctctggcaacgcttgttacagagttccctgccagggtgatgctggctctatagggcctacatcacagttcatcttttctctgccccgtctgcttcctccttgtcatctcgtgggtgcccatctctaagaagcatcttccacccaagccaggtctcagcatctgctccgagagccctgcctgggacctcctcacaggtctctgttgctgcccagcatgtgtgtgacctatctgtccttttagacattttcatgatgtgcctacttctaacatttccttgtagacgttgtttgaggtttctttgctgtattagttattaatgttt

SEQ ID NO: 43019 - DNA, 1025 bp, Homo sapiens
gcacatagaaagagaaatggtctctagagtgggccctgcagactgagtttttctgtcagtgtgtctcaccttattacagtaccccagagacaatccactgattctctttatttcttcctcaggtttgcctgcaatgagatttcattctctacatttaaaggacatcctttctgagctgctgtgaataaatttggaatggtactgtatattttcatctaatggagaactagctgtactttgaataaggattgctgcactggacgactttagaacatccctcacaatgtcgtcaacccggagccagaacccccacggcctgaagcagattggcctggaccagatctgggacgacctcagagccggcatccagcaggtgtacacacggcagagcatggccaagtccagatatatggagctctacacgtatcctcctgcctagcgcaggttgattgcttagagttttgattatttactagtatgacttatgaattattagaattttatattgttttctcctcccagttcatcatgtaaaataatcgcagggttcatttttagccttaagtttttgaacagagtagaactggttcatttttagtcaaatgcagcactgggcagtacagtcaccactgggcacatgtggctgtttacatttgaaatattttaaagttccttaggcacactagctgtgtgattaataaataaaacatttctgtcatgtagaaggttccgttgggcaaagctggtctaaagcaaggtcctgaggttctcagcagatcatttgttttacgtccatttgtttatatattgtctatgactgccttgtgttatgggaacagagttaagtagttgtgtcagaaacagttttgtccatgaagcctaaaatatttactacctgcccttttacaggaaaagtttgtttacctgatcaaaagggataggacatcgagcaaaagttttcctgttatggccctatttttttgtgtttttgagacaaggtctcgctctgtcacccaggctggagt

SEQ ID NO: 43020 - DNA, 1050 bp, Homo sapiens
cagtgcttattgttagctttttgtttttcctggagtcagtaattgcatttttcttttgggacagttttccacaaggtcagtcacatcagataatctaaaaggtccagatttttttataggcaacctccctcctggaatgttcccttctccaccttggcggtgttgctctcaaggcctaccaacaaccttgtgaatggggcttgttgacttttagctttatggatagtgtgaatgggatctttgttccattctagtttttaacaggttttggttgatatattgggaatgcattggtaatgaaatataagaaaatatgtttatgttaatgaccgttaacgtctgtgatatatgttggtttccttaacttttctccaagtcatgtttataactactgtactagtgttcaccagtcaaaccaagcacgaggagctggagttcctccttctaagtcgaaaaaggggcagacacctggaggagctcagtttgttggcctggaattatataaacgacttaaggaatttttgaagaattacttgacaaatcttcttaaggtaagatgttttatatatatactgagtattcataacaggatataaaaaaagtgaaataatggttctaacttgttaaatctttcactgtcatctgttactgttttagacactaacgtaggtgacagtgttttgctattgcatagtcttttacctactgtgaatatgaaatcaccataaactatattctagggttttgttttttcgagatggagatctcactatgttgcccaggctggatttttgatctcctgggctcaagtgatccttccacttcggcctcctgagtagctgagactctgcaaatgctcaccaccgtgcccagctctttctgttttttaaaattagaaagctttgataaccttttagcataatagtgctttcgttaaattaccaaccattttggatttggttgttagaaatgatgaactttttcatttaaagcaaatatgtattcaaattatctgcattttactgtgaacccaatgtggtgttccctatc

SEQ ID NO: 43021 - DNA, 1050 bp, Homo sapiens
ccccggctaatttttgtatttttagtagagacagggtttcaccatgttggccaggctggtcttgaactcctgacctcaagtgatctgcccacctcggcctcccaaagtgctgagattagaggtgtgagccactgtacccagccaatttttttttaaacaaatatcaaaaatacagatgattttgtggtatatttcttaataaaaaggaattacccgcatatcaaatgttcagggtactttttttgagtgtgtttgcatatttaataccatgaaaaatgttccagtttaatttgagatgaaagaattattttactatattcttgtgagtttatatatattagcatgtttttgtatacagaataatttaaagaagccatctaaaatcacatgtgtcaatgtattttaatacagtagatgttattcaccgttatttttaatttataatgtgacaaattagtcatcttaaagctttagttaacttgtttttaggatggagaagatttgatggatgagagtgtactgaaattctacactcaacaatgggaagattatcgattttcaagcaaagtgctgaatggaatttgtgcctacctcaatagacattgggttcgccgtgaatgtgacgaaggacgaaaaggaatatatgaaatctattcggtaagagttttgttttaaaacgttttaaatttgtttttgtttttgttttttttaatggcaaattgtctttcagcaagagaatctaggcaaatattaagcttttttcagaatagtaaactaattttcattgttttatcaataaatgtcacttaaatattttttagcaagaaagtagaagaatgggtaaattggagttctaaaatacaatttgcccatttctgcatttgctttttaaaaatttcttctttaattacctgaccctaccatcacagtttgcctggaactgcctgagttttcgcactgaaagtcctgagtcctggtagtcccaggcaaatcaggtgccatacctgagggcgagccctgaggattagccctcccatgctttagagtctg

SEQ ID NO: 43022 - DNA, 1048 bp, Homo sapiens
gcggaggttgcagtgagccgagatcgcgccattgcactccagcctgggcaacagagtgagactctgtctcaaaaaaaaaaataaaaataaaaataaaaccaggcctgacaccaaagacggttgaggagcaagaatttccaatggcctcgatgttttcaatccagcatgaggcccgccttcaaggaagcagtgtgcttcctacatcctggttcccatagaggggattcatttctagaagagttaaaggtttggcccggatccacttggatcacaccaaacacgacttccatcatattctgaaagatgataatgcagagagtctataagcataaaactggaatttgaccatgtaattctgctctcatcctatagccttgcatctcaaactgagctatgagtctatttttaaatccccaccccaccatttattagggggatgaccttaatgcttctgttcctcaaattccttatctgtaaaatgtgaataataataataggtaataatgaggattaagtgagctttagtatttacaaattttaacatgaggtatttatttgttaaaaggtgcttagattggtgtgtggcaaagagcaaagctaatgtatttggtattacaaatatacatcccacaaaacctccagtgtatgcctgggaggatgcaaaaccacaggataaagggtggcaaatcttactcaataacttagggagcaattgtgtttacattacaacaaacattctatcaggaaatagaacaactatgagataaaacatgacccttcaagaaatactctgcaaattctagccagttgagagcagttcaaattccctgggtctgtgttcacttttctctattaggagtgttttacaggaaacatctaagaatatttggcttgtctttccaaggatggctttgaagagtgaaccatgttagtgtttctaaaagatttgactgtctcatgcgattgagactgatctgagctacagaaactctgtatgactactgtaggtttctaatgtcattttttaaaaactttaaaaatataccat

SEQ ID NO: 43023 - DNA, 1022 bp, Homo sapiens
cccgcctaatcattttttcattttattttttcttggctcttgagtattgattcattaccagttgaatttttccagatttctccaaaattataccaaatttgaaaatctgggcaaggcacggtagctggacagcctataatcccagaactttgggaagccgaggcaggagaattgcttgaagccaggagtttgagaccagcctgagcaacatagtgagaccttgtctctagaaaaaattaaaaagttagccgggtatggcggcatgcacctgtagtcccagctgcacagggaggctgaggcaggaggatcacttgagcccaggagtttgaggctgcagtgagctatgattgtgccactgcacttcagcctgggagacagagccaagatcctgtctctgaaaaaaatatatttaaaacaaaaatcattttggagagtattggcatttttataatgcaaaatataattctctttactcagatcacctgaataatttattgaaatttcttccttgctttgataatttaatagtttctctctaaatttttgaacagtctgatttctgatgatgatttccatgtaatcacttcagggcttatatttgtgtgactcttggcttcaagtagtttttaatctaaagtaccacatcttagtatctgcacagaagatgcattcatttcttagagtggcagagacattacctcaaaaagataaaataccattctctgagggatcaaaatgatgtaaagacatgttaactgttaataacgatgatgttgttagggcacttaaaaaggaagtttgaaatggaaatacgtattacagagaaaatggcagacatcagtggctgtttaaatatggttgttgtttaccgtaaaatcaaagaactttttcctttttctttctgttttttgagaaacggagtcttgctctgttgcccaggctgaaatgcagtggcacaatcatagcttactatgtcctttaactcctaggctcaagccatcctcccgcctcagcctcctgag

SEQ ID NO: 43024 - DNA, 1028 bp, Homo sapiens
cagccctatactcatcttcctatacactacttctatttcagaactaacttaattattcctttctgaaacattctacctggggaatcttttcattctcttcagagaagtcagtcttccctggcaagtcttagttctgctttcaaagtttaacattttcgtctgtaaacactcagcccctaaatctagtccacctacagcctccacatttacagagtacattctgaaaggctgaaaacaaggacttcagcctcaccttgaactaaaggaaatgtaggtgtcagccaggactaggggaacaaccagggggcgtaaccaaggccggaatcaaaatgaaacccacacagttatggtgctgggatcaggaatgtgtagatagtagatcagaatccaaaggtgacaatgagatcaaagatttaaaaattgtggtctgaggtgcagagccatgattccaagatagatattgatgattgaagcaaaaagtagcagcaggtaggccggttaaaataatgagaaaaggttggacgtggtggctcacacctgtaatcccagcactttgggaggttgaggcaggtggatttgaaaagaaagtatattctgctgttgttggatgaagtagtccatagatgtcaaccagtggtttattattagtcatgtgagtcctggggaacccagaggaactccctcttcaaacaaatgttttacctgagtctgcacgtgttggagagttctccaaattaactctcatgtagtcatatgatgcgtagtaaagggaagacttaaaatgtgctcattccaatcctacgtgcccctgaaatccaggggcaactgcagcaacatttttgaatttagaccaatagaggctttgggggaggagcattttcttgctggcattgtttaacattgccaggacatcaccatgaaaataatgaaggtcaggcacggtgggtgatgcctgtaatcccagcattttgggaggctgagtcgggtggatcacctgaggtcaggagtttgagaccagtctggccaac

SEQ ID NO: 43025 - DNA, 1080 bp, Homo sapiens
tgtattctaccagtgtcaggacaccttgctcttaaatgctcacaaattgtgtatgaattgtgtgtgtgaacacttcactgtgcaacatagagttgtggggttttttgacagtgtattaatattaatccatgcatatttgtactgtaaaatatagcaaaatgttactagctttgctagtagttccatataattaagtatatattgtatactctgatttctctaagattcccttgtatacatttgtatttttgtacaaattaataagacagtcatctgggttcttctcagcaagcttgcgggttcgagtacacctctaaacttcagcgcatgtttcaagacattggcgtgagcaaagatctgaacgagcaattcaaaaagcacttgacaaactcagaacccctagactgtgagtatccgtgtgtctctatgttgtgtttacaggcagagttctctgtagcaaatgaagaaatgacaaaatattaggtgaagatgggaggggctttgtcagaaattcaagaactaagaagcgggagattcctcccaaatgcccagccctcctcccccgactcccgtgtgacattaggagatgacaacccttgaagtggtgtcagctctactggggcaaggtcaccacctgttgggatctggggagggactcacaggcgtggttttgtcttgtaaaccttagcttggatccattctagcatttattttaatgttcacttggcctgcataggtaacagtcaagctaaagacctgtggcttcagactgggattagggatcagtacaggcaggtgcaggtgattcagttctccaggagaggcagctgggctggtattttagggccttgcatagtagtaggatggcggatttatgcttacatcatcttttgatcatctttgtctttttaaatgaaaaatggagaattttatttttcccaaatcagaatgacaattctattgtaaaactggacagttttgccagtgggctttttaactatctgcgaagatgaaattactgttataatttatagaccatgtgtggcgtttcccagtaataagtgaaacatacactataat

SEQ ID NO: 43026 - DNA, 1029 bp, Homo sapiens
caagctagagtacaatggcacaatctcagctcactacaacctccgcctccctcaagccatccttccacctcagcctcctgagtagcttgggactacagacatgcgccacacccagctaacttttgttttgaggacacagcgttttgccatattgcccaggtggatctccaattcccagactcaagtaatccatctgcctcagcctcccaaagtgctgggattacaggcatgagccacaatgcccagcccatcttttaaatatttttaatcctaggtatggttactgcttaacacttttcctttggagagtataggaaaagagtaatactgcacaggccttaaaaaaactaccttaatcaatttttaaaaattacttcaagtgttattttgatagctttttagaatttatactgtcttgattcaccttgacaataaaattatctatgcttttttacttcaaataagttattatcaaataagcagaagatatcttatttacataccataaaattctgctgtaggggagaccaagaatacattatgggtactgaagcaactgcattcagagtctttaatgggatgacttgtgttggaaaatccaagtcactggtcaccgaacactaaaacagaaaaaataaaattgactcttaagaataaaaggacaaccttaagctgtagccatcatattgtaaagagatgctgcctacccaaatatttaattttgaaaaaaaagtccttacctaggacagtaaagtggtcatataaaccaaataggattctctcttttcttttacttagggtgcaaaaatgcttcaaattttccaaattttcaaaacctccaacccttcccatacttaccaatatcagtaagaatcaaaaactgtacttatatgagattcagcgatctgattaactcctccatgcttttcctatacatttatttcctagctcatccttcatttctcttacattccaaccacacagaatagtaatatgtataccaaataagccacttaaatcttacttaat

SEQ ID NO: 43027 - DNA, 1091 bp, Homo sapiens
gagttctctggtccaggctccgtgggaaagtggatggaaagtgcatgctctgggcactgctgccatctgctgctgccttgattcaggaaggcattttgcagatcacaggcagggagacgacaaaaaaaaaaacaccaaagctcattttgttgacattaaatgttcaacgtttctattgctgggcatttgacacaaatatgttcatttacttttctttgattcatgaatgtcttcaggtatttgcaaaggacaagaggcttccatttggtaatttacgtctatttcccatcatgcaactacatttattttgaatatcagtttgcattaagctatttaaaattaaaggaagataatcagataatgtatggctttttgcagtattattttgtaggggtcatataatatcagactttttggagaattcttaaaataactcatcctaacttatttagagtagccacttcagagatttataaaatgaaagtgaaagcagtttttctggctggtccgatggtagtgggttatcagaacttattaacattagtgtcactaaagttggtatacaaccccccactgctaaatttgactggctttttaccatttgattttgtatttcaatcaaacaagctaactttacaaaatattcatgttggggggaaagcattcttacataaatgtccccctccttttctttttagggtcttactgtgttgtccaggttggagtacagtagcacaatcatagctcactgtagctctaaactcctgggctcaagcaatcctcctaccttagcctcttgagtagctgggactacagacacatgccaccatatccagttattttttttccttttttgtagaggcagggtctcactatattgcccaggctggtctccaactcctttggctcaagttatcctgctgccttggcctcccaaagtgctggcattacaggcgttagccgctgtgcccagcctgaatgtacttttttttttttttgagccagaatctcagtctgttgcccaggctggagtgcagtggtgcgatctcggttcactgcaacctccacttcccaggtttaagcaattttcc

SEQ ID NO: 43028 - DNA, 1002 bp, Homo sapiens
acgcccctggctaattttgtatttttagtagagacggggtttctccatattggtcaggctggtcttgaactcccgacctcaggtgagccaccgcgcccggccaagcccagctaatttttgtgtttttagtagagacagggtttcgccatgttggtcaggctggcctcaaactgctgaccttgggtgatccacccgccttggccttccaaagttctaggagccactgcgcctggccaaagtacctttttaatcattaaagattacataaaactgaacaagaaagaaataccctgaccaggctgggagtggtggcggtggctcacgcctgtaatcccagcactttgggaggctgaggtaggtgaatcatttgaggtcaggagtcgagccccacctgaccaatatggtgaaaccccgtgtctactaaaaatacaaaaatgagccaggcgtgatggtgtgcacctgtaatcccagctacttgggaggctgaggcaggaggattgcttgaacccaggagacagaggttgcagtgagccgagatagcgtcactgcactccagcctgggtgatggagcaagactccatcttaaaaaaagaaagagggccgggcgcagtggcttgagcctgtaatcccagcactttgggaggccgaggcgggcagatcacaaggtcaggagatcgagaccatcctggctaacacggtgaaaccccatctctactaaaaatacaaaaaattagccgggcgtggtggtgggcgcctgtagtcccagctacttgggaggctgaggcaggagaagggcgtgaacccgggaggcagagctttcagtgagccaagatcgcaccactgcactccagcctgggtgacagagcaagactccgtctcaaaaaaataaaaataaaaataaaaaaagagaaagaaagaaatacactgagcactaaagtcaaagaacgaaactttcaagcatactagaaataacagccatgaaactagaggcagcaagagtga

SEQ ID NO: 43029 - DNA, 1030 bp, Homo sapiens
cagagtgggaaaaattagaagaatggcaaaaggaactttacaagaatatcatgaagggcaactacgagtctctcatctccatgggtgaggctgagttgacaccttttgaatgaagtgacagcagctccaagagggctcagaacagtcccttttcctccagtgacctcattctcactctgtcttcacacacttcaaattctggtttcaagccaaaatatgaccaattaatgcttgctaactaggaatcataatctctctttttaccaaattgtaggacagagaatgaagttcagggttatgggtgtgacagctggtggtttccatgggtatccttcacttggaaaggagcttgacttctcccccttgaggcacactgtcactctgaaagcagtgctaacctagcacatgtgctttccccacacattacatctccactgcctgctttcctgaatagatatccacagctgaagatggatagatgggaagaagtgatatgaaatctaaaagaaattccctggcactgtgaccacaaagcttcagctcagccttgatggcaattagttgtcatcctcatttatctctttgtaatactctctcttcctttttcctctcctagattatgctataaatcaacctgatgtcttatctcagattcaaccagaaggggaacataatacagaggaccaggcagggccagaggaaagtgagattcccacagaccccagtgaaggtaagtgggagaagagattcctacttcttgtctccctttcctggtcagacatggtggctcagagctaagcagggcttaggggcttctagagccattcattgctaaagcaactagattttgaatgtgtcatcaggcatttaaatataaaagggagcttagaggtcaccttgtccagtgtcttcacctatcagtactacacacctaacagttacaagttgcatttcctgacagaagtactgacacctagctgtttaataaaataaacatgtccttacatgatgaaggaggcagtcatgctca

SEQ ID NO: 43030 - DNA, 1059 bp, Homo sapiens
tttttttatagagatggggtatagccatgttgcccagtgtggtctcaaacacctggacttaagtgatctgcctgccttggccttccaaagtgctaggattacagatgtgagccaccatgctcgacagtggcctgtttttgaccaaaacaccattatgcagtgcatgactccatgtgtcttgctcaaaactgtccttatattcagcacaaatataaacctttgtactactatacaaatgttacatggtacgtgactgcagttaggtacagccaaccactcatcatttaggggaagttttgtatcagcatagagactacatacagtagtccccctttattgatggtatcgttttccacagtttgttacctgccgtcaactgtgatctgaaaatattaaatggaaaattccagaaataatttataagttttaagtttgccattctgagtagtatgatgaaatcttgcactatcctgccctgtctcatctggggcgtgaatcatccctttgtccagtgcatccacactgtatacgctacctggccattagtcacttagaagctatgtcaactgtggcagtattgcagtgcttatgttaagtaccccgcgctccccccctttttaaaaataaataattgccccaaactgcaaaagtagtaatggtggcaattcagatgtatcagagaagccgtcaagtgcttcctttatgtgaaaaggtgaaatttcttgacttaataaggaaggaaggaagttacatgctgaggttgccaagatctctggtaagaacaaatcttctatctgtgaaactgtgaagaaagtaaaagaaatttgtactagtgctactgttgcacctcaaactgcaaaagttacggccacagtgtgtgataaatacttagttaatatggaaacagcattaaaggcaagtacaggcatctccaggatattgtgggttcagttccagactactgcaataaagtgaatatcacagtacaagtaacaataacttttgttttcccagtgcatgtgaaagttaagtttacactatgctatacagtctattaag

SEQ ID NO: 43031 - DNA, 1050 bp, Homo sapiens
atcagttagaactgcaggccagttccaaagagtgtttgcttaagattcaaaagtgggtaagtaaaatggatcagtgggaaggataaggtgtccaacagaaagtgtggaggagaaactcttggcctatcaagtgctcctgagagaaaccatgcaatttaacacttcagttaaagaaatacatgagaactgcttgtcatgaccagacaagataggaaaggggaaaccccagaaacgtgctcttcatctgtcagccttttggaccaagaagctgtcactatcacacataagcaccattcccttagagtggatccaggtgttgactataaccagatttactctttgcttactaggttttccattgtcaccattggatgaacctctggtttagccacagttgtgaaaataaatggaagttggttgattgtctagaaagtgcaagaagatggccctgctccttttctgctgaacatttagtattggaaactcctacttcccttttcattaataatgtgtgcaagtttcctattagcggggaaggtgtggggctctgctgggcttctcttgagcatatctgagaagtgatgttcatgtctatctcaaccaggaccagaccctgtgacttactcggtaataacagtccacacaagcctcgttgatattaaaaaaaaaaaaaaaaaaggacctcattccaaatggaatgggaatccctaatttctgctcagattttctctgaggaggggcaggactcctgcccttcctctcatgtcttagcttcttaaactacaaaaagcatcctcagtgactgcctgagggcagctcagtagccatgaacaaaagcatctttctttctcaaaaatattttcttacggacaaggacctctgatgtcaccaaatatgtttttttttttctttctttgtgcctgatttttttttttttttttgagacggagtcttgctctgttgcccaggctggagtgcagtggcacggtctcggctcactgcactccgcctcctgggttcacgccattctgcctcagcctcctgagtagc

SEQ ID NO: 43032 - DNA, 1066 bp, Homo sapiens
tggaggaagcctgagaagctgagctgccttcctttccctatcccggtgaccacattgtacttcgtagcctgctcattaaattaggtatggggcaaaaaaccaagataggagtgcaaatttggttaccctcttcacttaactaacagtgaatctagaggttttcttcctcaaataaagctttattgcagttgttggaaagacgcagagcaccagaaatctttaggaaatagtagacataaatgttctggcgttgatgcatcccctctccattggcctctcctgtattttttttttttgaagtgaacataaactcaagattttattgtattcataataaaagatgacacttagaactggatcacttggccctttttccggaaaatcggcttagtttgcccaccatagccactctgcttcctgtcataacgccgctttccctgggcatgcagagaatccttgcccttcttgtactgtgtcactttatggggttggtgcttgccacacttcttacagaaagtccgtcgggttttagggacgttaaccatgcttgcgtgagcgctatcggcacggaaagaaagaagccgcgccgcaaacggaagtataccttttttttttttttttttttttttttttttgagatggagtctcactctgtcgccaggctggagtgcagtggtgcgatctcggctcactgcaagctccgcctcccgggttcacgccattctcctgcctcagcctcccgagtagctgagactacaggcgcccgccaccacgcccggctaatttttttgcatttttagtagagatggggtttcaccgtgttagccaggatggtctcgatctcctgacctcgtgatctgcgcacctcggcctcccaaagtgctgggattacaggcgtgagccaccgcgcccggcctctcctgtattctttagttcagcatctatcacttcaaatatcctgtccagagcagtaacaataaaattcctaggggaggggatgaaaagcagtcagttcccacctgagagactgaggggccaggcctgggtccttccctaacaagaaacg

SEQ ID NO: 43033 - DNA, 1917 bp, Homo sapiens
tccttccctcccttttccccttctctttattatagaatattcaaataaaaatagacagaatagtataatgggtccccatgtatccaaattccagctgcattagctgctaactcttggccagtcttgtttcacctaaatccctgcccacttccccactcccattttattttgaagcaaaccccagacattagtcatttcctttgcaaatatgtcagtattagctcaaaaggtaaagactcttttttttttaagtgataatctcaatgttattaccaccaccaccatagtaaaagcttcagcctagatcactgtctagccagtgattagattttcagttgtttcaatttttaaaaacatttttttagtttgaattaggattcaagtaatgtccacacattatgtttgagatgtctcttaagtcttttttaatctgcgggcatctcttccatctattatttttcctttcagtttatctggaaggaattgggccacctgtcctgttttgcatctcgctgtctggattccactgattacgtcccctgtggtctcatttaacatgttcctctattctcagtattccagttgattggtaactggatctttctctctggaacgcactctgatcaggcctttgctcactaatgatgtccgtggtgttacagccagtggttgcttctcagtcttcatcctccctgtcctgtcagcagcattgtgtgtaggtgaccactctctccgtgaaaccccttgccgtggcttctgggacacctctctctgctgagtcttttcctacctcaccagctgctgtgtctcattgtttgccaattttgcctcctttggccagctttctaatgcatggagtgggccagacctctgtcttggccttttgctctttatttactctcctccctcatgactgcatcccgtctcacagtctttattatttatttatttatttattttttttgagacagagtcccgctctgttgcccagactggagtgcagtgacgtgatcttggctcactgcaacctctgcctccagggttcaagtgattctcctgcctcagctgccctagtaggtgggattacaggcatctgccaccatgcccacctaattttttgtatttttaggggagacggggtttcaccatgttggccaggctggtctcgaactcctgacctcaggtgatccacctgcctgggcctcccaaagtgctgaggttacaggcgtgagccaccacgcccagctagtctcacattattaaaagcaatctgtatgctctcacctcccaaatagatgctttctctcccctgctccctttctatatgttgcccagctttctttctggaatgccagattcacattcctacctattaattcatttggatgtcagtaaatcttagatttaacatgtccaaagtgaactgcggatcgcctgcctgagacctgttctacctgaagttgtcctcatctccgttgatgacggatggttccatcctttcaagtgctcaggccaaagccttggagtcatacttgtctcctctctttctcacaccctacttccaatctattagtaaataccctgatttttcttcagaatatatccacaacctggccactcctcaccacctccactcccatcgccatcgtctggtcccaggcaccatggtctttcatctgatttttgccatggcctcctggtgggtctcattgtcttcatccttgtccccccacccatacagtctatctcaacacagcagccagagtgatcctttgaaaatgtgaagcagtcacatcacacctctgcttaaacctcccaaatggctgggcacggtggctcacgcccataatcccagcactttggaaggccgggcaggtgggtcatgtgagatcaggagttcaagaccagcctggccaa

SEQ ID NO: 43034 - DNA, 1042 bp, Homo sapiens
acctctgtgccaggcacctacatacctgcggtcctgtgagggacctcctcttagctggcattgcagctggactctgtcgtaggtgagagctctgttatagcagatgtatgtatcaatcagagttctccagagaaacaggacctgtaagggtgtgtgtggaaaagagagatttattttattttaaggaattggcttgtgattgtggaggccggcaagtccaaaatttacagggcaggccagcaggttagagccccagggaattgctgatgtggctgctggagcctgcaggcagaattcccttttccttgggggaggccagtcttttcccttaggccttcagctggttgatgaggcccgcccacatcatagagggcaatctgcttgactcaagtctactgacttacatgttcaaatctcatctaaaaatataccttcatagaaacagctaaataatgtttgaccaaatatctgggtaccgtggccgagccaagttgacacataaaatcaacaatcatgagacatattaacatactgtagccctttacttatccacaggttagagctccacaaacctcatcccccccttagtcagagcctcacacccataggtaagtgctcatagtgtctgggtagaggaaagcccgttcacttgtcatcaggcatgacccttgaaagcatcacagtattaggatctttaaggagatctttaagagataagaaggcaataaggtgtaaattaggtttcagagactctgtagaagaaagagagtatagggtctttttcttacatcttagaaaaatcccattcaaaagatttaaaggcttcttgtaacattactttataccccataaatatatacaactataatttgtcaatatataatttaaaaaaagaggctttctggaagttttcatctttccagaggaaatacctctttctgtggtggtctcagcaccagaatgggaacctcattctaaggagatttaagttcctgcagcacagaaaggctctttcttaaagactgtaatgttactcccctgc

SEQ ID NO: 43035 - DNA, 1077 bp, Homo sapiens
ctgaggcatgagaatcccttgaacccaggaggtgaaagttgcagtgagatcatgccactgcactccagcctgggtaacaaagcgagaccctgtctcagaaaaaaaaaaaaaaaagagagagagagagactaataaagggtatgaaatcggacatgatctggtttacgtttttataggatttcaggagtggattggcggggggtgcggagccatgtctgaggctcatgcatttgatgcagaccaagtggagagatgctggtggtcagagctggggtagcagcagtgcacagggagagaaaggacagattcagatgcactttgagagtgtcactcatgggttgcctgtgggggctgtggaatcaagactgactcctgggtctgggtcctacagaagtgggtgaatggtagtactgtttgctgaagtgccaagccctggaaaagaacctgtgttgctggttctagtttggagtcaagagttctagtttggacctattaaaatttgaggtgacactcaagtagcagatcaagtaggtgaatataggagtctgaagttcaagagagagcttggggatagactgatttgggagttacaggttgcagtgacttccaacatcagcgacctgtaattggccaaacctcacaggttgagggctcatgcctccacaggaccgttctctcttcagacaccagctgcaaatttgggggttctaggccaccctcacttctgaccagctggctacaaattctgggcttcccatcaccccgtcataatttgctagaatgactcatagaactcaggaaagtgctatatatatcattacagttttatcacagcaaaaggattcaaatcagagctagccaaaaggagatccataaggctaggtctgggatggtcctaagcctgaaatttccattgttccctccctgtggagtcaggatgtgtcaccctcccagcatgtcaacgtgtgaaaatatgcagagcattgccaaccagggaagttcgctgagctttggcgttccgagtttctgttggggcttctttatatagatatgattgattgaatcattagccacgag

SEQ ID NO: 43036 - DNA, 1032 bp, Homo sapiens
caggcttcccctaaattggggagcaggactcctctagggagaaaggaattcaaactgaagaccagggaggtgatggagcgtgaggcatgagaaccactgggctgggggacagggtgggtgggagggggaaggactgggcctgacgtcaccattctgatgctcagagcctgggctttgtctcccactgccccccaaggtggtggagaactgtgcacttggaggaaagggggcaagaaccgcatttcctggggtggtaggttgggtggccactgccacgagtgcaaggagggcctgttatggtgctgccaaggtccaggtgggtcaggtgccagggtgggactcacatgtcccagctgcccacacctgcccaagtcagatgccccacatgcttagtggaaacatgactgccaacccatctgatgcttatgtttccagctccctgcattccattcctgtgggcctctagatggttttcaccttggataaaattcttttcttcctattgagagactgtcctgagataaaagtgagcattgtcagtgtgtgtgctggctcacatctgtaatcccagcactttgggaggccaaggtgggaggattgcttgatcccaggagttggagaccagcctgggcaacatagtgagaccctgtctcaacaaaaatttattttttattttttatttttatttatttattttttgagtcagagtctcgctctgtcgccaggctggagtgcagtggcaggatctcagctcactgcaacctccgcctcccaggttcaagtgattctcctgcctcagcctcccaagtagctgggactacaggtgcgtgccaccatgcccagctaattttcgtatttttagtagagatggggtttcactatgttgggcaggatggtctcgatctcttgacctcgtgatccacccacctcggcctcccatagtgctgggattacaggcgtgagccactgcgcctggcctttttaaattgtattttatttatttacttttttgagagacagagtttcgctctt

SEQ ID NO: 43037 - DNA, 1005 bp, Homo sapiens
ttttctttcttttcttctttttcttttcttttctttttttttttttttttttgagagagtctcgctctcttgctctggctggagtgcagtggagcaatcttggctgcctgaaacctctgcctcccaggttctaagcgattctcctgcctcagcctccggagtagctgggattacaggcatgcgtcaccatgcctggctaattttgtatttttagtagagatggggtttcaccgtgttggctgggctggtctctgaactcctgacctcaggtgatccacctgcctcggcctcccaaagtgctgggattaccactgcatgagccaccgcacccggcctaaggcagagggaattcttaaaagcaaccaaaaaaaaaaaagactaccttgaaatgaagtacagcaaaatgaatgggggccagcttctcaacagcaaccatggaagctaggcaaaagtagaatgatattgtcaataggctgaaagaaagtaactgtggtcccatagttttatatgcagcaaaaatgtttcagaaacaaagatgtaaagaagacatttttagacaaattaaaaatgacagtttgctaccaatacactcttagaaaaggaaattctaaaagatatacctcaggtaaaatgaaaattttcccaaatagaaagtctgaaaatatgagaagatgtgatgatgcatggaaatggttaaatctaaacaaatagtgacttaataaaacgtaacaatttcttgttgtgttaaaaacaattaaaatacatgatggcattgatgtaaatatgaggaagagatgatcagaactaaagtgtttaaagggctttgttaaagggccttctatgtatgtttcccataatttctaggatacttgctaaacaactcgaaattggtcgtataacttacagatcagaaagggggataatggaataagaaaaaattaatgtaaaagaagacaagaaagtagagaagaaagatgggataaatagcacaaaaaaggtaaaaat

SEQ ID NO: 43038 - DNA, 1092 bp, Homo sapiens
gtggctgggactgcaggagcccgtcaccacgcccggctaattcttttgtatttttagtagagatggggtttcaccatgttagccaggatggtcgcgatctcctgacctcatgatccgcccaccttggcctcccaaagggctggaattatgggcgtgagccactgcacctggccagaaatgatttttttaatccatatatctatcagtatataatatcaaagtgtagagacaaaatgaaaacaaaagagaggaggcaaaaataaaaacctattgggaatgaaaatgtgtgcattcccatgtctattggttgatgctggtgtgtagactgagattgtaggtaaggccgttgaacagaacacttcatgcaccctcttcatgtggcttgggatttctcaagggattctagcacctggctgcctgtgatttgccccacttgacagagagtggagcagagacgaaccatccatgtgccaccctcctttaactgcagattcacatgcaaagtagatgatgatgtcttaagccactaaatttggggattatttgtcatacaggagttgatggttggaatagatacctagggaaaatgttaaaacattgaaagatattaaaaatggagtctcaaaaggctgggcatggtggctcatgcctataatcctagcactttgggaggctgaggcaggtggatcatttgaggtcaggagtttgagacccgcctgggcaacatggtgaaaccctgtccctactaaaaatacagaaaaattaaccaggagtggtggcacacacctgtaatcccagctacttgggaggctgaggcaggagaatcacttgaacctgagacagaggttgcagtaagctgagatcatgccactgcactccagcctgcagcctgggcgacagagcgagagactccatctcagaaaaaaaaaaaaaaaaaggatttgcatactatgtttatgaattgaaattcatcctaaatgtgtcacttttctgttgggtggggtgactcatgcctgtaataccaggacgtataatcgtgccactgccctccagcctgggtgacagagtgagaccgtgtctttatttatttga

SEQ ID NO: 43039 - DNA, 1045 bp, Homo sapiens
aggtcctggaaatctgatcccccaaaaaacaaactcacaagagacagattaacaattaaagatgaatgtaggctgagcgtggtggctgatgcctgtaatcccggcacttttggaggccgaggtgggtggatctcctgaggtcaggagtttgagaccagcctggccaacatggtgaaaccccgtctctactaaaaatactaaaaattagcctggcatggtggcaggaacctgtaatcccagctactcgggaggctgaggcaggagaatctcttgaacctgggaggtggaggttgcagtgagccgagatcgtgccattgcacttcatcttgggcaacaagagcgaaactccgtcttaaaaaaaaaaagccaccatgtaattttaatttatatcagagctggcttgacaccccggctggtctgctcagaaaccacattatggtgcaaagtgttcgtttattaaatatatttataaaatctgagcatgggaatgggaggtagctgtgggaccctgataaacagtgccaaggttttcgaactgtgatcaccagaccaatagaatcagcatttcttgggaactagttagaattgcaaattcgcatcactttcatcccctcctgtttcagacctagaaatgttgaggtttgtgcctagcatcctgtatttttaacaagaaccctcagtgaacatgatgcacactgaagtttgagtaccactgacttagagaaactttttttctaaaaaacgaagactagctgtcaaacattatagcactctttcctcaacagagctcattaaatcctagcatttttgtctccagcccattttcctgaccctttctttctttctttttctttttttttttttttgagatggggttttgctcttgttgcccaggctggagtgcaatggcatgatctcggcttactgcaacctctgcttcccgggttcaagcgattatcctgcctcagcctccagagtacctcaccaccacacccagctaattttttgtattagtagagatggggtttcatcatgttggccaggc

SEQ ID NO: 43040 - DNA, 1051 bp, Homo sapiens
gatattcagttttcctggcaccatttattgaaataaccatccttattccaatatatgttcttttttttttccttttcttttttttttttcttttttgagacggagtctcactctgtcacccaggctggagtgtggtggcacagtcttggctcactgcaacctccgccttgcaggctcaagcaattttcctgtctcagcctcctgagtagctgggactacaggcgccagccaccactcccagctaatttttgtatttttagtagagacggagtttcaccatattggtcaggctggttttgaactcctgacatcaggtgatccacccaccttggctgcccaaagtgttgggattacaggcgtgagccgccgcacctggcctaatatgtgttcttgacacctttgttaaaaatgagttagctgtagatgtatcggtttatttctgggttccctcttctattctgttgttctatttgtctttttttatgccattaccatgctgttttgattaccgtagatctgtagtataatttgaagtcaggtaatagattcctccagttttgttctttttgcttaggatgcctttggctatttcaggtttttcatggttctgtatacactttaggattattttttctatttctgtgaagaatgtctttgatattttgataggaattgcattgagtctgtagattgctttgtgtactgtggacattataactaattcattcttccaatctatgaacatggaatatctttccattttttggtgtcctcttcaatttcttgcattaatgtttcataattttcattctagacatcttttacttcctttgttaagttttttcctaggtattttattttatttatagctattgtaaatgggattattttcttgatttctttttcagattgttcactgttggcatataaaaaggctactgattttgtatattgattccgtatgctgcgactttgctgaatttatcagttctaataggtttttttgatggaggctttaggtttttctttcttttttttttttttagacgga

SEQ ID NO: 43041 - DNA, 1045 bp, Homo sapiens
ttccaaagtcttgagcagagttgggggccaatggtagcattgctgtcatctctgggaggagagtgagtatacaagtcagtgacagttcagccaggctcccttgggtttgggaagaggcactgcccttctgtgctgtggatcctgcttgtctgctctggagtccccccacccttgccaggagcttcacaaaccagagacgggctgtcagcaagagctcagacaggatgtggtgcaagtgcaggtgcacgagtttaaccctcagctgcaggagctagtctcaggtgttctggggatgcctcaggctaagaattttgccgactttctgggcttggttggctaatgccaaatgcccctgcttaaatatcacaaggtgctgattctccttttttctttttttcataccaatgtgctcaaactttgagctaggtcttgtgagtttgcctagcactcagacctgtttaagtaacgttctttacattgaaacaagtcaaccgaagctttgtggtgcaggagctgagggtgccccagactcagtgggagccctggttgggccccaaactctcccagcagggtcctcggtttcctcatttgtgaaataaatgagtgggccacgacgttaataagcccaagagaactgtgaaggtggtagtcccttgccctaattggtgctcaataaagttgttggcataaacgagtgcgtgcgcttgatctggtttctgctctctgggaggtgagtggccgtgcggggcggtggcagctggcgacacctgcgggctgttgggcaccagcccggggcgggcgctcgcacctgtcgggcgtgcacaaaggcccggcgcacgctgtgggggcggggcctcccgggttggccaatgaaaagctggcactgggtcggaggcgccagccaagtggggggcggagcttccaccaccggccaatggggatctggcttcgggatgtgggcggggtccacccggtcgcaacccgttgagtctctgcacagctgccgcgctgacgcgttttccgcgtgtcccgagccccggcggcc

SEQ ID NO: 43042 - DNA, 1032 bp, Homo sapiens
ccaggaactggacagcagacaaggaaggtaatagtggctgccggggccctgggtgtagacagggctgctctgaggatgccctaggcgctgcacctgtgggctcagatctgctcctgagccaacatggtgctctggaaacagacctgggcagagccttgttggaggccagaaagccagatagtctgcagcacacacgtgtagacctgctggcaccttagtgccactgtctgcggttccaccatcccagctggagctggctccttgtggctgggtgtccttgtcccggccgtgccagccccacgagccttggtgtctgggcaccagtctccaagcccaggggtccacgcagctgggtctgggaatagagatgttctggagggttcaggcgctccctggaacatgacagatgggtgtttcccacacctgatgctggtgtgcctgagagcccagcaatggcagaaactgttccctgtcccttcttctgtggcagcacgaggccccgtggggctgacaggccttctgatttctcattaaaacaggactgagggctgaggcctgcgagtcagccgtctcgggcagggtaggggagaagcgcccacccggagcctccatctggtcagcccacaggtgttcacctccagctgcgtccccgcctgccaccagcgggggttcaaagaccctggggccaccaggccaggagtgtggaggtggctcccagagggtgagctggcacctgccctcggtactgacagccccacttcagttaaagtgtttgacaaggaaatagacttccctctctgtccctctgtttcttccccatctctcatcctttccccagaggacagaagctggtgccaaacagaaactgaggttcgctaaacaagaagataaagtgtcacaaagtgctgacaaggagcggggtcgggaagatcattgtttgtgtccatccattgggtttctccagtggagaagcttcttgagggggctcccgccgtccactgctgctgcttggtttaacttccagcagaattc

SEQ ID NO: 43043 - DNA, 1164 bp, Homo sapiens
tggctctggccaaacgatcgtctccctgccccaaggtctctgtgctctttctataggtacagctcaggatccctgcccggtttctcagctggagaaaaggcccagggttagtgaagcatccagaggcctggagcttggacatggaagacccagagttgcaggtgaactggtggcttcccccattccctctgcacgggccaggacccagagccccagcttggggaaaacagccttccagggtcagtgtttgagtgatgggtaggaagtctcacctgtaatgcacttcaggttgcatatttcctttcagtgttttatcacagaagcagttgggattttcataaaagcagacacaccttttagaggtggaaattgagaagtgaaggatcaaagtttggggcttgaggggactttagagaataggtgaggaaactgaggctaggatgacctggccatggtcactgtgagagggttggctccatgtcacacacgtgccctacggactcatggtggagacatgcagggggcctggcacctagtgccctgggtcacttggggacagccccacaccaggaactttgagtgtggcctgcggcaggttctcttactggctcagggtgttggcttctgtccaggcgccaccactttgctgtgagctctgagctgcctggggccaccgagccttgcctgtcctctgtagaagtcctagctggggtctccaggccgagatccttattgatgaacttgaccaaacagcggttgggtcctttagctactccagtcttcactttttcctcggtttaaagccctggaggtgccgaaaagagcagggcagagccacagctgggggcccagagaaacagggaagaaaccatctctgcgcccggcctggggctgaacaggttaggaatggcaggtgcctggccaagcctttcctgtggtttgcccagggttgggaccaattccaagggaatttagggcgaaggattaggtgatctttttttaaaaaaaacaaaaagcttatgactcctatgaatctgtaacttctcaatagggagagtaaaagcagaagggggtgggaacccttgtggtttgcctgtaacgaagagcactgagttctggagtggccccagggtcaccccacaaaaaatgcgcagaaggcccttg

SEQ ID NO: 43044 - DNA, 1058 bp, Homo sapiens
cgggcgcggttgcgggtgggagggcgctcgccggcagaggatccagcgcggacgctccctgcagcgccaccctgcggccccttcgagtttcggtgcggcagcggcgagtgcaccccgcggggctggcgctgcgaccaggaggaagactgcgccgacggcagcgacgagcgcggctgcggagggccctgcgcgccgcaccacgcgccctgcgcccgcggccctcactgcgtgtcccccgagcagctgtgcgacggcgtgcggcagtgtcccgacggctcggacgagggccccgacgcctgcgttgaggctcccgcgcccccggccatgcgcggcccccctggccaagccggcgggcccacctcttcccgagcgccatccccaccttcgcctcctgaggcacaggtgggcgcggcagctagagtgatttaggtttgggggcatccgaggctgggccacgtttgcgttcctttgatctttttcgtgaaactttatttgaaaagtttttaccctcccacctaggcccaggagagcgaagaaaggggctttgtctttccccacacttggccaagaagggataagagggtgggcagaggctctgcggggatgaggagtgtgtctgtttggagggatcccgccctcagcatttccccaccagacctgagcagaccctctgtgtcactgcaagccagcccttcaggtcctgtctacctccccctatagcgagctgtccacaggccccccagctcctcccaggctggcctgtctggccgcctcccacccgcctttctgcccctctgcagggagagggcaggaagggacaggagcggagcaggacacatctcacagtgcccgcaggctccacccagctgcctctgtgccctggcctctttccctgtggtgtggctccggggctgtgcctgacccctgagcagctctgtgatgggatcccagactgtccccagggcgaggacgagctggactgcggtgaggatgctttgttccctgagggaggccccgctggctgggcccgggacacagctcacaccccccgctcactg

SEQ ID NO: 43045 - DNA, 1021 bp, Homo sapiens
cctcagggccgagcagggagtccgtgggtcagctgggctcccttcctcgtgggctgatatcaccgctgcatgtgtgcacaggcctcaccctgcagaccacaggccagggcactggaggacacccacagaggcctgtgccttcacttccatttcctcgtggagcaccccctcccaggggcttgggctgagctgagggacagctgtcatcctcatctggccaaggagggagccagggctcagcgatctggtgttgctacgtcccagggctctacgcccccatggtgcaggagcagtctctgcatttggccacaggccacctgcttccttgctcccccgccccaccgtggcttccttcccctcctctggctcttcttgttcccatctattccacccctctctcctttttctgacaggtccatggccaacctctctgtcctgtttgggcaggtgagtggccggtagggtggagggcctggggtgtggagtttgtgccgtgtgtgccgctgtgggagctgcctattgactgggtgtgggcgggcagaggagctggggagaccccagcccagagccatggccactccctggagatgctgttgtcacccctactcctgcctccctgcggactttggatcccctcccacaggtggtccgggggctgagtgcaggtgcccgggtctttgagtacatggccctgaacccctgcatcccactgtctgggggctgctgcgtccccaaagagcagctgcgtggctccgttacatttcagaacgtctgcttcaggtcagcacgggtgagcaggcgtggggatgggtccctgggccggggatgaggcgagtggattcgggggtggaggtctggactaatgtcccccataaacaggccctctcagagggctacagggagacttcaggagggacccgggcaacaagggctgggagcctggtctgactgggggtctctcggctcctcccagctacccctgccgccccggcttcgaggtgctgaaagacttcaccctgac

SEQ ID NO: 43046 - DNA, 1034 bp, Homo sapiens
ccacccagccagcctgcttccctcctgccggtccccaaggacctgggggagggaagcctcctgccggcctgtactggggagggggcaccccctccctgcaggggcatcttgggctctctccagagttcttccattcgtctgcttcctgtctcggcagcccggccccggctccacggggtgtctcaccctccccaccacaccctctctggtctcaggcccacctctggtgggtgccctgaccctgcgaggctccgttgtctgcctgggccttcactcccctctttccccagctcattatcactccctccctcatctttgttgctttctctccgggcctgggccttgactcctttctccctcatttttcttgcggcctttcccacctcctctctcctcctccctctactcagcctctcggcccttttcggcccccctcgcctcagtcctctcctgtctccttgttcttctcttttcttcctataaataactctcctctgtgctgtggctgccgctaagggccactctgaggcccttcatactccaggaggatccccagcagcgcagcctgcgcgtggtggctcctgccctcccagggctctcgatggtgatcaggcctctcccccatccaggttatgcctccgcctcgttgccctgaaagccgcagcgacagcgaaaagggctaagattcggccatgagcagcgcccctcggcgccccgccaagggcgcagattctttctgtacggtgagtgtggcccccaggtcgccagcccaaccttccctccctgggcagccttgggtgctccggccaagggtcctcgccaaccaggggtgtgagcgtgtgtgagtgtggagactgggaggatgctgccatccctaccctgactttgcatgatggtcgtagggggggatgggtagtgggggtatcagacgtcttccagtcctggggagggagttgaggctgttacctgaagacctaggtagcttagcctcagcggttgaggaactttgagaaccctgggtctctcacccagca

SEQ ID NO: 43047 - DNA, 1104 bp, Homo sapiens
gcatgagccttggaatcaccaggccagggttcaaatcccaggcccgcactcactggctgggcaagtaacttaattaagctctccaagccccaggttcctcatcagaaaccaagcataacagaacgtttctcactgggcggctgtagggattaagggtggtgtgaattaaagttctaagtatggtttagcctggcaaagaacacgcgctgcctaagctgcctcccacccctgcccgtctcccacccctgcctgtggtgtagtgggagcaatagccagcactggctcaggtactggactggtgacctcccagcacttgctggaggccccagggttcaagaggcaaaggagaccccctctccttggggcactgccaacacacgctggttggaaaccagatgttatcatgtgagatggcatcagcatgttgtcactgcacccagtggctggttcaggcaaagtgtcagtaccagtggatgattggcatttgggggaaggcttcctggagaaaatgactttgaactaggtctcaaggtcactactatcacggacctgttgttttctgggtgccaggcagcgtgaagggctgcgggaagtgaagggcatgttgtcccctctgggagcgcataacctgctgggaccgtggcacagatgcgggcggcgggttacagcggccttaggggcgccaggatggcagggaggaggctggggcttccgagaaagcctggcatcaggaaagggtcgggtttgtgggccagggcacgtgggggctaggagagcctggtcatgggaggggactctgatgttgagtcagagcttggagctctgggggctcttgatgttgagagagaggggtaggaccacgtggcagggccctggccacccagtgtggcagagagaagggagagagcagaagctggcgtctgtgaagcctgaggcttacccctcctcccagggcaggaagctgtctgccatctccaaggcccggtgccacggactttattcctcttgattaaacataggcccctgtgaacctctgagtcccatgtctagggatgtgccagggggtgagggggcagggggatgaatgctgactgtcaggaagca

SEQ ID NO: 43048 - DNA, 1054 bp, Homo sapiens
ctgctccgaggcagcgggatcacggcgctgggaagcgctcggcagcggcggccacagcgtgcgcggcggcgcctcctggcctcggcctccggcccccggcccccggctccatgcgctagccccgcgccgccagcccagtagtcccggccccgccagccccgcgctcccgctcgccgctgccgccgccgccgccgccgccgcctccgccgcgccgccccgggcccgcctcgggccccacggctccgaagccatgaacttccaggcgggcggggggcagagcccgcagcagcagcagagcctggcggctccggggggcggcggcgctgccgcgcagcagctcgtctgcggcgggcagttcggcggcgcggggcccggggccgggggcggcggcggcccctcgcagcagctggccggcgggcccccccagcagttcgcgctctccaactccgcggccatccgggccgagatccagcgcttcgagtccgtgcatcccaatatctacgccatctacgacctgatcgagcgcatcgaggatttggcgctgcagaaccagatccgggagcacgtcatctccatcgagggtgagcggagccgggggctgcgggagccggggcgcagtggcctctccggcgccggccgagggctccacaggccgtgcctggccatgctctccctgtcgggggtccttgcgcgcttgaggaccaggccacgaggtttgccgatctgtgttgcagaaccggcgggcagcttcgccatatctcgttcggggacactttggggttgggggttttctgctgactgtgttccagggcgcgaaggtggtgtcgcttgggggggccgggaccagatctgtccaggcctggccggggaaggtgggcgcggcagagggcttcagctgcggggaggtggggtcgtgaccggggaggcttcttagccgctgcccgggccctgctccgcagtggggcgggggatcggagcctcgcgttagtggatggcagccttcccgggcccagcgcccgcaggcccggagggtggcgctcgccgcggcgccctc

SEQ ID NO: 43049 - DNA, 1764 bp, Homo sapiens
gttcccgtccctgctctgccactaactggctgtgagagctggggcaagtctgctctgggtgcgtcttctgagagtcacattctggttgtctatgcagctaggggtgaccctggcgtgagtatctggaacaggccaggcttggctccctggccgggggtcttgtctgtcaagtgagcacctgagctggggtccctgagatctgttctgaggctgcctctgtcatgcagcactttgagatgcgccccccttggagccctccaggagctgagaatcagaagagatcctgtggggagaggtgagattttctgtacctctgtttccttacctgaggtgggtcataacaaagctctgccgcttggtagtgctgaggattgagacccccaacgcggtgtgcttagaacagtgcctagcgtgtcataagcacaggtgaaatatcaggcattattctgaaaggcggcagggtatcctgtgtaagggaatgctgtttattacgtgccgccttgtacgcttgtctcgttattgcttttggacaaattttcagaagaaaatggtcagactctggggtcggcacatttttaggacgtttgcggcactctggcaccctgccctccagaaaggccatttgattttcaggcatagagacagcctggagttccctgccccacttccccggcaccccttcttcatctgatacgtaagaaaaaaaaaaaaaagactaaatgactctcgttgttttactttgtttgactttgattactagttgatcactagctatttcattattggattcactttgactattagtgagagttgatattaaaacatttttgagaggtcatttgcattttgttcattctgtacatatcctttattcattttacttttggtttgttcctctttttcttttttctttttgtaaaaatggggtctcactatgttgcccaggctggctgtaaactcctggcctcgagtgatcttcccgtctcacctcccaaagtgctggcatttcaggtgtgagccaccatgcctggcctcccctcccttcctccctcccttccctccttccctctgtccctcccttcctcccttcctcccttccttccttccttccttcctcagaatattggtctgtcacccagactggagtgtagtgacgcgatcgtagctcactgcaacttcaaattcctaagctcaagcaatcctcccacctcagcctcttgagtagctgggactcaggcatgtgtcaccacatctggctaataatttttaaaattgtcttgtagagtcagggtctgtgttgcccaggctggtctcaaactcttggcctcaagtgatgctcctgcctccacctcccaatgttactttttcttattgagctgaagaccgttttaatctcttttaatgtaggtttttctacaacgtacatttctctgtttgctgcaagtcaggcactgtctgagttcccatagtcagcacttcggcctcaatgtgccctgagctgagcagacagtgccatcctctgggccacccaggaggctgaggctggctgtgcccgctccataccgtagccccagatggctgtaccttagggctttgtgcctgttccttttctgccagaacccctccttaccgccgtaggggtgcctgcctacagcagcttccctttagccttttcagtttggtgttttgatggcttgcaaacctgaaaccccagcgcctggagtgggatcaaagcctgtcacaggggcagagggaggaccgaaa

SEQ ID NO: 43050 - DNA, 1032 bp, Homo sapiens
gttaagcacctgggctctggagccaggctgcctagatttgagtcccagacctaccacttgggagctgtgtgacctcgggtgagttccttaacccctctgtgtcttagcttcgccattggtaaaacatgggcatccgtttcatggtgtgggcgtgagaagcaaatcagttaacgtctgcagagcttttagagcagcagctgccctgaggatgtgcgtgctgggtggcgactgtctcattacttgtctcagaggctcagctgtcatcaccgcctgcgtggggatgcgtgaggtgagggctgcatgagatcacaggaatgaccatttccggacccgagcctgagagcccaggtggcagagtgtggggtacgttggtttagctcatccaggcccaggggaagggacctgagggggcagggctgtcacagggcctgcacgttcccgtgaacacccagggtcatctttgatgttttgcctgttgtttttttctctgattcagcactgtgcagtagacatgggcgagtcacacgtgtgaacttaaattttcttttctttttttttttttgaggtggagtctcgctctgtcgcccaggctggagtgcagtggcgcgatctcggctcactgcaacctctgcctcccaggttcacgccattctcctgccacagcctcccgagtagctgggactacaggtgcccaccaccacgcccggcttattttttgtatttttagtagagacgaggtttcaccgcgttagccaaggtagtctcgatctcctgacctcgtgatccacccgcctcagcctcctaaagtgctgggattacaggcatgagccactgcgcctggcctaaattttcttttcttttctttaacgagacagagtcttgctttgtttcccaggctggagtgtagtggtatgatctcagctcactgcaacctctgcctcccgagttcaagcaattctcgtgcctcagcctcccaaggcacatgccttgggattacaggcacatgccaccatgtctggctaatttttgtat

SEQ ID NO: 43051 - DNA, 1050 bp, Homo sapiens
taaaagtcttgctgaattcacagtagtcttttgtccctgtgtgttttcttaaaacctagaagtacaactgttgttgtgtgtggtgggtgacaaagtgtgttcatgttaaggggcactcgtgttcccaccttgggtcctgtgccaggtgggagggtggagcccaggccctgctcttatgagatgaagtgcatgtgggcccggggactggcaccgggaccgggccgctggccgctgtcagtcagcatcttgaccacctgctaggggcttccctcgggaccgtgggtcagaggcctcagtcagcaaagccacagtctttcctcaccccatcctggcattttaggcaggggccatttttgtaaggttttttttgtttgtttgtttgtgtttgtcccatactaagtaatatatgtaatagcagaaagtttgtaaacacacacggactcttggaaactgtgttgcacagagggaagctccctgtctctccgcccacttcctggctgagaaacagggagagcccccaccctggaaatgaggtgctcatggactgtgctgggaagagcccgcggtgctgcagcagtcagtgacggatcccttcctacccgctcttgtgaatgtcgggaaggacccggggctttgtgggagcctgaggacaggctgcagggggcagcccctgcctgcagtgcgccctttgtggcgtctcagatggggtgtcctgagcccaactccgagagggtcttgtggggatttcgtgctcccccagctgcggtgctgttttggagggagatgccgtcctgaacccatgttactagattctcatcacatcccgggctggttgtggagcaccaagaaccctcctggcttccatgcctgggagaggcttggtgtgaggtgccacctgagcctgctctgtgccctgcacttctctgtgtgggtcctgagccgtacagcagcccctaagagatgtgtcgcgttccacttcacatgggaaggctgctgtctctcccagcagctacgccagtgtcgggattgctcagcaagctgcggtgtaaa

SEQ ID NO: 43052 - DNA, 1681 bp, Homo sapiens
cacccagctaatttttctatttttagtagagacgaggtttctccatgttgcccaggctggtctcgaactcctgggctcaagcaatctccctcggcctcccaaagtgctgggattacaggcatgagccacctcacccagccgctacaaaaaatttttaaaaattagccaggtgtggtgttacacacctgtagtctcagccacatgggaggctgctgcagttagataagctatgattgtgctactgcactccagcttggactatatttaggaagaccttgcctctgaaaaaacacacacaagaaagaatgcctttctcttagttctcatactgtgccaggcactgcctgtgtgcttacgtgcccttctcgtattcctgcaatttttggagcatccctacagggtagtattaaccccattttgcagatgaggaaactgaggtacacagatgtaaaggaaatggcccaaggctgctcattcaaatcgtggagacaggacctgtacccaggaagtctggctttggagcctgtgctgccacctttatgcacagggagaaagataagacctttaaaaacagagcagaaatttagaagaatgttgtctaatcttgggatgagagatcctcttaagcggacagaaaacccagaatttatagaggaacaaactgacagattccccccacccccagctttttattttgaaaaatgacagcatttaaaaatgtgatcattattaacattttaccgcatttgctggctctctgtcactgcctcatgctcacatatgttttttcagcagttgtagacacactgacacatcttcccaagctcttcagcaggcatctcctgaggacaggcacatcattctacacaaccattacaccagaatagcacctaggaaggtcagaagagctccctgatatttagtagctgacccataaccacacttccccagcgatgcctgaaaggtcttacagagctttttttgttttcctagataaggatgaaacaggatccaatgtgataccttttcccccatgacatggacttattgtagggccaggacccattttcctgtagaaggcccgagtcctggaaccgtgacgtgggctggctggcgctgggtgttttctgtcttgttcctttctcccttgtggggtctttgaactgaactgtgatctggaagctcagcgggaacacccggttcctccacgggaccacagccttagtgccgtggcgggggcgtgaggactgggtctctccaatgtgaaggttcatttcctccctctgtaattagtaagtagtctgtaggggtgatcattccacacgctcgaaataaactgccccgcacaactgttcacctgatggttttagcgtccatcaatgatctttgcctgagttggtgatatcgggattgtcaaggtggccgtaaacccgacaatctttctgtaagtattagccagtgttctgttaagagcagcatcttcccactcttatctttagtgtcgcccttgtgtcatggattttgttgttcaaatgttataaccagtgacaaaactagcagacatgtaattacatttctgggtcataaagcaggaggacctcttgcagtgcacatgtgccggatacatgctttgcgtgcccgctatacgaagagctcctgcagattaagaaaacgatttgaa

SEQ ID NO: 43053 - DNA, 1073 bp, Homo sapiens
caaaagaaaagaaagacaggcaaagagtaggatcaagacaaatgaaagaagaggaaatgctttgtgttgctgatgaacatgaaaaggcgcaacctcactagtaatcaggggcgtgcccatcagaagcgccagggactggttccccggttggaagagcagactgctggcgcacagggtgcaccgacatccccacccacggctggtggagagcaggagaagggattgctacgaccaacctggaaaagtaacggcgttatccattcacatgaagcattcacatgcctcgggaagaacacaccataggcacacaggtattgattaccgccttgcttgtggtagctaaaaaagaaggaagtgacgtgactgtccctcagcaggggaagggttgaagaacggacagaacatgcatactgtgagatgctatgaagccaggccaccggagcaagctagagccaacccagtggcctggggagggccccaggtgcccctggcggggcggtttggtgtgaactgcagcgtgagcaggagctgggaagacagtcactcaggacgcatctgtgttaaggagagggaagagggcatgcggccaaaacagtggttttctgagcatgttgtgaatgttttcttaccctgaaataaaatttaaaaaagattggcagagtgcacatttatactagccacagcctgtgttcttcctctgtatcccctcagagtctgactcagaggattttcctctcctcattccaagggggaacagtcttctgtttctttttacaaagtaatatatcgtctgtaaacatttcagaaaacagggtgatgtacacttactgcagaaaaacataaaagaagcaaaagaagtcaccagtaattctaaccagaggcaggcagccacggtcaccattttgtcattattttgatattttcttgcattttttatacaggtccatataattttgttacatacaaatttgtatctgactttttaaacaatcaagtattatgccagtcatggtggctcacacctgtaatcccagcactttgggaggctgaggtggaaggatcacttgaggcca

SEQ ID NO: 43054 - DNA, 2046 bp, Homo sapiens
agagaaccacatttttaaatgtcgaaagtgtaggcgatgggtcagttatgagaaaaaggtgcaacacggcatagagccgtacgatgcttcatattctgagtctggagcccccaccgtcccaccctgtggtggtggcccacctcctgcccccacccttcaggccatgggagggctggagatgctgtgaggtgtaggatcctctggcacggcaccggcccatgcggggggtgcagcacatgctggtcgcgttcctctccagggaggagctgctagaaagcagagctaagcccacagttgctgttgctggtcagagctggagtggcgtcacgggcacttccagggtcttagaacatggccagatgggacaaagccaggaggccagatgggggacatgctaagggaccgagtcttcgaggggagggcctttgtcctgtccaccattgcacccagcacagagctcatggatagacaggaaaacaaactgctctcaagtaccatctgtagtactacaataccgccatgtcaccggcctggtgtcgaaaggccattttcggctggaatgacagccactcccacccccaccctggggtaatctcagtttccctgctccttgcactgctctcggtcctgtggctctctctgccacccgcacccccaccagcacctctgccgccttctctccctcagcttttccctggggaggagaggaccaaagtcactggggagctctcagaccgacatcctgacctctggagatggggcagaatccccgggcctcagagcagccttcggagggtcccaaggatgtaggctgggtcctacgccagtccagactgccagccgcgtcaccttgaggcagggtggggcagagacttcagtctgcttgccctgaatgcacttagtaagcactcaaaaaataatgtgaaatgatgacttagaggcccaagctccagcctgggattctggagtcctgggccctgcccaggctctgtcactgctgggctgtgtaactgcaggcaagtgacttcccctctctgggtgtcaatgccctcatctctaaaaggagaggatgaaccagaacacgagttctgaacctggaacccatggcagggattaaggggactcggacctcctcagaaaacacctgtgtgttcttcccagtatgcactagcttttctggagagctcatagcttcctagggctgtggtaataaaccattgtaaacagggtggtttgaaacaacctaagtctgttcctagctggctgcggtggcccatgcctgtaatcccagcactttggaaggtcaaggccagttgatcacttgagcccaggagttctagaccagcataggcagcatagtgagactcccacctctgtaaaaaaaaaaaaaaacaaaaaacaaaaaacaaagaaaacaaagaaaaaatagctggacatggtgttgcatgcctaaagtcccagctacttgggaggccgaggcaggaggattgcttgagcttaggaagtcgaggctgcagtgagctgtgattgcctggttaacagagggagaccctgtctcaaaaaccaaaaagtttactgtgtcacagttgtggaggccagatgtctgagataaaggtgtgggcaaggccacgccccctctgaaggcactagggagagatccgccccacacctctcttcctggcttgtcgatgccgtcttctccctgcatctcttcacattgacttcccttggtgtctgtcgacatgcccaaattccccccttttataaggacacgagtcagattggattcagggcccaccctactcaagtatgacctcatcttaattacatctgcaacaaccctatttccaaataaggtcacattctgaggtcctgggggttaggactcagggctctccagggtcctccgtatctctgaggtctcttagaggggagatggagggaccagcccaggaatcaaagccaagctgagggggagctgctaaggtttcatgggctgactgcatctgcctggctttctgatgtggagagggctggtttcagtga

SEQ ID NO: 43055 - DNA, 1100 bp, Homo sapiens
ttctgactttatggatgaccggaaactggctgggcttcagagcctgggagaggactgatgtttacaatgcagtgtcaatcacagccggggagctcttgcctccaattctgggtgagctctgggtttactgggtgtccaggcagcccacagtcatgaattggaagggcctcggagcttggaggagtgttttcatttacagaacgtcaggctggagccagtaccgcaggctaccacttgatctcagcccatcatcccgacaggaggtgagacccagtgagcagcaggggcctggagaggtccgggcctcagaagtgagtcactcacccagaactgcagcggaggttatctttgacttctctgctgcccttaggcaggacgcttaactcagtccagacagatgagtatcttctggattttataatctccaaagaagacagcctcagtcatcaacagaaaccgactgtagcagccagcaactctcgacctcagaatgtcagagccgaaactaagacaggaccacctcgttgaagctcgcgtgctgcagacgaggacacgcgcgcagacccggcatggctgcctctgacgtctcactcaggcttgtcatacttctgggcctcatgttcttggctcttctggctcttcctttgaagaatgagaaatggcccgcttttctccaaaatggggcccagtgtgtggtggactgaggactgttatttagttggcctgctcgtaatgacagctcctcacctacctgccggatcctaggaggcgccctgggctggaatttcctgttttcgagggctcccaggggctgccccagcaggccggctcccccgcgccgcgccgccgttcccgggcgttccaggccagacttgccgcctctctctccgggctgggctgactcccggcctctccaggtctgggcttgccggccgcgaggtggaggagttgagggactcggtcggcccacaccaggtgcccagaggccggaggtccgtgcgccccggccgcggccccggcccgggcccagccccgtgcccctcgccatgggcctggcccgcgcccgccggccctgagcatggagcggggctggccgcagg

SEQ ID NO: 43056 - DNA, 1041 bp, Homo sapiens
tggcaaggtgacagtagatcctgctggcctccaggccaggtgaatgttccccccatatcatctgtaggggctagtggcccctctgctgcccatgagccccggccaggcccccattagcacagggattcccggcacccgcctggtgcccgtcccgcccctgacccggagctgccctcagcagccctctttgtccttaggccacgaatggcggcggcagcgccttcagcgactactcgtcctcagtcccctccacccccagcatcagccagcgggagctgcgcatcgagaccatcgctgcctcctccacccccacacccatccgaaagcagtccaagcggcgctccaacatcttcacggtacgtgactgccctcctcccccgcccagctgcctttgctgcacaggcagggctgagcgccgagctcccagccaggaggggcgtgggcagccccaagtcaggaagacggtacctgcagtctctccctcagatacacacggctcccgagggtccttgccggtgccctcagagtcttccagactgttctctgcacccacaaggggtttccagtagcggcccttaccctgtccccacagtcctccctgccctctgccgcacacactcaccctccccgccgccttcctctctcctaggcccctttagggtgtctgtgagcttgaaagtatccttggactcacttggcctaactcccctgaccccctttgattcaacagctaatgaaccggcggccggaaggctgtttgcccaaggcgacacagagggttagctggcccagctagagtcagagcccaggcctccccgtcgccttccggctctttttccgttaccccactgccgaggggaaaattcatgctttccacccaccgctgtgattggtttaacaaaggcttagccatcttttcctgggcttcaccacgctgcctcgttcctccctctcaggtttgtcctgtctccttgtgagctcctcactcacccctcacaaacctcacaccccacacctgggggctgttgtgctggcccggct

SEQ ID NO: 43057 - DNA, 1031 bp, Homo sapiens
taaccccacccccagggaaggctaggagcgccggagcccgcgctgggggctgccggggaccaggcccggccggacgctgcaggctcgctgcatggagaagaaggcagctcggccccacgcccggcgctggccagcgcgacgaggcccagaggggcgggggagtccaagcccgcccggcccggctgctcctggggggcgctttcctgcccctcccctcctctgctccttcctgcatggacctctgccgttcctgctcctgctccggaagccgccgccgccgccgcgcttgccttgccccctctttttggcctccccctatttcctaggatccgcattcgggtggactctgccccaggagcttgacagggtgcagggcctcttctggcctctctcctctctctgtccatccactgtgccccttgggccacgccgacgcgctcggtgccacgtgccgtgtggtgtctgtgccgcagacgggccatctgcccgctcacttgtggactttgcgctcccggttgtcgcgccctgtgctcccgaccagcagccccaccgtccacctcctcgcccccgcttctcttacgcccccgccccgggcgtgctcctcgcgccctcggcctctctgtccttgctcttttgtaaggggcgggcccggctcagtgacctgtgctgctctgtatggtgccgtgtgtaagaataaacccgttggaatactcgtggtctcagttccttcccgtcccgccgccccggcccgacccactgctagggctgcccaggaggagggaggcaggagggaggccgggaagtccaggtgggcagctctcggcagaccctgggcctctttaacacgcctcttgttttctcttccagtctcggaagggtgctgacctggaccgggagaagaaggctgccgagtgcaaggtggacagcatcgggagcggccgcgccatccccatcaagcaggtcagcgcctcccttcccgtgtgctccagggctcagaatgaggcccaggaatgtggcgcttcccagggcct

SEQ ID NO: 43058 - DNA, 2003 bp, Homo sapiens
ccctccccccagctcctgctgggagtggagattgcatttcagttgccatttgcattcccaatcaatccggactccgcaattaagtcggctggcggagctgggagggaggcggcggcgggaacgggtcctctgggggctgtcgcctccgcgcctctgcgccgttcccattccgccccagattgcttcctgctccgccgtgcgcagccggccggccggggagggagcaggaacccctgtagcttctttggagagggagtgggaagaggcacgggctaggcgggtttcctcctgtccgcttcccgggagcgggcgggtgggtggggtggggcggggctgagcggcccggtcgttccgcccgcgcccccggctaacgagcgtcattacagcggctccctcgcctccgcctggggagggcgttgccgaggacgggggcgttcagggtggaggagggaccccctccccgatcacattctctgcgaggagggaggagccacacgtgtctgggtcggaaaggaggtgcggagaccccttcccgccctgactgtcggagaaaccgcgcgcagtgcaggccttgaggggctccaccttccaggccgctggagatgggagcagagcggagcagagcagagcggagcggggcggggcggggccggccgtggagtctcctgctgaaggctgggagaggctgggagaggctgggagaggctgggagaggctgggagagggaagcacgcctagtggggtgaggggagtcgggacgggggcggggagccgggtccatccctcacacttggttatttctttggtttgtgtgctgggggcggggcggggggtattggggatgactccaaggcatctccagagcctgagggacttagagccttcgagcacgctagtcccatggctggtcgcagcgggagggggaacagctgactgcttctgagctctcagtgcacctggcccctggccagtgacaggaataccacacccagaggcaggtcaccaaggcccagcctacctggaagactccttcgcagaccaagaggcagggcccgcttgccttgtggaaggtccccttagtgccgctagttttcagaaaccccttttgaggatagggtctcccaggccaagggggccaggtagcaggatgtgtctgcacatggccatgtacttcaactcccagcccgcatgctcgcacctccagcaatggcatttggccctggtgtggccggaggaggagcagcaagaatgtgaaacgtgctggaaagtcagcaattgatgtcacagctgctggggccgctggaagtgggtgccctttctggcctccccctcacctcctgttggggagggagaggtccaggaaacgggaatctcttatcctaatggcatccatctaggagttagccttctattaggaagaacttagaggaggaaggtgcagttgaatccagtatttaccccccacccttgggcgtcaggaccacgagctgcagactagggactgccgtttccttgtgcctgcatctcttagtccctgtgttgttggctgtcttctggcggggccctccattcctaaaggagatgccatcgcggggcctcttccctctctgggcgccccctcctctaagtatgggcagagtccgctttttcaagtctccctgctgggggtgctgccccttccgctctcccagctgagggtgagccccacactcagcccccagtttgtggatctacctgtgcccctcttccccctatgctatttttgccttgaagtctccagggagcactgcctcttctcagccctcttgagttggggattttggaggatggggggccatggatggtgatgctggtcctggatctgcccctggtctccatcgtggcgctccctggtcctgaatgacccccgcctcccattcccagctgttgccttgtgtgtgttgtttaagggagagaagctgagccagtgagagcatctttagagggttctcactagaggagta

SEQ ID NO: 43059 - DNA, 1031 bp, Homo sapiens
cagctgggtgagtcacctccctagagggcctgtgcttgtcacagtgaggggaggatgtgacagacttagtggacaggtggttggggatacgacatccagtcccctggaatggatgggagagaccccaaacaataaagaattgtcccactcacaaggctgatgggactccgctgagaaagcccaggttagagggaaggaaggcgcaatgatgcctccaggtgtggtccttgttggaggcaaggcacctgaaccaggtgtgctgggcccactctcgcagaaacaccgtggaccagcccgaaggcaggggagtggccagggggaggggcctgacacaactgagatgtaccctatgcagtggatgtctctgcatcaggtcccaggtcctcagcagctgtgaagtagagattattgtccccattttaatgaggaaacagaggcttggcatagctaacaaacttgtctgtaaattccacagtaagtgggagacctagggttcaacctaactgtgtctgacttgaagagcaatcttctttcctctaagccaccctgagctcagaaaggaagcctgtgaggtggatggagggaaggaaggaagctaagaaggagaaggccggccaccacccatcatggggctgtgccagtgggggaccttgagcctgccgtggggttgtactggcctgatggcaggtcacatgcagtcttcagtgctctgcccggagagcgggtcagagctgcggggagccctctggcaccggcccccaggagcccctttggtcagcttggggtttctcttatcattccaaaaatgaggagcaggcccaagtgagtccctttccttgacagcagggagccagaggacagctgggctgtttccctagagcaagggaaacgagaagacgctgtcctgtcccgttcctgtccctgacatccctcacctgggagcggcagtggcatggaggagacagccccgtgccctcgctcctgtaatgacagcgcccacacgcaggagctcgcggacggtgcccacccag

SEQ ID NO: 43060 - DNA, 1018 bp, Homo sapiens
gggacagagctgtggaccgtgaagatctggggacaggctgcttcctaaggcacacagggtccctgcgcagcctctggctctcccagaagctggcccgccacctgatgaacccagtgccctgctgaatgtctcaggctctgctctgcagctctatttttaggatagtatctttgagaatcctcccctgcccggcctcccttcccagtctgacccttcccgcccccaggtgccccccactcggccagcagcgcatccctgcactctgagcgccccctcagcagctcggcctgggctggcccgcgccctgaggggctgcaccagcgctcctgctccgtttccagcgccgaccagtggagtgaggccaccacttccctgcccccaggcatgcagcaccctggtgagtggtggctctgctgcttcccaccttttctggggccccagtgacagagaggaggggaactgggcagcattcttggcttgggaggctgcagtgggacagtgtccaggccaaggggtggggcccagctgggccctcctgggcttgtcagagagaccctgcttcggggctagtactgacgttgtcttggaagcagagtaggggcactgtcccttctccagcctccatgtgcagcccttttccccagagcccccatctgcctgcagccctgcctggggccggcgctagaggcccaccctctgcagctcctcctcccctttgtccccaggcggcgctggtggtggctcccgcatccccatcagccccccgcgcagttagctcatcagcctctcggcagggggacggggaagcggctgagtagggaggtcggacggaggctgggcgctctaagccatgtgagccacgttccgaaggcagcagcatctcgcccgctactgtggaactggggggtccctgtggagttgtcctgaaaggtcgttttccacctgtgctgtccccctcagataggcctccacccatcctaggtgggttggtgactccaccgcctctcccgtctgcccc

SEQ ID NO: 43061 - DNA, 1031 bp, Homo sapiens
ccttcccttgggtcaccggtccggtggcctgtgctggcctgcgtgagggccctctgttgagtctggaaggaggaaggcaggaagggagggagcgtgtctgcctctaatgaagtttgacatttagtggtgagcgccgggcggggtgtgggagacggagcttgattagcgcgctctaattgacagtaattaggcagctccctgattgtttctaattctgctattaattgtgaggagcggggagtgtgattgaggataaatttggtgcggagctgctggggcttcagctccccgtgagttccctgggctgccttccacccctccaggctgcagaggcagcttcctccctttgcctccatcctgctctgcctaagtttcctattctctttccacattttcctcctccaaggctggggagctttgggactgggaagcccaggcagacctcgcctagagagaggtgtccgtctggctctcctgagtgtggcccagctacagttggcaggactggtcctctcctcctcccagtgccctgcgcccctcccctcctctgcctcccttcttcccacacttctccaactctcccctcaccagccagtggcccagctgaggtactcagttccagccccaagctggatcctcccccatctccccactccaaccggaagaagcaccggaggaaaaagagcaccgggaccccccgaccagacggccccagcagtgctactgaaggttagggggacccagagggaaaccgggcacaggaggtgggcagtgggacttggggatagtaccctaaaagtaacacctattttttattttttgtattcagtggattaagcactttctagtagttgctaatcaaagtagttctacagcttcttttggtaatctagacctggtatcttagaaaagttcttctgataactgaaaccctttctgttgaaatgtgggcttacttcatttattcttaaggtaaaagacagcagactgctacatcaatagctcctctaagatgttcgggcaggacctgt

SEQ ID NO: 43062 - DNA, 1030 bp, Homo sapiens
agttctgctaacagtccctgagagcaagggcccagcagaggaggaattccaggggatgtcggtgtcactgaggtgaggctgcctggggccaagatgcagtgaggacttacaagcagagatggccttggcagaactggggttcaccctggggccttaccacaggcacctgtgctgtctttccagcccccaggacacagtcacactgcttgttaggaattgttcacccatggggcagtgaccattgggaatgagattcatgcggctgtcttctggggcctgggggaccagagcttggaagagcttcaccacattgcttgggttcacagtccagccctcagtgcttgtcagtacagatgccctcaggcccctatttgctcacatactgcaggtcctgtagaaaacctctcctcctctcccccatccacttgcccttcctgcctgtctatgccatggtagtgggggaggggcccagctcccaggagccccacgctgacgccgtcaggaatattgggtttaatgagctgcaaaatgaggcggctgcagctgacatgtacggatggtgcccacacccgccttcccccaccctctcccagtgtttgcctcctagcaccccgtcacatccttctccagatactcagctctttctgtgggatgcacccctctctggtttcacacccattcccggcagtgccaggggtgccaagatcttgcatcccccatctgttttcacttaagctccacaggtggttaggaatgagaactgggagctcacactagtcttgcaggtttactctggcctccccctgcaagctgtcctggagtgtgtggccttgcagctggggaagggtctaggggaggacacttgccagtggagcagggtagtgagtggagttgtggcgatagcatgccctgggtgtgcacgcaggccaggagccctgatggcataaacacccccccaacagaggcagaggagtcgtttgaatttgtggtggtgtccctcactgggcagacgtggcacttcgaggcttca

SEQ ID NO: 43063 - DNA, 1023 bp, Homo sapiens
tggcgctcctgagaggctgtcagtgctgagtcaccgatctacctcattcgggtgggcagaacttatgtgtgccatgcgagtggctccagaccgctcctgagtgggaggaggggttcctgtagccgttgcgtcttctcaaacacggggagcagagtagaaagaggctctggccccttcccttgtgcccaccgggcctgccgcagtggctcagcagccccttcagtagcccgcctgaggaccgatgccagaggcaggcattcttccggaaaggcccactgaggcaggctccggctcctctggttggggctgttgttttgatggatcgtgtgcttttcccttacctcttatcacttgctgtcatctgttgacttaggcccagtctgcagatgtgtgtagtgttcctttttgggttagctttggcagtattgagttttacttcctcctctttttagtggaagacagaccataatcccagtgtgagtgaaattgattgtttcatttattaccgttttggctgggggttagttccgacaccttcacagttgaagagcaggcagaaggagttgtgaagacaggacaatcttcttggggatgctggtcctggaagccagcgggcctcgctctgtctttggcctcattgaccccaggttctctggttaaaactgaaagcctactactggcctggtgcccatcaatccattgatccttgaggctgtgcccctggggcacccacctggcagggcctaccaccatgcgactgagctccctgttggctctgctgcggccagcgcttcccctcatcttagggctgtctctggggtgcagcctgagcctcctgcgggtttcctggatccagggggagggagaagatccctgtgtcgaggctgtaggggagcgaggagggccacagaatccagattccagagctcggctagaccaaagtgatgaagacttcaaaccccggattgtcccctactacagggaccccaacaagccctacaagaaggtgctcaggtgagagca

SEQ ID NO: 43064 - DNA, 1080 bp, Homo sapiens
agggacaaaggtctttgggggtccaaagcaatcataaggtaagctcccagcacaacttgaatgcagctaaaggggtttgcaagtagactctgaggatcaggaagctccgcacagtgttcagacagaatagttttagctcctcctcaatagtgcctgtccactgaggaggcaaaaactctgaagtttctttacttctagaactgtcccaagaaagcccaagggtagaagggagaattctcaagttgaacgtcaggcttggcagaggtggagtgtagatgaaaacaaaggtgtgattatgaagaggatgtgagtcctttgggtgtaggagagaaaggctgttgagcttctatttcaagatacttttacctgtgcaaaaagcacattttccacctccttctcatggcatttgtgtaaggtgagtatgattcctattccatctgcattttagaggtgaagaataacgtacaagggattcagtgattagcaagggacccctcactaagtgttgatggagttaggacagagctcagctgtttgaatctcagagcccaggcagctggagctgggtaggatcctggagctggcactaatgtgaggtgcattccctccaacccaggctcagatccggaacctgaccgtgctgacccccgaaggggaggcagggctgagctggcccgttgggctccctgctcctttcacaccacactctcgctttgaggtgctgggctgggactacttcacagagcagcacaccttctcctgtgcagatggggctcccaagtgcccactacagggggctagcagggcggacgtgggtgatgcgttggagactgccctggagcagctcaatcggcgctatcagccccgcctgcgcttccagaagcagcgactgctcaacggctatcggcgcttcgacccagcacggggcatggagtacaccctggacctgctgttggaatgtgtgacacagcgtgggcaccggcgggccctggctcgcagggtcagcctgctgcggccactgagccgggtggaaatcctacctatgccctatgtcactgaggccacccgagtgcagctggt

SEQ ID NO: 43065 - DNA, 1028 bp, Homo sapiens
caggagaatcgcttgaacccaggaggcagaggttgcagtgacccgagatcgcaccactgccctccagcctggacgacagaatgagactccgtctcaaaaaaataaaataaataaaataaaaatgatacaagcattactggctgctttttaatatgtttagtctgaatagaatattagaagtagaatccagatcagtggatacgaaaataaactaatgaaagcaaagggccaagtgctggttaggattgtatcagctataataaatgaagtgtttggcttcagtatttaaatgaaataaagctttaattaattatatttttcttaattttggcttttagattgagttatgatcttgttttcattttttttactttgttttttaaaaagtaatatgcttttaatataatttgccttattatattttaaagtgatgttttttaaatttgtattttttcctaggcccttatgttagctatgggatatcatgagaagggcagagctttcctgaaaagaaaagaatatggaatagccttgccatgtctgttggacgctgacaaatatttctggtaggcgcttttgtacttggtgaacaccagctttaaggaagatggcccagactatacagaacaccctgccatgcccttgagactgcagactttcatctacaacagtggttaatgtaaaagagtagttatggtgtaaactggtgaatttcttcttccctttgtatttctaattgacctttcctccctgtaaagaaaagaattttcaagcaggtaggatatcctctcttcttctgtacatgtgctatgttgctagtcggaactttccattataaagtttcctgtcagcttttcacctaatggttttggggtagtattgatgattattcctcaaatccgttgtttaagagctgtataatggtgatattattccttctgtacttattttttttgagacagagtctcactctgtcacccaggctggaatgcagtggcatgatctcagctcactgcaacttccatctc

SEQ ID NO: 43066 - DNA, 1094 bp, Homo sapiens
ccaaggaggtgagaggagcaagctgccagagagagggtgtcagagagcttcagaggagcccttttgagtcttctgctcagtaatgatcagcacatgtgtgtgaggaaactgcccagggctgggcaaggtaccacatgaaagaagcagggaataatcctccgagttcatagaaggccaggaatagtttatgttcccaccagccagagtggaggatttggtagtcacagggcgtcaaatagagtcttcagaagggtgttgcctcagcactagggcataatttggtttcacttaacaaagcttaaaagctactcctgaacagtacccttaacttaccgttttcaaataagtgcatccctaacaaaactcaataatttagcaattcaaaaatatccagcatccactgaaaaattagcaggcatgcaaagaaacaagcaaatgtaacctataacaagcaaaaaaatcagtcagtagcaacagatccagaagtgacacagaagatagaattagtagacaaggacagtaaaacagtgactgtaatccatctgctgaagaaggcagaggaacaactgaacatgtcagataaagacatgggagacattcaaaagacccacattagaatgtaagagatgaaaagtacaacatccaagatgaaaagtacattaggtgggatgaactgcagaatagacactatagaagagaagattagttaaatgttacataaggcaatagaaactatctgaaaaaacagagaaaaggctaaaaaaaaaaaaaaatgaacagagcatctgcaagctgtggcacaatttcaggcggcctaaaatgcatgtaattggagtccctggaaaggcagacatgtgggacagaaacaatacttgaagaaaaaaatggccattaatttttcccagtttgatgaaaactataaacccccagatgcaatgactttaatgaccccaagtacaagaaatatcagaaaaaaactacactacagcacactataatccaattccctaaaaccagtaataaaattgaaaatgactttttagctaacctttcttgaaaaaagttaggtaagtttggcttatttttttatttta

SEQ ID NO: 43067 - DNA, 1037 bp, Homo sapiens
tcagacctttgctcattttttaataggattattagatttttttcctatagcattgtttgagtttcttatgtattctggttattcatcccttgccagatggatagtttgcaaatactttctcctggtctctaggtttctcttcactttgttgttcctttgttgtacagaagctttttaacttgatgtgataccatttgtccatgtatgctgtggtggggtattactccagaaatctctgcctagttcaatgttctggagattttctccagtgttttcttttagtagtttcatagcttgaggtcttaagtctttaattcatttcaatttgatttttgtgtatagtgagagatagggatctagtttcattcttctgcatatgtatatcgagttttcgcagcaccatttattgaagagactctccttttcccaatgtatgttcttggcacttctgtcaaaaatgagttcgctgtagatgtatggatttgtttctgggttctccattctgtttcattggtctgtgtgtctgtttttatgctggtgccatgctattttggttactatagctctttagtataatttgaagttgtaatttggggttagataatgtgaagtcaagtaatgtcattccttcagttctgttgtttttgctcagatagcataggctattctgggtcttttgttattccatataagttttaggattttttttttctatttctgtgaagaatgtctttggttcattggtattttgatagggattgcatcgaatctgtaggttgctttgggtggtgtggacattttaacagtattgattcttccagttggtgaatgtggaacatctttctttttgtgcgtgcatgtcttcaattttttttttccttccttttgagagagtcttgctttgtcacccaggttggagtgcactgctgtgatcttggctcactgcaacctccacctcctgggttcgcatgattctcctgcctcagcctcctgaggagctgggattacagttgcccaccaccacacccggctaattt

SEQ ID NO: 43068 - DNA, 1053 bp, Homo sapiens
tcatttgtttaaagaaatcttaaaatttccttcttaatgtctttattgacccactggtcattcaggtgcatattgtttaatttacatgtgtttgtatagtttcccaaattcttcttgtaattgattctagttttattctgttgtggtcggagaagatacttgatataatttcagtttgtttgaatttttaaaaacttgcttttagacctcaaggatagacctaacatatggtctatccttgaggatgatctatgtgttgaggagaagaatgcatattctgcagccattgaatgaaatgccctgtaagtatttattaggtccatttggtcagtagtacagattaagtctgatatatctttgttgattttttgtctggatgatctgtccaatgctgaaaatgaagcattgggagtcttcagttattgtattgggatctatctctctctttagctctaataatatttgctttatgtatctgggtgctctagtattgggtgcgtatatattcacagttgttatagtctcttgctgaactgagttctttatcattatataatgaccttgtctctttatagttttttcttgagatccattttgtttgatataaatatagctactcctgctcttttttggtttccatttgcatggaatatcttttttcattcttttgttttcagtctgtgtgtctttataggttaagtatgtttcttgtaggcaacaggttgttgggtctgcttttttatccattcagccactctgtgtcttttgactggggagttagtccatttacattcaatgttattactgataagtaaggtcctactgctgcctttttattatttgttttctggttgttttgtggtctgcttccttcttaaccttccttcctgtcttccttttagtgaaggtgattttctctggtggtatgttttaatttcttgcattttattttttgtgtatctatcatatgtttttagatttgaggttaccacaaggcttgaaaatagtatcttataacaattttaaaccaatggcaacttaacactgattgtc

SEQ ID NO: 43069 - DNA, 1015 bp, Homo sapiens
attatccttacaatctattgatcagttaacttaaaaatcttcaggatagtaaaaaggtctacctcactttttttttttttttgctccttcctgtacaccttcctgcacagtgatctttccattttttttaattgtggtaaaatgtagataacatgaagtttatagttttaatgaatttttttcttgtcttttttttttttttttttttttgaggcagggtctcatgctgtttccctggcagaagtggtgcagtggctatggtcatggcttactgcagccttgatttagtgggctcaagtgatccttctgctgcagtccgctgagtagctgggaacacaggtgcacagcaccatgtctggctaatttttttttttttgtacttttgtagagacagggtttcaccatgttgcccaggctggtcttgaactcctgggctcaagcgatccgcccacctcagcctcccaaagtgctaggactacaggcgtgagccactgagcttggcatgttcatgttactcaatccctgagcctattcatgctattggaaaggatgctgtgtttgttagggttctccagagaaacagaacccataggatgtgtgtatacacacacacaaatgcacacgcacagatttattttaaggaactgacttaaacgattgttaggagtgtgtggagactagcaaatctgaaatctgtggagcaggccagagacacagggaggagttgctgttgcaatttgagtccaaaggcagcgcgggggcagaattccattggtatgtgttcagatttcctcctcttataaagacaccagtcctatttgactagggctcagcctaatggcttcattttaatttaactattctttaaagactctatctgtaaatacagttacactctgaggtactgggggttaggacttcaacatgaatttttaggaaaacacaattcatcccataaaagatgccaaataatctcctgtgggatggagtgggaggaagcaaaccagcagatatt

SEQ ID NO: 43070 - DNA, 1033 bp, Homo sapiens
tctcaactcgtcaaagtcattctccatccagctttgttctattgctggtgaggaactgcattcctttggaaggggagaggcactctgatttttagaattttcagcttttctgctgtgtttttcctatctttgtggttttatctacctatggtctttgatgatggtgacgtacagatgggatttcggtgtgaatgtcctttctgtttgttagttttccttctaacagtcaggaccctcagctgcaggtctgttggagtttgctggaagtccactccagaccctgtttgcctgggtatcagcagcagaggctgcagaacagcaaatattgatgaacagtaaatgttgctgcctgatttttcctctgaaagcgtcatctcagaggggtacccagctatgtggggtgtcagtgtgcccctactgggaggtgcctcccagttaggctacttgggggtcagggactcacttgaggaggcagtctgtccattctcagatcttaaactctgtgctgggagaaccactactctattcaaagttgtcagacagggacatttaagtctgcagaggtttctgctgccttttgtttggctacgccctgcccccagaggtggagtctacagaggcaggcaggccttgagctgcggtgggctccacccagtttgagcttcctggctgctttgtttacctactcaagcctcagcaatggcgggcacccctcccccagcctcgctgctgccttgcagttcgatctcagactgctgtgttagcaatgagcaaggctccgtgggcgtgggaccctccgagccaggcatgggatgtaatctcctggtgtgccatttgctaagaccattggaagagcacagtattagggtgggagtgaccctattttcaaggtaccgtctgttacagcttcccttggctaggaaagggaattccctgaccccttgcagttcccagatgaggcgatgcctcgccctgctttggctcacactcagtaggctgcacccactgtcctgcacccactgtccaacaagcc

SEQ ID NO: 43071 - DNA, 1081 bp, Homo sapiens
cctttgttcctcactgcctttacctgtttagaaaagttttgaactgttagccaatcgggttttagtttagattgtgaggtctggctccagccaatggagtcagaacacagcaatagggacctcatgcgtaaaggataaatattctagtgtcttttttactttgtgtgtgcttgtggcaggattgctgacgggcaccaccctttctgcagagagtaaacatcgccttgctaaggaaactttttgtctgattgctgattcttctctgcgacatcggggaataagcatttatttccaacatagtgtttactctagagtttacaatatacattttattttatttttcaattggcatataattgtgtatatttatggggtacatagtgatgtttctatatacgtaacgtatcagtgatcagatcagagtaattagcatatccatcatctcatacatttatcatttctttgtgttgggaacattcaatattctccttatagctatttgaaactctacaatatgttattgttaactatagtcatcctagagtgctatagaccagtagaacttattcctcctatctagctataattttgtaacctttaacaaatctcttcctatctcctcccttcgcccacccttcccagcctctagtatcctctgttctgatttttctgtgagatcaactgtttttcagcttccacatatgaatgagaacatgtggtgtttaactttctgttcctggcttatttcacttaatatcctccagttccatccatgttgctgtgagtgacaggattccactcaaattatggctgaatagtatttcattgtgtttatattccacattttctttatctgtttatctgttggacacccagattcattccgtatcttggctattgtgaataatgctgcagttaacatggggatgtagatgtctcttcgatataccaatttcctttcctttggataaatgcccagtagtgggattgctggttcatatggtatgctatttgtagattttgaggagcctctatactgttttccatagtggctgtactagttgatattctcacccgcaga

SEQ ID NO: 43072 - DNA, 1047 bp, Homo sapiens
gaatcgcttgaacccgggaggcggaggttgcggtgagctgagattgcgctgttgcactccagtctgggcaacaagagcaaaactctgtctcaaaaaaaaaaaaaaagacactttgggaggccgaggcgggcggatcacgaggtcaggagatcgagaccatcctggctaacacactgaaaccccgtctctactaaaaatacaaaaaaattagctggccgtggtggcggactcctgtagtcctggctactccggaggctgaggcaggagaatggcgtgaagccgggaggtggagcttgcagtgagccgagatcgtgccactgcactccagcctgggcgacagagcgagactccgtctcaaaaaaaaaaaaaaaaaaaaaaaaaaaaagaagaagagagaaaagttcatcgcttttttaatgttctgttcctgcaagtatgaagatatgttactgcttttcagaaaaagcagtgtgcttttttctgtgcattattttgcactttaaggcaagaaaagctgtaaaggctctctttattagatttttcatttagaaataaattagttcatctaaggatttgtcaagttgttccttttctgttgaaacctgaattgattggttttggttcttctggaagcagatcttgagatagaaatctgaatccaagttgtgtatttgcgaggtaatcccaggacacaccagtaggggaatgaagtgcgccgtctaggaaagacagccaataaagggcatgttttcaagccaggtcccgctgtggacaaatgaagcttgattgtgctgaggaattctagagccagtgtagcatacgtatgtcagagttgtgatttttccactgggggtttggagggaggctggatttaaggaagctggagtcttcttatcagtatattgtgaggactgccctcaggtaggtacacattcccctgtagtttgggcctgccctgcacgtgggcagatgggcttcagaagccagagatacaggtactggcagttggaattcagaacactgtgcgggatagtaatgctcaagggg

SEQ ID NO: 43073 - DNA, 1075 bp, Homo sapiens
gaaatagaattttctcattagtcttgtggtaaaagatggacattaaaaggtggttaagaatttcagattagatagtgattcatagaggaaaaactattcttcaaattgtgcttttagaacatttgttcagtactcaaattttattctcatatttttgacaaattgatggaattaaaatattctttcggtgtgcttaaacctgctcatttttcttggtgcttgtggctatggaaatcccctttgcttgtgaggttaaaataatatggtatcctatttctttcatagccttaaagtatttaatcttttccatagttgttcttatattttcaagttagggagtttctgtctaagaaattttttacctcatttattaaatcactacatattccttgtagaaaatgttttaaataaaagaaagaacaaagaaaattagccatgatgccactaacctgagtctattaattttttggtagttgccaaaagcagtatagcattttgtagatagtgtagaaagatgaaaataagtagtagattatatagcaaaacattaaagtggtgagacttctggtgatttttaagtagtttcctttttgcttgtctgtgttttctgagcttttagcacaatagcaaaagctattaaaacattaattgcgggccaggtacagtggctcacgcctgtaatcccagcactttgggaggcctgggcaggaggatcacctgaggtcaggagttcaagaccagcctgtccaacatggcgaaaccccatctctaataaaaaaaaaaaacacaaaatattagccgggcctggtggcgggcccctgtaatcccagctactcaggaggctgaggcaggagaatcgcttgaacccaggaggcagaggttgcagtgagccaagatctcgccactgcactccagcctgggcgacaagagcgaaactctgattcagaaaaaccaaaaaacaaacaaaaaaaaccccattaattgccagcaccctgaatggagccttgcctgtagatcttctactgtgttcctagtttattagccttttctttaggattatttaagattttcatta

SEQ ID NO: 43074 - DNA, 1114 bp, Homo sapiens
tgagtataagtttgttctaaatgtttattgattggattcatggcaaataggaattaacatcagtgaagaattttactctcatttcacttttctctttcattgttttttttccatcaaaggcttttcgtgcatgtggtcagtcattccacagacagacatttgttgagcaccttctgtttgctacacgccgtcttgagccctggaagaaacaaacagatgtagtagttcctcagttctcagggctagagtctagcaggggaggcaaataagtcaacaagtccttacatgagtaagggctgtgacagggtttggggaaatgggggcatagtactggagtggtccctgcagagaggtgacaaggctggagggaggcagggctcagatgctggagggctgtgtgtgccctgggaaagaattcagggttctcaatgtgttctctaagttcatggcttttttttggggggggggggatggagtctttctctgttgcccaggctggagtgtggtggcatgatgtcggctcactataacctccacctcccaagttcaagtgattctcctgcctcggcctcctgagtagctaggactacaggcgtgcaccaccacgcctggttaatttttatagttttagtagagatagggtttcaccatgttggccaggctggtctcaaactcctgacctcgtgatctgcccaccttggcctcccaaagtgcagggattacaggcgtgagccactgcgcctggccagttcatggctttttgatgttgcttaaagctcctaaccctttttttcccaaatagttgcttggaatgatttgatacatggaagctcttctgttatcttggtatatcataatttattcaaatcttttttattattgggcaaaaaaataaaatttcaaatataaagtcttatatttgtttccttttgaaacctcattgaggagaagctggacatcagctcatgagtgctgcatgaaacacttgcagtgattttggtaaaaagaactcacatttttatgtaccctctcttccaaaaaagaaaaaaaaccctgaagtttaaaaagtctttattcggctggacatggtggctcacacctgtaatcccagcac

SEQ ID NO: 43075 - DNA, 1047 bp, Homo sapiens
gactctgattcagggtcttcatattagtgaacactgcacacatccatttgggttctatgagttgaagcaatgagtaaatagaacagaagagaataggttccttttgagcatagtgatggcgcatgttggagagtgagttgttcactgcacttgccatgtcacccagttgtgttcctgaagataatctgtgattcagcctgtgcacttcctgactgccccgatgaggcatcgacgaaaatggcagccgtgtgcccttctgtctccagagggtcagccagaggctgtcgggctcctctgtcacctacacagtccaggaattaagagagttatgtaattgttaaaccctaaaattggaaaagagttaattcagtcaaattcaatgaacaaaattcagccactgcttaggtttcttcccagaatagcacctcactttctcctgccttagctatctgaagtggaatgaaccaagttgaaatctgcttccctgtaagtctagtgcattggtctgtttctgctttgagaccttacagaatcaatatgtggaagaatatgcaaagtgttgttcagtcttaaaattcgttatctaaattttattttatttttcttctctagatctggatctataatgaagagcatgaattggttttaaatagtctcctttgtctagatatgtcagagactcgctcatcagacccgccacggctcatgaaatgccacgggtcaggaggatcccagcagtggacctttggggtgaggagtgctcggtgatgttgggagaatgcgcagaggcccacaaggttgagtgagggagtgtggcagatgaactcattttctaccttgggggtggtcttctcagtctgcagtacagtggtccccccagaaaccacaggtagtacaaaccctgtatatactgtatttctttctagagatacacctgtgataaatttatcaattaggcacagtaagaggttcacaacaataactgaaatgaaacggaacagttagaacagcatactgtggttgcgcagtggctcccgcctgtaatcc

SEQ ID NO: 43076 - DNA, 1029 bp, Homo sapiens
cgccggggtggacaccctgagggacaccgggagcgcgggatctcccctcctaggaatattcgccagcgtgaggcacagatcatcactgcagatcctttaacgtcactcatctcctagtgaacggtgtccctgccttccagcgttctcagcactggccctcgttctgtccccgcgtgtgcgtgtcattcctcctggctgaggattctttaccacctacttgtggagagaatagcatcgatctcccaacttgataccatttttactgccctccctgcgcttttccagtatgaaatggcacactcaggccaagctgtccctttggtttgcatagatttgccttttcgctgaaaaatgatgtgtttaaaaagactccattttgaaaaataccctaaatttgggagagcatgtttgtggaattgtggtagaggtttttgtttttaactttttgagtgtgaccacttctttcgttgccgttaagctattaaaaagagatcttaggaaatgccctgaagtatcggtgacccaagttagctggttgtagtaaggtgattgctgaatccatgtagctggtagtttgggaatacaagcttgcctgcctgcgttatgggtgtagtgcttagtaaaatagcctggaagtaaatttggtctcttagcgatttttttcaagaagggattttaatcatttttgccacaaaatgtaacatggcatgttcaccttacccttgattcttttctatagaaaaatgcacttggtttggtttccttgacaaccttgtgggggtgccttctttagtttgctacagtccatctcctactgttagttccttccttttgctgctgaagcgaccagaagtggttgtggactggaaaaatcctctttgcttgtgtgaattctttttgaaatacacgtcatatcaagctttgtagctctttattttagaacttgcttttctacctaaaacacaagccaaaatcagcgttgtcgatactacagctcccctccctcaattattgacacccttaactcat

SEQ ID NO: 43077 - DNA, 1030 bp, Homo sapiens
gagtcgtactttcatcagaaatacattaaggacagtgagaagccattagtatatttatggaattaggtttatgttagaattatttaggtatagtttgaccatttttcaaacccacaataaatattttagtggagtaaaatgttaatttagcaaatatttctctaatgtctgttctgatagccagtggcctgcttaggtgcaaatcctgtctgtctcttagaagctgtgtgaccttgatagattgttaagcttccctttctgtgaaatgcagataatagtacctgtctcataagctattgtgaggatgtaataaaatagtgtgcaaaaggaaacacttagcagagtgttcaataaatgtaaactttaattattattattagttattgacttcagagcctcccactggagagacagttaaagatgggggttatctgatgtcaaggaatctatagtttggtagactgatcttaaacaattgtaattcatccagaaaaatgccttaatgcaggtataaaagggccagtggaagcatcaaacacgtgtgcagaactgcaggttgtcaaggaagccttcaagtgaggagatggtgttgatgtcgagacctgatgaatgaaaatagctcatgggagagctcaagagtgtgagcaggagttagaaatttcaatggaaaatggaatctttgtgatgccctccacatttcattagctgtctggagtgaattgatatgattatttactgctaagtatattcccaaatatttaagattaagatcttattaaaataatgaattataaagccattaatatttggaatttttatgtaatagttatttgattatggtactttttttggctacagatattaaccaataacattctaatttatccttttaatgggataaattttaacggttttttttcttcctgtaacaagactaaaagtacattttaaggctatgtgatgtagagtcttattatagacattatttttcagtttactctccttttctgtattgtacagaattttgtcc

SEQ ID NO: 43078 - DNA, 1021 bp, Homo sapiens
gagagcaggtgaaaatcagcctgggcccaccgtgggcttcatccaggagctgtaaaatggaccggagtctgggtcccaccctgggagattctgatgtaattgggcttgggctgggtggagcctggacacctggatggtaaaagcttcccaggtgactctaatgtgcttctaacttgaggaccgccatcagcgccagcccactcttggatcagccagcgtttagtaacttgcacgctttacttgagggggaagccagtttgaattgctttgtaatgtaatggatgtctttctacttctcagttctattcaggaggtacttgagtacctactaggtacaagacactgttgttaaattaggggatttaagtatgtacgagatgattcggttcttgccttcaagagcttataaaaaagctaaaaatacggaaataactctaatgggaaccactacaagctaaatgtcattaaagtgaatcatgcaaattatggtaattgagagaagggacagattgcatttaattagaggggatcaagaaagtctttgagaagctgccatctgagctgagtctgagagcttggcctgcagagctgggggtgggtggacaggccaggtggagggaagataatgagcgcagatagaaggagagtgggcagatgcctgcggtgcctgttttgaccagagcctacggtggtggggaaggtagtgggaaacaaacctaggagggagggtggggccagcaataaaatatctttagcctgctccagcagtctgggtccagcagtgggttgggagttgttaaaaactcttcatgaagtttgtgaagcagatgtaaatacatcctgctatagcaaagggattgatttttctgtaacaaattgcttgaattgaatatatataattatgttaatgcattttaaactagagaagcctgttgcagggtaaatgagttatagatataaaataaataaatacttactattgagagacagagccttgctctgtcgcccacgctgaagtgcg

SEQ ID NO: 43079 - DNA, 1069 bp, Homo sapiens
gtggtggatttaagctgtatgatcctgatgacaaatgttgttgactgtcttttcctgtacttagtggtcatttgtatattttcttttgtgaaatgtccgtttgaatcttttgcccaattttaactgatttgtttattaagtgacaactcaatagtaagagttcttcagatatcctggatacaaattctttgtcagatttatgtgttgcagatttttttgctagtctgtggcttgtcttttcatattcttggtggtttttgaagaacagaaatgtatggaagcccatttatcaacttttttcttttatggttcatgcttttttatgtgctagctaagaaatttttgcctaccacaaaattacgaagtttttaaaaaatggtttttcaaagaaattttgtacttttagcccttacatttaactcagtgataaattttgagttaatttgtgtatatgaaatgagaaagtaaataaatgttcatcctctcactccatggatatcaattattcccacatcatttgttgaagaagactgttatttccctattgaagtatcttgatgactttgtctaaaatcatttgaccacatatgcatagcactgtttgtatggttatgtgaataaaagaaatgaatttatataatgcctttgaaggaaactcaagatcatgtaatacttctcaagtattataataaacatttattttcataccctactgaataattttttagttaaaaaacctattacagagacatgacaagtaattgcacagtcttaccctgcactggactctggactggagagaaaaaaataccttaaagaatattaataaatcaagtagcaaaatgggaataggaacagcagattaaagttttgtattaatgttaagtttatgaagttggcagttgtactgtggtaacgtaaaagaatgttctcagttttagtaaatacacactatttagtagtaaagggccatgatgtatataagttactctcagatgctccccgctcctagatgtgtgtgcatgtgggaggggacagaataaatgcatgcaaacgataaataaaaaca

SEQ ID NO: 43080 - DNA, 1031 bp, Homo sapiens
gggagaggcccctcgtggctctgagctgctcagcagacacagggcccctgggacatatgattaaggccagtgggttttccgaagaggcccagctttttctgacactgagacctgagagaaatttcttctttagaccctcactaggaatacctccttcacccatccctacagtggataatgatgcgcgtttcttcccgccgtgtcttctaatggctcgcggtgcaagttcagagggtgaacagtcttgtgagtgaatactgaaggaatgctgagcagacagggagcactcccctgggacttttggatccagtgatagaatttaggagacttagaggtgtgaatggactatgtacctctcagattatccttcagaataacaatagctcagaacgtggagatgaggcagcaggtgtgcccacggtgctgtgttggccattgggtgttacagtaagaagcagacccgcgtcttcgacagtcgtcttgggaaggatgagctcaccaagtctggggtgacagtcagggaacctggccctgtggcccctctcctacactgcggtgggccaagggacagctctcagacaccccaggcttccttggggcactgtttgggatcccctgacatatgggctgttaggagaccaaggctgcagcattccctgccagagagcgaggctggaggaatcttagcctggaaaagttttaaaggagttgtctgtggtgggctttaaaaaagcaaatgaaaaacaatagcaaaagaacaaaaaaacaaaccccaaaacctcagcaaaagcgcccttagaaatgtctaattccaagcactgacccatccttgttcttccccagtcctcacttaattcttaattggatataagccagggtctgtctctccagaatatcatcggccagcgtggccaatcatgagagagcaggaccaggggtcagttgaggcttattctaagatgagatgatcaaaataccaacatgcttttaagttatgattcttgatattatggtaactaggtatgcagtgt

SEQ ID NO: 43081 - DNA, 1055 bp, Homo sapiens
tttgtagtcagtcctggctgtctttccccagaacagcagtaagcaggaacagactactctcatatcatataacttagaacctgggttgctagggacagaaaagtgcatttttttttccgtgctgattccctgtgacttctgcttacctgtaaacttgttgagggactcactgttcacacactcagagctgactgggaggagtgcctgaaagcagagagctctgtagttgctcaggaactcgggaagagctaacatatttagagggtcttaaaggaaatagggctttttgactccttgaaggattaatttccttatgtagttttcacataaggtgttttctctaagaaagttcaatcaggagatacactagtcccccttgtcagtgaggatatgattcaagacctccagtgggtgcctgaaactgcaaatagtaccgaatcctatatatactgtgttttttcttgtacatacatacctatgataaagtttaatttagaaattaggcacagtaagagacttctgaacagcagtaactactaaagtagaataattattgtaacaatatactgtaggaaaagttatataaatgtggtctctctctgtctgtctaaaaatacctttctgtaccatactcacccttcctcatcttgtgagggtgtgagatgatgcagtgccccatggtgagagggcgagaggtgagtgacgtaggtgaggccactgtggcctctgacatacatcagaagaggaccagctgctcgggtgacctgggccgtcaaaccatgaggatgtcagtggctgcaggtcaggagctgacggtatggatgactgacaggtgggcagggttgacaacgcggagatgctggacagagggctggttcgggttctgggcaggcggagcgggacaggcgagtgcttccccttcctcagccccccaccgagcttctggggtggccaccgagcgagtcttggccctggagggcagtgctggctgggtggctcatctgagaatgttccttccggtaacttggatgctttcttcccaagattgtccttct

SEQ ID NO: 43082 - DNA, 1034 bp, Homo sapiens
gccctcctcaccctcgctctccctcctcctcctcctccgagctgctagctgacaaatacaattctgaaggaatccaaatgtgactttgaaaattgttagagaaaacaacattagaaaatggcgcaaaatcgttaggtcccaggagagaatgtgggggcgcaaacccttttcctcccagcctatttttgtaaataaaatgtttaaacttgaaatacaaatcgatgtttatatttcctatcattttgtattttatggtatttggtacaactggctgatactaagcacgaatagatattgatgttatggagtgctgtaatccaaagtttttaattgtgaggcatgttctgatatgtttataggcaaacaaataaaacagcaaacttttttgccacatgtttgctagaaaatgattatactttattggagtgacatgaagtttgaacactaaacagtaatgtatgagaattactacagatacatgtatcttttagttttttttgtttgaactttctggagctgttttatagaagatgatggtttgttgtcggtgagtgttggatgaaatacttccttgcaccattgtaataaaagctgttagaatatttgtaaatatctttctgctgtagtgtggtggtctgttggttttctccctgtcgctgtgcctcctttaaagaatattgacattgttttacatcattggagaatttgattaatactcagcttgtgggaggaaatgtcttttcgcgaatggtgtgggctgcctgccccgcagtgaccactccatcgctgggggtatcgtgggtctggataacccgtcagagatggtttttgaatctggggtatagtgggaaggagtgcctaatgatttctgatgttccttcctagaagttcaggattcatgactgtaagctttcagtaactactctgatgtttgctgaatggactgctagcttgaaaggtaatttgctcaattaatagatttaggttgatttcactcttcatattattcttataattatgttactttaaaaatt

SEQ ID NO: 43083 - DNA, 1031 bp, Homo sapiens
agttttgctcttgtcccccaggctggagtgcaatggcgcaatcttggctcaccacaacctctgcctcccgggttcaagcgattctcctgcctcagcctcctaagtagctgggattacaggcgtgcaccaccatgcccggctaattttgtatttttagtagagatgaagtttctccatgttggtcaggctggtctcaaactccccacctcgggtgatctgcccgccttggcctaccaaagtgctgggattacaggcgtgagccaccgtgccaggccgagaacattttgttttaaacctacattgacaggacagaatgatccattacaatgtgacaggtatgatgctgtggttctcaaccctgggcaagacccatcccaaattaagagaatcagaataggagccccagggaaggcatccaatttttgctttttgtttttaaactccttaggcaatgccagcgtagctggatctgaaaggcttatgagcagaaggaagggtttttgactcaaaaagatctgaataccaattctggctgttcctcaagcaaatgagatcctattttctgtttgctcatctgtgggagaattgtaatggtccttttcctgttaatagaggtgagttatcattttttgtttattcagtgagcctggcagatactatagatagaaatgaactgtgatggtcatgtgcacccgtcattttataaggaagaaaaatgtttacagttagtaaatttgataaaatctgcacataccttttgttcaggttgaatgagttagatcataatatagaaatgagttaagtattcctagagttgatgggtaaaatcgacctcctatgacaaaactacaactccaggtgagcagttttctgtaaaaaatatttcatcaaatacactcgttaaattctaaaattataagtctacagtctttaggactattaaaccttttaatagtgcaggagccaggtgtggtggtgagtacctgtagtctcagctactgggtaggtggaggtggtagaatccattgagc

SEQ ID NO: 43084 - DNA, 1067 bp, Homo sapiens
caccctcctctgctgctgcccctctgtgtgtagaagacagcccctcctttaccaatgcaccaatgacacctgtgtccctcgctggactgacgtcctggaacatgggggccgtatggtgcttatcttgggaacccccgaggccttcacaaggtctggtaggtgccccgtagacacttaactaagctcctatccgacaagaagaaggcatcactggttttcctgggctgcgtgtgctctggtgctgagacacattgtgtgtctggataactgtaggacggtgagcacccaggatgtagctatcgttaccttaagagtttaatggtatcataaaatctaactcttgggcatggacttcaggagggttttgggaacctgaagagtagaggatcaagcttgtctaaggctgccgcctgcctgcgtctgctgtgccgccagccagaggccggtggagcaatcaccctgcagaatccttgaagatgtgcctgtgttttatggcagtcgtagctcattccacagctttactcatatgaataatgagctctcgtgtgactgaagtgcagatcgttcggtgattaattcgttctttatgatccctcctttatatctcatttgtagaaattacgattgtgccagacaggcttgtggggttaatcaagtgcaaagcttattgaaaaccacaagagaggcccattaagaatatttatctattaaataattctttacttaattgaataatatttcataatgtttcttttaaaagtatctgtcacccttgttaaatagaaatataacttgattggcaaaataattgcatggggttctaattggcaattacttcaatttcacttggtcagacagaaataaatctttttaaaaagaggaaaagaaactatagcttgatcttagtatcactgtgaaagttttttttttttttagttttaaaatattagctccttttaccctatattggtttcttaaaagtaagccgtggctcattctctgcaggttgacttctcagctttgattttttcatttttagttttgactgccgtggattattttttctg

SEQ ID NO: 43085 - DNA, 1114 bp, Homo sapiens
gagaggagggagtgttatccactccttcggcccccccgccgctcaaagtttgccccatgtctcatctcacacatgccaggaacttgcccttcaggtccctgtgacgtgctctcctgcacataagcagggaggccagggtggcagtgaaggtacatggggtgggctggaggcaatatctgccagctgcacctgtaggaagctggttactgcagcggtggcctcaggaagggacaggtgaggccatttgggtctgctgtggtacgtaagagatgtctactgggatgctctgagagcacagcttagcaagacagcttcctggaaagatggtacccttctgtcctgcaaaggtctgcttgggatggggatcaggagtagcgtctgagctgcccagcttcaggatctggcctcgataagggaaagaagaaaccattctctggacgttggtcctattggaaaccggagagtcagtcaggtgaagacaggatttcaagagccactgtgtccacagatcttaggcaaggattgttataaactcttgataagtttacacaacattcgtctactttttacttttataggttgtgtcattttctccaagagtcttctattagagttctgtcacggtgctttggcaaagactgagattatccttcacaatgtatttttctcactttccatttgcaaagcatgttgcttgtctacagatagaatgtattgaaaacacagtatgttaactgaagaaataggtaggaaagggattttaagaaatacctgcattaaggcttgcttctcttcttgatttttcaaatttaataagatccaactccagaaagcttgaatacagagatttagtttagaattcatgaaggaacagggcaggagtttgcatataaaatacagcattttaaatattccactttcccaccatctcagggttttagttacagactacggaatccaagttagctttttaaatttttaattttttttaaattttactgtaagttctgggatacatgtgcagaacgtgcaggtttgttacataggtatacatgtgccatggtggtttactgcccctatcaacccgtcatctagtttttaatcaccacatgca

SEQ ID NO: 43086 - DNA, 1052 bp, Homo sapiens
ctggggctctcccaggttggagagagaaaggtgagcaaacagagacgttcactggttcccaactgttagccagggcagaaaatctgcggctatctgcagggtgcactaattatacagatttgatggaaggctgtattcgggggtttactagagagactgagtgcataaatttgatcaagaagattagaaaatgaccgaggaagtggataatcggtttttacaatggtgcgcttggaaattctaattagtagtagcaattggattctgcaattttttctttggtgagtcccaacaaaaccaattaacttgtgttgcatccatacattaccacgcacacgaccataagcaagggaaggcgtgctgagtctaactgctgccttttggcttttaacagaaaatcaattcattttggcacattaaaccattagtgcccattggatatgaatttcccctttttctttaaatttctctcccgcttcccctttttctgttatgggggaggaaactgttgactttgaaggctgtgaatgggaggcttcccgggaaatcgggataaactcatgcacactgatgtgtctttgggcttcaaggaactttctgattgaattctcaaagtcctcaaggcttctaaattctacaatcaagcatcagctttatgaattccatattccgtgaagaggtggtgtcattgagaacctgttggatggatgtcatcagcactgtctgaagggttcctcagaggtacagcagattagatgaggaggcacttctacactagggatggaaaattaatggtacctgtgatggttaatgttaggtgtcaacctggccaggctaggctaggctgtgcaggtgtgtggtcaaatgttactccagatgtcgtgaatatatatatatatttatatatttggtttatacttatataatatatattatcatatatagatatataatacatatattatgaatatatataatatagatatataatacatatattataaatatatataatatagatatataatacatatattataaatatatataat

SEQ ID NO: 43087 - DNA, 1097 bp, Homo sapiens
cctgcagactttcccccctggctggaccaggaatcttggggtggaggtttttggatgttgaccaagccagcttggaaaaggggaataacatgagaactctgcttaaacttggaaagattatcttcccctggatgctgtcttgcattgtttttaaataataataatgataccggctggtttgaatgcttactgtgctgggtgtggatctacgtgcctcacatgtatcagtgactctacttctcacaaactctgtggatgccctgtttttacagatgcggaaagtgaggcatagagagatataaaaatagttaaagaaagaaagaaagaaagaaaaagctcggcaaaaccagctcaactaatgtgccatatttatattattcaatacattgtccaggcaaagatataagctcctctctgtgtaatgagatgttgttcatagtggattaagggatgggcttgccaggaagctgcctaaggcactgatatacgttgagaccatatgtgaataatctgaaacacagggccaggtgcctctggtctccccatgtttgtttgtccatgatgaacaaagcaatagcctcacacatctcagagactacctttaaaataattcatcaccagcaactccaaatagggaaaaatgatatattacattcagggtacttaatgcatgttttatttggaatacaaagagttgttacatgtttatgaatagaaaagtaatttcttcctacctgcactggtcaaatatgtagactggctctgaaggggtgactcgttactctcttgggtactcctcctgtttctctcactgtttgctacccctttcccacactcctgccacattctagtcctcatgtagagcaccctaaagccactcctgagcccagaacactgcccgagccagcctgcaaatagaactgcagataaaaggacgcccagcagaaacttagatttctgatgaacaacacgtcattttttagcataagcgtgtcccatatgatatttatagcacaaatattgcatgggacatacttatactaagacattattcattgtttatctgaaattaaaaacgacgtgtgtgtcttgtattt

SEQ ID NO: 43088 - DNA, 1032 bp, Homo sapiens
tcacagctagcaatgtacaccacgggagacgaagacacagcttctgttcatgtagttagagatggaccggggaggagggagagggaacacattcatcgcctaattaaacaacaatgcaaaaaactagcacttaacgctggtccacagaagaatgggggatttggtccagctgcagtggtcatggagggattccccagggaagtgaccactgagctgggttctgaaagaagaacaggtctcaaccagttggggagaaaagggaggtaccttctgacagagggagcaggtggcaccgaggtgccttgtcaaggagagcaaagtgcattccagggagcaaaggaggctgactggatgggggcgccagggctggtggggccagggtaagtggatgctcaccctgaaatatttaggggctattaaggagaaatatttaggggctagacctctgggacttctaaggctgtgtggaacagtttgtccttatcctaagagcaattagaagtgactgaagtactgaaaccagaaggtggacatgcttggatttgcattgtgaaaactgcttctctgcagaatgagttggaataaggacatctggatggagatggtcacgttgaacggctgttactgtcatactcgtgagaggtggtggcagccaagggtggtggcagtggaagtggaaaaagccctcagggtctagagatatttaggggttaaaatcaataggacttgatgatgtgttagatatcaggaagaggatgtgacaaggggatgtcaaggacagctgtggagtttctggtcttcatcattagatagaatggattgaattgacactgagctgggaggaccaggcttggggccggtggacagcaagtgaagcagagatggtttggtttccagatttgttgaatttgaggggcctttgacatatccaaatggaaatgtcaagcagagagttggattatatgagtttagttgggcagaaggcatccttttttaacttgatattttgaaataattgtagactaatgaaag

SEQ ID NO: 43089 - DNA, 1030 bp, Homo sapiens
tagttccacatttttgcaattgtgaattgtgctgctataaacatgcttgtgtaagtatctttttttgtattatgacttcttttcctctgggtagatacccagtaatggtattgctgcatcaaatggtagatctacttttagttctttaaggaatctccacactgttttccatagtggttgtaactagtttgcattcccaccagcagtgtagaagtgtttcctgttcactgcgtccatgccaaaatctagtattttttgattttttgactatggccattcttgcaggagtaaggtggcattgcattgtggttttgatttgcatttccctgatcgttagtgatgttgagcattttttcctatgtttgttggccatttgtataccttcttttgaggcttgtctgttcatgtctttagcccaattttgatgggattttttttttcttactgatttgtttgagtttgttgtagagtctggatattagtcctttgtcagatgtatagattgtgaagattttcctccgctctgtgggttttctgtttactctgctgactgttccttttgccgtgcaaaagctctttagtttaattaagtcccagctatttatcttcgttttcattgcatttgcttttgggttcttgatcatgaaatctttgcctaagccaatgtctaaaatggtttttccaatgttatcttctagaatttttatagtttcgggtcttagatttaagtccttaatccatcttcagttgatttttgtataaggtgagagatgtggaatccagtttcattctacatgtggctagccaattattccatcagcatttgttgaaaagggtgtcctttgcccactttatgtttttgtttgctttgtcgaagatcagttggctgtaagtatttgggtttatttctgggttctctattttgttccattggtctatgtgcctatttttaccagtaccatgctcttttggtgactatggccttacagtatagtttgaaattgggcaatgtgatgcctccagatttgtt

SEQ ID NO: 43090 - DNA, 1053 bp, Homo sapiens
ttctggccaggacacttcttgatcagttcaaactgttacaaagttcagctgaagattcccttctccctgtggccttttactagtgcctctggccaccctgctgaaggacccctgtgaggccaggcagaaatggtttgctaggggacccagtgagctcacagggcttttgccgctgcttcctctacccctgtattttgctcagctctctaaattgactcagctccaggcagggtcagaatcttctcctgtaatctagaccttcagtttccccactaggggtgtgtatgtggcggcagatgatctccctttcccacttccacagtttgggcactcactgtatttggggtgtctcccgggtcctgcaggagccatccacttccttcagagggtctgtgggtcctcttgggtttcctgatttattcctgcagtcgtcctggagcaaaaattcacagtgtgagcttccatatgctgctctgtctgtccaagtcagagctgcaatctagtcctgcctcctgtctgccatgctccctccattttaggtttttgctattataagtaacactggtatgaacacttccatacaagtttctttgtgtgaacatgttttcatttctctgggataaatgcccaagaatatgttttttgggttatgtgatatgtgcatgtttagttttataagaaatggctcaaacattttccagagtggctgtatggtttatgttaccaccagtaataaggttgttcccagtttctctgcatcctcatcagcatttggattggaatgggttctctgctcccacaggatggaaaacaactttcctcccctattccaaatttccagagatagagactagagagaaagggatagaaagtggacctgcaattacacagttaaaaaaacttcaaataatattgaaataaatatttttgtacatagacttctttgttgtttatttagttatcacagtggttaggtacaagacttccaagtactactttttaccttctctgcactcttttctcccatctgtgggctacccctgcttaggggct

SEQ ID NO: 43091 - DNA, 1047 bp, Homo sapiens
aatatttaattaaaacctccaagggggtgggcgtggtggctcatgcctgtaatcccagcactttgggaggccgaggcaagcggatcatgaggtcaagagatccacaccatggtgaaaccccgtctctactaaaaatacaaaaaattagccaggtgtggtggcgggcgcctgtagtctcagctactcgggaggctgaggcaggagaatggcatggacccgggaggcggagcttgcagtgagccgagatcgcaccactgcactccatcctgggtgacaaagtgagaacccatctcaaaaaaaaaaaaaaaaaagaaacgtccaagtattttctttgggagtttaactttgttctaacaactagaattgtgatgaaactaacaataattttgtttttctccttcagtctaattttaaaatagttctttctgtccttcccataaccatttacttataaaggagagtagtatatggaagaattcttaaccaagtgtttgcccattttgtagtgaggttggaatcccatggcgatatggtttgctgtgtccccacccaaatctcatcttgaattataactcccataatccccacatgtcatgggagggaccctgtgggaggtaattgaatcataagggcggggctttcctgtgttttcttgtgatagtgaatgtctcatgggatcctatgttgttttataaagggcagttcccctgcacacgctcttttgcctgctgccatgtaagacatacctttgcttctcctttgccttccaccatgattgtgaggcctccccagccacgtggaactgtgagttcattaaacctctttttctttataaattactccatctctagtatgtctttatagcagtgtgagaatggactaatacacatggggaacaattttccaaaatccaatgaaaaatgtcccattattttcaaatatgcagaggtgctagatttcagaaacacaaaatacaacctaagtccctgaaataaaatagtatgctttagcatgttttaaaagaaagtgtgtgcattgtcagaaagc

SEQ ID NO: 43092 - DNA, 1065 bp, Homo sapiens
atggctgatccagagccctttggcctgatctccactatccatggaagcatctttcttcaaatctagggctacatgaaacgttttgaaaactattgatctgtggttaaaaattagcagttaagcatgagcttctccaggagcttctgttattatacccttgaatttattaatttggcttcatacaggtgagtttctttggttgagtccattatacaaaatgtcttctttctgtaataggtcagggcagtgatgtttgttactggaggaagctgagaggcttagaaaagatgctgagacttggtgtccatcagataatgtatgatggtgagaactggtgaggactgatgattccagagaaagcatatggacagggtaaaggaggtgacctacggtatccaggaagtcttttctacagtgggtttagggtgcagtggaaggggagaggattttataggttgtggaagtatttggtgaccggtggtgataagggatgctggacctgagttgggtgccagtcctgtggactgatctgtgggagtggtgacctcagcggtcatgccctcatttccctcctgcctctctgggtgggagtgcctggatatacgtgaactgctgcccagctgcacagggctgccaggctcatgcggcctccccagcactgcaccactggagcaagtgggcgttgatgcgtttcctcattcatccttaattattctgattctctggtgttaaaatggatccaggaaggctcttggagccagtccaacatcacagtcttttgtctctgaaccagtggttattgtttctacctctcaaggtgtataccccctattttggaaaattatctgccatgttgaagtctgaaaatataggtatgggtgactgggtcatctcattctctgtcccagttttccctgagtgtggcagcctcctttgcttgggatagtgggagcagagactcttaatttcaccaaggatggactttgcatttctcatgtatattctccttggattatatgggttttaggacagaaagggtggcagaaaacattgttatactatatt

SEQ ID NO: 43093 - DNA, 1025 bp, Homo sapiens
tggggtacatattaggagtggaattgctggttcatatgacaattgtatagttaacttttgaggaactgccaaactgttttccacagcagccacaccacttcaaactcccaccagcaacgtctaagggctccagtttccccaaattctttccaacactgctattttctgattgtttattattgccatccccatgggtatgaagcggcatttcagtgtgactttgatttgcatttctctaatgactaatggtgttgaacatcttttcatgcgttactggctgtttgcacatcttctgaatgtaaacttttaacaaaaggtattttgtcatcttgtaaccattttaggcaatattttcaggatttaggaaattcaacaaagcctcaataatgtgcattccccccataacctgtaagtagacataggatcagggtgggatgggatggctggaaataaaagacctacgctctgatgttctcctccacttccaccctgctgacttcttgccgggcaggctgttttgaaaacattatcgtgcactgagcaggaaaccttagcttttctacagttcacacattattttctctggctctttgtatatctagtatccttccaaataggtgtatgtttaggacagagctgggcacagctgtgcagagtaatgaagctggggtcccttgagctgcccgtgatattgcttcaataaagagaactcggaatgcaggctgtggcattacactgcatcccatttagtctcctcatgggaaactccactgctatttagctcttcccgaatcttgagctaacaattttagacaaaccatgaatttgctgggggtcaggaggatggtgtattctcagcttcagataggcagtagatataaaataagttagctcctaccttcttctcagtagtcactgagagcatgacatgcccctacttaaacacctcccctggctgccccgctcacggaatgaaatctgtttagcatcctgcaggccccacgtggctgccccagccctccctc

SEQ ID NO: 43094 - DNA, 1082 bp, Homo sapiens
tcttgtataaggtgtaaaaaagtggtctagtttcaattttctgtatatggctagccagttctcccagcaccatttattaattaggaaatcctttctccattgcttgtttttgtcaggtttatcaaagagcagatggttgtagatgtgcagtcttatttctgagttctctattctgttccattggtctatgtgtctgtttttggtaccagtaccatactgtttacagttggttactgtagccttttagtatagtttgaggttgggtagcatgatgcctccagctttgttctttttgcttcagactatcttggctatctgggctcttttttggttccatatgaattttaaaatggttttttctaattctgtgaagattgtcaataaaggaagtgaaggacttcttcaaggagaattgtaaaccactgcttaaggaaatcagagaggacacaaacaaatggaaaaacattccatgttcatggataggaagaatcaatattgtgaaaatgactacactgcccgaagtaatttatagatacagttgatttttaaataccgacttcatatcctataacattgctgaaccgatttattaattctagtaattttttgtgcattccatagagttttctatgtataagatcatgtcctctacaaatagagataattttaattctttctttccaatctagatactacttacttcttcttcttttttttttttttttgtgggggggggggggggcctggctagaacctccagaacagtaatgaattgaagtggtaatagtgaacatttgtgtcttattccaaatcttaggaagcattcagtctataacatttaagtaggatgttatctatgggctttttatagatgccctttatcagcttaacaaaatttacttccattcctagtttattgattaattttatatgaaaatatattgaattttgtcaaaccttttttgtgtctattgagatgatcatgtgttttttgttctttattctattaatatggcattatatttattagtttttggatgttaaactgatattaaatgcctggtataaatcccacttgatca

SEQ ID NO: 43095 - DNA, 1023 bp, Homo sapiens
tttttggtttccctttcttcctttcctcaagattactaccaatttctgggggcaagcattgactagggttgctcttccctgtcatcactctaggcacattgctgaggatcagtcctcactgcctctctcaatgtctttcccaagccagagtcttctgctgcctctgaccctctctagaacatggggaaattatgttgttctcaacacatccaattctatggggtttttaaggtttctcatcatttctgtgctaatctctcagggttgagtattggtctacatttcctgcaccacgagggatgcatcagaagtcagggttctccagtgaaatataaccaatatgatgtttattgacattgatatggtttgaatctgtgtccccaccaaaagcttatgttgaattgtaatccccagtattggaggtgaggcctggtgggaggtgattggatgatggggtggatccttcatgaatggtttagcaccatccttttggtgctgtcttgtgatagggctctcatgaaatcttgttgtttgaaagtgtgtggcacctccctctctctctcttcttcctgctctggccatttaagacatccctgcttctctttcaccttccaccatgactgtaagtttcctgaggcctcctcagaaacagaagccactgtgtttcctgaacggcctgcagaaccgtgagccaattaaacgtctttctttataaactacccagtctcagtatttctttatagctatgtgagaatggactaatacgaaataaagcttaattagttttacactttagatatacagtcatgtattgcttaatgccaggggtacgttctgaggaatgtgctagtaagtaaggtcatggtaacacaatggtaagtatttgtgtatctaagcatatacttccatagtgaaggtacagtaaaaacatagtataaaagataaaaatggtacacttttatagggcatttaccacaagtggagcttgcagggctggaagttgctctaggtgagtcagtgaat

SEQ ID NO: 43096 - DNA, 1005 bp, Homo sapiens
atatttcccgactgaagcttatagacactgagagaagagcactaagaaaatcaaatgaaagaatgagaaatcattttgaaagttctgaagtactacacaattaaaatggtttactgatatattcccctggtctctcaaattaattttaaataacatcactggcaggttctggaaaggcattatggaagtacttttacacattttttctgcacagaagtccaggatatccatagtggcctcagaaaaatttactagggaaaattataccaaagtgaccctgtgacttcttctgagactgccttgtgttggctccctcttcctgggcagtcggactacatctcccagaatcccttgcagttgggtctggtcattatgactgctctctagccaatagaatgcaagtgaaattaccatgcgccacttctgggcctggcccatccaagcatcccctgggcaattattcgtgttcttttaccttcccaggtgaattctgaaactgtgggtggtaactgaaagtgacatagaatggaaggaatcttgatttataaagtatcacttcaagcaacgtcactcaatgaccggcaacattccttttggactttacctgggtgagaaacttttaatgagttagaccactgaagtttcatgggtgagctgcttagcagctgctgttgtcttaattaacataggtacctctggggccaggtgaaatataactggttccaaactctggtgatgacaagggattgaaagccctcttcacacagggagatgtacttcttgaagacccaaggtcgtgaaagtagagcaaactctttctgattaggcttggcgtccacttcgtgtatggtccaggtccactgctctgtgctcctctctgcaaatgctgcgattcaggttctgccatgactcagcatcttcccttgattgggttagaaagggcaatcctgaagaaaagaaattcatatctgtcaatttggtggagtttgcaaaagtctgctaaaa

SEQ ID NO: 43097 - DNA, 1023 bp, Homo sapiens
ttttttttagaaaaatacttacacataagataattgttttgaagaacactgcaggttgttattctgttatgactgcagactttgttttgctcaaagcaaatccacttgggcattacagaaaaagaagagcatgatgaatgtcctgtaagaatctgtgttatctgcctctgtgtgaatgcaaaacaacttgctttcctaccagggcttgtacttattcattggattcttcctcattacctgagctgctaggtgaatgtttggctgttgcttatttattttataggattttcattaagtctttgtatatttcttaatacaacaatagagattgtaggtgagtttaaaattatctgtaatgttatttaacagaatgcattaagtttgagacaatgacattatgtaaatatattgaatgagttctaatctagagtgtggggtgcaaatctctatggaagcaaaatggaatttcatgttgacagcagcagtgcgtttcctttacttttatgtgctgaattctggctatttccagaatgagtgcaaagcaggtaattaaagttaaaagtaaaggtttgacaatgatgcaaggatttttatgaaacctctatacagtggcaagaatcttccctgtaaagtttgtatgttttggcactagataaaccttatttttaaaatattttaaattaattttaatctccccccttttgttttagtgaatatgttgggcatcagattaaaatgacattctgaaaaatattccttcagccataagaccctcgctggttctaagaaaccctcaatgtgttgttaaataaaaactgcactggacaagatgagcaaatagaagttggttttattcccacactatgaagagcagcaggggagagaacacagaccaagcccagatactcagatttgctgaaacaaagggcagggaaatttttaagagctggggtggggcttgtaggccatctgtgtttctagtttgcttcactccaagggaaagtaaactttctcctgtcttca

SEQ ID NO: 43098 - DNA, 1023 bp, Homo sapiens
tgattttgcaactacgcaagtgtccttttcaattcctttattcaaaacaggatgtgttaattttggaaaaataatagttaaatgtgtaagtttatgaaaccctaagcttaaattctggttagacacaccctggtttcctgtacctttttttcattacatatatttataattttttcattttatatttatatgcattttgaaattttacaatagttttaggtttacagaacgtttgtgaagataatatagaattctcatgtaacagatacccagtttgggtgattactattttatattagtatggtcataattgtattgtatattgtacataattgtatgttagtatttgtcataattgatgaaccgatattgacaggatatgactagctgaagcccatactttattcacatttccttagatttacctaatgccccccttttttgctctaggatcacatgaaggatgccacattacatggagtggccccatttccttaggcttctgtcagctgcgacactgtctcagaccccttgttcttgatgaccttgacagtgttgaggagtattgatcagatattttgtagaatgtcccttaattaaaatttgcctgatatttttctcataattagactggggtagtgggttttttggaggaagaccacagaggtaaagtgctgttttcctcatattgtgaagggtacatattgttaattatgattcatgactgttaatgttcgccttgatgatttagccgaggtagtgttggtcaggtttttccatcgtagactggctctttttcccctttacctgctgtagtttttggaaggaagtccttagttgtagtccactcttacgaagtagagagttacacactctcttccttgagtaactacgtaagtaactacgtaaattatttggaattcttccacatgagagatgcctcttttccttcactatctatgtattggatcatttatttataccagcattaattttatttatgattactttatactttgggtg

SEQ ID NO: 43099 - DNA, 1194 bp, Homo sapiens
tttataaagatcaggaaggccttacagtctaaatgaggggaaagcttgccagataggaatgggagttcttctaataggaagagatagcatataaagtgagagaggcctgtgaagtgtttggcaagcttgggtaatcacaactgattccatgtgactaatgggagtaagggggtgggatggtgacattacaagagattaagatgctggccgtggtggcacgcacctgtagtcccagctgtttggaaggctgaggcacgagaatcgcttgggcccgggaggtggaagttgcagtgagccaagatcatgccactgcactccagctagcactagagtgagactcgatctcaaaaaaaaaaaaaaaaagaaaaagatgtgaaacatctcatcttggactctttctttttagcattaatatgagaaacagaatcttatttcaggaaaattactcctggaacagtacagaggtcaacctgaaaggaaagcgactggagaaaaggagacaaatgtaaaaccttgctaacatttacaagaggaaaagaaatgaacacagtgagcgtggggagaggtagatatgaacagctctgcagttggaggaacaaaccttggaaataaggagaggtgacctgtgtttagctgcacccctagagggtggaatcggctgaggagcaagcccagcaacactgaagttcagagatggagcggctgggcggtgggcgagagaaactcttcggggacacatgtggttcatttcaggaggtagctaaactttctacaaagttagtacgtaattacacacttattttttaattcaacaaagtaatttgggagagcttcatggggagcagcactgaggtttaaagagctgaggatacaattatcttcatttaactttctatgctaaaatatttcttaaaaataaagttgtgcagctattactattcaaatatttccttaaattaccaaatatttgctagattgacatatgttgtttaacttttcctaatgagactaaactcctagagctaggatacgcagtatttcttccaagtttcctctcaatacctagcagatagattaaaaacacactttttgtgagctatcaggtagatacttttaattatcctacacaaagaaacaatcttgggatgatttggatggattatctatgtcttcatcattggcattcacattgct

SEQ ID NO: 43100 - DNA, 1048 bp, Homo sapiens
ccccgccctccgcgcccccgcccgcgcccgcgccgagcgcccgaagcgcgggagccgcgcgcgccctgcgggacgcaccatcccgccccggccaccgagggggagcgccgaggagccgcccggcctccagtgacgccccgcgcctctgccgccagccacggctccggggtagctggcgccggcagcccgctctggcccttgcggttccgtggccgccgctctgcaacgagggggccccgaggacgaggggaaaccagctcccccctcggcggggccggagtgagccggtcccggggaggaggggagctggcaggcccctcccgtcgccacatgcggctgctcgggggcggcgcatgcgcgcggcggaggggggggtggggccttggggccgcgagtgggagcgggagcggttctgcggcctcctcgggcttcttggccctgggcggagtgggattgggtgtcccggctgttcgcagtggccgcgagtgcggccggacctggagtagtacctgagccgctctggccgagcaaggcgcggggccccggtctacaccgcgctggacccggctatgccgtgacggaattcccgaggccgtagcgccacgcgagacgcgcactggtggcctccgcggcgagtcctggggtctccgcaaggcctcagtgcccgagctggggacgtgctggggggaggcccggccccgtcgctgcccgaggccccgctgtcccggccggaccggcctggtccctggcgtcctgtcgggtccgcgctggaggagagtcccagacagcagagcccgcggtgcagctccagccccgggaagccccgcgctcaacaggttaatactacacagcggcgattctaatggtcacgcttttatttacagctcgcctcccttccgccaagattcacagaacacggcagagtggcctcgggatcacctgcccaagacacctgcacgaccggaagttgggagaagaaattaaggccatgatgatgaacgcagcctttctcgtttatttccaatcccacaacaaaccggagtccagg

SEQ ID NO: 43101 - DNA, 1081 bp, Homo sapiens
aaatagtttagccttcagtatttgtaattggatcctcaagggtttctaggaatatctggacaatttctcatactctcatattctacttttttttaaaccatcagccaagagcataagtaaaatttttcatagtatgttttttacctatttatttattaagctatagtgaagtaaagttaatttggggggtccatttttcagaactccaaaattagaacctgatgaagtataataaattgaaaacaacattttttatctgaatgtttgatgcaaactgtgtttcttgtttctcagttgaacctaaaatgtatatttctttcatactacactgaggtgaaacaattgcagggttctcaagagccctgggacacagtgacccttgtgtcccagcatccaaccccacgggccggcaccccactcccccctacagacattcattcctgccttcatctttgccattttacttctcttttggaatgccattccttcccacctgtccaaattccaagttcgtgtctataaagaataactattccagaccacagtgatctctttctctgtgtcccagttacataatccttataattttacacatgagaaaacaaacatgcagagccacgtcccatcagagggcaagctgggatttgaggctgagttttctcttcttggtctggtgttctttccgcagcttgaggcttgaccatgcgggaaccagatggagaataagcgaagcctgtgtggggctgtctcgccccgtacttgcccatgtgcatgtgtgcacagtaggtgctcagtgcctcgtacagaacatgctagaacccccgaaaatcaactccagggccactctaggagcatgtgacccagactgtcaaagtcacatcagcaaatatgtatctcatcacgtgcccagccccagtactgggtggtggcaggagtgtcagagctgtgatgtgacagggtgtggacagatgctaacctttttattgtaagatagaaatcacaccggatgaaaagacaaggtgaactacatagtcatttaagttctgtgtgctttaggcaaatgtggatattaaatataagg

SEQ ID NO: 43102 - DNA, 1837 bp, Homo sapiens
gtcccacatggaaatagtatgttgttttcatgcattcgccatcatccccgttaatagtcttcaaaggagagctggcaactccatcattgctttcttgctttgagatttttgtttcggtactctttgggagagaattcctaagaaggtttttagaataaaattgtcctcaaccagattgactaattacacattataactacaacttgaataacatttaaagagttggttatttctgtttgataggttggtgctgttatatgtcaaggctttttaaatcggttttaagaaataagcattattttggtggaggtagaaatttcacaacattcataagttctaaacatctagaaatggttggaggaaacattttcgttttgaagatagtttcattaagtaatccctgctgtgctcctttgcttacagaaaaaaatgttaaagataactcaaaataggatagttggtgtaattataattctccttacttcagctttctcttcatcctttttattctttaagcttgggggaaaatgtttggatgttctcgtatcttaaaactggaggagagaggctgggcgcggtggctcacgcctttaatcccagcactttgggaggctgaggcgggcggatcacgaggtcaggagatcgagaccatcctggctaacacagtgaaaccccgtctgtactaaaaatacaaaaaaaaaaaaaaaatagccaggcgtggtggtgggcacctgtagtcccagctgcttgggatgctgaggcaggagaatggcgtgaacccgggaggcagagcttgcaatgagccgagattgtgccactgcattccagcctgggtgacagagcaagactctgtctcaaaaaaaaaaaaaaaaactggagaagagagatcaccaccttaatccccttccctgctgggctatcacatgaaactgacctctgaggttctaagcctaacccgcctaccactgtttttattcataaatacttaaatccttacctctggatcccaactgttactctttttttcacttcaaaatttgcaaactcatttctatccatcaaaccccggaaatggcccaggggcttcacagtgcagtcccctccctcctgctgcatccgttcctcaggctgtgccccaggttgcattcgtggtgcgtgttttctcccagggcagccttccccacattccactcttgtcatactgttgactcacaaaatggaagtggctgaatgttccagggatagtgtctaagagctattggtttaaggttgaaacctacaccaagtaaggctttgtgaagggagatgacgagagtgaagttgttgacagtctgaaggtgaagagattccgaggctcagttcagcaccgggaccagacccgcccagatccagggtaatttgaggtctgtgtttggtgctgatggttttgcccagtgcactccacaccctctccttcttagctgtctcagttctcttcagatgcctttgttctaacttatgcttccctcccttaagaagaaacatagttacttgcaagaataaccatgctcaaaagttacaagttggctttgcttcaagttatatggtctcctagctttttctatgtggtatttccccccacacatgccgttgtcctttgtgtccgaaaatacagcagaaacatttgttatcagcctgttacggtttttttgtttgctttttgtttgtttttatttttactttttttgagacggagtcttgctttgtcacccagactaaagtgcagtggcacaatcttggctcactgcatttgaaccgtctcccaggttcaaatgattatcctgcctcagcctcccaa

SEQ ID NO: 43103 - DNA, 3280 bp, Homo sapiens
gctccttcctcttaaagtgagtggagggcaattaagtaacgtgggaagtcacgattctgagggaaaaaaattctgtatggaggtttctcttttgccctttagcagaagctccgtggcctcaggaaggtcatttaatctctctggctttgcttcttcatcagtgaaatactgttctccattaagaatttaccctgaggtgcctggtcatagtagtaactgtagtgtctacctctcagaagctctgtgagggtcagatgaggaagaacatgtagaaaggatttcccaactgtgaagctctgtgtgaattgagggcacacagagcttcagtattacaaagcatgacctatttccaatgtctgtttcaacaaactgctggtaaggtgggttataacacaggcatcagatactaataaaggtttgtggcagaaacctcccttcagataaaggttcaatcccttaaattgcagttagaactttcaggaacctatcataccctaagcatcaccatgctttgataaaattgggtgtttcctttatatagatattaatttagttaaactttcaccaatatcttacacttatataacaggctttatataagggcctcagcagcgtaatttcacctgaggcagagaattatcctaattttgcaggtgagagctgtggctcacggggccagagccatgaagacggtgcaggggagctgggagagctggcctcggtctccagttctctgcacatgtcccacctctcaatcttgttgcttcagtcaaagaaagtgtcaatctttcccatgttaggacctacttaattggtaattaaaatatttatacatttagtgctaattttctctttccttttttttttcctttctacacatagggtgttcctgaaaagccccatagtgattgagtcttcaaaaccaccgattctgagagcaaggaagattttggaagaaaatctgactgtggattatgacaaagattatcttttttcttaagtaatctatttagatcgggctgactgtacaaatgactcctggaaaaaactcttcacctagtctagaatagggaggtggagaatgatgacttaccctgaagtcttcccttgactgcccgcactggcgcctgtctgtgccctggagcattctgcccaggctacgtgggttcaggcaggtggcagcttcccaagtattcgatttcattcatgtgattaaaacaagttgccatatttcaaagccttgaactaagactcaattaccaacccgcagttttgtgtcagtgcccaaaggaggtaggttgatggtgcttaacaaacatgaagtatggtgtaataggaataatatttatccaaaagatttttaaaaatagggctgtgtttaaaaaaaaaaacaaaacaagaaaagcagcagtgattatagagaggtcacactctaagtggggtcgcggcgtggccacgcttcacggtcacgctcgtccgtcctgcagtggcgtgtttacatggtcacacgtgtgtgtatcaccagtgggtcaactgcttgtcattcctcccgtggcagtttgtgtagacaatcttactgagcaaaaggcaatgaaaagtcttggttcccacactgcgatatattggaattttcacctcagtttatgaagtttatttcgaaatccatagtcatctaagaatgaatacctgtctgccatgtatttcaatcttagtgagccaaaattgtttgtttgttactacagaatagagatgactgttttttgccacagccctatggaatttgcaatctgtgattgccttgtaaaaaggagagtgcatatggcactgcattaaacgtgtggtgtttctagtcaatgatattggtgagcacaatgtattcatttaatggcatagaccataccagacctaatttgcaagtattgggtcttaaacttcaagtgcaatgtatatgaaaaccaatctgagccttgtatctcttaaatatttattttttttaacgtgtgagatgttcgagagaaggttctccattcatttcagtgctgcctggaggaaactcggcaatgatttctttcagttgtgaagttcctttcgtgttacaccctccactgaaccctcaaccttcgaaatactccagttttgtgggtttggtcatttttacttataaatttacctttttgtattttgcaatttacatgtgtttggtttgttttaaattctgtgaaagtggcttgattaaaagactccttttaaatggaagccaccagtcagcagaatggaagcttagaggaacttgcctgtgagcgctggtctttgtgtttggttttgtgatgtaacgatctttgctggggttttttgctttgttttgagggaaatgtcttggagtaaattttaagttcctggagttaatttgttttacaggaattttgttttttaaaaaaataggatcattctgaactttggaatgacccccttatatattttctgaaaatgaaaacagttacatgaaaaaaatttccaatgaagatgtcagcattttatgaaaaaccagaagttattagatgaaagcagcgagtgaatctttaaaacagacttgatcacgcacacacaataagtctttctctccgaaaccggaagtaaatctatatctgttagaaataatgtagccaaaagaatgtaaatttgaggatttttttgccaatagtttatagaaaatatatgaaccaaagtgatttgagtttgtaaaaatgtaaaatagtatgaacaaaatttgcactctaccagatttgaacatctagtgaggttcacattcatactaagttttcaacattgtgttctttttgcattcattttttacttttattaaaggttcaaaaccaagtgttgtatttatgtttgctttttaaaaaacagttggggtggtggtctctgtgtaggatgttagaatttgtaatggagaaatattttgcagttcttcaaattttactgaattttgacacaacctcttgggaagtatttgaatcatccttcaatatacacaggacattggttccaggataccccacgtatgcgaaaatctgcatactcaagtctggcacttggccctacggaacctgcgtacactaaaagtcagccctccgtatacgtgggtttcacattcagcaaataaaccatgtttggttggaaaagctccatgtatataagtggacccacaggttcaaaccctgtgttgtttaagggtcaacagtatgtgtttttcttatggtagaaagttttaagtgca

SEQ ID NO: 43104 - DNA, 1085 bp, Homo sapiens
aacgtggtggctggaagatgggcccggaagtgcacactctcatccccttccctacgatcttccaactcaggccaggccggggacgcatgccccagcccaccccagacttgtcctaccatccggttatcccggctgtgctcggggaagaaaaggcgaggccctttgccgctctgccttctgcccctcgggcctgcgctgaccggtgggactcaggaggatgcacacagggaaggaggaaaataaaggcgccctttccccttggctccactttgtttgccagcgccagcccgcagtggtggggctcagcccccttcctgcacacagcgaggacaagggaggcagccgtccctcccggcacctgccatccccaaatagaaaggaccttctctcagggtttcctgggggctgctgatgggaaagaggcagcattcgcaggggccctgcagagatgctggatatattttttcatagatctgcgattttaaaaaactaagtccatgtccttgtagaaatcatcaactgcattccatgcgggtctgcggctgggaaccgccattagaagtggactgtttgaccccgagctggcagcggatccccgctgcccccaaaccctcaactattttgcgggggtcatttgcccagatcacagcaggagtgagccaacccttgggccgccatcccgcagaactatgcgtgcatatttctgatgaaattcagatttctcagctagatctgaaatttgctccattgttctcgtcttcctcctttgttaatatttaattaacatacaggctcacaatgccgggcgaggagactcggccgggctttgtgcggcgcgggagttcgctgagccagcccccaacggcccgggagctgggcagcaccgcccggcccggcctggcccggcccagctcagcccagcccaagtcgcctatcttcatgggctttaaaatatccctgcaagataatgtttctgttctttggtttctccgaaagaaaggggagagagagttttcttggggaggtttgattctgtttctgagactcctaagtatttgtcttttgaaagaaaatcaagaaaaaaa

SEQ ID NO: 43105 - DNA, 1050 bp, Homo sapiens
caaggtgcccaggcaggaactcgggctcaagtgatctgcccgcctcagcctctcagagtgcaaggattacgtgagccaccatgccttggcatgatacatttcaaaggagtcatttggtattgcagccaagtagtaaggatagagaaatggaattgctatccttactaatagcagagagaatgacaactgttatttattggagactgaaaacaaaaacataaaggcaaaaacatggcattttggggaaggaacaaatagtttaatgagtttcaagatcttctagttccagtgcttccttgtaaaatataaaataaaaaatcagtacacaaatcgtaaaaagcctccaacctagtgagtgcgttatctcacttaagatttacaacagcattcttgggcctgagctaatctgattttataggtgaggtgaaaaaatgggtgcttgtaaattttttgttttctagtcaattcttagaaataaaaagttttaatgggaaatttcaaacacatccagtagtagaataatgaacccacatacccatcacctagcatcaacattctggcaatctgttttcatccccccacctccacttttgtatatttcaaacaaatcctaggctggtaaaattttagagcaagatacactgctgggatgagttaagactttagatactaaaccagttgctttaatttacatttgatagtaaactagccgagaaaagttcagccacctagctgttaagaaagggaagtagactcgaattcaggttttttgacttctagttcagtgttccttccactgtgtcagtatgtagtaaggcaggaaagtatgaagcatggtgcagaaggttttcattcgaaattgtgaaagtgaaacaagttttagtacttcaacaggtaaaatttacctggtaggaaatttttggagcattttaatcactaatagtgctgataaatgagatgttttcatactgataattatgtgtgtatttaattctttttttttttccttcaagaaaatctttcatgcttaatttcttagcttcaatcaag

SEQ ID NO: 43106 - DNA, 1096 bp, Homo sapiens
ttacctgatttgtagttaatatttaaataaaggatctggatttcctcatctataaaataaggaattttgactattagtgatttggactaggaacatattatacatgagtgtgatattgaggaaaaagaaggttgagaacctttggaatacaaaggtcagcaaactttttctgtaaagggtcagatagtaaatattttaggctttgcagggcagatgagttttgttggaagtgctgaactccgccgtttaccttgaaagcagccatagacaatatatgcctgaattggaatagctgtgttccattaaaagcttatttacatacacgggtggtagctaaatttgggcagaaacaggtggcaggccctacttggcccatgggctttggtttgctgacccttagattagataattgctagaaccctatcacaagctaatagtctatgtggtatcttatccaagtcgaggattctggaaaagaagaagaaatagaatggtaagtaaaagtttgtgttaactgtagatgtctgattgctgcatgatagagaattgtagaaatctagtagatatcttcagtcttgaaggaaaattgatccccctattaaaatagaatgtcttgtacaatgtttaggccttagaaggagattttccaggtaaggaggtcattgacctctttcgttttgctcagttaatattttaccccttggctttcatggatgtgctgttcttcctttaaagttctggactaatggggacacattttttcttcttggttctgtttaatatgactgctatgaactggaactttaaaaagtatttgtattctaaaggaaaacagagggaaatgactcagaatatattaagaatataaacaggctgtacagggttcttgtgttagcttgccctgtaagattttgagtcattatttcacttagcatgatgtcttcaagattcatcagtgtcgtagcatgtgtcagaacttcctttttaaggctaaataatattccattatatatctatactatttttttttaaaccatatatccttcaatagacacttgagttgcttccaccttttggttattgtaaataatactaa

SEQ ID NO: 43107 - DNA, 1027 bp, Homo sapiens
tattgcaataatatttcataatgatcatgtattagtttggtatagataatcaagctattactctaataaatgagttttttaaaagtttaaggaagaataaagaagaccataaatccataattaattctgtgtgaacagataactaccattgtagcagtttggcttatatcctgggcacacgtgtacacgtatgttttacatacacagtggccataccatattgtatgatattggagaattcccccccattatattattggggatattttttcatgtcaggaaacagtttgactttaaaattcttattgctgcctaatatgtaactacatgactgtacttttatttgacctctctgctctggcttttttttgttgggcatttggtttatttctactttttcctattaataaaacacttcttgatgaacatccttgtacatattacctttgttcactaaatgatgaacagtatttatcaaaatcttgggagtccccgagactatgtcagagtgtctgtgaagtcagactattttcataacggtattaaggctgtttgcctttttttttttttttttttttttttactgtgctgacatttgcatcaatgttgcaaaagtaatggtgggtacattctctggtgttttaacatgaattaaggcagtgacaattatttattttattaaatcttgatcctaaagtgcatttaaaaaatctttgtgacaagtagggagcatatgcataaaggacttctgtttcgtactgaagtataacagttgtcttcaggaaaagtacctgtccagctggcatggtagtgtgcacctgtgttctcagctacttggaggctgaggcgggaagctcacttgaacccaagagttcagtccagtctgggtaacattgcaagaccccgtctcttaaaaaataaaaataaaaaaaggtacttgttcaatttaattgtgagctgagctagcttttcttatttcttctgtagaacatcatttttacttgaaaggacaattgacagactgtgg

SEQ ID NO: 43108 - DNA, 1094 bp, Homo sapiens
ggcagaaggaggggtaagacttcagcatatattttttggggatacaattcaaccagttataagcagttctgccagcaacagatttcttcctgttctgttcatctgtgaatgtctttatgaaagatcatgttggtggatttgggactctttgagcactttgaataggtcatcttactgcctctggctgcttctgttttgatgagaatcaactattgcacttccattgtaggtgatgagtcatttttgtcttggtgctttcaaggttttttctgtgtctttggcttcgaaacattttgactacgttgtgtgtgtttgtaaatcgttgagtttattatcatttgagtttgttgagccttctggatgtatagataaatattttccagtaccttttggaagttgtcagccattatttctttgagtattttttccttctcctgtctgtcctctccttctggtgctcccattacacgtatattgttgtgcctcctgatggccccacatttctttgaggctgtgttcagttttcattttctgatttctgttctttggattatgtcatctctgttatctgttttcaagtttactaagtctgctagttcacatctactactgagcccctctaatgaactcattttagttatttttcaatttcagaatttctatttggtttttaaaaataatttctgtgtgtgtgtgtggtgtgtgtgtgtgtgtgtgtgtgtgtgtgtgtgtatatatatatatatatttttttttttttgagacagagtctcactcttgccaggctggaatgcagtggtgcaatgtctgctcactgcaatctctgcctccctggttcaagccattctcctgcctcaacctcccgagtagctgggattacaggcatgcattaccacacccacctaatttttgtatttttagtagagacaggtttcaccatgttggccagcatggtctcatgatccccctgccttggcctcctgaagtggttttttttttttctttctttttttttcttttttttcccagacagagtcttgctctgtggcccaggctggagtgcagtggtgtggtctcggctccctgcaacctct

SEQ ID NO: 43109 - DNA, 1027 bp, Homo sapiens
gttgatttatttccatgtacttgtcagcaagaggcacagatactttctagatttttgcttgtataattactaatgcctgtttttatgactttgtcagtttgccctgggaaactggcatcacattccatttttagttacttaaggtgatggtatagacgagtgcctgtctttaaaagaggtgcttgtgtgtttttggttatctggaatcaaattttcaaatggggttattgtaaatattgttgactagacagcattgttttctccctgcctctggagggtagttggaacactgaagatacaaaaattgtatttgatagatgatagtggttttaaaatgttggaagaagctatatgttattctcttataactatcctataggagtttgtgaaagattgtttttcaagggctgttaagttcttgtcctgcatctgtcactgctgtgtgactttaggcaagttatttcatgtcctatccttgttttctttatctgtaaaatgtaatataggacttactggaggataacttaaaataacgaataaagtctttagtgcatgaattaaatgatttgtcaggttgtttttagttctaaaaggcgttatatagaaacatgcatttcattataactccatatatgcattcccggagattatagtattctgcaaagtggcatgctaaaaataaacatgattttttggtaaaataatggttttgctgatttctcaatacctatagaattttgtaaccagagcacctattaaaaataaagcagcaattctaataacaatatcgatgcagttaaatctccatgagtattggcacctagagttacagtccatctaattgtatttcctctttgtatatttctgtatgttgacttttaatgatatttgcttccaagagattgatttccccagaattaaaaacatgatctagtggtagccatttttatcaactaaaaaaatcttgtttctaataaatgcagtggaaaatgtcttcagcttttttatttgctaagggtttctgttt

SEQ ID NO: 43110 - DNA, 1051 bp, Homo sapiens
ccacattaaaatgaatttttttttcagaattaaagtcttgaagtaaaaaaaaaaaacttagaaattctggaagtgttctgatgttttcacagagagttgtaaagtttaaagttgagcagtagtagttcaatgtctttctgtgagcaatgtcagttcatcttgatacatgtgttctagccgtggtcattcttttcttgctttatgatgatcacaatggtaacatctgaatgatctgaaatggccgcttccttggacaggaggagatacgcagagaattaaattgtgaggtactcttatcttgctcggcaatgggagcctctctctgtcttcggaggctgtcactgaagcccagatgatttattcaccattagactaatgaacacatgagcagattgtgtctctgtgtaccccaatggcattttagtttattaaatgacttgtataactgtgatttttgttctcccttgggttgttaacccccactctaagacttgaactctgaaatgtggatctgttggaacctacctgtaaagccacatggaggggctttggtgcataacagggagtagaatcatgaaaccccagaatgtacagtgggagggtttgctgttccctatgaagaaagcgaggtccagagacatcaataaagctggacgcacagctctgctgtcctttcctgtgaatgttgctggtgctgttcttgagagtgaattgtgatttcatttgaaaatgtgtgctcattatattagtaaggagtgtatattggtttagtcgacaaaatattagaaaatggttgagtgacttttacctttaagtgcaatcagtttatttaaggcctttaaagttaacatagattaagattttattgttctgtaaaaacaatttcaggttgacattttatgtcatgggtagcagatgtttgtttcccagcgagaatccaggggtgtggactgtactgcattgtacactggctgaagatttggattagcatcatttatttgactttatttgaaatctgaatgtcctgctgcccgtgattcatgggtagtga

SEQ ID NO: 43111 - DNA, 1050 bp, Homo sapiens
aagaatttgacctttttttttttttttttttttttttttttgaacattaactgttaatgtttaaggttattttctcctggagtcagcttagggtttcatgtggccttttaacaggacattttgcagtattttttacatctgaaatataaacaattaaatattttagcattctttaatatttaattcaaaagaatatgaacttactgtcctttttttgccttgtgtatctgcaatatagggaggtatggaaacattggaacttcaaaaggacatcaaagaagaatcagatgaagaagaagaagatgatgaagaatctggacgattacgtttcaaaactgaaaggaaagaaggaacaattattaggctctcagatgtaactagagagagaaggaacattccagaaactttgggtaacttttttgcctgtctcccatcctcctttactctcatttcaacttcctccatagtattgctgtaattaatcaaagtaggcaaagaaggttgactaggtaattgcggctgccgtccggagagtggccggactttggagtgagtgctgtttatggtactgtaaaactcattctttaaaatcattgctgtttatggatttaaaatgcttgaataaaatgtttaagataattaaaaaaaatttttttttgagtctgtggcctacagctgctcttgtacatgctgtggttcctggctggtcttgaaaaggtggcatggggatggtagctatggggccaggttgacccttcccaagaccctgaggttgtcagggcgaattctggacaagaccggtttatattttgtaccttttagtgtcttcatagctatatctttttttgtgttttctgcagttcctctgactttaatgagacaagttgactcgtttatagaaataatcactctgagcaaagcttgctgtgtgaaaggtctactacagactgctgctgattcacggagacttttaatagcgaccctacccctcattatacagtgtttttcaatgtccactgcaaggaataaagcagtgattccaaatttgag

SEQ ID NO: 43112 - DNA, 1044 bp, Homo sapiens
aaataatagtcaactattgagatttaaacttctgcttgcactgctgtgtaccgaaaaggaaacttctgctttccccttttctgttatggaattgttaaaaatactaaatgcttagcttaagcgtaagcacaatgtattatatgtctggtacgcatagtatatattttatattaaacttcatatgttgtcttacaggggtttgagtgttgagtaaagtgtgtctctaacacaaggggtttttcttgcagtgcccttgctaccagttccgagccagccgagacctgccgtgggaccccagagattcccagtgagtagcagctgctccttctcctttgatagggatgagcatacatttactaagaaatattaatatagcaagtgcaagaggttccagccaaatataattttaaggatttgcaaatattgacaataatctctgcaatagaaaatgtttgttaaaagcttaaggtcagtggatttttgagagtagaattaattttgtttaactgtaaaattgttgaatcaggatcatcagtggaatgccgttcgtcttaaagaatatgaatattgattttattattgccttatgttagtgagaaagggccttgctttattagagaggtggggggtgtatgtgtgcatgcacgcacaggcacgtgtgtttgtgcatgtgtattgtgtgtgaaattctaggaaatgaaaatgagagatctcttgtattttaaaagaacctctagggtcttaatgagccactcattttatattttaaaatgaaggttttcacttgaaaatacctttaaaagaaagcatatattctctctctctctctctcacacacacacactgtcattcacttatacacacacagaaatgcacactttgctgtatcttcagtaattttatccattcttctaacatgttttaggtagaagaaaaagcccattaactagttatatttgtttaaatatatacactttattttatttgaatttttggttcagtgtgtagtttgttcatggttttactaaactagagagtacattt

SEQ ID NO: 43113 - DNA, 1028 bp, Homo sapiens
ttcatccattaaatatttatgaccgcctgtgtgccaggcactgggccaagtatggaaacacattgatgtgtaagacaggcctggtctcagctctcacggacccggcagttgaagggcagagagaagtggaagtggattggagacattcaagagacagagtttctaggacttgctggtactttatgagggatttctgatttgaactcagaaataagaatgcaagcagggaatctatactgatttggtttttaccatatatggaaacatggaaatatgacagaagatatggaaatatgtcagaagctatatatcgtatttacagtctgggctgctgtctacaaaaaggtgtaaaaatgataacgacatgtatggtgaacttttgttatttgctaggtactgtcctaaggactttcctgcccctgtgaggtaggtactaattgctgttttgtagatgagcaaactgaggcccagacagattcagtcatgagctcaaggctgtagctggtaagtggctgggatggagacagggctgggagagctgtcaggttagatgatgggtgctgcttctcagcctgagcacctacaggatcactgtaagttagaataaagttctgcttaaacattagtgatggattttaaaggcttttattttccactgagtgtggaaaaactatcatgagagaattttcggggctttgttacgtaccagtaacattcagatgccagtgactgtgcatttagacagcatgtaaatagtcagttaaaggaaagaaagttttgggaagagatgaaaatcacaatattaaagttccagggaaatcttccagggaatctgatagtgcttagagacctaagaggtgatgtacctagttctcaggtagcttggaattttatggaaaactaagtttgtggactaaagtctttgagtttcttctaattcagtaactctttccttttagaaaaggatgaaagagctaaagacagagtccttttccctgatcacaacctgtggcaaagtaaaaaatcga

SEQ ID NO: 43114 - DNA, 1409 bp, Homo sapiens
attgcatggatttcaataagcttaaaaataatattcttgcgttataatgacattaaaacattgacttaatttctagttgctgcgttttgatttttgatcatttaatattgcagaatcacctgttgtgtaacagtttttatgttaatatgtgtggtcatgtcttgtgtaaggatattttggttaatggtggactgcatagacagcagtgtttccatgagattataatagtgtattttattgtaaccttttctagggttggatatgtttacatccacagatacttagcattgtgtgacagttgcctacagtattcagtacagtaacatgctgcgctggtatgtagccttggagctactagtgtgtactatacaggctaggtgtgtagaaagcgctaccatctaggtgcgcgtgtgtgtgtgtgtgtgtgtgattacaatacactctgtggtgttcgcatgatggaatcacctaaggatgcgtgtcagaatgtatcctgtcattaaggatgcatgactctgtgtgtgtgtgtgtgtgtgtgtgtgtgtgtgtagaaagagaaagacagtgactgttaggagacacgttacttgacatttttgaggaaaacttggaaccaggtctatatttctaaaaattacataccatttttctgtccttcaccctgtttctctgttgttgttgttgttctttagggccctccagaatttccacagcatacacctggacctgttcccaacagtttcagccagcccccacgactccctctccaggaccagtggagagccccacccccgcctcaggatcgagaccctttcttcttaggaggtacagaaagagtgagtggtgtggagtaacaacagaagctgcattgggtgatgtgcccaaacacatttattttgtaaactgaattgaactcccagttggagatgttaggaatgccaggtttttgtaccatagcagttctgcctgtcatttcaggtgctaaaattggacattgttggtatctgaaatcggaacatctcatataaaagggaatttatgtatagaaaatgacaaatgaagcaatctagaaataagaggcaaaatctggaattgtttccaacattcataacctgtcaacacttgtgacttctgtccacagtaggatagtgcttcagactgcttttctgagaagcacatggtctttttaacctgaagttaatgatgttgtgttacctttcagtttcaggtgaaccaagattcccgagccatctttttctggaacagcgaagtccccctccaccaccaccgcctcctacccttcttaacagtagccatcctgttcctactcagagtcctctaccattcactcagccaggaccagcatttaatcagcaaggacagcagccagtgttcccaagagagcggcc

SEQ ID NO: 43115 - DNA, 1031 bp, Homo sapiens
aagagagacacaatgtggctagtggtcagtggtcagggctcttgcctccattaaatatatatgagactttgtaatttggtttttagaaaaagagacacagtgtggtcagtggtcagggttctcgcctgtcagttttcttttggtattgtcttcttttcacccttgagcttcagtcatgtcacttagctgcttggaatctcagttttcctgatatttgcctctttctttcttaaagtaaacattgcaactaaagtgctgtgaacagtaagaaaagatttctaaatctgagaagagggtgctttataacctgggtttcatttgttagaataatggtaggctagtctcatgaccctcgtgcactgggatatttgacctgcgggacctcggagatccccctgcttcccccctccccccttccagctctctcgtgttctctttgcctcctccaggtgttggttctctcttaagaatccccaggatgaatatgactaagcatttcctctcgagtaaaacgttctggcacctttcttctcccgggggtcatgtttcttaggacattgacctgatgcttgattctttccttgttccagcttaaatttaagtgactaggtaaaatagtagcatgtgaatcccgttgatctctggtggcagatagagtggttttttggctgtcttaattcttttaaaactgtcagtccctttactgaagcacctgctaaagatcagcctggtgtaatttctatgaagaggagcctctctgtaggcaagtatgacaactttaccaatggaaattgttaacattaggatgaggcatgctgccacatggatcaggtgacatttatgtatgagaaaaaaagtatgagaaaaaagtatctgctccccaaaagaagtcatttactaattagaatgatttattgtgtttttatttaataatgtgccttttaatgttccttctgccaagtttccacttacaattagaatctctttctttttgtgaaaagaatacaacttctcagaatgtaagcaagcgg

SEQ ID NO: 43116 - DNA, 1584 bp, Homo sapiens
tcttagtgaaggtacagtaaaaatacagtgtcataacctcatgggaccgcctttgcaggtgtcgcccatctgagcagaatgttgttatgcggcacatgcttcagttttctcttttgagtcttaatgaaaggccagtgtgacaatccctaaattagatatcactcagttttagcttcttattgtagataatttgtgataaaatcattacgtttgttttggaaataaattttcctttacacaaatcatttgtggtgtatagctttagactcagtgagcagctgtgggacagtgggagtggtgggcagtgcaggtgtgtgtctaatttgaatcagctttgtcccagactactggactactgcttgttttctgttttcagtttgccccatttaaaaaaaaaaaagcgtcatagaattgagaattgaagtcctgtatgctcttcccacatgctttcagaagtggagcatgcctcatttctttctcttgcttttcatcattgtccatatcaggtcattttcagtcaggcacaggaagtgcagttttccactgtagtttggataggttcagtactctaaaataaaaccagtcactgcagatagatttccattgcagaagattcttccataaagaagtgatctgtagaacacttgcttctttatcccaccatatagtcttattagttgtggtaagtagctctcatctgttgttttcatgaaaatgaattctataacaaatactatggtctctgtaattgctctgccctataacagtgctattcattgtatgcaatttatattataaactgaggaagaaagtaggaaagttgtaaacataggcttctagagtaaaccagctagcaacgattgctttaaaagacacaaaaaatgtatacagtaaaaaaagaaaataacttatctcttttagtccatttcaggatggtaggacatgtgatcatgtgaaggagaacgttacttcgtctccttgcttgtgcttaagaataactcattttgttagttggttaattagctgagatttagtgcttttatttctaggtttgtagaacaaaactttgactttttcatgtgctataagaaaatctttataaaatactgtgattagaagttccatatgtagactatccagtaggatagtctttatctgaatctgttttctcacatctattcgttgtaattagaaatgttgagaagaatggtgttacataaaattgttttcatattatatgaatttgttacctttaggtgagaactcaagcactcagtttcttcagtgtttatggcccttttgcttttgaccttgtttttaagtgtactgtgttaatcagtgtctcattcttttacttgtgttacagactttttttaagatgagatgttggccattgttgggaattaggccttttcccatagcaaccagaactggtgctgtttgttacaatggccgatgtagagggctgcatgtactctgcactggcaggctgggaagtgaagggtccagtttctaccatcaaagagcagcttttacactcataaacagctttcctttaaaagaattttatctacatgaattttt

SEQ ID NO: 43117 - DNA, 1910 bp, Homo sapiens
cagaggggatatcgggtccttcttagtgcattcagttgggaggtttgtccaatattgacaagattaactttgatggggcggcgggtgggtaaaagtgatgtttgccaagtctctcctctgtaatgttacagttttaccctttgtaattagtaaagtaatttataggaagatactttgagacgattgggactatgtaaatatcccatttctgatcaaattttcactattgttagcaggcactgaagtttttctaatgccaacactcctgtatttgttagctgtcatgctcctgctgtgataatttacacttctccttcatctatttgttcatttatttatgtcagtgtgggtgtatgaattgttactttatgcaatgaactgtcactgtcattatttatgttgattttagaattgtaccagattgaccagtgagagcccctttaaactggtttctgtgtcctttgatttgttgccattactcttggaacatgtcctcactttctggtgcaagaagatgttcgagctcaccttgttctttctctgtatgggctctggaattggtcctgcttcttggaagctccaggtccttagagtggagatctgggagccagttgtgcccactgcttttgtctgtcctgtcttctgggcccgctcagcacatttttgattcttctacagtgagttgcaaagaaaggaaaatggctcatacagatactgcttttgtactgtattttttgaaataggtcattggtgggaattaggaagtaatttttgctattttgatttcattttttgaattattgtagttgatagttctaagaattaaacattactatttagatatttaaagtgagtccctcatcctctataaacccaaacaaaagattgacagtcattatttgcaaattttgttgaggttctaacctaagtgttgatacatggaaaggcatgagacacagctgagcactgagttgagagctgggcagaaacgtgcatcacatgcttctgaggccgcccatcgccctgtgagaaccactggtctaagaacccatggaaattcctcagcacttcggttggggttagaatttgctactgtcactcctgctccttctctggaggtgccatgtttcatgcctctggcccacttattactttggatgcagctcaagtgggtcgtcttctgggacgcctccctggatggccgctcccacgcacactggttcgtcctttctttgttcctcttctgcagcccgatcttctcatctgaccgtgtgttttcagagccggctcctgatgttactgctacttacctgagtggggttttggtctttttttgtgtgtccaggatgtaaggcagtttcaggtacattataaatgtttaagatatttaaatactgtgttaaaaatggcaacatggcttgcactctcttactgaagcatagcaaaggaggaattagcagtgttcttacccctttccccagtacttctgatgataaaagtagtagttgtttctgttgacatttagatgataccagtaagtaagcaaaatttggaaaaagacaaaaagcatgaatcattactaattcttctgggcattatttcctgcaaaaatttattattgcctcctgaaagtcctcctttctagatttgcaaaatgggatatttcacatcctgttttgctgctgtttgaattgtgttaagtggcaaatctgcagtggtaacttgtttgtggtgaagacccatgcaaaggcagagcctccaccttgtgagtgtcattcaggggaacccacgttttttagcctctaaggtcccggacaggaggatgccgctgttctggtcgcttgatttctggcagaaggtgacttcctaggatgatctctggcagcgcctgggagtggatgagtagcaga

SEQ ID NO: 43118 - DNA, 1053 bp, Homo sapiens
aaaatggttggggaatttgtcaagtgttgtcactctagaataatgctgcttagcgtctgataggtataatcaagagttgagatttctatagagggggttaatcaatttgcttgctagtgaatgcaagtcagtgatagcacttcttcatggggtttaagagtgaaaataagatttgatctgtcaaattgcaggaagccctgacaatatcagtaggtgtttttatctatgcatttaaacgatttgttataaataaatttgtcctgctaatgttgggggctacagacctctttttttttgtaatgattaagctgataaaaagtattccctaagcttacttaattcaaatagtgccttttataaatatacaaaaaaaactagtctaaaaagcgatttttatagcattaaaagataatcatttgtgggaaaaaaatgtttctggtttgaccagagatgacaaaacttcttttctctctcatgtgctttggaggaagtagaagatatttaaaatgctgtctgaacctagtgttgtttgaagagttaaaaagcgaacaccaccctgggaaaattcagtttcaaagcaaacatactttttatgaatagaatgtatagtctgtcacccacatacaacacttatatgtggatgttaagataacagccttctaaaattcaatttgaatcaacagtattttaaaatttacttaactaagtactagtaattttaggatctctttcaatgctgtaattatatgcataactataaccttatagaagacttataaataaatgggtagatttaatttggcttggttcttattcaaatcttgtctgtatgtgtgagtataggtataaaaatatgtaatcaatttgtttctcagatgtaatcagttgaagaatttgttcctggatatttgtactacaacatactaaaatcaaaagtcaaaatcaggaagttgttttggtatatgcagtaaaagggaattgaaagcgttgtttccacattgatcctgccatataaattgggccaagtgtgagtctagcgcgttgcagttcact

SEQ ID NO: 43119 - DNA, 1026 bp, Homo sapiens
tcaaaaacaaaaccactaataaagtaaaatttgaatgtgatcaacagaatccaaagggacaagttgaatcgaagagtcaatgggagaatttgacccatgggtagaagttgttcacctgatccaaactacgctcctggccacaacctaggaatgtgtatgctagttcacattctagtgtgaactggagtaaaacccgggaacttgaaactgttctgtagaattagcttttcctcatgctaagtcaaaagggaataattgttcttttaattagaaaaaaaaattcatttttttcttacaaaatgaaacaaccttttacttatgttcaagccttcattgcttagcatgatcttcagaaaaattcagaagcacagcattatagtagcccttcatttaaagtgatttaattgttgatcccgtttgtttcaactctgtctgaaaatagtttcaaaatatgttagtgtaaactcctcccctggttttggagccacaaagatgttccagcgcttattgtgtgactgaagtttgtttaatgggcacaatgaggatactactacttacctcttagggaggtgtattaggcagttcttgcactgctataaagaaatacctgagactggataatttatgaagagaagaggtttaattggcccagggttctgcaggctttacaggaagcatggtgccggcatctacttggcttctagggaggcctcaggaagcttccaatcatggtggaatgcagagtggggagcaggcgcatttcatggcaaaagcaggagcatggtggtgtggggtggggggcggggcatgtgccatgcactctgaatggccagatcttttgtgaactcagagcttgcttatcaccaaggggatggcctaagccattcacagtcatccgccccatgatccaaacacctcccactaagccccacctccagcactggggatacatttcaacagaagatttggggagggacaaaataccaaaactccatcaggaggactgaaggaaaacaatgtctgtac

SEQ ID NO: 43120 - DNA, 1061 bp, Homo sapiens
tcatgtgctaaatagctgtgacttggtttagattttacaaatatgacagtatcttggattgtatcttcatctcttaatttaaagctggctaactctaatgctgaaacatgcctgctgagctggctgcaaatgagatgcatgaaaaggaacacagttccaggtccactggaaacagggttttccacggaaactcctggtctctgtaggctgacccagcgaagaagctacctgcttgttcagtccgatttctggcctccccgtcaggtgccacctgtggtgcccattgttgccattgccacgcaccgtgcgtcccgtggtgggatctggtgtgtctgggggcagagcactttggaaataagacatttttggatgcacagagtacatgtcagagttctgaggagtccaaagtgctttctttcaagaatctcttacagcctctagcttcatgggtggatttggaaacatgttaacactagggttgatacgggtaattaatgtacatgttttagatctccatctgctgttgacagttcctaaaaatgaatagatgaaaactcttccagaaacatacatgttacttgggtttaattgctgccatcttcattactggcttcctggggagataggtttcatttttattggtgtgtagtaatggaaagttaacccaaagccttggcttctgtttgtgatagagcgggctccctagtggtgcagttaggaatacttcatcagctattagaagcgtacagtgtatgtttaaggatatttcaaaacaattgatcataatctggattaatttgcaggaacacggtagacactagagcattttagatggattaaaatgtggttatcctaatctgagattctcaaaataaatggtgatggagaattctggtccagtaactgtgtagcagtgagtccagatgaaaaaaccctgagcctagtctgttgtgagccacagatgggtgcgcttggcgaggcctcacgtgtgtggcccagtgtcctgctggtcctcctgtctttggggcgatctgcacttccctgtgggcagaagggttgca

SEQ ID NO: 43121 - DNA, 1033 bp, Homo sapiens
attctagtaactgcatgttattttttgtttttgtttttggagacggagtctcgctctgtcgcccaggctggaatgcagtggtgcgatctgggctcaccgcaacctccgcctcccgggttcaagcgattctcctgcctcagcctcgcgagtagctgggactacagacgcgtgccacgcctggctaattttttgtatttttagtagagacgaggtttcactgtgttagccaggatggtcttgatctcctgacctcgtgatccgcccgcctcagcctcccaaagtgctgggattacaggtgtgagccaccgcacccggctgtcactgcatgttaactatactttttaaacccatggaatttgagaacttttctcagtgtagcagtgatgtggtagccagttttgttctcagattagtgttttacttccttaaactacattaataagcctctccagaaagtccatttcaaagacatttatctatagactcagtgaggaagaatgagaagatttcgtagaaatgtcataaccagaagatggtcttccaaaaagtttcgaactgtaaccatgtttcagaaattgtaacttgacaagaacttgattcttcgaagactagatattttttttttctgtctactcataaaccacataggaactctttcgttcttcctgggtgtcatctggaaggaactgaaagaagcaagaaaccgtcatctgtgtttcttgcgggaaagcacattaaagcagcgggaagaaggggagtgggcgcacagcctccctggctgggccctagtgaccgacttctcccgagtcagctttgctcccaaggccaggggggctgccgtcccccagaggctgctgaggagagccctcggagatgcagtgcagaagcctctccctgacgctgctgatttgggggtaggcatggaaatgtagagagtaccgctcagagaagaatctgccctttgcagagcggatctcagcccaccatggaggccctgtgaactcggtggaaggtgggatcatctcggcgtctg

SEQ ID NO: 43122 - DNA, 1056 bp, Homo sapiens
caagggagctgccggccggcgcagaacccccaggagcacaggtctctccgggccgctgtcctgcgtaactgttctccagagcgccagccagccacgggcctgattccagaggagccgaactgacaggacacagcaggctggagttggtgttagattgcttcacattctcttgtcaccaccaagaactccaagtttttcgttttgttttgttttcaaagtgcttacaatgcatgtagacattgttctttgtggtctgactctatgatcgatcacagtgacttagattcaggaaagaacattaacgtcacaagttctaagtagttttcacagcaaagaatatttgataatggttgcacttatcttcagtgcaggttagaagagtcttctcaaccaagcttaactcgagttgtcttctcagccctcaaaaggctcttgtacaaaatgtagattaaaatttgggtgattgttgattgacctttgcataccctggaaagccagggtgtgagtggggtggttgggagtggtgccagttgaacagcagattctgcttcttgtcactgtttcaaaagcgtcaactctgtgttcctagtttcgatgaactccccattcatttttaacacacttcccagataaggcaatgtgctggacaggcacacggcatggccctcggctagagcagggtctgtgatggcctcacctggcagccctctggcctagttcccaccacacatgaggtggtggaatggcctgaaggtggaacagacctgtttttttcctttttaaatgcagtaaggtggcctgtttatcactggctctgtgatacatgacattctttgggaatttggtggccactgcttcagtcacctctgtttttctgaaggctgttccagcagggctgccctgttcatcagcggatgttcactctggcctgccgttccccgtggcatgcggggtgagggtggctttcttccagccccaaatgagacgagtctgtgtcatcattgaaactgcttttcgtaattgcgggtaggttcctgtaggtgagacatattctcc

SEQ ID NO: 43123 - DNA, 1029 bp, Homo sapiens
catcgtggagtcctagaaactctctagtccctgcggctgttcccctcctctgctctctccctggagaggactgccagctcttaagaaacattcctggtgcggtgtctgcagtgccctttgtgggtgacttcaggcttcccgctttcgtggtgctcttcctgggattcgtttttttattaccctccctccctacttgtaggcctcagctatggcttgacgtaatcgcttttagacccaggttggcttcccttcattaagctatgatcctccaccccattttttttttttttaatttggagtgggagggaggggggtgggcgagagaaagctcgaaaggtattattggtttttcaaaaaattagaggtgacgattctaccagggagttgactgataggagtgtgtgcagggcaggaaaggttcggaggcacccgactaccaccactcggaaagccgctagtccagatcgactagggagaggcttagatactttagtgtatttaaagagcatttcagttaactttttcagctatttttaaagtttgtgaatggagtgttattttggacattcttaaatatgaattctccaaaggcatttagccttgacttaatattaaatcctaaggattttatgtaaggtttttttgcaacctatttaattttttttaaatgcctaacttctgaggtgcataagcccgtggtttgtgtactggaactaaagcggaactcactgattcatattggatccccaggtataccttctgctggtagcatatggctggaaaaggccgtttgcctcacacattgtaacctgccttggctagaaaatgcttttaatgtctcaactctctcttttctgtgtcatgttttggtaggaaatctttaagattggcggacggaacaggtattttagtgagacacttctgagtacttgctttttcctttgacttctaaccaactaaaagagaaggaggtcttcatgttgatattttgcttggttttattttactgattttaaaaggtatatagaa

SEQ ID NO: 43124 - DNA, 1068 bp, Homo sapiens
ttcttaacactggtagctcctgtcccattccaagactcactctctcagaccttcccatctccctggctttccatgctcctctccctccacctcctggcttcaactgggtgagggccgtattcctgccactctgctccgcctcagccttgagaactccacgtgggctgggtgggaaggtgctgacgattttcacactgtgtttaccactccatcacctctcaacctttgcttcgacaggtcttcactcacgatttattcctccaggtctttgattggagagagtaactttttaattctgttgttttgcagtttggctctgtaggagtgagtggcgattcaaagatgccggcgtcccgcagtgtgcggttcgtgcccttaaccacccgcttctttgtttcccgcccctctgctttcgcaggagctcttgtgcttgagttcagtgttagtggtagcgtggctcactccacttggaggtggcggccgtctgaccgtgtgttactgctttgccgacggggcctcccggccctgatgcgtgtacactctgcgggctgcaccgggtggctctggttgggggcgaagctgtgttgactgggagagcgttggaaattgagacatggagagatgacgggagtgcgtttctctgggtttgatctccatcctgttttctcccagacacaccacacctaccttgggggaatgccgttgcctgttccacccctttgttcacttcgcgttaactgctgtggtaactttttcaggatctgtgtgaagaatggtaatgacgtagttgaaaggaaaatgtactgttgtgtgtttcatttgtgtgatttcgtaccaaaaaaatgtgtttgaactatattgtatgtaatttggaagtcgtgttaataaaaccctgcagtttccactctggttccgtagccttcattttgtctgggcgctcaggtcgggccacagctcatcttacctgtgtgtccgagacggtgcttccgcacctctgtaaggggccggggtcgggggctgccctcacgctccccagattggccgctgggttgcagcccgcggctttca

SEQ ID NO: 43125 - DNA, 1032 bp, Homo sapiens
tgacgaatgctgttacgaacatgagtgtgcacacgtctttttaagagcctgcttccaattcttctgtgtctgtatgggggcgtggaaatgctgggtcgcatggcagttctatgtttaatttttgagaaactgtcatcctcttttccaccgcagccacaacatttgacatccccaccaacagtgctcaagggtttcttccatttcgccacatcttcaccaacatgtgctattttatgtttctttgtttttgtgtgtgtcatagccaccctaatgagtgtgagggggtgtctcattgtgatttggagttacatttccctaatggttagtgaggttgaacatcttctcatatgcttgtgggtcatttgtttatcttctgtggagaaacacctattcaagttcgttgcccataaaagggattttgtaagcaataaaagactactttgtagatctttttgcagataatttaaaaacctatgtgatatggacaatttcttaggataaacagtgtatcagtatcaactgctgtggagatctaaagctcataccagtcaatctctacagaaaaaaataaaatgatcaaaaaactaggcatgcagaaaggcccacatgttacagaggaattctactaaatgtttggagaccagatataacttatgctgcataaattgttccaaagcatttaaaatgagaaaatttccacatccttttaatgaagcaaatatatcgtttatatctatacctggaagagatagcacagaaaagatgaccaaccgataatgtttatgaatattgatgcaaaaaaatcctaaataaaatactggtgaaccaaatactacattaagaaacacaaggccgcgcgcggtggttcacgtctgtaatcccagcactttgagaggctgaggcaggcgcatcacttgaggtcaggagtttgagaccagcttatccaatgtggagaaaccctgtctctgctaaaaaaaaaaaaaaaaaataagaagaaaatttttttaaaaattagccgggtgtggtggcagg

SEQ ID NO: 43126 - DNA, 1032 bp, Homo sapiens
taagcaacctgacctggtttgtacatcaagatttgaacctagattcattgacttattaacacctgcttttctcacagttccattgctctctgccatgcaataaaacaaaaacaattgcatcaccatgcatgacacatagtaaaacatccaggtccctctgttggagattctgccctgacaacccaccccccttccccactgaattcttctgtagtcctgagtgtgcttgagtatgtgcttgagtggagtatgcaaccaagcatacaaatgaatccaagctcactctctgcccctcaagtttcgggaatggtgcatcaaggctctccagaggaataggactaattagggggtggaggtgtagaaagagagggtgggagaaagatgtattatgaggaattggcccacatgattctggaggctgagaagtcctaagatttgcagatggcaagctggagaccaaagtataagttctaattcgaaagccagcaggctcaagatccaagagctgatagttgagtctgaggccaaaggcaagaaaagaccaatgtgtcagctcaagcaggaggagctccccctactcaggggagggtcagtctctctgttctgctgaggacttcagctgattggatcatgcccacccacattggaagggccatctgctttactcaggccaccaattcaaacattaatctcctccagaagcaccctcacagacacacacagaatattgtttgaccagctatctgggcatcccatggcccagtgaagctgacacataacgttaaccatcacaagtagggacccctgtttttattctcttcttaataggcttggggagaggttggcctctcatgcttctaactcatcagctgttacctgtgggagctactacctactcagcatcgctcagggcactgcattacgccttccaggcaattatacaaggtactgcttgagcttaagcaaactgagagaagatttagcacactttctaaaggtaatatcataaatagacattgattccaatcattt

SEQ ID NO: 43127 - DNA, 1050 bp, Homo sapiens
tttgaaattgtttttaggacactttccctccaaaattagcggtttgtttaatttaggttcttgtatgctactgtgcctgcagtaagttaaggccgagcaaaagcgcagtagatagggctctgttggagttgagcagataccagaggtgcacagctgggtctgaagagctacacaggggaaaacgagatggtgaaatgtattattaatagcattaatgggaatagtgacaggcacagcctggtgagtggaatgtttacccatatactaagcactcaataaatctgatgtatttaagcagcaatgatcagtagcagcttccaccagttcttggaagtttaatatttaaatacacatatggcaaagaaaaaacacaggatttggtcagtgtaaattttttgtaatttatttctcttttcaagcagagtctttgtggaagtggtgaaaagtacatcccacctcatgtgaggcaagctgaggagacagtggacttcaagaaaaaggaagaactagaaaggctgaagaaacatgtaaaaggtctacttaacaggtgaccttgtagtgttgttacactgtgtcacttagagaggttgtctgtttcctaaaatgtaggaattatcccagcaattcaaatagaagtgatggggacagtcgattggatcctttctgttcttggcttgatgcaccgagacccatgagacccatacctcgagaaggagaggatacccgactgttggctactttgaatccctttagggtttgagagcagcccaaatgctcacattgttattctgagaagcaggaaggaaaggggcagaggttctttgtccgtctaaggacagtgttggaaggactggcttatgtcccctctctgcagaaacacattcacctggtcttccatcccccttactcattgctcatgtctgcattttgttgttacccactttaagaacagaacatttaaaaaactgattggaaaccatacaggtggggctttgtcagttacacgtgcccatcagctctttggttttgaggatgtgtgtgtgcatgtga

SEQ ID NO: 43128 - DNA, 1050 bp, Homo sapiens
gcacaggttcacagtgagtaaccttccacgtacatatgtgtgtagtgtccccactacccgttcaaacagagcagccttttctagtgttaggaactaaggatttttgtgccacctaagaaataaaacgttagcattttttctaacaacacgtcctaaggctggaccctgcctatgggatatcaggtcagaatattcaggggagtatcctcacgtatgtttctgtagacttaatccagggtatgcctcagtgtggccacatttcatcttgtaaagacagcaattacattgttttgggattccagaatattatctggttatgaataatatatgctgggttattggggcaagataagaatagttaaggggtcaaaagtgtacataaaaatagaatatattgttggtatggataactctttaattttttaaaattgaactgaaaattcctaattggaaacattgttgctctctgtctttacaattctctgcaggttgagtgaacccaacatggcttccatcagtgggcagctggaggaactgtacatggcccacagcagaaaggacatgaatgacaccctgacctccgctctcatgggtgcctgcgtcactgcctcggccatgcccagcagactgatgatggagcatgttctcttagtcagcatccttcaccacacagttggaatcgaggtacagttgtaccttttctccaggctgtcactagtgtctcatggtgattattttaatgataggcttgataagtgcgtaattgtgtgctgtgggtggttcttgtgtcgattcctttttgttgtgaataaatactctattgtctatgtcatgtagttgtaaagagcattcaggaagtacttgattacttgattttgcttaactttgcttttttgttctgtccattcttttttttttttttttttttgagacagggtctcgctctgtcgtctaggctggagtgcagtggcacgatcacagctgcagactcgagtgatcctcccacctcatcctccagagtagctggaactgcaggcgcacaccaccagg

SEQ ID NO: 43129 - DNA, 1031 bp, Homo sapiens
ccggtgagatcagggcagacctttactgaagcttgctttgcagtgcagcaggcaaagccgctgaagcgctatgtgaaattcccaagatcacgtcttgttaaaagtacacagaacttgttttctgggctcctaggcaagcatgctttctactgcaatgctagtcacattcatttcatttttatattactttctctcaattataatcttaacagttatttagagtcttaccaagtggggctctccaaagcttgctttaagatgcacatatttgccggccgggcgcggtggctcactcgtgtaatcccagcactttgggaggccgaggcgggtggatcacgaggtcaggagatcgagaccagcctggccaaaaaggtgaaaccccgtctctactaaaaatacaaaaaaaaattagccaggcatggtggcgggcgcctgaagtcccagctactccggagactgaggcaggagaatggcgtgaacccagcaggcggagtttgcagtgagccgagatcgcgtcactgcactccagcctgggtgacagagcgagactcagtctcaaaaaaaaaaaaaagatgcacggatttgccaaaatgaagtagccttcttgtcactggggcttctgtgctgaaggcggcatggggtgggtggagatgctgcctgagtacaaaacatgctgtaacgcgcacggtctgtgtcacttagatgaacttgtgcctccgagtcttcctgtgtccagtcgttaaggtcaacgagttagttcatgtaataggcataggaaagagctggcccacaataagcgctcattgaaggctcattatttatgtacagaaggagattttcgtgttttaattctgttcttcctctggctggcttttcctaccactgctgatttctttgttgttgctagataatgttctgatccacatttttccatgtctagcagtagttgcatggtggcagctttttgaaaggcctgtggggcattaggaagctgagggctggagagaggggcacaggcctgagcatctgag

SEQ ID NO: 43130 - DNA, 1030 bp, Homo sapiens
ggaactttcaattctgttttgctcagagcttccgtgtcggcatgagcctgtcatgaaaatcaagaaatagtcagacctgcacgtcagggtggtgtctggtgagtgagagtgctcagaggcagagtgaacgcggctcggttttcctcaggggctgtcccagtggtctgggcgtgctcgtgcagaatgtccgtgtgtggggaagcccatgttgggcgagcgtcctctttgcctcaccccgggtgctaaacttgggctgcaccattggatcatccgatgctttcagagaaggccaagtccccatccggaccaaggaaattgggatgacgtaggtcctttgactctctctgacatgcagccaggatggagactggggcagcctccctgttggagtgagtctttcagcccctgtcatctcaagtccaaatcattgctgacccaggctcttccaggcatgtgctcacctgccactgagcctgaggcagctctgttactctctcctgttgggacagctttccaaacacagcgtgtttggggtgatggactctcaaacacaaaacactgagtttaccgctagttttggcatttttccaaacaggctaaccgtcccaattgccagtgacccattccagtattcatgcaccagaaatgtcatggtcaaaaacaaaaagccaccggtgatggaaggacggaatatgaaccaattaaaagcatttcattagctcttctctcttcatcaggtccgcaacgccggctcaggttctgagacgcagcttcgcgtctcctgggacagtgtcttgagtgcggagcagacgggtcgctggtggattgtggggtccgcctggagtggggccccgatgatcgacaacagtcaccatacgcacctgcagaagcagcttgtggggacggtagggacacccatgctcaaggctgccaggcagaggcacccccctgtgtggtgtgtggtcctggctttacctggagcagctctcttactgttcttgaatggtcactgaaatgtacaaggtttatc

SEQ ID NO: 43131 - DNA, 1014 bp, Homo sapiens
ctcgggaggctgaggtacaagaatcacttgaaccggagagatggaggttgtagtgagctgaagtcatgccactgcactccagcctgggtgacagagcaagactgtctcaaaaaaaaaagtaagaaaatgtgaagtcatcgccatagcaggaaccagctctaagggcacacacgattgagtcagtttattgtcagccgggcacagctgtcgacttttgcagcgacgggggaccccctagatggtcttgtctcctctgacattttgccacattgtaggagaacctgaggaccagagaggttgtgacagggctgggcccctagctggtgtctgccgctgcctccacctcctttacgtggctcgcctctaaccagacccttccaggcgggaagatgttcccctgaaaggtatcagccattaaactttggaagtcgagtgatgttccagtcattgctgttctgttttctaggcttggacttaaggatcagcaggagagagaaatcattcacgttctcatggattgctgccttcaagagaaaacttacaatcccttctatgctttcctggctagcaaattctgtgaatatgaaaggagatttcaggtagcttagtgcggaggcaccagttacgtccgctctactattttttctacacaggctacctggctcaacccacctgcaaaggagttccccaagtcaggaggcccctgatatccccgtcacctggtccacgctggctgccaggccaccttcactgggagcggaagtgggagggctagaggggagtgtcaagggtccaccatgtcctcatgtcacctgcttctgccacagatgcaggcagtgtggccaggccagcaggagcacctcgtcggttcacagtgcaccagtctgttctgatgccccttgctgtggccttttccttagaatgttctgttagtatctgctgatttggggggaagaactgcaccagaaggagattcttgtgaagctgtttgggactatgctctataggcaagaa

SEQ ID NO: 43132 - DNA, 1030 bp, Homo sapiens
cttacgccaaatcctgacaactggaataacttagctcatggaggaggcgttgctccccctccgctcccctgccttgcctttcgctcgcccaggcattgcgctcatcctggaacagcacagatgctaccaccgatgagcgggagaggcgtggcaggagcacaccctcaggcgtagagctttagagatgccccccgccctgcccctccgggctgctctcattccgagtttctctgtgtttcgaccatgcttttgtggtctcgccgcgtcctcgggtccgcaagcgcctgtgatggtgtttggctgcgcacctccctgtgggtagcattcccgtcaccatgcgtttagtcccctcctctagctcgctgacattcagctaagattgcagtgggtccacgttggcgcccgtgagtctgttctgggtagcatcctactgtatacgtatgcctcagtttatatacttacttatcctactgatccgtgtttatttctgattttttgatagttttctagggcagagatatatatggattagtcttctagaagtaaattttatatatatatatatatatatatatatatatatatatatatatatagttttaattaggggatgggtacttttgggaatggaggtaatttatggttcagttctagatactgaatttctgattcataaggtgtatgacccgggaattccacttacactgctgagttgttctcaacggtggctgtggccggccacacctctgccagcagtgtgtaggaattcccaaggcccacatccttgccaacaggtgttcatttcttagctctggaaatagcttcttaaatcgggtagagtgggggaaggggggagattaatttttactctaattaactatattacaaatcattgaaaaagttggctaaatcagtgtaactttatttttctccatgtcctgaccattaggtagttgaattcagtgaattggacaaacccagagtccgttttttacgaaaagtattaagtatcctattaatggaaacagaa

SEQ ID NO: 43133 - DNA, 1048 bp, Homo sapiens
attgcctgtaagtctgttcattttaacaacatacagggctgggcacggtggctcacgcctgtaatcccagcactttgggaggttgcgggtggatcacttgaggtcaggagttcgagaccagcctggccaacatggcaaaaccccgtctctatgaaaaatataaaaattagctgggcatggtggcaggcacctgtaatcccagctactcgggaggctgaggcaggagaatcgcttgaacctgggaggcggatgttgcagtgagcagagatcgtgccattgcactccagcctgggaacaagagtgaaactctcaaaagcagaaacaaaaacccaacatatatgggctgttagatagtaattgtaatttcgtataaatagtaaatgagtacatcttgattaaaagctatgaattcagaattgcttttaaatatatagggggttttttgaaatttattacagtgcaattgaaaatacacttaaaatactgcaggatgcttagtgctcagtgttatgtatgaacttgtggactttacaatgcaggttgagaactgctaatgtatagaatgactaaacagctgtctttcagggtatcatttttaaaggtataaggaacaaactttaatgtattgaaatgcataaataaaatttattttttatattttgtttagagtaacagtgaatgtttattttgaaagaccagcttggccgggcacggtggctcacacctataatgccagcactttgggaggccgaggcaggtggatcacctgaggtcaggagttcgagaccagcctggccaacatggcaaaaccctatctttactaaaaatacaaaaattagccaggcatagtggcaggtgcctgtaatcccagctactcgggaggctgaggcaggagaatcacttcaacccagtggggggaggttgcagtgagctgagattgcgccattgcactccagcctgggcacaagaacaagcctctgtctcaaaaaaaaaaaaaagctttggtggtaaactgaggtctatacctttcctttaccttttaaagaag

SEQ ID NO: 43134 - DNA, 1030 bp, Homo sapiens
actctgtctcaaaaaaaaaaaagagtctaacaagatatgtcccctctaatccagcagaacaaatttctacatttagaaacgtaaaaatttattctagtgaactaatatgcataagagaagatgcatgggaaaggtgatttatggcattacttataatactgaaaaatactgaaacagcctacatgtctaaatacaggacatttgttaaataaccgttaatataacaatgcagtgaaatactgtgcagccatttaaaatggtcatgatgcgtattaatgtctgtcattaatttattaacatacttgtatttatgaacatgatttattgttaatggaaataagtagattacaaaacaggattgcagtctgcatttaaattatgtttatctgaacagtaaagatagctagtttcccagtttcttaatttccattgaataaaagaaagatactagttgcttattgctgtgtaatagagcttaaagcaatacgtttttgttaccttggtcagttctgtggggcaggcatctggatctacttctgcgctggcctgttcacaagcctggaagttagtgctggccgttggcaggagagtcagttctcggccgcttgcggggcttcttagggataccgtgtcctcatggcagctggcctcccgctaagctgctgagcagacagagcagggaggaagggcaaagcctgtggtgactttggtcatggtgtatttgtccagcccactctcggggtgaggggagtcgggctccaccccctaaagggcagcagtagcaaagcgtctgtggacataatcctgaagccaccgtagaagggagcttcaggtttagcttagtcgtaaacgctggcgctgcaaaacaaatacgctgtgttttctgcctcagcctattaggagttaaaaattgtggttttccttcttacctcttaccttctgtatcagtagttattggctacataaataacaacacagtgagttaaaaagcaagcattgtcaacatacattttggtgaatgtgagttcac

SEQ ID NO: 43135 - DNA, 1063 bp, Homo sapiens
acgggtggatcacttgaggtcaggagtttgagaccagcctgaccaacatggtgaaaccttgtctctactaaaaatacagaaacagccgagcgtggtggcacatggtaatcccggcggcggaggttgcagtgagccaagatagccccactgcactccagcctgggccagagcgagactctgtctccaaaaaaataaataccatttgcttgcctgatctaattacagacatgtaaatcagaattctttggttaatatcaaaatttaaaaataaaactgtctaatagagcctaatcttcctcttaaactaagcagcgtagcgtctcgtattcttttgttgtgattataaacagtttcttttaccttgaggaatcaagtttcagataggactttttataaataaacttgttagatttttatgtaattccgtagttacttttttttttcttttttttttctgagatggagtctcgttctatcacccaggctggagtgcagtggcatgatttcggctcactgcaacttctgcctcccaggttcaagtgattctcctgcctcaggcctccaagtagctgagactacaggtgcgcgccaccacgcccagctgatttttgtatttttagtagagacggggttccaccatgtaggtcaggctggtctcgaactcctgacctcaggcgatctgccggccttggcctcccaaagtactgggattacaggtgtgagcccctgcagcagccactttcaaatttaactttaaaaatacagttttcattgtatttaatttggggggatgccttctgtttgtgaccagtgatgctgtttttctgtttagtgatgaaagatttccccttaagataaatatatttaggttaaaaagagtctttttggcaagactaacacaatagttgattgtatcatttgtatggtaccaagtagtagttcattatgccgttatgttttattactgagccagttgatgtcttagttggtgtctgcaaaatttctcccctttaaattttctgtctttcccttgttaattgatctatatcttgagagatacttt

SEQ ID NO: 43136 - DNA, 1080 bp, Homo sapiens
ctaatttttgtatttttagtagagacggggtttcactgtgttggccaggctggtctcgaactcctgacctcatgatctgcccgcctcggcctcccaaagtgctgggattacaggcgtgagccaccgtgcccagcctaaatttatttttttgtaatgattcatatatagtgtctccaatcttgaactttttttttttttttgagacaggatcttgctttgtcactcaggctggagagtggtagctcaatcctggctcactgcagccttgacctcctgggcctaagtgatcctcccacctcagccccctgagtagctgggactacgggcacatactgctgcacccaactatttttaaaaagtttttgtagaggcagggtctcaaactcctgtgctcaagtgattctcctgccttggcttcccaaagtgcagggattacaggcatgagccaccttgcccagcctggacctttaattttattttggatgaaatttacaaaaataaaatgtccatacactaaagactggaacagtctttgggggagaagagggttctgtttaagtatttttcatttatttgaagttttccttttattctttcacttccttctacaaaccaagtcattttgttcaaaacttagttttatttatgaaaaaaaattttcatcaaagaaattgatttcttcattgaaatttttattgagataattgtagattcatatgcagctgttagaaatgatacccagagatggccgggcgcggtggttcacgcctgtaatcccagcactttgggaggccgaggcgggtggatcaggaggtcaggagatcgagaccatcctggctaacacagtgaaaccccgtctctactaaaaaaatacaaaaaattagccgggcgtggtggcgggcgcctgtagtcccagctacttgggaggctgaggcaggagaatggcgtgaacccgggaggcggagcttgcagtgagccgagatcacaccactgcactccagcctgggcgacagagagagagactccatctcaaaaaaaaaaaaaaaaaggaaagaaatgatacccagagacccctgtcca

SEQ ID NO: 43137 - DNA, 1135 bp, Homo sapiens
ttttactgtatatatgtatgtgtgtatgtattttttatatatgacagaatgtgtgtgtatgtgtgtttagctttagaaacatttattctggagccggtgtagaaagagatggactaaaagggcagtttccagactggagaaggaacatgggcttttggttgacttacataatgatatggtttccagaagatctagaaagccgtattataaatataatgttcatatttctttttcttctcttttttttaagatactgagtcttgctctgtgacccaggctggagtgcagtggcaagatcatagctcactgtagccttgacctcctgggctcggtgatcttcctgctctagcctcctgtagctgggactacaggtgcatgccaccatgcccagctaatttttaagatttttacatagatagggtcttgctttgctgccgaggctgatttcaaactatggcctcatgcaatcgcctccctcattttcccaaagtgttgggattacaggcgtgaactgcctcgtctggctgatgatgttgatgtttcatgaagcataaggagaaagctcactgttaagacatgtgtcttaactgtttgtgaagaaggtaaaagaaagacactaatgacatttttattgtttatcctacgttatatcttgtgatagtttctttaaatagctttattttgttgattaatcagcaattgtactatcttatgacctgcttttttaggtagagttttttgttttgttattttaacaattcatttaggcccctgacaaatatttattgagaacttactatgtatgtactaggtattgctctgcttgctgggtatacagatagtgaataagacagacaaggttcctgccgtgaaccaggatgctgaggtggtgacaaaacctgtgagggccacagagtaatgtgattacagctggaagggcctatattagagatggtgtttaggggaagggctctctgaggtggttacagtgaaaagagtttaggcaggattttccaaccttggtgctgacatttttgaacagataattctttgttggggggaactgctctgtacattggaggatgtttagcaacacccatggcctctacccactaaatgccagtagcactccgtt

SEQ ID NO: 43138 - DNA, 1035 bp, Homo sapiens
aggtcctactatgctggtgagattgtaaaatggtattgccattttggaaaacagtgtggcaattcctcaatgataactctacttctaggtttatgctcaagagaaatgaaaacctgtatccacaacaaaacttatatatgaatgttcatagcagccttaattcataatagaccaaagtgggagcagcccagatgtccatcagtagatgaatggaggaattcaacgtggtccatccatacaatggaacattactcttacttagccttaaaaaggaatgaagttctcacatatgctgtaacataggtggatcttgaaaacatcatgctaagtgaagaaaaccagacacagcatattgtatgattccattatatgaagtgtccagaataagcacatccataagatagaagtagatgagtgattgccaggggcaagagaagggacggcaggaaacggggggtgactgcgaatggagacggggcttctggttgtggtgatgaaggtattctaagatcagtggtgatggttgcatagctcttaatatattaaatgcatatttagtgggtgttaccttttaaagaatgaattttatggtatgtgaattacatagctgttagtgtttttaaagtctttactagcaaaatgtcattttcactggattctgaccaattgctccctcactcctccttttattgtttaggaagaaaggcgaaggttgaaaaatgcaataattatccagtcatttattcgaggctatagagacagaaaacagcaagtaagtttgttttaaaatgaggagattagtagggcatgggagagcttattttaaatatggtatctttgtacaccttgttaattgaagtcaatgctgacagtagtattcttcccaataaataattttatttgttctaattattgtgaagatttatagataggtgagtttttaggtaatttttaaataataaaatacaaacatgggcctcaccacagttgaaaatcaaaatagaaggaagtcatgagagatcctttttttttttt

SEQ ID NO: 43139 - DNA, 1065 bp, Homo sapiens
attactgtcagaactagtctttattaactgatttttccaaaatacttagctggaccaaaggtaggaataaagaacctattagaagagagaaccaagaggatcctagatgccagtaattcatattttttctaacttatttctttaataaacttttagtttgaaaaacacattgtatacattctttttgtgaagcaggagtttgcaaactttttatgtaaatggcgagatagcaaatattttagggtttgtggtccacatatggtctctattatgtatttttcttgccttttgcttacaactctttaaaaataaaggaatcatgcttcactcaacagccgtacaaaaaacagccctagggctggtttggcctgtgggttgtagtttgcaaaacacctttaacgtaacttttgaatgtatttgtataagcaaataattttgatacatgatatatgtaaatataattattcttttcccaacttttatttttaaaaatttctaataccagaaacacctgaagcccaggagttcgaggctgcagtgagctgtgattgtgctactgaactccagtttgggcagcagagcaagaccatgtttctttttttattatttatttatttttatttttgagataagagtcttgctctgtcacccaggctggaatgcagtggcgtgatctcggctcactgcaaccactgcctcctgggttcaagcagttctcctgcttcagcctctcaagtagctgggaccacaggcacgtgccaccacgcccagctaatttttgtatttttagtagagatggggttttgccatgttggccaggctggtctcaaactcctgacctcaggtcatccgcctgccttggcctcccaaagtgctgggattacaggcgtgagccaccgtgcccagccaaacccatgtttctttaacaacaagaaaacactcctcctcatctttcctctttaatctcagtaaggtctcatgtattttttaaaatacagtgtgtgacagatgacttttaatggtctgcttataggtagagagcaccctgtaagcagcccgtttttc

SEQ ID NO: 43140 - DNA, 1035 bp, Homo sapiens
ttcaagtgattctcctgcctcagcctcctgagtagctgggactacaggtgcacgccaccacacccagctaatttttgtatttttagtagagacggggtttcactatgttggccaggatggtctcaatctcttgacctcgtgatccacccgcctcggcttcccacagtgctgggattacaggcttgagcccctgtgcccagcccaaactgtttttcttactctctcactcaacactgaaaaattctgtgagcagaaatgtggggttttttttcccacacaccaagcaattcttcagtggacaccaactaggtattctacaattcagttcaattctgatgccgtccacccggagataatgtcagatcccatcatctgagggcttagtcctgcaagactacacccacttcagaggccgattacaagtagtaggttgtcacctatacttctgaccaacctgcaaaaatgggggttcctcagcccctccttgggattggtaattgactaagacagttcacagaactcgggaagtcgaggtgtgcgggaatggggagcttccatgccttctccaggcactccacactctcggcacctccctgtgttgagctcattgtgtcttcctgttgagttttatggtgcttcttctccagtgtccctcccacagacagccccttggaagttggtgcgtggggctgaaagttccaaccctctgatcacttggtttttctggtgaaaagccccattctgagtcccctagatggcctcaccataagtcacctcaagtatgatcacaaagggctggctatgaataacaagagactctttatctttcaagaaattacaagagttgtaggtgctttctgacatgaacggggacaaaatctaaatatgtttcctattataacacagttagaattttaaaaataagatctggtcagaaatgcctctctgcgtgtgaggaaaaatggcgtcttcgttttccattttaaaaaataatgtttaactaaaatacgttttaactgattgttttgcaaaggg

SEQ ID NO: 43141 - DNA, 1115 bp, Homo sapiens
aggcggaggttgcagtgagccgagattgtgccactcagtccagtctgggtgacagagcaagactgtctcaaaaaaaaaaaaaatttatgtaatactctcacttattttgcttaaactgtgatctcaaattaaaatgaaaatgccattagatgatgatagtttcactatgtatggttgtcttagtgcagcttgatgtaaaaaaaaaaagtaggaaatgaagtttttttgaaatgtaaatactgaagctactgttatatcataggcaaaaaccgggtattcagagtttactgtgttaggcaaaatggatgcctactgttgactggatccctagaggatttcacactaagtgtactgtgatgtagataattttgagatgatgcctagctttctttgcccgaagaaaaatgtgatttcgtatatgtttgtagtgtagaggacgttccagttgagcacatttatggagactggttgttctggtatgttctaggaggatggcagactgtcagtatcatacataacagaggaatgcctgaagaagctggacacaaagcagcagaccaacaccctgctcaacctggtgtggagggactctgcgagcgaggaggtcttcaccaccatggcctccgtctgccacacgctgatggtgcagcaccgcatgatggtacccaaagtcaggcaagtgtccgtgggcgtctgtgccagggggtgccagccagagaacataccttcctccctgggaattgctctcctcttaagttttgtctgctcttttctggtagagattgatgtaggatattctactgtccaagcgtttcataaaaaataatttgtgtttttcttttctaaaccaacaaatactgagaccttttcctggcccgtgaggctctcaagtaccctatctgtaatattttctgtagtaccttatgaatgtgagtttattcacccatctgaaaggctggactcatacctgcattagtgaaacactatgttacatatctttttaggcttttttcatagtactcgtgttttatggggtttttttttttcttcttcttcttcagacagcatctcactctgttgcccagagtgcagtggtgtgatcatagctcactgca

SEQ ID NO: 43142 - DNA, 1047 bp, Homo sapiens
tctcctgaccttgtgatccgcctgcctcggcctcccaaagtgctgggattacagacatgagccaccacacccagccttcatagtacccttttaattagattgtccttgacaatttatccctaaaagtaaatttttgtttttcagcctttgaaataaacttttggttcagacaaaacaaaacctgcaagttaaaaatatggcctgtttgtgcttaaataattgtgacaataatcttgaactgttttctctccctccaatttgagtgatatgttagtggtttcttgagaatttaacagaaaagtattcaattggatacagagtaaaatatatgtagtagttctgctaggacccaagggactgatgttgcataggcaaaagctgtcagtaagtaagcaggtctgacgttaattcacgttaccctacagaattctctttgtttttataaaatgccatcccatcatatgaaaagagtgatttctgttggctaagaaagcattctttgaaatgaactgtaagtaaggaacccatcggttgaaatggccttgtaaacactaatgtggccaactaatgaggtgctgtcttcactcactggtgtttattaccatcggaggaagtagatgtcagtgaaactgtggctcctagattaggtccttagctctttgccggctaattgcatgagagcaggatgtgagatctgaggatcgcagcagctgaaccaggacacttgcttttattgtcgcacaacccattgctgtggatggtaattgctggatttcaatgcatcactgccctgggctgaggtttactagagaaccgcttccaaaaggtgtttaatgggtgaaggaactttctgtgtaggcttgattttatgagtacagcacctatttcctctaagaaactactctaggaattttatttatggcttaaacatattaggttctagtatttagaaagagcaagtaggcttactctaactgttacagattttaactgctttcaattttgatttttttaaaaaagtatttgaaagatgattagtatattccc

SEQ ID NO: 43143 - DNA, 1157 bp, Homo sapiens
ttataatcaatagaattaataagctattgattcatgttaaaaattgcattctctttcatgaagttcaaataacattgatgagcttttaaacatttcagcacatagtgatcttaaaattaaatgtattttgaaatcctatctagattataaactaatttccactagctgttgttagacacatcaaataaataaaatagacttgccttcgtcagcttcagcaatatcattcatagttctgaatcttctaagaattcttagaacatttgtgaatgataattgtttcccgggaaatatgagtacacttggaagaagcatattccaccaaagtgattctaaatccctaccacgtttttaaagttttcttttaagcttgttaagaaatagtaagagaaggggcttccttttcgatccgccatctgcggtggagccgccaccaaaatgcagatttccataaaaacccttacggggaagaccatcaccctcaaggttgaacccttggatatgatagaaaatgtaaaggccaagatccaggataaggaaggaattcctcctgatcagcaaagactgatctttgctggcaagcaactggaagatggatgtactgtctgactacaacattcaaaaggagcttactcttcatcttgtgttgagacttcgtggtggtgctaagaaaaggaaggagtcttaccccactcccaagaagaataagcgcaagagaaagaaggggaagctggctgtcctgaagtattagaaggtggatgagaatgacaaaatgagctgccttcgtcgagagtgcccttctgatgaatgtggtgctggagtgtttatggcaagtcactttgacagacattattgtggcaaatgttgtctgactactgcttcaacaaaccagaagacaagtaactgcgtatgagttaataaaagacatgaacttaaaaaaaaaaaaaagaagggattatcaaagaagacatttgaggtagtgaatgccactttcccccattttaatttaaactgtagcatgagggaaagtatgttttttgaatctgtaaatcttttaattaaagaaaatcagttgccagtaagaagggctggctgtttaaattggttctggtgtcaatgctggaatgctagcgcgcctgagtgtctaaggcttacct

SEQ ID NO: 43144 - DNA, 1048 bp, Homo sapiens
aatttcagaagaacaaattattgcctttgtacttgtgtgctataagagttcgacagatcattgggtgtctcgctgtttcttttacctgtggcacctggacttagaggggaattctcagaggatgccatgctgtggtggccttgactccttgtgtgggagccagtgtcttccattgtgttctctttcataactcaagagagtccccgtggaaaactggcctgaatttatgacccggcttactgattaactcataggattgttacagctaaataaagcttaatgagtaatttttaatctatcccactatgtgggagaagaatatcacttctttacattttagaagtagagccccagactaaataaccttcagaaatttgtcttttttttttttttttggtgaaaacattctttattagtaagcagacatttgaaactttttgattacatgcatcatgcaaaatgactgacctcacacatggttgtctgttcattgtgacatcttttttgagatgattacaaatttaagatgactgcagtagtaaaaataattcatgaaaatgactctcaatgaagcaaaacactacatagcacacatgaaatactgttcatccctcctggatgtttaattctctcctaacgtaaatctctattttggaagactattatttacaaaaatggcagttgtttttgtatgtgcatctataggcactgaactgatatgaacaaaatttcaaataattttacaaggtttggttgttttttcctgttttgttaatccaaaacaggacaatgccctttgatttacaatgttcagttcttttaagaaatcattttctttggaagatgattttgacccatgaaaaagttgttttacccctggtaatctttttgaaatggggctggctgttatacattatacaggttgttttcagttaagtgaaaaggagttgggcttgtcttgagaagaattcctctaaattatggcactgagaaaacttctctgcagtggtgggctcaccacttccatcctgtggtagttctggtagca

SEQ ID NO: 43145 - DNA, 2400 bp, Homo sapiens
aatcaaactagacacttttcagtatttactacagacaaattttcaacttatttgatcaaaagatttcttaatggctgttagtcaatgctgcatcaagaaactttagtgcaaattttaccaaatgcatttatcaaaaaggggttttcatttttttctgcaaacaaaacattaacactaagtatgtaacaaactgatttgcctacaaatccaaaaactatcaacataagccagtccttcaactaaaaactcaaacatacttatcttaaggtctattcctaatccagatttgtctatattcaggttggaagacagaataacaataaaaccaaaatttatctgtaaaaataataaaaataatttgtttttttttttttttaatgctggaggtattgtccttattaatacgacacatcatctgttcccacatggtactgcatggataggaacaatattattttagttgatggagtaacacagtgttaagaatatctgcttctagcagtgtcaggctttcatctgttagctctttattcggaaatgaagtcacaagaataaagtcaagagctgcaaattcaggacaagactgtacaataaagttccggacatccaggatcctgtgtgtactattgaatctttgtatcaaacgactcccatctgctaacctgatttgaatttttgttgttggcactgaatcatcaataagaacaaccgcgttaagtattgatttatcctcctcttctggagaggaaggtgtactgactatttcaggtgtaagccttccaagtttttgcccttctccactaaaagccttgaacctcaatctaggttttatgtattcttgatcctgatggtcctccatatcccaattcacttggccaccatgaacaaggcactgaagctccagggggatctctcctcttttaacaaactccagaaattgagcatttgttggttcattgtaaggtctcaattctccatcatctaaactgaaaccattgctccacagtttaagcaaaatctgaacatcttgtagctgattttctccatgcatatattcagaccgcttacaaaaggaattacccaatctgtatcctccacctgtaaatgacattgaggtggtgtccgtgggctcttgaagactgcagctttaggtctgtcagacttggaagatttgcgcttcacttcatcttcatacagttcttccaaggccagtttatttcttgatatgtcatccctttggctgttttcaagtttctttgcaggttcttcacattaagttctgcaaatcctgtgcgctcggaggccacagcctggaagatctcctctcctgctcaccgagctcagggccgccgccctccgccatcttccgctggctgtatttgtctttttttttttatttttttcgacagggagtcttgttctgtcacccaggctgaagtgcagtggcgccatctcggctcactgcaacctccacctccaaggttcaagcgattctcctgcctcagcctcctgagcagctgggattacaggcatgcgccaccacacctagcaaatttttgtatttttagtagagacggggtttcaccatgttgaccaggctggtctcgaacccctgacctcaggtggttacccaccttggcctcccaaagtgctaggattacaggcgtgagcacctggcccagaaatttatttttaaaagtttaatagtttgttttattattgcttattgagtgatttagtaaatattctgtcagggttagcttgaaatacaaattttaaaatgtgtattttaaatgtgtatttctgaaaatggtatttcagaaatatgtatacattcacatggaaagatgttaattataatcttagtgacaaactcttagaacctgtaggaagaactcatttttgtttctatgtctacacacaagggtctggatggatttatagcagggtattaactgatgatttctgggtagataagatgccatgtggctaacattcttttgccttgttttgttttaataacattttttaaaaactcaatttctcaactgaagagaaaataagcaaataataccttttcaaattattttgaaagttcgtatttttcgtagcttttttcttactcttttttccgtatgactgttgcgtattcttagcaaataaaactccacaaaggcaagaaaaaacgttaacactcttatcaggcatatggtaaggattttaaatatctcagagatagggtatctattatcattttctaatacagcttcccttttcaacagtatagtctttttcagagtgaattttttttatttttattttattttattttatttttttgagtctgagtcttgttctgtcacccaggctggagtgtaatggtgtgatctcggctcactg

SEQ ID NO: 43146 - DNA, 1047 bp, Homo sapiens
agcttagcctagcctacctaaaacgtgctcaaaatatgtgcattagcctacagctaggcaaaatcatcaaacactaggccaattttataataaagtgttgaatgtccatgtaatttattgaatattgtactgaaagcgtaaaaacagaatggtttatggatactcgaagtatggtttctactgaatgggaatcacctttgaccatcttgaagttgcaaaatcctaaactgaaccattgtaagtcaggcaccatctgtaaatgtctcatatttcctactgggaataaagtttaaaatgaaataactgattttctgaaactggcactcaatttaagtcaaaaatagtttaacagtaaggcttgcattgctaggacttacagctttagtgggcagaagtatcatcaggggagcgtgttaaaatgcatattctcctgagacgagattgcgccattgcactccagcctgggtaacaagagggaaactttgtttcaaaaaaaaaaaaaaaaaaaatttcagcttctctgttcctgccctaagacttgggttagaaaccctggagactgcaacctcacaagcttatcaggtaatcgaggtacagatggtttgggggccaaccgagaagcactattcttcaccccagtctagcagaccacatttaaacaatctccagatggatagtgaattttgacacatcagacattttgcaaataacatctttattcatttacctcattttcagtacttgctattgaaatcagccagtttagtttccttcttcttgaagatgagggaacccatagccagctggtactgttttccattaggcatcccttgactacaacataacatagagatgctttgcccagatgtcttcagtgtgggcagtaggtgctggtgttggctgtttgataaataatctcaaaacagtctacagtagtattctgaaaacctgttaaagcaagaatccgttcttaaaagctctttgcaagggtgggggacattggacgaggaggaggagtggttcccacaggcacgcaatttgaaaacc

SEQ ID NO: 43147 - DNA, 1032 bp, Homo sapiens
gtttatgcatttatcaaatttataaactcctcttgaagtgtaatttagagctataattactttagcttgatgagataggaaatcctgttttgagatgtctgtgtgcatccaccaaacttaacaggagtttcctcctgtgatagggaaacaggaggaagtggcagggaatgaggaggaaggttcccatgccctcattatccatatgtctggagagagagagagagagagagagagagccatactatgagtgatttttttacttccttagtggttaagttgtattttttcagttccaaaaagctatttttaaaaagtaataaagcaacagcagtgccctgttaatataatcctaacatgcgaccatttgactatgttacaaccaagagatccaaagcttgtagcgctgtgccttatccttttctgttattgaagattttgattgattttgtttttgttttttgactactaaagtggatgctatatgcagtaattttatagtgttttaaatatgtgctgaagaatactgtttttcaaaatactccagtttttaacccgtttgtgccagaggttgcgaattttttgtgtgaaaaatcaggccttggcaatgaccttgagcagtagaatataaatcccacaagcttagcgttccagtaatggaacactaggcataaatgggttaacaagtggtaactaagggctatataaaatttggttaacccttgacagcagcagtgcataccagatacttcatgactttcataggttagagtgttttattctcagttatttgaacactcacagtattcatcccacccatagtgacacagctctatgctaagggatcataaatgaattcacacagggtgcctgttcctgcagtatcaccacgtagtgaaggagacatgcattcagctaatgacagtgggaaacagcaaaccacagaggccggtcctgtggaagcacacaggagagaagcaccagctgctgcgtcatctggcacttgactcacttgaggaaaacggttgttttcca

SEQ ID NO: 43148 - DNA, 1762 bp, Homo sapiens
ggactagtcatgccatatttagcaaataaaaagacaggtcacctagttaaaattgaattacggataaatcacaattactttaaaaaatgtagttatgtcccatgcaatattgtggacatactttaaagaaagcaatattttggacatacttctactaaaaatgtattatttgatataaataaatataaacatattatttgatgtttattaaaccatccattaccacagtgccgtctatcttgatatcccatccttaacataactcccttggctggactcacttttttaccttctcctttcctcctcctttctccccatctccctccaccgcctttttttgattgaccaaggatccatggtactggcatgttatattggtaacatgtgattacttcttttttcatatttaggataggaaatatgaaagaggatacactatattgaaatttttttaacatttaattgtataataatttagtagaagaatgtaaatgagaacttaattgtctcatataatttgataatgtttgtaatctgtagaaaatatatgttcttatgaacagagattgaatagaaatagatatctaggagttaggcagacctgatctttccgttgcctgacctggagcaagttaccccctcaataaagctaagtttccttggggatgataaattcatggggaccccaggattccatgggatgatgcaattaaatatgtaaatatgtcagaaaggatgacctttgttaacggttggggtgattatgaaagggctaatttcagcatggtaactattaaatctggatttatttaaagtatcaatttaattggtcacaaaaatggaaagaccagacacgaacatcttcatacaaaaagattgtacttctgttccttttagaagggtgtgtgctctgtgtggactacctgaatttatcccatacaaggatagcacatgtaattagcatagctcattgagatttcatctttgcttttgaagagtaaaatgaatgactttcaagaattagtgtattaggtcaatgacagtactttgtttcagccaaacagttaaccagacagaactaataatgaggctctccccaggctgcctaggctgcataagaaaccattaattgtaagatgttgtatgtgcagctaagcccctgagcaacaccatagagtcaagggtcaaggaatagctgactccagtttaccctgattagttcactaaacatttccactcgttgaagaaggacggtatttccatagcgttgtgataggttttaaaatgccacaagagaatcgccacttctaaattggcacgaaatacccaccacttataaaggtgcatctttgatcttgagtgggtttttactatgcagttttatctgcatgaccaaattgctcgaataacactttttctctgtccacgggtaggtcattcaaggggtgtccacattgtagtggcctgagatatcaacccaagtacccttccccttttttcttgggcacacagaatttctggtatccctgcatgccttggatttgcatttcataaaataagcatttgtatttcattgtatgtaaatgctaaattatggaattttaaagggaaatctcaacaattgattgtgtgatctttataatgtataatatatccagtatagattagatatattataaatttatatattatatatactagatacatagtatatattatacaatttataactataatataaattatataaattagtatatat

SEQ ID NO: 43149 - DNA, 1119 bp, Homo sapiens
gctgaggcaggtggcttgcttaagctcaggagttcaagaccagtctgggcaagatagcaaaaccccatctctacaaaaagtacaaaaattaaccaggcgtgatggtatacacctgtagtcccagctactcaggaggctgaggtgggaggatcgcttgaaaccagaaggtggaggtcgcagtgggctgaggtcgcaccactgcattccagcctgggtgacagagtgagaccgtgtatcaaaaaataaaaaattgtaaggaccaaaaataagggatgagaggaactgacagatgaaaaataacttgagaaaatatactgtgtctgttttatttgaatactgcctcaaccaaattgaaaaaaaaactagaaagtgaatttttgataataataacttaatttttaaagtgatctattttgcttcataaagcaattatattattttactatgtttagatattatgcaccatcaaataaaacaattagagatttctttggggcatattagaaaacatagttaactgtaaaagtatgaaaggacagctagcatgagagaggacctgaaaaggtaaagcaaaaggggacatgaaggtatgaggtcagagagagggcccagcccacggtagagaaatgtccagcaccaattctgttcaagtgtgatcaggtcaaagtgtgtgctagagcacaggggagttctgaaccaggattgcccccgacaggtcactcagctctatgtgccagcatccagacatgtgtggaggttccggcggatggggaggataggcccgctgcagtccaccctggacggtgagttctctaggacacagggttactgaggtatgaattacatgctgtcaaattcactcctttaatctacagatctgttatttttcataaacttatacagccatgtcactcccagcaggagctaccatgtagaaaagtttcatcacccacaaaattgcctctagctccattgcggccacctcttcagcagccacccatttctgttttgtcctgtcactttgccttttgcaaaaggcctccaaagggaaccatgctgtgtagtctgctcctggctccttttggtcagcacgctgcatttgagggtgctgtgtgggtt

SEQ ID NO: 43150 - DNA, 1025 bp, Homo sapiens
catgagccaatgtgcctggccggatttttaaaatttattttaaactgggcaaaggagcagctttagaaatatttaaatatgatatacattatatattatctatacatttattgataaaaatcaagatttgataccttgactattagcatttatttcagaatttatgaagatacaaaagataagatttagcagtttattctttggtaggttgtaagaggtcttttgtttctaataaccttacagctttccttgtttgttagatctttcagaggttgatttatgcagataagcaagaagttcaaggagatggtccatttctggatggaattaatgtcacaataagaagaaattacatttatgaagatgcttatgacaaactttctccagaaaatggtatatataattctttctgtgtattatttggcaggtggaggctagggaattgttttagaaaatggtggttctttaaaaattagtgtccatcatcttgttccataatgacttaaaaactgaaatgtgaggctgggcatggcagctcacacctataatcccagcactttgggaggctgaggtgagaggattgcttgtgctcaggagttagaggccagcctgggcaacatactgagaccctgcctcaacaacaaaaaaagtgagcttatctggatgtgttagcgtgcccctgttgtccctgctctgcaaaaggctgaggcgggaggatggcttgagcctgggaagtgaaggctgcagtcgaactctgattgtgctactgctcaggccttggcagtagagccagacccagtctccaaaaaaaagtgtagcaagtcagatttgggagacatgttatcaagtaatatttctaaaattgacagttactacaacagaagcctttaaaaaatattaattatttttaaagggcaagaaagtaaccagttccccacctcctgttgtctgcccctaaaatttagtttgcaagctgttgttctaaaaatctcgatggtagccatttatattctgcgtttttgtat

SEQ ID NO: 43151 - DNA, 1058 bp, Homo sapiens
gaggaccaattccctgagagtttgtgggggcggaggttgcagtgagccgagatcgtgccactgcactccagcctgggtgacggagcaagactctgtctcaaaaaataatgataatatcattgctgttttgagtcctatgttaaaatgtccctaagatcctcacaccccttccttaagccttcctgtaaggctagttgatgttattgcttgcttgtaacatctttcctcctcaccctcccatttttttttaacagagcctgatttgaaaaagcggatccgtgtgcacttgctcaatgcccatggcctggatgaagctggcattgatggtggtggtattttcagagagtttttaaatgaactactgaagtcaggatttaaccccaaccaggggttctttaagactactaatgaagggcttctgtaccccaacccggctgctcagatgcttgtgggagattcttttgccagacattactacttcctaggcagaatgcttggaaaggtaaagtaaccttcatataaaaatagacctcggaccaaaagatgttgacattttatgtttatgtgtggttgttatccaggtttaccataaaatactgtttgttttaaatttggatgctaaatgttgcaaaagcactgcacgaaacaaatttgtatggttgtaagtaggtgctatggtttgaatgtcccctccaaactcatgttgaaacttgatccccagtgtgccagtattcagaggtggaatctttaagaggtgattagatcatgtgagctcggccgtcatgaatggatgagtggtttattgtgggaagggccctggtgactttttacaggagggagcccctagctttgtgatgccctgtgccgcctccggactctgcagagtccccaccaatgagaagacctcaccaggggctgcctctggaccatgggctcctggccttccagctataagaaatggatttcagtttttattaattactcagtttcaggtcttctgttataagcagtcaaaacggactaagacagtaagttactgcctagtgactattagttta

SEQ ID NO: 43152 - DNA, 1045 bp, Homo sapiens
atcgttgtcagcacttacttagtgttgtctttttcattacagccattctagtgggtgggaattggtatctcattgtggttttaatttccctggtgactaataatgttgaccatcttttcatgtgcttcatgacttctgttgagaaatgtctattcaagtccattgcctatttttttattggattgtcttttattattaagtccctgcaatgcaatgaattatgaaatttatattctctgaggaagctgaaacattgtcagataaatgatttgcaagtattttcttctctggattgtctcttcactttcatgatgatttcctttgaagaacgaacatttttaattttgaagtctaacgtgtttttttcttttattgcttgtttttgatgtcttatccattccctgacctaaaatcacaaagatttacacctgtatgttcttctgacggtgttgtagttttagctcttacattttggtctttgatcctttttgagttaatttttgtagattgtatgagttaggcatcctcatattcttggcacccttgttgaaaattagttgaccgtacacgtaacactctgggtctgcccttatgcagtatggtcttgattactgtagctttgcagtatggggtgtgtggatttattaatagcagatgggagtagaaccgcagccttgttaagcagggataatgggaaggaatcagtctatcctggatatagaataattcccctttatttgtgtctctttgaaatgcattgtcgtagccccagttatttctttgttcagactcccagtgattttaagtgctcttcaggtttgagaaagggctccaacctgacttcactaccgtaacggtatgtgttatatcatcatcttcaggctcaccgtatttcaggtggcagatttcaggtgttgatttgatgttgatttgtgagttggctttggtggcagttttcagatagcatctctctctttgttgatggtcacacagcctacttctcagtttcagcttcccctggaggatgtacatttcataattcatt

SEQ ID NO: 43153 - DNA, 1034 bp, Homo sapiens
attgtgatatttattgggtcataatgtatttaaattttctttaatgcatatgttagtgattgtttactgtgataaagtgcaaagaggtcttcaagagtgatcctgcagaggaagaattacctcatgtcactggtcacttctcaattaaaagttccattagcaaatgattcttgcttctggtgtgggtcatgattgcattttgtcgcctgtaagtcaggctgcagacagggaataaataaacagcccaaggatgtggtaatgtcatcttgaacttttttttacagatagaagcacctaggtccatttaagccaattaagttcagaatatttattgaggttaatcctttatcatatttgaattctatttgaaaatggctttttttcttgctttaggatattgatttaattgggatggcatgcctataaatcagattatttgatatgatcttggttatatatttgaaaatttcaattagattgtataactttggcgtggtttataattttttatcgcggtagaattcagtgtgcatttaatgtattctgtagtgtaatattggcacttaacagtttatcttgagattttcaaaagttggaaagtttctttttctccatcattagcatccttttgtaaaatgctcactgaatttgctgaggctttaaacatctaaattgaggtgaatactagtcattttggttgccttagtccttaaaggggcagagcttctcttgtataataccttgttttgaaccctaaactcttttttttttctctttttttgagatggagtctcactctgttgcccaggctggagtgcagtggtgcgatcttggctcactgcaacctccacctcccgggttcaagcgattctcctgcctcagcctcccgagtagctgggattacaggtatccaccaccatgcccggctaatttttgtatttttagtagagacggggtttcatcatgttggccaagctggtctcgaaatcctgacctcaggtgatctgcccatctcagccttccaaagtgctggc

SEQ ID NO: 43154 - DNA, 1056 bp, Homo sapiens
ggagatgtattcctgaattcagttgattgctgcacctaaataagatttctcggctgggtgcagtggctcatgcctgtaatcccaacactttgggaggccgaggtgggcagatcaccaggtcaggagatcgagaccatcctggctaacacggtgaaaccccatctctactaaaaatacaaaaaattagccgggcgtggtggcgggcgcctgtagtcccagctactcaggaggctgaggcaggagaatggcgtgaacccgggaggcggagcttgcagtgagccgagattgcgccactgcactccagcctgggcgacagagcgagactccgtctcaaaaaaaaagaaaagatttctcactgtaggtttagcaccacaaggtaaattctttctgcccttggattaagtaggtcttgcttactattgagttattccttcctttttatttttctcatcacgcccaagcaatagttaaacatctgaaattcatgagaagaatggatcagtatggtattgagaccattctgttttttctgggccatgttaatttgtcaccatgaagattagaagcacacactcttgctggccccacttaaagtctgctgtttatctttggctcttatttgtgcaataaagacaacaaataatctaaaaaatagtgttgggtgcagtagctcatacctgtagtcccagcactttgggaggccgaggtgggaagaacacttaagcccaggagttcaagaccatcctaggcatacatagggagacctggtctctaccactaaaaaaaaaaaaaaagtagccaggcatggtggtgtgtgtctgtagtcccagctacttgggaggctgaggtgggaggattgcttgagcctgaaatgtagaggctgcagtgagcagtgatggcaccaccacactccagcctgggtgacagagaccctgtctcaaaataataataaaatagggcccatgtaaatccttttaaacatttaaatattcaatttaatttagatttagatttagcaaatgtaactttatgaaataaaagccaaatgaaggtata

SEQ ID NO: 43155 - DNA, 1022 bp, Homo sapiens
gagatcgtgccactgcacactccagcccgggcaacagagggagactccgtctcaaaaaaaaaaaaaaaaaaaaaacagtgttcttcacaatgtctgtcattttctgaaacaaaaagccagtggtactctagatgtttgcttttgggaaaacctcaacagctattttctcattttctccagtcgtatcagtggacgagtccttaaaatgtgaatctcaaggggtgtctgagcatgccctgttggagtgtataagttctggaatacttatttaaggatgcgcattttatagactacacatacgaagtagattattactaaatacggtaactggttggaagctgtgactaagcaaaggactcactccccacaggagcagtggctcacagttgaaacgtttctcctttgctggaagcttgcagaagcacagtcccggctctctggaagctacttactcccatgttattaattcacacagatcgctctaatatttacagtgcatgatatggttgggtgatggcctctaggttggaagggtgacttctgagttgactgtctcatggatgaatgactaccccataaagttttgttttgattttggtattccctgggtagcaccatagcacttgaatcttaaaacagtaggataaagagggtctgggtctatcacagcatctcctgcagcacagctcatagtagtcatttgcaaggtatggttagtccagccttcaccttccctctctctgtccttcctgccgtccctcattctcgggcaaaaattccagtgctgcacctccagacagtaggaaggcccgtgactgcctctgttgagagggtttctttctctaaaactgttctccacctgttctccacacccccgggggtaattagactacctctgtttgacctgggaaaataggatcactgtaaatacacatctctctgaagactggatattttctctttttttgagacggagtttttgctcttgttgcccagactggagtgcagtggcacaatctcgg

SEQ ID NO: 43156 - DNA, 1134 bp, Homo sapiens
ccagctactcgggaggctgaagcacaagaatctcttgaacccagatggtggaggttgcactgagccaagattgctccactgcactccagtgtgggtgacagagtgagaccttgtctcaaaaaaaaaaaaagttatagaaatgtcagttttctctgatcaggcaaggtaattgggagccttggaagttcctttaactgataacttcactggtcctttgtcttccaaatcatacaagtacatcatcatttattacctgcctctaatccatttaaaggaaggggtggtattttatacattgaaatataatagctagcctcctgaggcttggttaacagatggactgtcagctgagtacaagcaaaggaattaagataatgaacacaatctttaatcagaatgaagacaatggaattgaaagcccattcttaggcttgatggttccaaaccttaggaagtgaattattgagaataattgtatcatcctttaaaatgtgaaacgttaaaagaagcagatctggtaagttgaacgttcaagttcaatttgaacattctgtataaaatgagaaccagcaaacgagtctcctataaccatcagctgtaggatgacttaagtcaggctctctagcacatttgtgaaacaatctttctgtaaatggtaagagactgggacatcagtgccattgcccagaggcagcagtcttgtctgttactctgggaatattaaagctaccaggaaaactgaaggctgtgaaaagaaaagaatggaaaggtagggaagttgaaatgtctttgttcatttattttgggcttattttatattttcattgtccacagtataggttgccctcatctaaccccaggaatgcagttggggtgtttttgttgtttttttgttttgttttagaaatacaggtgggggtcttgctttatctcaaactcctgggcttaagggatcctcttgccttggcctcccacagtgctgggattagaggcgtgagccactatacccggcctgtttttttggttttcttaataaatactttttaaaaatttttttatttaaaatacactctttataaattatgattacatgtttatattgtattttgctcgtgtactgttttgtatttatga

SEQ ID NO: 43157 - DNA, 1611 bp, Homo sapiens
agaagctgagattatgggtgcgcgccacaacatccagcgaatttttgtacatttggtagagacagggtttcaccatgttggccaggctgctctcgaactcccgacctcaagtgatccgccagcccgggcctcccaaagtgctgggattacaggtgtgagccactgtgcctggccctgctttgaccctccttaagttgctctccccttctcgtactttgcccatcgcctccacataattggcggtgggtggggtgggggcggggggaggcagagaattccgcttttgcatttacaatcggtccttcatatctgtgggttctgtccacatccatggcttcaaccaattgcagattttaaatatttgaggaaaaagcaatggttgtgtctgcactgaatgtgtgctaagcaatatagtgtcacagccatttacacagcctcggcatgagatgggattgtaccagtgctctagagatcatggaagtgcacagcacgtacacaggtgatacacacatgccacgccgttttagagaagggacttgaggatccatggactttagtttccgtgggtgtctggaccaatccctgtgggtcctgaagggtgggtgtgctttgcatttcataaagcatgtgttcattttgccataggaggctattctgcagaccatcctgttattaaggtcttctggagagttgtggaagggttcactgatgaagaaaagcgcaaactgctgaagtttgtaacaagctgctctcgaccccctctcttggggtttaaggtacacaactttcatgacatttgctttaaagaccacttcataataagaaaggcagcagaacattcagtagggttaaatgaagtccttttacatacacttttgtttttatcttcagctagatttttaattaagtactggttatgatgtatatattttggtgctagttttatttggggttgctttttttgtttgttcacaataacctagtcatatgatagttacacattgtggttatgattgcctgtgaacaaaccgtacatttggagggactatttgcaatattaataatgtctcataaatctgtaacacatcttgggctttttgctactgaactgaagcaggtacaacgtagagatgttgatggagtgtatatgctactgagccttattttaccacttctggaaattaatgttgatcttacgtaatttggcttatttttagcaattaaaattgcctcaggcagatggatcatttgaagtcaggagttcgagaccagcctggtcaacatgatgaaaccctgtctttgctaaaaatacagaaaaatgagccaggcatggtgccctgtgcctgtaatcccagttacttgggaggctgaggcacgagaattgcttgaacccaggaggtggaggttgcagtgagccgagatcgcgccactgcactgcactccagcctgggtgacagagtgagaccctgtctccaaaaaaaaaaaaaaaaaaaaattgcctcaggaacgtctaatcataattcctgtattcactgtaaattaaaataaagccatattaacatttaaaaatgcacacagtggtatatatattatagaataatatataattag

SEQ ID NO: 43158 - DNA, 1100 bp, Homo sapiens
agaatctgatccaggaccacacgttgcatttaattggcgtgctctttagtttcctttcttctgtacccccattttcaaggggtgcaggcaagttatcttgagaatgttcgtcaatgtgatgtcgcagccccaccgttgggagtgtacagatggcaacatattttcacacagtgtgtttatgaatgttcagagcaagccttcataatggccaaaaacgaaataattcacagtacatgaactgctagtaaatactatagattaagagatatttagaatttaaaaggaataaatgatatctactacactgtgtatgaacattgaaaacactgtgctaagtgaacgaagcaagacacaagactacgtattattatatgtaattccactcggataaactgtcctttgaaaggcacatttagagacacagagcgggtcaggggctgcacagggctggaggtggcagcgggagcttcggagaagtggagcgacccaaaaccggattgtgggggtcgctgcggaactctgtaaatttgctaaaatcattggattgtacatttaaagggataatcttatagtaagtcaagtacacctcaattaagctgttcttaaaaattgactataaactaacacagcatctcagttagtgccctcagaactggagttgggacccagtagagaggtggaaagaagtgaggcctaagtgcagtgagtttgtttcaaataggtcaatcatcgacgccgttatgttctggaagtaatgaataataaagacgtataaacttaaacgtgttagtgaataccatcactcaatgatatcagtagaaatgataatcttccaaattgttggagagaaaaaataaccatgcaaataaaacaggacaaacagaaccaactctgtttaccagatatggggggtgggggtgggaagtaacattcagaatcgtaaaatagaaaacatagaatgagagaagcctgaatgttacaacagtgagtgcggagaaactgacgtaatgaaagaaaaagactttgagacagggccaggaaaacgctgccgcctacaagcaacacacctaaacggagtgacccagaagggtttagtggca

SEQ ID NO: 43159 - DNA, 1047 bp, Homo sapiens
gccaaggcgggtggatcccctgaggccaggagttcaagacgaacctgaccaacatgatgaaaccccgcctctactaaatacaaaaaaaaaatcagccgggcatggtggtgcatgcctgtagtcccagctacttgggaggctgaggcaggagaatggcttgaacccggaaggtggaggttgcagtgaaccaagattgcaccattgcactccagcctgggcaacaagagcaaaactctgtctgaaaaaaaaaaaaaaaaaaaaaaaaaaaaaaaaatcccaaatagactaaaagggaaaatcctaccccagtcaagaccccgcacaatcataattgagttataccgtggaaaacactttgagcatccatgagacggtcttactgttttttttatttttctcaatgttctaacatatgtgaaatttaattgatttttccatgataagtgtttttgaagttgttatatgttagacatccagtttggaaaaatcatcttaatatttaggctttccggttagcttagtatgcctggatttgccagggctgcagaattaatgtagacttaaaggaagagaatgtctttcagttgaagtactataaatagcaaaggcaggcaggcataattttaaagttatgaaactccttagtgccagattattggagaagaataacatctgctaaagctaattaaagtttaatatgtttaataaatgtgattgttacagacaaaaaatcattaaagtgctgtagaaaattgttaagttaccatcaggccacataataaattaatgatttttctcactctgaattaatgcaaattcccgttgtactgtatttaattatgcacaaaatggtgcccttgactcagatttcagtgaagaacttcatttttttacttttaagtctccaagtaggaaattcaattagcgttatgaaagaaacactaaaatgtggcatttaattgcaaaatatattttaagcttttcatttatccagtgactttgccagcagtcactgaccccttcattcagagatccttttctgtttca

SEQ ID NO: 43160 - DNA, 1032 bp, Homo sapiens
tctaacatttttatgagagatttaaaggagcaaataaactataattagaaaaaaaaagacaatggattttagcacatattatatgccacatatatattttttaatgaagtttacatttaacagtaaagagacctacaaagatcagtaataagaatcatgtaagtctcttcataggctttttttttttttttttttttttttttgagatagagtttcgctcctgttgcccaggctggagtacaatggcccatctcagctcgctgcaacctctgcctcctgggttcaagtgattctcctgccgcagcctcccgagtaggtgggattacaggcacctaccaccacccccagctaatttttttgcatttttagtagaggcaggatttcaccatgttggccaggctggtctcgaactcctgacctccggtgatccacccacctcagcctcccaaagtgctgggattacaggcatgagccaccgcgcccatcctcttcatagcattttgtgggctgtgctcttactagttttacccttaacataaattatatgctaaactcaacatataattgaaacaaaatccaactgaaatgtgggtgtggccagttgggtgcctgttgtgctttgtgacagcttcagtgcttccaaaggttcctgcagaatgggacattgctctagtttgattcacatttgactacaatggttagaaggtaattaccttttctattttttaaatttttttgaacataaactcaagattgtattgtcttcataataaaacaaaagatgacacttagaattggatgtcttggcccttcctcctcttctgtcctcccagttcagaatgctcacatctctttatatccagcatcctcttacatctgcacctatgctcaacgcactcaagcctcagcacaagcttcttcgtagttctagccttttcccggaaaatcagcttagtctgcccaccgtagccgctatgcttcgtgtcctaacaccaccttccccgggcacctgtcctaacgccaccttcccag

SEQ ID NO: 43161 - DNA, 1025 bp, Homo sapiens
tcggcctgttacacacacacacacacctggtactacaggtgtgcgccaacatgctcggcctgttacacacacacacacacacctggtattacaggtgtgagccaacatgctcagcctgttacacacacacaaacatatatatttttaagacagagtttcactcttattgcccaggctggagtgcaatgcgtgatctcgtctcactgcagcctgcaacctctgcctcctgcctcagcctcccgagtaattggaattattacaggcatgcaccactacagccggctaattttttatttttagtagagatggggtttcgccatgttggtcaggctggtctcagaaatcctgacctcaggtgatccacccgttgtggcctcccaaaatgctgggattacagtcatgagccactgctcctggtcacgtaatttttaaatataattttagctgtatcttgtgttcagttttctaggctacctttttcactcaacattacatcaggatcatttttcctcatgttattctttgagatatttttaatgggcttgtagtgtcccatcatgtgatttaccagtttactttctgttttttagttgtttacagctcttccttcgttgtgatgctgtgaacctcttgtgcataaattatcatgtgcatctctaattatttcttagagtacagtcccaggagttgtgaatgtgggtgaagcccctgctcctgctgccaggcccacctctcagagagtttcgtgtacacgtgtgcagggaagggctgacctagctaggtctctgaaacccgtgccagatactaaatctgcacaggctgcgacagtgagcagactgagggcgatctgtgccttattgtcttcctgttggaagagaacacataaatcacgtatctcaaatgtgaggcaaatagctaatggtgtttgtgtatacgaggaaggtggagtcaccggttcttcgtggccatcagaggaccgacacgcccataggtctcatgcattaagtctgcgttgagcaatccct

SEQ ID NO: 43162 - DNA, 1473 bp, Homo sapiens
ggacagtccctggtgcacatccagggaagaggagtgtcggtagttcttgcagtaggcactttatcaggacctgacctgttgctgggtgattttagtctctacaaacagaaagcgtttcaaagcgtcagctgtgggagcagagtgaccctttgctgatgctggggggaggggatctaaatcctcatttatctcttctatgtctcgtattttactgtcactggaggctctgtgggctgtcatagttaattgaccataattagcaatatacttttaaagtgggaaagctgaatgacacttttaagacaatgaacattatcaaaacaaaatgtataatttcttaatttgaataataaattaagcgtttaaatgctatttgtagtcttgatatacagaaataaaataattagggttggtcttttttattttaggttgttttatgttgaatgttctatatcttattagttaatttgtatattttattagtattttggaaatagcatatctgagactgaagagaaattgacaattcacttatttgtggtttttttctcagctattctgagcttatttatttatttgtatgttctaatggctaaacatttacattaaatgttttttttcccaagattgtgttggagtcctaccccaaatcattgtgattagcacagcttctgaatgttactagttttatcacaggtgtttgcatgtcaccagctaatggagtatagtaagatggcctacactcactgagaatcagaggtcctcgggaggatgcctgtcatcaggggtgggccgagcgtggctcccaggccggcggccggtgtgctcctatccgaccagccacgggtgttggcttcccgagtctcccattgggtctggcattagttcttgaaaaatttctggaggaagattctttgttctttgttttgtttgcccttttctacgttctgtcctactttctgctttctggtaattttgtacacaaacctaaatgttgacttggggttattgcagatacttctcatgaggtgttatctgcagagagatctttgttttggtatcctgagctcgttaaggcagctttatcgattgcagtggtttacaggatggtgtgtgcttttgcggagtgtgggaaaccagatactgcatccctgcccatcgtgagcctgcagtctacactctatgtatccctgccgttgacatgcaggcctccagtggtggaactgggagcacgggaaaggctgtggtggggttaatgactccttccaggaacttcctgaggaggtgagtggtgaacctgaaataattgaatacgtaagctttctcatacttgaaagaaataaacagccaaaggcatatggtaactcaaatagaaattcagggcatgctcagctctttcagatccacctgctccgggtcagcaagcatcacaactagcagggtagtctaggaagtgacgcagccaccctgtgc

SEQ ID NO: 43163 - DNA, 1062 bp, Homo sapiens
ccacgcccagctaattttgtatttttaatagagacaggattttgccatgttggccagggtggtcccaaactcctgacctcaggcgatccgcccaccttggcctcccgaagtgctgggattacaggcgtgagccactgtgcccagcagaaatgttaaagtttaacatcccattgccttagttcctcaaatgttacacacacagcagcaagccagcagtttctactaggtttacagtagagaagggaaacctggccaggcacccgagctcatgtctgtaatcccagcactttgggaggccaaggcaggtggatcgcttgaggccaggagtttgagaccagcctgggcaacatggcaaaaccccatctctacaaaaaataaaaaggttagcagggcatggttggtgcacgcctgtggtctcagctactctggaggcagaggcaggaggatcgcttgaacccaggaggtcgaggctgcagtgagctatgaatggcaccactgcactccaaccggccacagtgtgaaactctgtctcaaagaaaagtgaaaacctttgtccacacacagacttgtacacaaatgttcatagctgccttattcacgatcgccaaaggatggaaacacacaagtgttcatcagctgaggaaggaataaacattatgtggtccctctgtgcagtggaataggacttggtcgtaaaaagaagtgtgggccaggcgcggtggctcacgcctgtaatcccagcacttttggaggccgaggcgggcagatcacgaggtcaggagatcaagaccatcctggctaacacggtgaaaccccgtctctactaaaaatacaaaaacaattagccgggcgtggtggcgggcgcctgtagccccagctactcaggaggctgaggcaggagaatggtgtgaacccaggaggcggagcttgcagtgaaccgagattgcgccactgcactcgagcctgggcgacagattgagactctgtctcaaaaataataataatagtaagtaaaaggaagtgtgatacacagcagcatgggtgcgcctcagggacgttaga

SEQ ID NO: 43164 - DNA, 1027 bp, Homo sapiens
ccaagttcctacgctgtgaacattactgcttccctgtacagggaaggcagggtggtaaatccttgattcttagtgcttgctggctttttagagtgacatgaactcaagaattttaaatgtaggttttaaattcaattcagtcaattcactttgaagcccacattctcgttaaggtcaggaattgccctatcaaatttttttttttttaatttttaaaatttttcgtagagacagggtttcgccgtgttgccaaggctggtcttgaactgctgggctcatgcagtttgtccgcctcgggctcctaaagtgttgagattacaggtgtgagctgccgcacccggtccagtttggtttctgtgtccttttgatgtacacttcgtctttttgaagtttttaaactttattttgaggtagttttagatttacagaaaagttgtaaagatagtacagggattttcctgtataccattcacccaacttcccttaatctttctgtaactgtggtaactgtggtgaatttctcaaaagtaagcagttgacaccgctacagtattgttaaatgtggactttattcatattccacctgtttttctgctaatgtccttttcctgttctagaaaccatccgaggaacccagattgtatttagttgtcatttactcttagttacaggttgtctgtcccgttgtttttcttgaccggggtgtgtgtgtgtgtgtgtgtgtgtgtgtgtgtgtgtatgtatttttttttgtttgtttgtgataagttgggcctggttagtgcttggatgggagatagggtctcgttctgttgcctgtgctggaatgccgcggtgcagtcctgactcactgtagccttgacaaccttcctggctcaagtgatcctcccacctcagcctcctgagtagctgggatgacagacacatgccaccatgcacagctacttaaattttttttttgttgcacagagttctcactgtgtttcccaggctgatcttgaactcctgggctcaagcagtcctcctg

SEQ ID NO: 43165 - DNA, 1223 bp, Homo sapiens
tggacttatttgaattaggatgctctctttattttattattagaggaccctattgctcagtgaaatgatgttctgagataggaaagaaagggtacctgataatagtgccttttgatcccattagtcacagcaggcattacatctgggaaaagcctgtgggtttaacttcacattttatttatattcttggaaaaccaaagcgaacctttaaggtttccagagaggccttttattttagcagtgcagcaagtttttcctttgtaaagcatcactgtggtacgaatgatgctctgtagcaatagaggaggagtcctgtggtatgtagaaccaaggaaagcagacttcttgcaggaaaaatgagtgcattgaggatagtaacctgactttctgacctgtgattaaattatgatagtagtcagtcattttactctcccagggtttgaggaagtggccggtgaggacttggagcctagtgaggagttagtagagctgcccagggtggaggaggccacagaggacagccctggtgaagagaacagtgaggccttggatgtgttgatatccagcaaggacctggcactgtctagtgaggacgaggcctgcacaggatgtaactggggcctgggcgagcccttcagcgaggagctggggctcatatccagcgaggacggggccagccctggggacgtagaggagctcggcgaggagtgcgaggagccgctgagtgaggaggagcacagcgggccagagctggggcgctgccggcaccaccataaagtgtcaaggagctgcccgagtgggactgacttaaaacagtgtatctagaataaaatggtttcctctagtgccttgatactgtccttggtcagacgacctcagctgccttggagatagaactgaagaagcaagagagggaggtggcagccctgaagcacaggccgggcgtctcgtaggctctttccctagaagccagagcacagaccctgaagacagccttgagtttgatccgtaccacaaaccgggggcttaaactaccaaaatgtaccatctcccagtcctggaggctggccatgtgagacccaggtattgcagggctggttgcttctgaggctgagatgtgtcccgtcttgctccaggcccttccccagctgttcttctccctacatttgcagacggatggcccatccgatgttgacatcatctcctttgtgtctgtctctgtg

SEQ ID NO: 43166 - DNA, 1027 bp, Homo sapiens
caccgtgccaggccgttcatttctactgaaaattatcctggctagtgaggatgggtgccatgttagtgatctgcgattcttttgtgctgtttttcagtacatacttggtcgtttcaggacctttgtttcctctgacgtcctcccttaaatagggagaggaaatggttcctggaaacggtcattttgagaattttctgtgctgtgagaactgaggctctggctacccctctaaaaggcttgagccatgctgtaagagtttgtgggcagtgtttctgtggtgtttcctcccttgtattttgtggtgttggtccccctaacaggtctttgtatagtgtttggttcacattgttggcatgacagtcacctgagcaagacgttgcctgagtcctttgtcagtttgggttttcgcatcatctgtttccagtgggattttggtccctggtcaacttgtggacaactccagagattgagatagttgccgtatccttagtgctcccagggggagatgttctgggactgtaggtgcaagatgtaggaagagtgatttaaacttgaggctgcaggcagacctgatactgtgttgggctttgacaggtttagggaataccagtatttataggcagtatgatagtgtagggggacagtgaggtggaaggtgtgatggtggaggaaagatgaatcggccatctgcgagtagggctcagaaaagagcctggagcctgctgctgttctggtggtttcttccctgagcaatgaggactgtggttgggaagaggcccattcctcctgacgccagagttcctcatctcatgttggctcttttgtatttgaaatagaataatttgattgcagtgtattgtggattctttgacttcgatagatttttgtaacttttgggaaacagattactctaaccagacctgggaagtagctagaaattatacttgtaataaaaaacaattatatgggaagctgaaaatggtggtgttcatttaacaaatatggcgtgcctgctgtttagtgccag

SEQ ID NO: 43167 - DNA, 1057 bp, Homo sapiens
ttggaatatcatattttttacaattggaaaactctataaattttctaatttttacccttatttttcttattgatataagtatttttgtcttgttttccagcaggctgattttagtattttactgtgtgattatgtttctgagaaagattagttactgtgtttatgtcccaaaattcctctacatggcactgttgggttctcttgtaccttgattttactttgggttttagattctgtagagagggtgaagctcccggccctgtgatcttgaggagggtgagttgggagccgtccatgccctgcctaccccaacaccaggttcagctgcctgtgaagtcatttgtttcgtgcacatttcctagttactggtattttttaatcattaaaaatgtttttaaattattgatagtaattgtacgtatttgtagggtgcatgtgtgcagtgggtgatgatcagatcggggtgcatgtgtgcagtgggtgatgatcagattggggttaatggcagagccacctcacagttactgttttgtgttgggaacattcagagcctctcagaaaactttatttcctaagctggtttgttgaggggttttctttcatatcagtttgctaatttatgtgttcactggaagcatccacggtgttctgaggcctgtgatcatgcgcctttctcattctttacatttgtccgtgtctgaaggtttccaagtgttttcctgttggtttagtttctctcaaaagaatacctttctcatatcttattattatcctgagtttttcttcctattttggttagttgtgcttctgcagaatatttatttgcagtacttttgttcataaataggaatgttaagaattgtttttaagttcgacttgtaaaacatttttgttgacttctaagtcgttcttttaaatttctattttcattcaaaaataacccatatgacatctattttttggaaggaagggttaagaaacagcagatgttgccttgtcaattctgtgagcttgtattctactggatttttttctatcttgcttaagaaatgctgcc

SEQ ID NO: 43168 - DNA, 1043 bp, Homo sapiens
tgccttgctctctgtggggatccacagagagttcacgcagtggccctgtcagccctgaacatggagagccactgcatgtgaggccttgggggcatgtctggagagcctgtcatggcgtggagctcaccgtacagtctcctgggaccttgacagaccgcaccaggccacatcctgcgccaattaaacccgaacctcagggctgatcccgttgtggccaggaggaagaatggataatgctgggcctgggagggaccgggaggccgagtccgaggcgagagccatggggtggtgcttgttccggttctcctgcagccggtctgtccatcctgcctgctgtgactgttctccagccactttctctttttcatttttcttgctggaaagctgtagaaggcagtggggtgggaacgctccatccacagtgcaggttagaaccttggaggtgatggcttcgcctggcagtgaggtgaacagagcctccagcagtgccgggcgtgtagccagggcagctgcagcaggaggacgcccagagccttggctctgaacagatagaaccatcgaggccgaatcgggcagtcctcctgttcagaccaactgtgtgtcccttttgtgagacagctggtgacccctgctggcacatctgtgtcccagccgtgaggcggccgctccctgtccatgccggcagtgcaccgtgcccacgggaagctcggtgtgggggtttggagcagcagcacgctgcgtgactccccaggtgatgccagggagatctggataaggaggtccacatctccaccttcatcttctttcctcaagtcacttttcctggcacctcactaaccatgaggtttcacaggaaccttggggagtcccttgtgtgcttggcctggggacacaggactgtgtcggactgctggggccagaagggtttttctagagaccagacccaagcagctgctgtccacctgccacgtgtgccagccccagccttcctcccaagtgagtgggggagggaggcttctgggtgttgccgggacctggccggg

SEQ ID NO: 43169 - DNA, 1028 bp, Homo sapiens
acggggggctgtgactgggccaggcaggggcggctcttctggcggcagtgacagagctcacgctgcatcgctgtgccccggggaagacttcacagctatggatatttagggtccagttcagtgtgtcacacaccagaaactttaaatttttttctcaaatgttctactttagttggcaaagtataattcttaaaagtcatggcggagtattgggtgcaatcctcctggaggcaggaacgggcttagcaccggcaggttctggttggccctttgctgctgtgtgcgtgggtcccttcgtctctcctctctccctccaaggtgggatgtggtaccctgggagcacctgtgctgagtctctccttggtgtccaaggggctgggatggcccagggtgcacaggtgtccccgggcagcctgcagatgcttctcgacgacacggcccctttgagttcgaaggtcagatctggaagccacgttgccacacaacagcgacttcgcagcactgtcgccatgtgtcccgctctcttgccagggtccaggcagctgggaaacagcttggtttgctgagaagccacgtcctgggtgtccctgtcccagagccctcctcgctcccagcctgcaactggggcctggtcgggcgccctggcatgtttcctcctgctgcaggcgtgctcaggaagtgctgtgtgtgcatggcgcccgcgggcatggcctgtgtgctgggtgctgttttacttcactcacgtcatagaatcgcagacagcagccctgccacctgtttgttctgcaggtgagcacgtggagttcccaaggggagaactggccccgggctaggtgacccctctcagctcaacagttccatgtgatgctgagagatgtgcgtgcattctcctggtgcagccatctcagcaggggtcctggggtcccctggcaggacgcgcgggccgggtgttgacaatggggtgtcataggtcaagcctcacagcctgcgtttacggtgcttggttaaatggtccccaaaatcacgtt

SEQ ID NO: 43170 - DNA, 1032 bp, Homo sapiens
ggcacatttcctaaatatgcagcatggaacgcttggcggttctgaacgcgcatctcgtgctgctcctgtagggcggttaggacgcgctcctctggcgaggaaggtggcagcctccactgtgcacgggtcacaggcgagtgtggtgtggtgtggttgtgggtggggtgtggactggatctgcaggcttgtccctctctcgtggagagctgtcggggtccaggcagtgctcagtggtgagagccacagcacatttgaaagtccacatgtgtttgccccactgtggtccaggacatgtgtgagccacactcagtggacttgcacctgtgacatgttggtcagcgtggcggccgtcagctgggtgtggaatgcatctgattggagcctggcacccggcctaccatgattgtgattctctggggcgagtcctgagtgtgggcagggcctcaggcccccaagagggctgtgagcaggcaccttcctgtgaggcacgatgccaccatgtgaagttgtgtgggtctttggagagttctggcaggttgagggcctgtgcgtgtgggacccaggcctgccctgcctgctgccggccatgttccctctgcccagtcatgttgacaattgtggccaaattcaacatcgggcctgtttcctgcacccacgttggcacacactgagttcaagacagtttctgcagaaatgaatccagaggtgtttatttctggcacgttggatcagacgttcagagggtgggcgtctttctccatgcacttcagctggatcagtcagtgtcagccattgactttagcaacagggaaatgaaagactttcctcaataagaaatgggactttctcacgctggatggcacagagctggcaaacatgaggccagtccacaccaaggctttgcctgcagaaaggctgcactgtggccagcgggggaagcggaggagacacctgtggacaccctccccacaggtgggcacacctttgcgcaggcccagtgtgcgttctgaaggagagcccagggtggggttc

SEQ ID NO: 43171 - DNA, 1085 bp, Homo sapiens
cgccccagcgcggaggcgaccccggccccgctgccccggcgtcgggaggacaccgcgcgctcacgtggatgactgcgcccgggaacagggacttcccgaaccttcctgccccgcgccgtgaggcccacacgcgcgcggtgaccaccctggttctgagggggcggcggggccacggcgtgtggcggacccggcagtggcacccaggctgtgcgcgcgggtgtgtggggttccgaggcgcagggcgaccgccggctccggctccccgaggaaggggcacaggcgctgcccgcggtcactcgggccaggtgagggcaggggacgcgcgggggccggaggaggaggcctggtctgcgggcggcaggagggacccggggccagccgaggctgttcccagggaggcagacacctgctgtcgccgggaccctcgacacgctccgcacgcgcgggagcggaaccgggcctgctttggaggcctcccttggcgcgcttggatttactcaaaggtcaaagaaaaatgtcaaggagagcgattgcctggagagctcctggctctcctcccgggtccccgctgggtcccaggagtccccggaggggaagcaaggagccccagtgccctggagtcctgtctccaccaacctcgcccggctccctgctgcctaggcccgcgctgtcccagcagaggaggggtgggagccgccccaggcccacctccccgcgccggtccacaaggaggcccctcctgcaacctgggagaggccgggggaggcccggagggcgaccgcgcggggccgcgggacctggacagccggggagtcgtgaccgcgggcagcgccggggctgagggcgaggagggtcttactgcagggaagggcgggacgctggacagagggaccgactggggtccaccggcctgacacagaagtcgctggatcccagggcccggctgggaaacccgcttcctacccgcccgcgggcgccgcagaagaaaccgaagaaagaggtcttccctccacgcccaggacggtttcaagtgtcccacccagcgctgagcaggagggtgatgcggagggaaaaactgttggctg

SEQ ID NO: 43172 - DNA, 1030 bp, Homo sapiens
gttctggtctctctgggaaggtagaatcctaactactgtaattatcagctagcagacacagcgagcttaatctcacactgaccagcctttgtaatttttcacttgagctcccctagcccgggttctcccctaaaacactccctcacctcagtgcaaacagaaatggagctcagctgtttcccgtcccgcctgcagttactgaatgaaatctatttcaccactcgaaagtctggcatccccctccccacacttctcatctgtcagccaagtctagaaaggaatcagcctgaggtcagctctgtctacaaaatagactcagcgcagcagcattttaggcatctgccgctttgacgtagctttgacgtagcagctcacagataggactctcatctgcaaatacatgcataccgaaaacacaggtgctccctgcagccacgtttgtcacatggagtacagagtgttagaagcagcctgtgtggtcaccagccagggcctaggtgagtgaattacggtgactgtagggaataaccttggattcagtgatggaaactgatcatcctagttttcttcgttaccgttttcttcagagcacttttcctaccagggagcgtcagttacacagtcaagtaatagaatgaagacctggataggctgcatttcataatttggccctaagtaatttgataacttaaaaattctagtgtaaggaattttggaaaaaaaatgaggacagcaaaggataaattatgtcccagtcctaaaggcgggagccagccttgccctctgggtctcttagcgtgcgccctagtttggtgtgttgccatgcagggttagtgaagcacaccactctggccgttagtgctcctgctcattccactctgtaattctgagaattaatgttggtgtcgtcaacctaaagaaaatccaggcaaaattaattatagagactatcagggccacagcctgggaaacactgggaggcgctccagagaacaaaggagaggcttgagtgtttaaagagaaaaggacg

SEQ ID NO: 43173 - DNA, 1031 bp, Homo sapiens
cactttcttgtatgtaagctcagcacttgagtctactgcagcactgaagagtggaacgttgtgaaacctcaacacgctagttgagattaaggatgattgtgaaacctcgacatgctggttgacattaaggatgattgtaaaaccttgacacgctggttgagattaaggatgattgtgaaatgtcaacacgctggttgacaggatgattgtgaaacctcgacacgctggttgacattaaggatgactgtgaaacatcgacatgctggttgacattaagaatgattgtgaaacctcgacacggtggttgagattaaggatgattgtgaaacctggacacgctggttgacattaaggatgattgtgaaacgtcgacacgctggttgacattaaggatgattgtgaaacgtcgacatgctggttgacattaaggatgattgtgaaacgtcgacacgctggttgagattaaggatgattgtgaaacgtcgacacgctggttgacattaaggatgattgtgaaacctcgacacggtggttgagataaaggatgatggtgaaacctcgacacggtggttgagattaaggatgattgtgaaacctcgacacgctggttgagattaaggatgattgtgaaacatcgacacgctggttgacaggatgattgtgaaacctcgacacggtggttgacattaaggatgattgtgaaacgtcgacacgctggttgacattaaggatgattgtgaaacgtcgacacgctggttgacattaaggatgattgtgaaacgtctacacgctggttgagattaaggatgattgtgaaacgtcgacacgctggttgacattaaggatgattgtgaaacgtcaacacgctggttgacattaaggatgattgtgaaacgtcgacacgctggttgagattaaggatgattgtgaaacgtcgacacgctggttgacattaaggatgattgtgaaacgttgacacagtggttgacattaaggatgattgtgaaacgtcgacacgctggttgacatta

SEQ ID NO: 43174 - DNA, 1050 bp, Homo sapiens
attgtgaaacctcgacacggtggttgagattaaggatgattgtgaaacgtctgcacgctggttgacattaaggatgattgtgaaacgtctacacgctggttgacattaaggatgattgtgaaacgtcgacacgctggttgacattaaggatgattgtgaaacgtcgacacgctggttgacattaaggatgattgtgaaacgtctacacgctggttgacatttaggatgattgtgaaacctcgacacggtggttgagattaaggatgattgtgaaacgtctacacgctggttgacattaaggatgattgtgaaacgtctacacgctggttgacattaaggatgattgtgaaacgtcgacacgctggttgacattaaggatgattgtgaaacgtcgacacgctggttgacattaaggatgattgtgaaacgtctacacgctggttgacattaaggatgattgtgaaacctcgacacgctggttgagattaaggatgattgtgaaatgttgacacgtggttgacattaaggatgattgtgaaacgtcgacacgctggttgagattaaggatgattgtgaaatgttgacacgctcgttgacattaaggatgattgtgaaacgtcgacatgctggttgaaattaaggatgattgtgagacgtcactaaacaccccctgccctccacactccaccctccacctctcactaaacacctcctgtcctccacactccaccctctgcctctcactaaacacctcctgtcctccacactccaccctccgcctctcgctaaacacctcctgtcctccacactccaccctccacctctcactaaacacctcctgtcctccacactccaccctctgcctctcactaaacacctcctgtcctccacactccaccctccgcctctcgctaaacaccccctgccctccacactccaccctccacctctcactaaacacctcctgtcctccacactccaccctccgcctctcgctaaacaccccctgccctccacactccaccctccacctctcactaaacaccccct

SEQ ID NO: 43175 - DNA, 1055 bp, Homo sapiens
accaaaggcagacatcgcaggttcaataagtgatttaggtaactattaagtaaaaaaattaattttagtgttttctaaaatgaatcgagattaaaagtactgataactgcggtcaggtgcagtggctcacacctgctgggagcctcagcacgttgggaggctgaggaaggaggattgcttgagcccaggagttccagaccagcctggacaacatagcaagaccccgtctctacaaaaaaattcaaaaattggctgggcgtggtggcacacacctgtagtcccaactgcttgggaggctaaggtgggaggattgcttgagcctaggagtttgaggctgcagtgagccgtgatcatgccactacactccagcctgggtgatggaatgagaccttgtctctctgttaaaaaaaaaaaaaagataccaataactgctttgaaaaatataaattactacctgaaaaatgaaaattaaaggtgtatgtcatataaccttataaactgttgaacgggcatctcaattaactagaataatcaaatgatattctgaatgaattttttttttttttgagacagagtcccgctctgttgcccaggctgctgcagtggtgtgatcttggctcactgcaacctctgcctcctgggttcaagcaattctcttgcctcaacctcccaagtagctgggattacaggtgcttgccaacacgcccggctaatttttgtatttttagtagagacagggtttcaccatgttggtcaggctggtcttgaactcctgacttgaggtcatccacccacctcagcctcccatagtgctgggattacaggcatgagccaccgtccagcctgagtgaatgttttgatcttagtagggtttaatgagttctgtttacagctgagtaccattcagttctgtcagacaagtcaaggacagctgtgttctgtagctgttccctatgtatttcaggtgtccgagtctttcagtgcgcattcattttggggcttcttcctctcagttttggatttacaaccccagggtgtatcaggaacactggatg

SEQ ID NO: 43176 - DNA, 1060 bp, Homo sapiens
gggccagatgcctgcgggggagacggatcccacacctgcaggtgtccggtggggagggtggcccaagctgcggcactggcaggagaggagattcaggtctcactgagaggggctgggagtgcataagacacccaattcattagtgggctgcggggctgagctgagaagaatctgcagaagggcctcctgccagggtgggcgggaggagcaggttcgaggactgcagttgccctggctggctggggtctctccttcaccccgccacgcggactccacccaggagcagaatggcttctgtgccctgctatggctgggccctgggagcatgaggggactcagaagtttctcggtgccagggtgctggccttctcttctggaaagataaacaaatgccgtaggtatttgttgcttcagttcttcaccccgacggccgtccctcggcccactcaccgccctgcccttttgttaacaggaaggcctagggagtcaggtaaaaaacggaaaagaaaaaggttaaaacccacctaaagcagccaaccaggtaggactgtctgccggacacactgagtcctgcagggcggggaggtgcaactgactgatcacaccagcaaatcacgcttcctgtctcgccgggtgcggcggggatgtggccctgattggccttgatggtgtctgctgggcttgggtctccttgctccccgtccgctcctgcctcgcagaacgccctggcccgtggctcactcccgcttgggagcctgcctccagctttgtccttctctttgtcgttgattggggatgcaggagcattgcacatgaatggaacaggttgggcgacctgagcagcggtggggcagctctgagcgcctggccactctgggatcacccaccccatttgacagatgaaaaaactgaggcttaactgagattacagataaggactgttggaggctgaatatatctggaaatcctttataaacgtgcagggctgttggctactgtgttggaaattgcatttggctgctagtaacaccagacagcacagggattgagataagatcga

SEQ ID NO: 43177 - DNA, 1047 bp, Homo sapiens
acccccgccccccactgttgtgactcctaggccccggagggagatggggcggcggggagaaggttctccgggaaggactttgcagccagccgggtcgtttcctcgtcacacgaccgggcactttagacccataactgggacttatcttggcctctggggacttggtcctctgaggtgctgggtattgagtaagcagattccacatcttactacccgggatctccaaggccactcactccccttttgaagccccaagatttttccagggccctgggagtgcttgtctgcggcactcttctgtcctcaggatatttaccgccggggggtcagggaaggaggggaggggagggcctaactcaggcctccaggtccaggtgtggctgggtccccctggcatgagcccccctggcatgagcccagcaccatcccctctgtcctgtgtgcctccctggggcgcagtttctgcctttcggtgggccttggcatcctccctggttatattttggaggcccttgtgagctctgagtccgggatgcctgtggtcttgttctcattagagattctcatgtcagttctgggtgctgggggaggcttggaggtacggggagaggctctcagcccatggctcagccttgtgcagcccctgcccttcccaccctggcctgtcatggggtgaggataggagggcttggccctacagggcagtgttctctccctcccccggccccctgaggaggctgggtggggtctagaggcttccagcaccctctggccagtgcagtgttgggggtgagggccagttccccgctgggagtggcccctgctttgctctgtgcagtggtagagccaggaccagggctctccctctgggtctcatctgccgggacagggtgtcctaaggcctcagggctgtgtcctgcagcagagcctggcggcccagttcccacctcctcagacccaggcccccttcatgttcccgcttctgggaggcgtcttctccctgcccacccatccgagggttggaggaaaacatccggctttggaccc

SEQ ID NO: 43178 - DNA, 1052 bp, Homo sapiens
gtctcgatctcctgacctcaggtgatccacccacctcggcctcccaaagtgctgggatcacaggcgtgagccaccgcacccggcccattatttgctcttgattcttttaaaggtgcactgaagatttacaaatatcaggaaatgaacattttattttttccttaggtttaaagactgtataaagcattttaataaacatgatttgtttgtttgtttttttgagacagagtcttactccttcacccaggctggagtgcagtggcgcaatctcggctcattgcaatctccacctccctggttcaagcgattctcccgcctcagcctcccaagtagctgggattacaggtgcgccaccatgcccagctaatttttgtatttttagttagagacgggatttcaccatgtaggctagacctctgcctccgaagctcaagcgatcctcccacctcagcctcccgaggagccgggactacaggtgtgcaccaccacgcccggctaatttttgtatgtttttgtagagatggggtttcgcggtgtggcccaggctggtctcaaagtcctgagctcaaaccgtccacccgccttagcctcccaaagtgctgggattaggtgtgaaccaccacacctcacctccttcaaggtttctgactggtcctggagcttggcctgtcccggcactccccaccccccaccttcagcacctggccccttccctcacggccgttctttcccactcgccgtggtttgcggggtcacagttgttgaggaagttgcagacacctgggagctgctcttgatagcagggagtttggcgtgtgatacccattcctcacccaggagggaggggcgtgcaggtgcagagacagagagatggacccgacccgtcaggtcccgccggccccctccccagcaggcttctacagcacagcctctgtgagggtggaaatgcttctgtctgagctgctgtcctcacagtggccacgggctggggaggtgctggccacctggggtcactgtgttccagcagttgagagaggcagagcattggctgt

SEQ ID NO: 43179 - DNA, 1025 bp, Homo sapiens
tttcaccatgttgcccagggtggtctcgaactcctggcctcaagtgatcctcctgccttggcctcccgaagtgctgggattacagacgtgagcccaccgtgcctggcctccctccctcagctctttaaaaactgtgttctcggccaggcgcggtggctcatgcctgtaatcccagcactttgggaggccgaggcgggcggatcacgaggtcaggagattgagaccatcctggttaacatggtaaaacccagttctctactaaaaatacaaaaaaattagccaggcttggtggtgggtgcctgtagtcccagctactcgagaggctgaggcaggagaatggcgtgaacctgggaggcggagcttgcagtgagctgagattgcaccactgcactccagcctgggcaacagaacgatactctgtctcaaaaaaaaagtcttctctttgggtctttttttatatgcaggctctcctccccctcccctccttatcctccccatctttttcttttgttgcatggttgtagtcaaagtctagataaaatactaagtaagaaaagaaggaaagtgtttacaattttaatgtatcctgggttactctgtgatgtgaatttcaaattttgttttcttcaaaaattgaaataatttttttgtttattattatgtttttggattctagcatttccatttggctttaaaaacattgccaggtgcagtggctcacgcctgtaatcccagcactttgggaggctgaggtgggtggatcacaaggtcaggagatcgagaccatcctggctaatatgatgaagccccgtctctactaaaaatacaaaaaattagccgggtgtggtggtgggcgcctgtagtcccagctacttgggaggctgaggcaggagaatggcatgaacctgggaggcagaggcagagcttgcagtgagccgagatcgcgccactgcactccagcctgggtgacagagcgagactctgcctcaaaaaaaaaaaatttttttttctttttagttctgttc

SEQ ID NO: 43180 - DNA, 1517 bp, Homo sapiens
aagcccctagttttcctggaggtaccctggggagactggactgggacaggacaaacacattggcaagaacagtggggtcttcacaaggtggccccagacccatgggctgatggtcagaagcacccgccctgagccgtggcgggcactggctggaggtgggctggtggctggggcctgcccctgtgggagctgccgtgccgtgtggggcccggggctgcccccggggagggaggtgcagtgtctgatgtcaagtgccacctgcacagtgtcgttgaggtccccatcactcctgggagggaggtgctgttaccttctgcttacagaccgggaggccaaggctcagagcgcttaagtaacttgcccaaagccacacagcacagcaggtgcgccgccagcacccacagggtctgcccttcctgctcccttgagcttggacgacggcccctgtgaggtgcttagaccccaccccttctcaggccaaggagcccaaggccgtgatgaagatcgagcacctgaacgccaccttccagccggccaagatcggccacccccacggcctgcaggtcacctacctgaaggacaacagcacccgtaacatcttcatctaccatgaggacgggaaggtgggtgctggcgagcactcgggcccgggtggcacaggagggtgggccctcaggcccgggtggcgcaggaaggtgggtgcttggacggtacgggagggtaggcacttgagctaggcggcatgagaaggcgggaagtcgggctgggcagcgtgggaaggcgggtgcttggacgtgtgggagtgtgggcactggcgccgggcagcatgggaagacaggtgcaggaaggcagcttcccagggccgggctgcccaggagccggatcaccacgctgtctctggggccacccagcttggccctgtcagtgggggctgccagctcgggctagaggatccaccgcccccacaatgcccagaggggacctcggggggaactggggtcctacggggaggagatgtggacggtagccggctctggggtggtttgggtagggttcctttggctgcccttggtgtggcggcggggagggtgggtgtaccccgcatctctggagggcttggggggaacccaggtaaaacccccacaaaagctatccttttgtctttgggccaggctgcagggggcgcagcggtgggcccagcctctttgttacttaggttcttgtttctatgtttatcacacgtctgtgtgcacacggtctaaagcgctatatcgttcctaaatcttgagaaacagaagtttgaggtccctcctaacccccgttgggaattggtccccatatccaaaaataagctgccggtgtcgctgcagatttacccactttaggcaccatctgacaacttcccacgtggaagtagaggttccagctctttccatcccctcccacgtgcccgtcccctgcctgccgtgctccgctggcatctgaccctgggtttgttagggggccgagtcgggtgc

SEQ ID NO: 43181 - DNA, 1050 bp, Homo sapiens
catcctctctcccttcctcctctctcccttcctcctcctcccttcctcctcctctctcccttcgtcctcctctctcccttcctcctctctcccttcctcctctctcccttcctcctctctcccttcctcctcgctcccttcctcctcctctcttcctcctcctcattcccttcctcctcactcccttcctcctcctctctcccttcctcatcctctctcccttcctcctcttcctcctcctcccttcctcctcctctctcccttcctcctcctctctcccttcgtcctcctctctcccttcctcctcctctctcccttcctcctcctctcccttcctcctcctctctcccttcctcctcctctctcttcctcctcctcactcccttcctcctcctctctcccttcctcatcctctctcccttcctcctcctctcttcctcctactctctcttcctcctcctcactcccttcctcctcctctctcccttcctcatcctctctcccttcctcctcttcctcctcctcccttcctcctcgtctctcccttcctcctcctcccttcctcctcctctctcccttcctcctcctctcttcctcctactctctcttcctcctcctcactcccttcctcctcctctctcttcctcctcctcactcccttcctcctcctctctcccttcctcatcctctctcccttcctcctcttcctcctcctcccttcctcctcctctctcccttcgtcctcctctctcccttcctcctcctcccttcctcctcctctctcccttcctcatcctctctcccttcctcctcttcctcctcctcccttcctcctcctctctcccttcctcctcctctctcccttcgtcctcctctctcccttcctcctcctcccttcctcctcctctctcccttcctcatcctctctcccttcctcctcttcctcctcctcccttcctcctcctctctcccttcctcctcctctctcccttcctcctcctctctcccttcctcctcctctcttcctcctactctctcttcctcctcctc

SEQ ID NO: 43182 - DNA, 1028 bp, Homo sapiens
tgcgaagtgactggcagcgctggcccagtgttatgtaagatgttatttggggaactgggtatacacactgtcctatttttggaactttttggaagtctgaaattattttgaaatgaggaaaaaaaaatatgctttgtatgaaactatagtggaatagattgagtcgattctcgtttcaaaataacttcaaagagtttccaataggcatgatgccggcatgaatggtttcagcaggtcacaggcagagaagccggaatcccaaaatagcgccattgtgtggacaacctgactccttacaaacgtgcagtggcttcccaacgctgcctttgagtttctgggtctggctgctgaatgtgttgtgcttaagaatccagacaccctgctgttcctgccagagcttctcacgagatatttcgggtagttcatcatctgtcatgtgcagaatgcattttatttctcatagacgcttgtcatgataagctggccacattattaaaaggctcccaaagacaatttccagagcgttttccaagcgttccccttgggcatgaggtaaaccggaggtagcgtggtcgcaggcctggcccggtgtggcttcccaggaggggaggtctgacctggaggcccagagccccccagggtcgggtctgcagccccagggctgatgcgtggggcctcgtttgcacaggccgtgtagccggagctcagcactggacctgttccacccaggcctcaggagcaaggcaaactgacttcctgaagcttcctgtatcggttcctctggccacagtaacagattactgcaagcccagcggcttagagcaccgcaagcattactattccagagcagagtccaaaaggggcccaggccagacacgatggcccacacctgtcatcccggcagtttgggaggccaaggtgggaggatcgcctgaggccaggagtttgagaccagccctggcaacgtagtgaaaccctgtctctacaaaaaaaaaaaaaaaattgtttttaacttaccctggtgtggt

SEQ ID NO: 43183 - DNA, 1048 bp, Homo sapiens
aaaagtgctgctgatctcccagtgcttctggccgtattccggtggggttgcctccgtggacatgaaggcttcgaaaaaggatctgtgggccgggcgcggtggctcatgcctgtgatcccagccctttgggaggccgaggtgggcggatcatttaagatcaggagttcgagaccagcctgcccaacatggggaaaccccgtctctactaaaaatacaaaaattagttgggtgtgatgtggctcgcctgtagtcccagctactcgggaggctgaggcaggagaatcgcttgaaccgggagacggaggttgcagtgagccgagatcgggccactgcactgcagcttgggcgacagagtgagacaacgtctcaaaaaaaaaaagaaagaaaagaaaagaaaaacgatctgtgaattactgtttctttcccaacattttattgtgacattttcaaatagcaaaaatgaaagaatttttaccctgaactctcctgtgaccatcacctacattgcaccttaacctcgtactgggctgactttacctcgttgtgggttttttccattgttgttttcagcatgtttatgaaggaaacaagtttgggtttgattgtttttgttttgagacacggtctcactctgttgcttaggctggagtgcagtggtgcaatcatagctcactgaagcctcggcctccttcctttctggactcaggggagtctcccgtctcatcctctagagtagctgggactataggtgtgcagcgccacacccagctaattttttttttttttttttttttagagatggggtttccccatgttgcccaggctggattatttatttatttatttttgaaatggactctcactgtgtcgcccaggctggagtgcagtggtgtgatctcgactcactgcaacctcctcctcccgggttcaagcgattctcctgtctcagcctctagagtagctgggactataggtgtgcaacaccacacccagctaattattattgtttttttattttttattttaaagatggagtttccccatgttg

SEQ ID NO: 43184 - DNA, 1033 bp, Homo sapiens
tgaggatttttacgatgtttgtgaaatgttctccccacatggcttctgttttacccaggttaattgagtgttttgtctgcctctaaacaggcatttcttcttccagtgtctggggcagggtctgtggccaggccgcccacaccctcgggccgcagtgggaggacggaagcctgaggcccgggtgtccttggctgcagcgtcttgtctcctgctgttcagcggcccctccctgccccgcccctgaccaactcgatctctttcccgtccaggttcccgatgagcacttctccaccctgctggcctacctggaggggctgcagggccgggcccgagagctgacggtgcagaaggcggaagccctgatgcgggagctggatgaggagggctctgatccccccctgccggggagggcccagcgcatccgacaggtgctgcagctgctctcctagtgggttcagcgcggggcggggccgctgcccagtgcagggctgcctcagaccacacagggtgcagctcctccggcggtgggggccgggttcaccagcagggcagcggctgagcaagggctttcagctcctccggtggtgggggccgggatcaccagcaccagagcctcgcaagggccccttccctcctccagaccctccttggccggtgacggctgtgacagtgatggcaggttcagtgccttcagcgcagagcgtggatgctctggaatcacccggacccctggccttggagggaccctccagccccaggaatctgctttggagggaaatgtctatttttctaccgggaatattttagagattggggcatgctggctcctcccgccagctgcaaacctgcaccttccgcctgattcccgatccccctgcgtgggccgcattcctggtcccctgcctgcgtccatcgaggggcctggctgtggcctgttttcctttgaccccacacagcgtcattgcgggtcatggggagcccctggtgggagcttgtggagtcggatcacgtacctgtgcagaaaccgcctctg

SEQ ID NO: 43185 - DNA, 1027 bp, Homo sapiens
ccacactgtgtggggtggggcaggacctcacagagcctcgggagccgggagtctgtgggaggtggaccacgggggtggggaaggggcctctgggcagttaatcctggcacctggcgcctgcccgcaggactggccatcctcatgtgacctgtctgtctcttcgtcgtagcacaggcttagcaggatggtgtcggctggggccagacccagtgcttggggacagagcttttggccactactgaggtgagggtgggctcgggaagccccaggcagcgcacccgtctctggataccctccatccccgaagcctaatgtgttccttgactttcagggcgaagctgtgctcaggcccgggctggacgcagagccagagctgtccccagaggagcagagggtcctggaaaggaagctgaaaaaggaacggaagaaagaggagaggcagcgtctgcgggaggcaggccttgtggcccagcacccgcctgccaggcgctcgggggccgaactggccctggactacctctgcaggtgagcggccctgccccacgcggttctgtcccggacgtgcgtctcaacccctgcctgagggggtcgaagccttcactcgcacacactgtgtggaaggttctagagcagtgaggtatgagcgttcatgccaggcctgtgctgccgccgctgccctttctgtctgaatggcccagagccttcaggaactttcaggggcggcagcagagccgctgcccgtgcaggggttgcctggaactgtgcttttagaaatgggtctgatggtgaaccttgccccaggtgtacgtcaccacaggaagaatccacgggcctgggtgctgcttggacgtgggggtgaggaggagggaactcgtggtggccttcagccctcactcacagtgacaggaggcgccactgccacccaagagcgggaagacggggattgtggggtgctgggcacagggtgccatctccctggctgcctgcggcgtggctgggtggatggtgcctgcggcgtggctgggtg

SEQ ID NO: 43186 - DNA, 1026 bp, Homo sapiens
ccccaaacaatttagcagggacccaggagccacccaggtcacttcccatcacacctccctggtgtgaggccacggctggggaaggtcattcccaggctggagagactgggcaggggtcactgtccttttgggctgttctcagagcccacagcagccgtgtcaggccctgcccggcaacgcggcccccacacaggacctgctggaccaaggctgcctgctcctcccagccctggggctctcaccgcacagcctgcacacctgtgctcactgcaccgtccctgcagggcagggagggcccgcaggcaggaaggggctgtagacagaattggtgctcggatctgagagctgggctcaggccgggacagggtgacaccaaccggaacgctgccgtggccggatcgctgccgtggccggcggccaatgtggcccccttctcagggctcgtttctgtgcatgtggtgttcacagtcatcacttaggaaaattcggaaccgtggagattggtgtccagtccagggacctggtgccagagccagtgccaggctggctttatggagccccgcgtgtttgtcccacgtttcctgttggcttaaattcacaaacctgggaaatgatgatggtttttatttttgccagttctttttgttggggtatgactagcacgttacccaccttggacatctccaggaagagccagtgtgttgtggcgaagcctcacgctggggagcacggctcacacagggcccgtgtcacacagatggacgggtggggtgggcggaaaggagctgttgggtctctgctgcctcagtcgagtctacgggaaccttttaaaatcaaattagtgtcatttcttctctgtgtctcttgccaggagttaaaggcataaaggaaaaacatagttttcatgcagttgtattttctcaaacagtgtcagcttctctgtaagaatctcacggctctcttctctggaaggtgctgtggcagctgatccactttgctcctcccagcctgtagggtttggctttg

SEQ ID NO: 43187 - DNA, 1671 bp, Homo sapiens
ggcccttgggtggagacgcaagatggggcagcggctggcgagaagcgaacctagggggctcctctctggggcccaggaagagttcttggagaggctgtcctggctctgacaggagagcgggcctcccctttggtgggcgtgctgggcggggccccaggctgcaggaggactgtgatgggagcaaggggtgccccctctctcagggagccccaggagggcagaggctgcagcgcgtgttcacaggacgggagcatgagggaatgcactccgcggcgtgggaagaaacagtcgtggggaccagggcatcgcacgcggggcctgccgcatccatgcactgctgggcctggtgcccgtgttcccgcagagcagcagacaccaccactccgccggcccttggatctctcctcagtgggaagagaggctggggacgggccggccacctgccgcctcgctggacttctgccctgggattcctgagacgagagccgagcgtcctaagctgccctcgtccaggtgccccgtggcctccctcgggaaacgcactgtagcttggcctccgggccgcggtcagtgcctgcgggcctctgggtccaggctgtgggaactgtccacttcctgggagggcaggagtgagagacctgagtgggtgaccccaggcagccccagccccccacactccatcaggagaagaggggtcagggccacagccaaccagtctccgcttcctgcttgcttcccaccgcctctgcccatctggaagccctggctgcagtgggggccctcctcgtggtgatgggcctggaggttcttggcggccactggagcttcctgcagccactaggcctgcgcagcctcccctctgcccacagggcagccccacggccacctccgctctgtggtttgccttcttggactcagggcttcactgttttgaaaagcccgggtgctgcagtgaggaccccgctccgcatttctgccgggagctgtgagcagccaggccagcctcctcacggtgccaggaagcctctccttctggcccagagcagcagctgccccttccagcattgaccgtgggtgatcaacaacctggcatgggggcaggattttccctatagaaccattgaacaacacggacctgtcagctcaaggtaccttctggctttgcaggtggctagagatccatgcaaccacaggtgggcctggttgggcccctccaaaccctcaccctcttcctccctccctttcactcccccccccccgttttttttttttttttttgagacagagtctcactctattgcccaggctggagtgcaatggcgcgatcttggcttactgcaacctctgccccccgcgggttcaagcagttctgccgcagcctctcgggtagctgggattacagacgtgcaccaccatgcccggctaatttttgtatttttagtagagacggggtttcaccatgttggccaggctggtctcggactcctgactcagatgatccacccacctcggccaccacgcccggaccactccccagttcttgacaagtctgcagttcctgcactgtcctagactatggaacacctgggagggacagagagcttgtcctgggaccaccagctggacgagcctatcacccacccccgaggtagaagacctggggcgcagccc

SEQ ID NO: 43188 - DNA, 1082 bp, Homo sapiens
cagcagccactcactcacggagcgcggctgcagccggcacgtctgcctttgctcatcctcccagccctgctccgagctgcgccttctcgttgtttatgtgttctagacgctaggcttttgtgtatgtgtggtttgtacatattttgtcccagtccatagcttatctcttacatcctcttaatgagggttttgcagagaaaaggctgttttctttttaattttggtgaagtctaatttatccttttttttttttttgttctttttaattttaaggatctgcttttggtgtcatggttaagaattcctcaatgactcccaggtcccaaacattttctcctacattttcttatcaaagttttatagttttacatttgacatttaaatagatgatctatttgagttcattttttgtgaggtttaggttgttgttttggttttgttttttgtttttgagacagggtctcactctgtcatgcaggctggaatgcagtggtgcaatcatagctcactgtagccttgaactcccaggctcaagcaatcctcactcctcagcctcctgagtacctgggagtacaggtgcgtgccaccatgcttgtctaatttttaaagtttttttgcagagatggggggtctcactgtgttgcccaggctggtctcaaactcctggcctcaagcaatcctcccacctcagcctcccaagcagctgggaatacaggtatgtgccagcatgcccagcctggatttttttttttttttttttttaaatttatttttttattgataattcttgggtgtttctcacagagggggatttggctgggtcatgggacaatagtggagggaaggtcagcagataaacaagtgaacaaaggtctctggttttcctaggcagaggaccctgcagccttccgcagtgtttgtgtccctgattacttgagattagggattggtgatgactcttaacgagcatgctgccttcaagcatctgtttaacaaagcacatcttgcaccgcccttaatccatttaaccctgagtggacacagcacatgtttcagagagcacagggttgggggtaaggtca

SEQ ID NO: 43189 - DNA, 1134 bp, Homo sapiens
agcaggcctggagacagagggggcctgagtgtggggatggtgaccacccctctcaacctgagaggcacccgggtccctgtatgtgtgtgtgagagagagagagcatcatagcgcctgcactgcacagagctggcagaaacagaaaccagcagaggaatcctctgctccaaggtggctgaattagtttcacaaaagccatcgcttttgatgttgctgtccctgttagtcgggaagttctttcctctgttgcttagggccctgtcagagctggggccggcaagtcccacgcccggtgatccccacgaagtttccgggtgctctctttcacactgtcttttgcggatgttgatcccttgcctagaacaccctttctcgcttcccctcgttctctcagcaaacactggctcgtccttgacattttattttgggcatcagtacccccgggaacccacccctgaccactgtctccacacccctccgccagtctttgctgggttaagcctgtccgcacatccatctctttcccacctacttggagctctttgcaggcaggggaagtttttatgtgtgctgcagcagcctggctgactgttggatgaaaaccgtagaaggggatgtattcagtgacgtaaaaggcttttccccaaggcgagtgatccaccaaggcgagtgatccaatttccccactgagtagaaaggagagcaggcaggatggggactcagcgcttcttattgtccccggacagttgttgaagctttagagccttagatttgagtggaaagagaactgcgaggccccaggcactgcatcctcaggatggcaggaaaggagtggaaaggccacggccagctcctggccgaacctgccatgcaccatgagacgctcaaccttgggtgaatattctagaacaatcaaaatgctttcaaaatgactctggaatgtttattttcttttgtagtaatgaacccaggctttagcaacaattaacatccagctcctaggagccagatgcttaggaaaggctgctgttttcacagggtttccacgtggagagcttacgcacactgattcctatctgtgccttcctgggctgtgataagaaatggttcattacataggtggatggttttgat

SEQ ID NO: 43190 - DNA, 1050 bp, Homo sapiens
tgggcaggcacacccagcacggtcacaacaagccatttatcccccagtacgcaggcccctcccccggttcctcacaggctgagtactctggggtcacagtcttcccggacatcacctattggttgtcgggcaggggctgtaggtgtttttttagggttgtcctgctgcattttgttgcagcccacaatgcgttgcaatcctagtcagctcaggggcttttcaggtatttgacttatgacctaagtagctgggcagactgataagaacagacaaaacaagctatgttgcagacgagtaaaactttcgtcatagactaaaagtttttgggtcaggtgaaggcaactaagcgttggggggaagactggggatggggaggccgacaagcaggcatcggcaacccaggcaggggcctggtcttctgtagcttgctgacctaagcaagcaagacactgtgtcttggaagtggaccactgtgtacattatttccttcactgagaactgattttgcaaagccgagtttgtgtgactgtggagggcgagtgtccacaccaggcagcgtccaactcagcgctgtttctcagactgatgtcccggggacagtcacagacccccggggctgtcctgctccctgccgggtggcagtgaccatggggatgtgcatgagggctctaggtctgaggggtggtttgtccaaggtcatggtcagagccaggactgacacctgggttccagcctccgtgccaggggtgtggcgtgagcaccacgaggggaaactggggacatgtgacacactgcagcgctgaggggccctgttctgaggagccagtggagacctgaggacaaagcatccgtgtctcaaggctttgccctctgctaaggtgggcactgcagggacccctgagctccacagagaagcggaccttactgggagaggagcctggtgcgcaggaccgttgctggggccgcagcgtgtgctgcagcgtccaaacgcagctctgggtttgtgactgagcatggcggtgattctgccagaggcgggaagcctccctg

SEQ ID NO: 43191 - DNA, 1027 bp, Homo sapiens
gggtcggggcgggcgtcacggcagcggggtgcagggttgggggaacatcacggcagcagggtgtcggggtcgggggtcacggagcgtgacggcagcggggtggggggttgggagtgacggcagcggggtcggggtgtgtgacggcagcggggtgaggggtcggggggcgtcacagtagcggggtgaggggtcgggcgtgacggcggcggggtgcggggtcgggggcgtgacagcagcggggtgcggggtcggggcgggcgtcacggcagcggggtgcagggttgggggaacatcacggcagcagggtgtcggggtcgggggtcacggagcgtgacggcagcggggtggggggtcgtggggagtgacggcagcggggtcggggtgtgtgacggcagcggggtgaggggtcgggggcgtcactgcagcagggtgcggggtcgtggggggcgtcacggcggcggggtgcggagtcagggggcatcacggcagtggcggctttgaacaggcgactttcaaggactttcttcgctttctccacggagcttctgttttcatgagaaccaaatatgggctggggaaggaaaccacagtaaaaaaagtgtctcaaggagttgtgagaaagtaagaaagctctacgatgttgaggagcagcaggtcgatgctgtggcagattccagcgggattagggggtgggaagcagagcctgaggggcggcgggagctcagctggggcgccggaggagctgcctgcgcggggagtagctgccggccacttgtctccgaaacgggagtggaatgcggtgaggaggtgaggagggagggcagtgttgcttgaaagctctctgcccttcccttccgctgccctctggtcattgtatgtattttgaaattcacaccgaaggagggtgtaaggtgttcctgtgtgtgaagctgcagagtgggtgagaaagaggccagaggagcgccttcctctcctgctgccagtcctggttttcaggacctggttttggtcggtgggcctaggacat

SEQ ID NO: 43192 - DNA, 1033 bp, Homo sapiens
cgacgtccagctcagacccaccagcaccttgcatctccagcgtcagttcccccacggtggcagatttgctttagggttcctgtgtaactgaggcgcttcacccacagtggcctctccgtgtggctttcctggtcgacggtgtcagaaatgtttcctgcagcggcaggcaggtgcagcggcaggcagggttggcggggaggagctgggtgacaggctggtcaccgctggcctttggaccctgcggggcgagcgctttgggattgtagcaattctgtgtgaggagtgcaaggtgaccagtcgtgaggtttcctaagcagccccagggtgaccaggcaagcgtgaccctcgcgaggccccgaggagccagaagccacatctgaccgcagtttagagacatgacgtggccgtgccttgtgtccacccaggtgtgtgcagctcccgagtcacaccctggctgggcctatgcggccaaggctgtctacacggcactgctgaacctcacatccgactgctcggtgctgtctggaatgacggccttcagggcagcgtgacagaagcggttcagggccggcaaatttgttttctgctcaatgtacagcctcagcttgtccctgaaggtctccccgagaaagctgtagatgagggggtttaggcagctgttggagaaggcggcgaggttgacaatgtggcccgtgagggggtgggcatggcggaaagactgcttgcagggagcggccccaggctgcgtccgctgcaggaggtgcacgctgatgaagacgttctccggcagccagcagacgaagaagaccagcaccaccgcgaggatcatgcggagcgccttctgccgccggggccgcagcccacggtgccggtgcgccctgaccagcacccggacaatgagggagtagcacaggccgatgatggcgaagggcacgatgaagcccagcgtgacctcgagccactgcacctcccggacatccgcgaaacagaagcaggcctcgtcggtgtgctgcaggtgcacggcggtgaaggg

SEQ ID NO: 43193 - DNA, 1245 bp, Homo sapiens
ggtctgctctcagacatgtggtgggctccgtgtcacgggtaaggggtcggggtctagacggcaacagagtgtctctctcttcccgctccctggtgtgcccacctccctgtacagtgtttctgttcaagctgctgcaggggacggggcatttttcctccagactctattttcctgcaaggaagagctgctgtcctttttcttactgaagcccctgattctgtgtctgatgttgctgacgccgtgcttgctttcttgcccgtgtgcaacttcccaatcccagcacacgtgctcacttcccaagggtgaggcgggcaccgtgcctgcgggcggcccaccctcacggaaaggggcgcaggatcacagttcagtgggtcacctgttctccaggtcgcccgctgggttctcttccgagtgcaccttcctttctctcttaaagctttttaataaacgtccgctcctgctctgaaaaaaaaaaaaattttaaaaacaggtgaatggaaggtgggcatggtttgaaacactcctttggttttaccaaagaagcaagaccgtcccctgtggaagtgacagtgacctggtgttgaacgccagcgtggccggagctgtgagcttcacagtcgtggatgagcggaagaacttgagtgtggctgcagacgccgacttttcccttcttctccccctcctcttcttcttgtaagatacacaaatcaagagctgcccgcagctttagtgggactgcgcggtggagaagggaactgccactgccgctgggcccagctcctcgcttctctctagagccgtgtgctgggcacgcagctctgaataatgcggttggctttgctcgtgggtggactttggacggagtttgtgttttgccgtttttttgtgtgtttttcttttctggctggctgcacttggcactgggctgttgcctgtagctctggatggttaacgtgggtggtgcacgtgccccaaagccaggtctgtggtcagcggacatgctgcccagcccctgtggggagagcgctctgctgtgatgacttctatgggcaagaccttctgcatttcacacgctgccaaggcactgcagcttgttcctggctcggctggcctggccgctgcctcttgaaccagagagcagggtgacggtggcccagcgagccaagactcaggagcgagcctcgttttctggaggccgagcagggcttcgtgctgtgtccgcgacgcgcacctccttgcttgtga

SEQ ID NO: 43194 - DNA, 1103 bp, Homo sapiens
tgctggccatggaggggtgagtggggagggcccggcgggcgggaaaggctccgtcgcccacgcagaggtgagtggggagggcatgtccacctgttccgtgttcgcacctgcagactaaactcaccgcaccccagggtgtggagcgactgcgtgctgagctgcaagtgaaatggagtgttacactgtagcctttacgaaaatgagcagtgaaagagttttttatatgcttttaggaaccacgcaggaatggggggcctcaggggccacgcgtgtcggctggattcccaaggtgatcttcaggccggtggttttcagcctgttgggattaggaccacttgaagggtcttaattcttttattggattaaggtattttaaaattgtttaaaacaaatacatgcttgtcatgaaagtttaggtaatgcagatatatggaacttctgtcaatatggtggattggtcaacatgggaaatcgtcccttctgcctcacacacataaaaatactggaagaggctgggcgtggtggctccgagcactttgggaggctgtggcgggtggatcacctgaggtcaggaatttgagaccagtctggccaacatgttgaaaccctgtctctacaaaaaatagaaaaatgagctgggtgtgatggtggggcgcctgtgatcccagctacttgggaggctgaggcaggagaatcgcttgaacctgggaagcagagttgcagtgagccgagtttgcagcactgcactccagcctgggcgacagagcgagactccgtctcaaaaaaaaaaaaaaaaaaatgcctgggagaaatatcacagccgaattttctagcatagttaattcaaaagcaggtggtaaagaagagacccagcagccgctccagtgaggggggtgcacactggatggcccccatcggcatcaaagcgggtgcacacggtaggggcgtgtgtgtcagcagtgacacggcaacccgggtgatctcagacactcaggcggcagagagtggaactcaactgccctcctagccgagagccacttgtccttaaaatgggaggtacaaaatccttttagctggcggagacacatggcagggaagctggg

SEQ ID NO: 43195 - DNA, 1035 bp, Homo sapiens
agaggcccagtggttgcactttgagtaaggaacagcccggcccttgtatgggccagtggccgcacagtctggcctgcaccccttgggaagttggcaggactctgggtttattgtgggaaatgatcagggccgtgtccttgctacagtgggaaagcttgccatgggcaccgctgcactgcgggttaattaggagaagaatagggcatcagtgagcaacaagaggacatttaacttgaaatataaaattagtatctatgtcgacgggaagttgagccactgagaggtttgtacttctttctgagctcgggcctctccattcgctccctggagacaagtttgagaagagccccggagcagagcgtggcctcctgccgtccaggccgggtcctggagcccctttgcccctcgaagcctgccatggctcagagtttctgcaccgctccttgcctggcagtcagagctggcacccgcgggtaggaattacaggcacaggtggtggcttgggatgaggcacgctgtcggaaaatcagtgctgtctaagaggaggtaatgagtctgtcctgggaaatgctcgggctgggacgaggtgggtgtcgtaagggccgcccgggaaggagtcctgtggagcgtgagatgtgaagtagatgagctccgagtccctgcccagcgctgccatccgattccagctgttctgcatcctgtggggcgtggtgacccatcagcacctcgtgatgcttacagaatcttctcagtgtggacggtcgaagcaagtccgtgcccctgccatgtgggtcgcacacctgctccgaacaggaacagcaccagcctgcagagaacaggagcagctgctgctgcccgggcggcgccttctgggagcgggcactcctggctttcagggcattggttgctgggggacagtgtgaaaacacagtactcagcaagccagtgccatcagggcgctcactcgcactttctcttaaagcaagtttatgtttaaaataacggtagattcttagtaaattaaaaaaaaaaaaa

SEQ ID NO: 43196 - DNA, 1030 bp, Homo sapiens
caatggttcacgcctgtaatcccagcactttgggaggctgaggcgggtggatcacaaggtcagggttcgagaccagcgtggccaacatggtgaaccctgtctgtactaaaaatacaaaaattagccaggcatggtggcaggtgcctgtaatcccagctactcaggaatcaggagaatcacttgaacccaggagggagaggttgcagtgagcccagattgtgctgttgcactccagcctggcccacggagtgagactctgtctcaaaaaaaaaaaagtatccaaaacacactgggctttgaacataataccaaattatctatctatctatatctcactgttaaaggtattgtttacatgttgcctttattgtagagtggggtccaggcacccactgggaggcttggaacagatccccagaggataaacggggactgctgtataatttttgtagcacagagttagaagtgtgtgtatatttctagaaatgcaaataaaaccaaggcctgaagagtaaaaaaatatttacatgttgaaataatattttgaatatgctaggttaataaaacattaaaatgaatttcacttgggttttactgtgactgctcaaaattttgaaactgggtggtcagctcggtgctgtccctgttagatggcgttgtctagctctcccaccaaaggccaaacagccctggcacattttctcagcggggagaggcggcgcctggttcatgcattgcgttttctgtcttcgatttgacggagtattgaagtataaaacttaagagtgctctccctctccctctccctctccctctccctccccctccctctccctctccctctccctctccctccacggtctccctctgatgccgagccaaggctggacggtactgctgccatctcggctcactgcaacctccctgcctgattctcctgcctcagcctgccgagtgcctgcgattgcaggcgcgcaccgccacgcctgactggttttcgtttttttttggtggagacggggtttcgctg

SEQ ID NO: 43197 - DNA, 1045 bp, Homo sapiens
gcagtgcatggagccctccagcagtggctcccaagggtggcggggctccccgagacaccactattgttgggggccaggggagagactcacgcagaggcccccacccagaagctcccaggcagtgccctcacttcctgggccagggccgagggtgggctgacctcctctcccacgcggggttgggtcagcaggaagctgcttgtggacagaggccttctgttcctgccccagggcctgtagccagacctctgtggccgcctctggccggaaccctccaggacgggcgcgggagggggctgcctgtccacctactgcagggggactgcccagggccccacactttccttccagaggcccagtgtgcaaggtgggggctctgcggcctcccctccccagtcgtcaccgccccctgcccaccccctcctctcctgagctctgcctggccatgtcctcgctgtctctgaggtttgctccttccccgagtcccctctctgccatcccgactgtgccatctggtccctgtctctcttgggcctccctccaccatctccgctggggtcttcctctctctctccagctctctctgtccgtccacctgcctctccccactccctctgctcccttctccgtgggattctctcctgatgtgctggatgtgcctcggctggggctccttcccttccaagtcctgcacccccccgccctccccactccatggcggaatcttgttccaggaagtaaacagtgtgatgtcggccacccaggaatttggaggggggtatacattcccaagagcccccagaggcgccggggcagaggccggctggactccatgggctgaagttgatggtcgtgggtcagttagaggggtggtgggggcaggtgtggccgggcaggggcacgcacggtggagagttggccagggcaaatcttgtgaccgacacacagacggcaaattcattccttcagccagtgttgaaagaataagttactgccacagaaatctcaccaagcacagaacaaatgcatcacacgcatttatagg

SEQ ID NO: 43198 - DNA, 1026 bp, Homo sapiens
ggccccccgcccagggccctggcagccctcggggaggccggaggtgcgtcccccgagggctggctcttgggagtcccgaggtctggtcactgcggccaggatgttgtggccagcgtgacgtgcagggccccgtttcccccacagagcacgcggctgtgctgctccaccgggccttcctggtgggcatgtacggccagatggaccccagcgcgcagatctccgaggccctgaggatcctgcatatggaggccgtgatgtgagcctgtggcagccgacccccctccaagccccggcccgtcccgtccccggggatcctcgaggcaaagcccaggaagcgtgggcgttgctggtctgtccgaggaggtgagggcgccgagccctgaggccaggcaggcccaggagcaatactccgagccctggggtggctccgggccggccgctggcatcaggggccgtccagcaagccctcattcaccttctgggccacagccctgccgcggagcggcggatccccccgggcatggcctgggctggttttgaatgaaacgacctgaactgtctgtgtgctctctggtgtcccatgtcgccctctggccagtgagagcctcaaggaccctggccttggcttcccagccccacagtgcagggagttgagcagggtccggggtggtggagaccagggccaggctgggctctcccttgggccagcagttcccgcaggtgttgagggtcgggggatgctgcccacttggccgcccccgccccacgtcatggtctccctgtcgagtgccggccctgggccctgccgggcctcaagtcctctgcccacggggtcggcctctgttgagtgagtccggccttgtcaggctgcgtgggggactggcccagctgactggtctctctctcctgcactaaaaggatcaacaaggccctgagagcctcaactgtgggcgtccctctgtgggagctgagttggggtcccattccagaagagtccgagtagccggtggtgctgctcgtcctgcc

SEQ ID NO: 43199 - DNA, 1053 bp, Homo sapiens
atccgttctgaggtgctccgcctggtggacgccggtacggtccaggctgggcttgggcaggggctgctgactcaggggtcccgggccccttgcctgctccttgtgggcctgggcagcctccggctgtggcagaggagaagactggccgggtagcctcaggggatcctgcagaccatatgtcctggccacagcaggctgtgctggaccctgggaggagacctagggcagcctgtgctggccccgtccgagagggtcttactgtcaggctcaggggtctagagtgagaaacaggtcctcgatggaaaaaagagaaagtggtctggggttggagaggaggaggagaagtggtggggcctctgggtgggtccctgaaggatttgggggttggagctgcagccggggaccccagcaaggactgagcaaggggcctgggcccacgtaggtcagtagggctggtgcctgctcacagtgaggagacactgggggcagcttggtgagtgagtggggctggctctggaaacccatgactgccaaggggtctaggctgttgtgtgcccccggaagccaccgatggcttcggggcaagagcgccctgagcactgagagaagatagtcacagcagcctgcgtgcagcttcggaagtgtactgcgccgtgccaccataggccctctggagcgcccacccacccctggggatggggcccacacagctgccatccagggtgcaaggtggtcccgacacgctgcccccttgtgcggccccaggtctcgggtggggtcaccgagcccacgtggcccagggtctcaggtggggctgccgagtgtgcactgccccaggtctcgggtggggctgccgagtgtgcactgccccaggtcttgggtggggtcaccgagcccacgtggcccagggtctcaggtggggctgccgagtgtgcactgccccaggtcttgggtggggtcaccgagcccacgtggcccagggtctcaggtgggtggggtcactgcacacaggcagccccaggtctcgggtggggtcccgagtgcgcattgccc

SEQ ID NO: 43200 - DNA, 1048 bp, Homo sapiens
atgtgcccggttttctctctcctttctctgcagggcaccctcccccaggagacttcattgctctgggctcaaagggtcaggccaatgaatcgaaaacggcgtccaccctgctgaagccagccccttccggcctgccttctgagcgcaagcgggatgcggcggccgcgttgtccagtgcctcggccctcaccggtctcaccaaacgccccaaactctcctccacaccccctctgagtgccctggggcgcctggctgaggctgcagtggcagaaaaacgagccatttctccgtcgattaaagagccatctgtggtgccaattgaaggtaatgagtctgtggacatcccccgagaacacccctcagctcatgccgtccatcaggtgttcagggaaggccccctccaggcctagtgctgcccgtatggccgaggtcctttgggagagcggatgtttgtggcttgttcttggaagtgcttctcacgtagatgcccttatcccgtgtgtgcatctgcgtcctgcactgccagtggctgccctttgagaaccgggtcactcccttattgagttgtttgtctcatgtgtctgttggacgccccctttgtgacgggcactgtctgagccctgggggtaaaccgggcgtgacgacaccccaggtgtctgttctcaaggttgcccatcctggtgcgttcctctctcaacctgagcggaggcgatgtgtacttggttcctccttccctcctggttaccaacagagaagagttgatcccctccctgttttcagttgaaaagcagcagaacagtaaggacatcaacgggggaatgtaagcttcaccactgtcccgttctcgcagaaatgcctttaactgtgtgcctagaatcgcccctgcccctctgcgccattttcccaacgaccatttctcaaggctccgtgactccctgggagtcgctctggcagctatcgcaccagccccagcaagcctcatggtctgcagtgttttgtttctgtgggagcatctcttttgggtaatttctttgtaggagtcaaaaag

SEQ ID NO: 43201 - DNA, 1030 bp, Homo sapiens
acgtttgaacagatgtgctgtcatccaggctttgttgttccactgatagagcacagacagagaagacttagcatcattcttaagggccccaagagctcatttaccgtctccatattagcagtaagcctgttctgctttcttatcattcatgtgttcgttggaatagcccttgtgatttcctttacgaacttctcctttgcaggctagctgtgtggtgcaagagacctagcttttggcctcagttttcaacatgccttcctcactaaacctaattatctctagcttttgatttaaagtgagagacatgtgagtcttctttcacttgaacacctagaagccattctagggttattaatgggcctggtttcaatattgttgtgacggtcgtgtctcaggaaatggggaggcctaaggagaaggagagagatgggggatggctggtcagtggagcagtcagaacacacacatttatcagttaagtttgctctcttatgggcactgtttgtggagctccgaaaccattacaatggtgacatcaaagatcacagatgacagagtaccataaaagatatactagtaatgaaaaagttggaaatatatacgacacagacatgaagtgaatccacgcttttggaaaaatagtgccaatagacttgccagacacagaccttaaacttgtaaaaaatgcagtgtctgtgaggcacagtcaggccacggatgaagcgaggtgtgctcatgtgaacacagggcgaattggcttctgtgagcacgctgtatctgcttcacgttacttttaatctactgcgtcttcatagttaaaatgtgcttcttaaaagcaggatatagctgagtcttaaatatgcatagaatctgacattctctgccttttcactgggccatttacatttaaattgattactactttgattagataagtctatcatcttgttatttgttttctgtttgtcctgtctgtcctttgttcttttttcttccctctttttctgcctttcttggattgaatttttta

SEQ ID NO: 43202 - DNA, 1024 bp, Homo sapiens
acagccctgagcacccccgcctgcctgccactgtctcgacggggagggccgaccatcaggggtccaggcagcacttcataaagcaaagcttcacccggctaagacgtgtgggctgcttgggggctctgtgtctgcaaaacagtacctgtgaaaataaggaaccgtaggagacgtgggctggaaggacggctggtaaacatggcccctcctcacttggagatttgtgctgccaataacgaggacatggatgaggggcctcccacagagcagcgcttcccaagtgccgctgagtgaagaagccctcgacagcctcgcacagcatcagctccctgaccccgcatgtgcgtacgtgtgtgtgtgtgcatgtgtgtacgtgtgtgtgcatgtctgtgtgtgcacgtgtatgtgtgtgtgcatgtgtccgtgcatgtgcatttgtgtgtgtgtgtgtgtgtgtgtgtgtacatgtacacccgtgctcacaaacaggctggagaactacatgccgtcgcctctgtgcccccgctggtgtgattctgagtgactgggtgatgggtgatgagtgttatttttatatttcaaaatagtgtgagaaggaggctgtcctattgaggcacagaccagtgggcaaggaccttggtggtggggggcacacaatcctctgggggacctgggctgcccctgtggggatgtggcatcccttgggatgctgtgggcagcacagtcacctccagggcccctggcttatcctcagcaactcagaattaagtgacatcttcgtccttctctggaccagttgttttccagagcaggtcagacagagctcagcttccccatctgccaggattcagcgctgggctctcggaaccaggagcgcaaatcgctggtgctcggggtccatggtgccccttgagggctcacacagccttcccatgacccttgtcttctactcctggtagggtcttgaatcccaggagatcttgctctcccataagaaaagcagctgtgaaagcacagccgggcc

SEQ ID NO: 43203 - DNA, 1076 bp, Homo sapiens
tgattttttttaatgttaaacctaacttgcattcctaggataaaccgcactgggtccctttttatacaattgatagattcaatttcctaatttttagtgagaatttttgcatctatgatcttgtgcaatattcatctgtggtttagtttttcttgtaatgtgtttgtttgccttggtatcaggatgatgctagcctcaaaaatgaattgggaagggttccctcctcctcttttttctggaagaatttgtgtgagatatttcttccctaaatatctgatagaattcactagtgaggtcatctgggcttggcattttctctgtgggaagctttttaaattatgcatttaatttaatagatatagaactactcagatgttttttgagtcagttttggtcatttgtatcttcttgagtttttgcttattttgtgtatactgtcaaatttattggcataaaatcattcataataattcattattatccttgtattacccatagcatctgtagtgccatcccttcttccatttctgattttggcaatacatatcatctcttttttcgtcatcactctaagttttatcgatttttttatctctctcctttcagatctgtcaggttttgcttcctatatttttaatccctattttggggtacatacgcagttaagattgttatatcttcttgatcacttgcaattgtaattataattatgcaatgtctgtcttcatctcttaaatattcttgttctgaagtctgacttgagtaatattaatatagccactcctgctttcttacaattttaatatttatatatacctatctatatttctaatcttttaatctacctgtgtctgtatatttttaatggattttttgaagataacatctaattgaatcttgctttttttattcagactgataatctatgccatttatatttaatataatttttatgacattgagtttaaatctgccatcttgtcatttgttttctttttgtctcgtatattctttttttcatttttcttgcctcttttgggctgttttttggtattccatgttttctccaacattgg

SEQ ID NO: 43204 - DNA, 1035 bp, Homo sapiens
ggccctggttcacctaaggttctgcagatggacagggtctgagcaaagaaccaggcatcctgcctagagagccctctgtcagctcagctctgcagcccagacttcccctccaggctccaggctccactcctaagctgaaccatggggctgcagtggcctgggcagggagcagcggggaagatggggctgttcccagctcaccgtctctcagttccatctcttttctggatcccaggctccccatcagcagtgagatccctgcctccacagggtcctgtgagtgactgggacgccctacagcttgcctgccctcaggggccgggtgctttctgctgaccacaccgtacttcctcttgctttggaaatggcagtgaagattgtatgtgagcatccttctggggtttggtgtggggcccctgagatgggacgcacgcaggttcaagaactacactgtttgccaaattgagggcccactgtgactgcaggaagtcagtttgtagtgagcggggaaaggccaggaggctcaaggaggggaggactttggggcagcctggccatggccctttgtcatcactgtgtcgagtggcctcccttccttctgaggctccagctttcctcaagtttgggctctgcagggaggtcctagcagctccccagctcctctaaccaggacagcctcagtttctgggggccctgcagagacatcatgacctggtgcagggcttcccaaagctgtctgtggccccatctgcccagcctgggtcaccacaggtaggatccaggaacccgggtgttggcaggctcccaggaaacatggatgtcatcagcccaggtttgaggggtgctgattaggaacactgtgaggatacggaaggtgtgtccggttctcacctgtcactcctgtaggagttgtggcgagtcctagttggcctattccagcaactcttgtttaaaggaatatcctttcctgattgaattaccttggtacttttgttgaaaatcagtttgccggccaggcgaagtggctcacacctg

SEQ ID NO: 43205 - DNA, 1029 bp, Homo sapiens
gatctgggagacacactggttccagcaggctcctcattccttgctgtccagggccttccccggctcagaggcctgcagggtgggcgtcagggccagaggcgtggacggcacagattccggaactgcacaaacatgtggcgatgtcgacctaccgggtttgtcatatggatgagggggaaaggtatacaggtccagcctccccgattcgaaaacctgaagtcgggaatgttccaaaatccacagctttttttattgtgggtctgtcactcaaaggaaatgcttaatggagcgtttccgataccagattttcagattagggatgaatatttgcatgagatgcttactcaaccagtaagcacgtaatacagatattctgacaacctgaaaatctggaaatcccagacacttggtcccaagcgtttccaataagggatactcagcactcacctgtgtgtatatgtgtaagtctagtacggtctcgctttgccagatgacagggatgcatgctgaggaacgtgctggtgggcagtgttgtctttgcgggaacttcctagaatgacttgtacgagcctgggccgtgcagcctcccgcacccttgggccgcatggtttagccggctgctgccaagctgcaaaagtgtgcagtgcgtgactgtgctgaatgcagtagaccaccgtggcgcagtgctaagcatctgcgtgtctgtacgtgtttaaatatggaaaaggtgccataaacatgatgtatgaagggtggaagacggtgcacctgcgtagggtgctcaccgtgaacggagctcgcagggctggcgggtgctctgggcgagctggtgaatgagggtgagtgagtgtgaaggcctaggacatgagtgtgcacaactggagactataaatgccgtaccacttaggctacactcaactattaaaaatactgttcttttcttcaataataaatgaatggctgggcacagtggcctgtgcctataatcctaacatttggggaggctgaagtggggggatcgcttgagcc

SEQ ID NO: 43206 - DNA, 1051 bp, Homo sapiens
gttccgcaagagcgtcttccataggccactgcatccttgctgcctggaacagtgcttcatcaatcatgagttccgcaagatcgtcttccgtaggccactgcgtccttgctttctggaacggtgcctgctgctgggtcctccttcccactgcaggacgtacagcgaggctggagcctgagacggttccctgcaccctgaggctcacgtagcccggccgacctggttctgcgtgggtatagctcaggccccggggaagggcggaagtggacaggcagtgccctggggctgcactcctaagatccgtcggtacctttaaaaggttctctgcttgctctcatctgcgtgtgccccgtaacactcgaaggagtaaagaggatgtagagaaaagtaccgcgttttccttttccctccttctgaaaggcctgggccccggcatctctgtccctatccccgtgggtcacagctgtgtgctggctctccctgccctgccaaggtagaagcattttctgcgtttcaggctgtgaactgggcctcttgagataagtgctgtaaatgctcctttatcctgacatcccggccctcagtactgtaaagcctctctttcctgctagctagcctttacctaatggagcacaatttatttttattctgtcctcttcacagctgcctcctgtgattccaggaggaggcaggtgtggggctaaggtggtgagggggtggctgttcaggcaccagtgtcgtggatgccttcagccccctggtacaccccactgggccgggccctgggcagccgccgctgcatcctctctgactcccacttgaacacctgctgttcttcctcctctcttgcccctcaccgaggccttgagagcccatcagtaccaggcctgtgtccctgcatccctgcaaggtggtagcaggtacctctaagagggccggttctgcccaaagcaggggtcccaggggtgtggaggaggggcccgaggagggccggtatctaggcagaggggagttgctgcttcctaggcaggtgctcctggtcagtgtggcc

SEQ ID NO: 43207 - DNA, 1030 bp, Homo sapiens
aagaattctttgttaaatccaaggttaggagggtttcctcctctgttttcttccacaggttttacggttgggctttgcgtgggtcttggatccattgttacttagtttttgtttatggtgggaggtggggcccagcttcattctttggcatgcgccagcccattgtcccagcagcatttgttgaaaagactatttttccctatcgaaaggtcttaacacctttctcagaatcacttaacatgaacgtgtggttggttcctggactctccactgtgttgttggtctgtacgtcggtcctcatgcccacaccacaccatcctgattgcagtggctttgtagtaagttttgaaatcaggagactgagtcttcctcccgtgttccccctttgcaagcctgtggtggctcttctgagcccctgcagttccgtgtgagtttcagaatcagcttatcagttcttcagggaggccggctgagtcctgggattgtacagaatgtgcagatcagccctgggagtctctggtcccgacagcgccgggtcttctgatccgagacatgggatgtttcctaatcacctagatcccgcctagtttcctcccatgctgttttgctgcctgtgtgtttgaaatggctcctcttggtggggtgggtgcaggagtggtgctgtttgtataggacatagggccgtcctcccatcccgacactcggctgccctggagacgggcctcagcacagggctcccattacccctgcacttccagcacctgctgaaatgtgtggcgcgcgggctccgaggcatggaatggtgtgcctgactctgcgctgcccaggctgtggtcacagcagcaggctggaagtttggctgtcgcccccagccaccttggggcacggtcctgtctcacctggagcagaggtcctgggcccccaggggctcaggcgtggcctccttctggaggggccgggaatgtcccctccacttgctgagtgttggcccaggaggctcctctgtgggatgccagctgctcccaccatg

SEQ ID NO: 43208 - DNA, 1051 bp, Homo sapiens
gtatgtttaggagtccctagaacgcccccgaagcgagcttgtgtgatgtgtttcattgttaacctgagatggtggtttttggaaggaagatcacagacgacaagtcctttctcaccacgtcccatcagggagcccctgacatccacgcaacagcaggtggacctgaccgctggactgaggcgttgacagcggacctgactgccggactgaggcgtggacagtggacctgaccgctggactgaggcgttgatggtggacatgaccgctggcattgacggtggacctgaccgccggactgaggcatggacagtggacctgaccgctggactgaggcattgatggtggacatgactgctggcgttgacggtggacctgatcgccggactgaggcatggacagtggacctgaccgctggactgaggcattgacagtggacctgaccactggactgaggtgtggacggttgacctgaccaccagactgaggcgttgacagtggacctgaccgctggactgaggcgttgatgtggacaagaccgctggtgttgacggtggacctgaccgccggactgaggcgtcgacggtggacctgaccgccggattgaggcgtgctctgccgggtgcctcgtccgcgaagctgtttgcactttctccagtctcttccttggaagcgaatccctcagggcacaggcgacgctccccctctggagggatgagttctacatgtatgatgtggagttctgtgagggaggtgtctcctcttccccatttattcacttcttcatttattaccagcagtgtggactggagggagtttgccacgtgctctgtgttctgatctggtgcacgcaccaggacttgtttattaccagcagtgtggactggagggagtttcccgcgtgctctgtgttctgatctggtgcacgcaccggaacttgtttattgccagcagtgtggactggagggtgtttgccgtgtgctctgtgttctgatccggtgcatgcagcgggacttgtttcgctgcgtgatctccccgcggccggccgcgccct

SEQ ID NO: 43209 - DNA, 1047 bp, Homo sapiens
aatcaagaacaaaatcagggaaaaaaaagctcctaacacttggaatttaaaaaacaaaacccaaacagaacaaaacactgtgtcttaaacaattcttggttcaaagaagtacgattcaaaagtgcataagatgtagaaaataattgtcatgaaaacacttctcatcagagcctgtgggaaccacctaaattcacaagtttaaatatttatatcattgaacaagaaagcatgtaaatatatggattaaaccttcaacccaagaagtcagagaacaaaaggaaagtaaaccttagtgaaacaaaaaggtaggaatttgtaaagatcaaagcagaagttaataggaaagtgaaaaatggtagaaataataaataagtccaaatacctgttatttgaaataaaaccaataaaacatatgaattattcacagttctaataaaaaattgatagaaagtatcaccatccaaaataggaaacaagactaattacctggagctattgactgagcaggagcatgcgagagctttcaggcgtgctgagaattctgtgtcctgatctggacggtggatacgtaggtgaagacatgtataaaaagccatcaggctgtgcacataagattgagaagtttactgcgtgtaaattatgtatacctcgatgggaaagaaaagcaaaaattaaaaaattgagaattatgagttttgtctgatttctataaaaagaattatgaattatatctcagttccattttaataaacttaaaaatctgtgggaaatgaatgacgttttagggaaatgttacctatcaatcccaactccagaagagagagaaattttaaacagatcaattactgtagaaaaacgttgtcccaaaattgccatggctgctctcccccaccacaagaggaaagaaacagaagatgcatcaggccaagccagtttcatgggaaaattctaccagatcttcaaagcgcagatactttgagcactgtgtaaaccagttcagactgtgggaaaaggaggggaaggcattctggaagtgttgtattgaca

SEQ ID NO: 43210 - DNA, 1033 bp, Homo sapiens
gggagctgccccgctcaggccaccaggcaggcaagggaggaacggtcgcctcctccagttttcatttcattccggcctcaaggggttggaggaggcctacccatgctgcccggggccgtctgctgagtccccgattcaaatgctgatctcatccacaaaccctcccagacacacccagaaagtgttttgatctgagtaccccaggtcctgtccagtggacacatggaatgaaccgtcacagactataaagttcaacagggaggatgatgtatctgactagttaggcacccaacataggagatacagtaggtactgtctagtaggaaagtatcggtgtgaaacaaagctgagttataaaagcaaccagggtaaaacatgcacacttttctaagcctcgagagaattacacgcaaaaaagtaaactagattaaaaaggccacagaatgagatagatgtaaaagctacaaaatcgaaagcataacaacataatacaacagaaatagacacaaatccagttatagttggactaaactctcctattaaaaggaaaggacttcctgattggattgcaaagcaaaaccaaacatgttggaaagtacgggaagcaaaggcatcctggtgaagtgaacctggaaagcaggagctatgatctccatgcagtgtgagttcaagccagaagccgctcagaaacaaaggtgggcgcttttcacagtgaggttcagatgggttagccaaataacacatcaccgctgttgggaaaagcagaaatgaggaaagattcaaggcgaaattgtcaaagatgccagtagcaggatttatgtcctaatctgcgatatagcaagtgggcaaagaataatggaaaacagaaaaatacatatgtgcgtaaaacccatatcccccaaattagagaatatactcatgttaaaaggagtgcatagaaaacattcacaaagattaattgtgtattcggtaatagagaaagcctttataaattaaaataagtagaactaatacaacttcttgtgattgcagt

SEQ ID NO: 43211 - DNA, 1024 bp, Homo sapiens
gaggcccagggcgggggtctccgaggtcctgagccccatgcaccgtgcaggtcatgggtgcagggtcactgtccccagcagggagctggactgctgacatcctggccccacaaccagacccagccttgctgctccatgaggcctgttaggaggaggcggctggcttttcattgctggcttttctacccttagtgtggggtcaagcctggtgccctttggggagtgtgtcggggcaggagacccttcctgcctgggtcggggtcctgcttgggggtggccgtggtggaggagatgctctgaggtggggcctctgcctggaaggtcacctgattctgttctttaagcacgagcctgccagggagagtgaattgatttcctctgactgaaagtcccatgctgaacctttccctccgtctctccccagttccacagtccctcttgggcccacccctgtccaccccattcacagtcagtttcctgaggcaggttttaggaatggaccttggttctgtgaagcctcccgcagcccactcggtcttcgtctccatcagttgtctccatcactgggctctcggcctcgcggggcagccacactggcccctgcccaccctctggctgcccacttcccagctcctgggtcccgttgctccccagagagtggaggctgcggggtggtgggggttgtgttccctgcagtcctagaaatggggcctggcccaccacagtctcaggccgaatcctgtcttgtcttgcaggctcagctgtcgcaggccctggaggagctgggaggccagaaacaaagagcagacatggtgagtcagacgcgggagtggctgggattcagggcacctggaccctgggtctgggcagggacgcctgtccccataagcctttaggctgcaggcgccagtgcatggctgcctcttctgtcgtcggaagctgcgttgagcggggaagggtgtgtgaggagcctgagtcccatctctactagtgacaggtggcatgcgccggcggggagcacagc

SEQ ID NO: 43212 - DNA, 1113 bp, Homo sapiens
gattataagatagactattattatatacttaacaaagtctaataaaattaatacttcttttccttctagacaatccaagggtcttaaaatcctttcttctgtttacattttgctccattcgtaggctattgctataaagtactttattcatacacttacgtgtttgaaaagatactgtttttgtatattcatttatatgtacacatttctaaccctttttattcccctgtgttgcaacctgtatctctgagcatccatctgcaatcgtttttcttctgtctgcaaaataccccttgtttcctttgatacagatttaatgctgaggaattatctaattttcttggggtccggaacatatttaattcacttttatttttgaagaacagttttgctgggtataaaatcataggttatcaatgcctgtcctatccaccagcctacaaccctttgaacctatcattccactgtcttttgactcccattggttctgctcggaaacaagctgtcagtctcactgttgcttcttttaagttaatctgtcttcctctcctcttccctagctcttttgattgttctctttttggcaggagaagtgttgttgaaatgttcctctagatctataattttttaattaataaagtttgttttcgggagagtttaaggtttacagaaaaactaagaagacagcatagagctctcatatgattctttccacagcacagttttgtctgttactaaagtcttacattactgtggtatatttgttacagttcatgaaccagtactgacacattatttttaaccaaagcccatagtttacattaaagtttactctttgtgtggtgtctttctatggattttgataagttcataatatcatgtttccctcattacagtgtcatacagaatagtttgcttctattctctggaagagattttggagaattggtatcatttctcactgaagtagttggtagaattcatcagtgaagccatctaggtctggtgctttcctttttgggaggttattagtgatcaacttaatttctttcatagatacagcctgttttttttctggctgaacccagggctggggtcgtcgccaaagtgact

SEQ ID NO: 43213 - DNA, 1090 bp, Homo sapiens
attagccttatctgttcatgaaagaagtgaagcaagaaatgcatttggtgacactttgtcagtgctttgttcgagctgctatacggaaattattaatagtagaattgcattctgttacaatcgccctctaattcagtcaccatccattgaactggactttttacccagttagcaaggtaatgagtttggatgactctgaaaactttgtgacctccaccccgggcgtcactgtgggctgggggaacctcctcaggctgtgtgtggaccttccgtggagcgcggggcggggcgtagcggacatgcacctgtacacagctctgggttccgcgtttctggggcactctctgccagccaggggtgccctgcagaaatgaggctaggattacacggggagcagcttgggccaaagactcgatttccatctgctccctgaatgtggtgagcccggtgtccacaggactgtgtaggaggggacagccagcatctgccctttccagagacctttctcctggcactcgtgtctgggcgctagggatgatcttgtttctgttccttggatttttacttctcttcagctccatctgaagcttttcccctctctcatttcattgtaatcataactcgcacatcaacctcaaattaccctctatcaatcactctcttgcctagaaacttgctgggctcctcctcttctgctgccctgggtgtgtcatgcagagtgccctgcgcctgccaccaactcccaccgcccttgctctcccactgccagaaagttaggcctccaggcctctggagtccgagttgggctcacggttccatctgagtgtgtttgccctgagctgtttgtaaatgggacttacaaccacagccaagctcttcaaattatggagttccgtttaaaaaaaaaaattactgccttttaatctttttattagagcataacagacatacagaaagtgctttgtcctgagagtacatcttagagggctatgatgaaatcagtccatccatgtctcagctccacggtcgggaacacggtgtcaccagggctcccaagttcacctgccggctcctccacctcccccaaagc

SEQ ID NO: 43214 - DNA, 1060 bp, Homo sapiens
taccccgctgcccgactagggtgctggagcatggtgtctgagagcacgcgtgtgcgtcagtgtgcacatgcgtgcacccgggtgttcatgaacacacccgtgtcggtgctcagtgtgcatgcatgcacacatgagcattactgtgtgcgtgtctgtgctgcatgagctctgtgtaggagacgtgtgtgcatatctgtgttgagtgctgtgtatgtgtgtgtccatacgtgtgtacttgtgtgcgcatgtatgttgtgctgtgtgagttctgtgtgcacatgtgatcatgtgagtgtgcacgtgtgctttgtgagctgtgcatgcacatctgtgtgaactgtgcattgagcatgagtgtgcatgtatctgtactggtgagctgtgtgcacgtgagtgcacgtgtgtgattgtgcatgtgtctgtggagtcagctctctgcatatgtgagtgcacgtgtgtgagtgtgcatgtgtctgcagaggcagctctctgtatgcatgtgagtgtgcatgtctgtgctgtgtgagctctgtgtgtgcatgtgtctgagcatgcacatgtgtgagtgctgtgtgcgcacatgtgtgtgcatctgtgcttaccattctggaacactggttcttttatgcattttggcttcttttcccacgagaccctcatggaacattaagcccagcagacaaggccagccccaaccattgtgatagttattaaacagcaataaagcaggatctgtatttacagacccagagtgtgctcagactgggaggtattaaacatcatccatcatcaaatggaaaacagtcagatgcagggagtgtagaatggagttaatattcttttggttaacttcacccataaagagctaaactgcccccaataaaacaccaaggggaggaagggaggttcttccagacggaagcaatcatcggcacggtctgcagacaggcccccagggtttcctcgtgccggtgggttttctgcagcttgttacgcagctgcggctcagagcaagcggtgtctcagggtccctttccacagttctcattgcctgctttgc

SEQ ID NO: 43215 - DNA, 1077 bp, Homo sapiens
taaactaaatttcttgagtgccatcagaaggcccgtgagctggtgagctgcccccgagccttttgccacccatggtgggcatgagccacctactgagtcggctccgagtcagcagaggccatggagtgggggcccccactgtgcagggagagggtctgaccctgggcggggcaccgggaagggaggtggaggcctgaggccagccctgctggaattcctctcttctagggggaggaagcctaggagctggaatcagaaaacctgttagaacctgagctctgtcactctctcacttgtgcctggcgccagctccctttccctctctttgcctttgcttcctctctggaagaatgaagcatgcacgcctcaccccatctgcacggggagccgattcacagattacatgagggaatgctttgaaaatatttttaaattgtaatgttcaaatatatgtgtgaggtagttcatcatcaactcactcaacaaacatatggttagttctattctaaggtgatgtgtgttcctaaaagtcaccctgctacacaaaatcacattaaaaataagatgggaccctgatgaaaatggcagcatggttgacgcggtcagtggctggacacaggcaagtgtgacaatcggcacagctcttcgcctcgagaaggcctggcgctggcttggggaagtgggagtggtggcttgtgagtcactgtggagtggggagagcacctgaagctggaggggtgtggcacagggggctcagccaggctcgggaggctcccatcacagctccgttcagctgagtgcggttttctgcattcgtcttggaggaggttcttcacagaggggcggagggggactttttggccatcactcaacatcctatgggacagccccttcctggctgacccacctgcctgccctgtgccaggccttatgcagtgtggttgatgcttattaccattcatcaaatttatttcctgacaaatcctatgttaaatacctggcatgggacctgcagtgagtgggcattcgatgtatagcggtcactgctggcattcgtcagagtaacttctcatttca

SEQ ID NO: 43216 - DNA, 1022 bp, Homo sapiens
tgccccctcccagcagcctgccagcctgcagattccgtagcgcctagaggtgccagctccatgggctgctgccctgttctcagaggcctgggtccaggccctccagggtccccatgcagacaccagcatggcctccctcagcagcctcagttcctgttccatggggcccatctctgagtgtctacattttaatgatgtcagcctctgccccgtgttcccacagcccaagggctgggagctgcttcctgaagtcactgcgtccttggcgcctgagggtcttccttctgctctcggtgacctcagtacctgcacccgccgtgagattctctgctcatgccacacgcgtggcttctttgcttgagattcccaccccagtagaatggaggcccagcgagcccaggctggctgcggtgttccgtgctgccatctctgctgcctggaacggcatgtggccgtcctcacccacatcccgtgtgctgaacagactgggtagactcgcctgccagtcaggtgtgagtggcaaacatcccggacatggttcttggcgagcattccacagtgtcgtctccttgtcacgtcttggtgttggatttttacagtctagttctgttgttcagaagatttcagtgtcagccatcaggccttggggatgtggccctgatgacgcgggcccgagtgcttgcacctggacggtcctggagtgggtgtctctctgctgcccacgccgtccctcagccgggaatgtgtgttgctctggttcacttctcccatctccgttcatgatgtggatttcactgccaggaaggagaggtttgcttcacaacctggcggatgagcttttccagcctgtgctcagccccacgcccctatgcctctgtctaccctctggggtgctgcagaacacacgcttcacgctacatcctgcagccactgcatttcctcagaccgggtctgtaaggaagcccaggttcagctgctcgatgcttgacagccagacacgagaggcgagagtggcggaggaa

SEQ ID NO: 43217 - DNA, 1868 bp, Homo sapiens
acctcctccatgctcttctcaaagtgatgttgctttttcttgttttaaaactttttcctgaactcagcttgtaactcttaggattcctggccacatctcccgtcttcctgcacgtgatttctctgccacccttgcttttagtcgcagaagataacagcaattgtgctgggcgcggtggctcatgcctgtaatcccagcaatttgggaggccgaggcaggtggatcaactgaggtcaagagttcgagaccagcctggccaacacagtgaaaccctgtctctactgaaaatacaaaaaaaattagctgggtgtggtggcaggcaactgtaatcccagctactctggaggctgaggcagaattgcttgaacctgggaggcggaggttgcagtgagccgagagcgtgccattgcactccagctctgggggacaagaacgagactttgtctccaaaaagaaaaaaaaagaaaaagagcaattgtggctggcctgtctccctgcctgcagcgtttacggctttcccatgggcagaggccgtgtgtggctccgtccccagccggctgtgctgtctctgtcgtgctccttggcactgactgactgacctgtctggagcctccaattaaaggtcactggcagcacttcccctaattaccatgccataaggacttggcaggttttgtggctgtggtgtgagcgagggcgtgcctgtgcttcagtgatgcgttacccagtgctgagttgttgagctgcaccttcctttggatgggatgcattttggggaggaggacggagaatctgagcttcttccctaccaggcatcttgtcctcactgggcctgtggggagggaggggctcatccttaggagctcagttgcttgtctttaggagctccttggggctgctggccaggagggagggaggtgacgggtcttgccgtcctcccccgcagcgtggagtcctcccgggcagggtgggattcctgggggtaggtggagctgcgcacggaggtgatgggtctcaccatcctccaggccttcatacatgcctgatgggcctgtgaagttggcgggagtgggcagtcggcgccctcgtacgcacctggtggtcctgtgaagctgcatctgccgtgagcgtccagtgggtcttcagaggttaggcggtcactggatgacccagcaacttcccttctaagtgcgcacccaagagaattgataacatgtttgcacgaacactcgtgtcatcgttcatagcagcattgctcatagtagccaagagatggggccaacccaaatgcccctcagctgtgactaaaaacaacacggctgtccacccagcgaggagttattgagccataagagatggaggctgatgtatgctgcagcagggactggccttgaagacatgatgccaagtcaattcaacagtatgaaaggccaccacctgtatgatgacattaatatgaagtgcccagaataggcaaagtcccgaactcaaagcagggcattcctgagacactgccgtggcctcatgtgctcactgtgggcagaaatatcagagtggccactgccctgggagaaccaggtggccgagaggcaatggcggctgcaggcagggacagctacatgcgctgctctcctggggtgtgtactgcgtggctgtgcggcggggagacagaccacacggtgaggtgggagggtggagcttgttagcaggcaccgttacttgctccgttacacttgtcttttgttaaccttttctacctttgagcttctttgaggacagtcaccattgtgtctgctttgcctggaatggtggctgatacacagtgggtgcttgaggtgagcgtggagttacggttctgagacccgtgg

SEQ ID NO: 43218 - DNA, 1029 bp, Homo sapiens
gctgcgttctggacccccgggcccctgcccaggtctgcactcagctgtctctcagccagggccaggagggtctccatcacgagtcctcctgggggctgaagggtgactggctcccagctgagagagccggctgcagcatggactcatgacagctggggaggggcagccctgcagaagggactgaatggtgactttcctctctcaggtttcgtggaggccctacagcccatgcgggacaacacgttccagtgcagctgcaggcgtcttttgcgggatgggccgagagtgtgacgggctatgctagcctgggtctggtgggctggagaggagggaggcggtctcctaggagggatttgtgcccctggcctgccttctccccccacccctgggagagtggagctcacgtgtcctccttggtgttaggcagggttggagagggagcctcggagagcctgctggcttggcacaggtttccaggagcgcatgtgggaagggcagggtggggccgggcctgggaaagggggagagtgagtgaccatggccgtctccagggatgggcatgtatatccgatagagaaggaagggcagggtggggccgggcctgggaagtggggagtgtgagtgaccatggccgtctccagggatggacatgtggatccgatagagaagcggcctgccgtgctcgcacctttcacgcaaggcaccgacgcagtggaggggtgctgccgatgtgccagcactaagggcccaattcctagcctaggcgtaatggggcaagggccctgtgctgggggtgggaggcgggactgtgtgctgggcagggtggaggggcggggctgtgtgatggctggcgctgtgtgtgatagataggtctggggggtggggcttcgtgctgggcagaatggaggggcggggccatgtgtggggcaggggcggggccatatgtggggcaggggcaggggcagggctgaggtgttggtgccctttggttgtggggccgcagctggatagggctctgggactgtgctc

SEQ ID NO: 43219 - DNA, 1072 bp, Homo sapiens
gtagcttttattaattggtgaagcccgtcacagatctgaaagcatcttaatagtctgaaatgatggctcttcagcaagaaaaatttgatttgggacaaaagggagacacttgagacccaaaatgacttggctgtgttgaggatgggaaggaggccttcatctgccgcacgtctgagtcactccagagttttctccactgccagtgtgagtcagagcgaatcactgttgggttgtgacttcagaagaagtgaactctgtctcaggctgtattaatagaagtagatgcttcacaggagaggaggtgtctgtgcgagtcacagccctgcggggtctgatttccgctttgggcgtggcttctgagccgggacctcgaggcgccaagggaacaggagcagccgggcagctgctcgcttggttgtgcctgctgtgtaccgaggcgtggggcatggcggcacggctgtgagcgcacagtccagccacagaaggaggcttcaagaatctttgcggtgctgccatctggacatctgtgtcattgaagtcacaggaggaggcttcaagaatcttcgaggtgctgccatctggacatctgtgtcattttgataacgtgtgtgagatcagtggaggggagccttaggaaaatcggctgtggtttaataaactgaacttcccgctgctttgagccggagcctcctggactggaaaggcgtgggcctcatggccacctccggcctgcgcagctgggtctgcactctcacaactgtgctgagcccacgcttgtgcccttactagtggcctgacctctgcgctgtggagaagggtggatattgtcgccaactctcagacttcttgtgtgtgttcagaaagtacccaaacggattcaaaggaataattagcgtatcctgtaagatatgaatcttaattcctaaattacatatttagcagattgtccaaaatagcacttgtaatggcaacattcaattagtttaaaaaatgtatattattgcaacactcgccatgagttttatttagaggtttctaaatataatgctataaaaacacagaagtgtttaaa

SEQ ID NO: 43220 - DNA, 1066 bp, Homo sapiens
aagctcacctgggaggggcgctgggtggacggcggccgtcaccacccacactgacgccatggcctgcacatgtgcagctctggacagatcctgcgccttgacttcccagctgcgcctgggggtgagctttagcaacccttcacccgtgcacctgcacaggtggcagtcgtggctctggcactggggctgacttgccagctgcttggaccaaggctgcatccttcctgcctgagtctcacctgcctggagcaggccagcgtcaactccctggtttgtgattctgggacctggtgattggctgtttttttttttgaaacagagtctcgctctgtcgcccaggctggagtgaagtggcctgattttggctcatggcaacctccgcctcccgggttcaagtgattcccctgcctcagcctcccgagtagctgggacctggctgattttgtatttttagtagtaacggggtttgtccgtgttaggctggtctcgaactcccaacctcaggtgatctgcctgcctcggcctactaaacttttaggattacaagcgtgaaccactgcacccagccagggattggctgttttaagtaacagttatcaaggtgctagataatattttaagacactttgaggtatgagattaggcaaggcacacgaggtggacaggtctgacgcgggcagtctgagcatttctccagcccccgcgggtttcctctgtcccagccctctggccacatgcggggtggccactgctccgacctctcttggtgatggcttttctgtggatgacatgagacagtggcagttctgcttgtccctccagacaagccaggaagacacttttaaaactcaaggccttttcccaagagttcctctgtccctccagtctccccctccccaccccagaagctacttttaacacccagggtcttttccccagtgtcttggtgcgtcttggctctctagcccttctgtgcgcctttgccggtccctcaggtgtccacgtgtccccacatctggctgctgcacgggtctgtgttcctgctgtgccagcccctgcccggtgc

SEQ ID NO: 43221 - DNA, 1027 bp, Homo sapiens
taaaaagcgttttatttatcgaatgtctctcagtgtcagggcctttcatccatttgttctcatcatgaagttccgagaggtggacactgtcttaatctctcaggtgcgagcagaagtctcttgcttgaggtcacagccgctggtcggagtcagttcagaccggctctggggccattgccagctgcgtgcctgcgtgggtagtggggttctgaggccccagcaactccaccctaggctttctcattcctagcaggcgtctgctcccctgacgcccacagtgccggctgctcttgcacgtttcccggagtgcaggggtctttggtgggcgtgagattgtaattgcaggtgggttcctgcgggttcctcctctccgcaggtgggttcctgtgggtccgctcctctctgcaggtgggttcctgtgggtctcctcctctcttgccttttttccccaccctagaccccaggtcgtttctgctccctcattgcccacctacaccaggttcctgacgtctggaccttggtctttcctaccggtcggtgtggtcgggcccgctcccccgtgtgcagctgctcctccgtggcacagcacgaagcagcttcccaagaggctgtgtgtccattgccctcaggagaatcccctctggagcaagtgtgctgggctgtccctgctgccctctccttgccccttgggtgctccatcaggggccccactctacagcctcctgtgtcttgctggggctgggtgagttgccgctcctttgtgcccctctgatcacttcagattttcgtccatctcccccttgtcataagtaggggagggcggggacgtcttctctgtggcactcccatgactagcaaaggcccgtgggctcatgccagccctgagcacctctcttctggaacaagcgggtcaggccagcactgtggaagactgtccccaaagtggggtcactgagaggccccctccaggagagtgttcagatgtcttcatcccacccgcgtctgctctgttcttccctgggaacga

SEQ ID NO: 43222 - DNA, 1029 bp, Homo sapiens
agaggtgtggtgtttggtctctcctagttatttacggaacaagagctaagaggaagagagagtcgcggacacgctcccagcttcggcctccggggcttaactttttccccctggcataataaactgagagggtcctgacattttattttcttttacaagtaggagtgataggacacacctttggaattgagtttatgtttggaatcattggggtcccagagagagagagaggcccaagactatgtgggaagctggtctcctttcccagacctgccgcagacgacgtagagagttaagctctggcctctcaattgcttccttattccaaatttctcggtctgttcatctggtgtgcccctggggaactcctgggagttgggggctgtaatggcgtggagagagctctgggcttggggacttggcctcgaggtgctgtgtgtccaggctagcttttctctagccccaggacgtggtgactgaaatatttcagcggggaggcacctgaatgctgctggcacagctccctggacctctcaggtgagctccatggctgcgcccagccaggcacctgctgcgggccgaaggcagggcagggaaatccaagaggagggcatttgcctcctgacatgtggaggtgcttttgatgcagtgaggcgcatcggggcagccaggtggcatttcctgcacccacttggtgctggagtctgtctgcctgcccaggtgcttttaaccccatccctgcccctctgttgggtagtgttttcttcacccttctgctgggccccagaaggacagctttttggactggttgggagcttcctggcagcgggtgccatgggaaccatgagtccgtctgcacctgctgacccagctgcctgcctgtgtgcccctccgacggtggtggctgtgttgtgcaccttccttgtgtgtagacaggatcctgggggaggccgttggctcgagcctggggtgcagagagcactccttggactgtctctgacatgcgtgtaaaaataactgcatttgttt

SEQ ID NO: 43223 - DNA, 1025 bp, Homo sapiens
tgtcaacctgagatttggaggggtcgggaaccacacagtaacagtgtccttccatgggtgaatggataaaagatggtatgtccattcactcaaatactgttctgagctaaaaagaaatgagctaccaagctgtgaaaagacgtggaagaatcttaaatatatattgcacagtgaaagaggacagtctgcaaaggcggtgtactgtgggatttctcctccgtggtattctggaaaaggcagaactgtggacacagtaaaaagatcggtggttgccagggatggacaagagggatgcgcaggcggacccagaggatttttggggaatgaacctactcttcacgcggccgtgatggtggacacgcagtcgcacgcagcagtggaccgactgcacgcggccgtgatggtggacgcgcggtcgcacgcagcagtgaaccgactgcacgcggccgtgatggtggacgcgcggtcgcacagggactgcagacatgcgttcgtctaaacccgagaatgtaagacatgacaagtgagcccacgtgtccactgtggacttgggttcatcagttgtaatgaatggactgcagtcgtgcacggtgcaggggaatctgcctgggggctgaagggtagatgagaactctcatttctcctcagttttcctgtaaacctataattgcttgaaaaaagaatatctgtaaatttaaaacaaaaattagcaagtaagatgaggctagagagagctgtcccaggggtcagattgagacaaaatgcagttggggccagcttcctcctgagtcagcctcactgactgcttggagaagagagggaccacgctgagcgtcaggaggcagcgccgcggcgggtctacgaggcacatctttcaccagcctttccattagaggcacctgagcagccctccatcatttcacgtgtgcatggtcaggcccttgtggggggctcacaggacttgtgtgactgccagttgccgaaagaaggaagcaggtcccttgtcatgaccagagagaccccag

SEQ ID NO: 43224 - DNA, 1048 bp, Homo sapiens
cagtgagcagatgccgagccggaagccatcacctcccttgtttgaggaagagaaaatgacaccatatctcggagttagctgctgggccaccaaccagcctggagcaagaaggaattttcctagcattgagctatagttttgaccccttttactggtgaagcacagttccaaacgctgctgtgagctggactgaagtttctgtctgaatgtttctgcgctcttaggactggaggctggaagccccacggtggcacctgtgctgcattctggtcttggggctggagttggtagaggcaagaagcttctggaactctcagtgtaggacttactgctttccagggttgcgaggagcctgcttgttagctttatgcgggtttgctcaggtgctgcactggaattcctgtcttacagcagagagagtgtctgtggggctgcttgaggattcagcgggatgacgttggtaacgtgcctggtgcagcagctctcggcagtccccgggacgtggtgctgtgacgaagggtccggggctggctgtggagccaggagcaggcagggctctcagtgggcagcggggcagcctacagggcactggccgtaaggcgctccaggagggtggggtgcttgagtgcattgcagcctgggggttgggtcagaaccaccaaaccttgcctcctgtgtgtttctcccttcctttagccgtggacagatggggcgtcattggtcactggtgtgagcagagcgtgtcagagatcctgggcctctttaccttggagcaggagcttcatggcagtgtaggggagcctggcctggtttacgctcaagcctcgtttcggctcttagaatctgagaatggacctcctggttgtggggctgaggacagggcatactgttcagaatcagtgggtggatctggtgcgccctctgctcacgcttcacacagggcaccccggggctgccctgtagcctcccttccctttccgggccctcttagtctccttggcccttagggacccaagcacccctctgcctggcgtccccagctctgccg

SEQ ID NO: 43225 - DNA, 1061 bp, Homo sapiens
taataatttattaatagccagaaggaggtttcttattttgggggctgatgtcactttgaaaattggcttttagaagcatctggttgtgttggacataatcacatcaatttactgaaaaacctcaaatgataaagattgccttttgctttcaaagccgctgtcagatgaaacaggcattaaaagtgatttgaagttaaagcgttcacactttaccaggcgatcctcatcattttactttggaaatgaaacagaatgaactattaaaggaaaggaaagttgcctgtacttttctcccaccaaacagggaggtgcttcctaaaattatttgccttgaccagcagcagcaggcccatctctgtgtccagggccacacggaagggaacattcgcatctgcatgctgcccatgttgccttcgctgtggtcagagatgtggattgagcccatggggggattggtttgggaatggggtctctgtctcagggagcagcctctacagtgggcaggtggtcctcacaaccccagctgtggctggcctctcaggacctgtgggctccctctgagagctggggcacccgccctggggaagggtgagtcttggggcatcccatggacgcgcttggtgctccgtcctgttctgtgaaatggggtcttgggggtgagacgaggtcctcagtactgcgctggtctgggaggccaaagggagaagctgccctgaaatcctgggttctcacaagcgtttccagcttgctttcatgtgtgtgtctgtatgctggcttctgtcccacgtgtggcttattgccctgtgtgggcttctttagccaaggtgcaggctccagatggcgctggtcacccgtcgccaggagcgctggagacgcttccctgagatggggcagtggagaggcgcaggaggcctctgggcgtgaggttggagctcccggtccctcttgcctgcaggtcctggggggcggctggtctgctccttgctggtcatgtgacttgggcaggcacctggtcctctcttcatctctgtgagctgaaaggtactggcagtaacgactgg

SEQ ID NO: 43226 - DNA, 1071 bp, Homo sapiens
ccatttcatcttttctttttctgatatggagtgctctgaaaccattgccttaaacccattctgtttccactagctaaagctcatacacttcatccccagagagcccattttcttttatttatttatttaccatttatttatttttatacataatattttacatatttatggagtacctgtgatattttcttacgtgcacagaatgtggaatgggcaagtttagggtatttggggtaaccatcactttgagtatttatcatttccacgtattgggaaaaattctggttctcttctagctactttgaattatacaatacactgttaactctagtcaccctcctcttctgtggaacaactgaatttatacctttcatctaactgtatgttcgtacccattaactcaactctcttcatctgtggttccgctcacccagacctttcaatccactagttcctgtcattctactctctgcctttaggaggtgaatttccacagctcccatgagtgaagacgtgcagtttctttctgttcctggtggtttcacctgacacggtcacctcccattccagccacgttgttacaaatgacaggctctcattctttctttttttttgagatggagtcttgctctgttgccaggctggagtgcagtggcgtcatcttggctcactacaacctctgactccctggttcaagtgattctcctgcctcagcctcctgagtagctgggattacaggcgtgtgccaccacgcctggctaatttttgtatttttagtagagatggagtttcaccatgttggccgggctggtctcgaactcctgacctcctgatccacctgcctcggcctcccaaagcggtgggattacaggcgtgagccaccgcgctcggcccagctcttgttctttcttacggccggatagcattccactgtgtgtacatccccattttctttatccattcgtctgtcgatagacacaggttaattccgtatctttgccatctttgctgtgataaacatgggaatgcaggtatctttttgatacagtgatttcctttgagtaaataccc

SEQ ID NO: 43227 - DNA, 1135 bp, Homo sapiens
acaagccctgcagagacagcctgtgtcgcttgggttgtgttccctgccttccgcagggctctggctggagccccagcctcagcagttttggactgtggtcctaggccctgtggatttctattctttgaaagcttgaggtgtcttgtttgctaattagtttgatggctgttgctgtttcattcattttccacctcggagtcctctgggtctccagtttttcagactcggtgaaactggcactttgggcttcagctagagccccaacatctgctattagccccaaaatagctgtggcttgggctggagctgctctcgcctcggaaggaaagcagtaggccggactccccacagccctctgctgctctgcgtgcagctgggcttgagtcaaaattcagctgcagatagaacaaaaagactttcttccccttgaaaacccaccagttagaatttaaaaggcttcgcagctgaagcccgcgtgttcagcagcagatgtcacagcttggactgcagttggaactgtcactgccgtgtcatctccgagctgaggctcctgaggcctctgaatgccttccactttgtagttggtgaagtgcgggtttcagaatggactgtcgggagttattcttaggccgtaataatacttggcacggctcctcctggttacgagcacttagctaatccccagagcacccttggtaaacatctctgagtagctttaaccacacacaggtcaggaggcttctggaaaataaacactcttcctgccagttggaggtgttggggctctggtcttggatttgatgtgtggcgaaggctgcaattgtttaataacccttcatgattcaacagctcttcaagaactttcctctgttcttgtgtggagctcgtgacagccagtggtggtggagctccagccctctcttcccacaggcacaagccgggttcctgagtcccagggcttctcgggaggtgtctgccctcctctttcagacaccctctgccctgtgtcccagggccctgggcctgtgctgcactgagcagagactgtaggggaccggctctcccactcctcccagatgggcagcgtcttccgtgtcgggagcatgctgtgctgcttttctcttctcagtctctt

SEQ ID NO: 43228 - DNA, 1028 bp, Homo sapiens
gctgaggcaggagaatcacttgaacctggtaggtggagcttgcagtgagctgagattgtgccactgcactccagcgtgggggacagagcgagagtccgtctcagagaaaaaaaaaaaaaaagaaaaagaaaatagttttgatgttacaagactgcctagaatggtgtctgcagaccacacttagtgaactgttgtcctagcgcttagtccctcaaggcgagaagaggctcacaagttggactcacatgtgatcctacagctctgtgacatgcttttcaaaaatattgtacaggataatgtaaatccatcctcactacaaagaaagctcaaacagtacagaattaaagtgaaactttcttggatttctctgctttttcaaattctgctgtatcccaggttaacattagcagtttgctataagtccttacataatttttatgtgcatggacgtcttacgtacataacaaatggcatcatacggcctgtattgttatattattttcccttggattgagttacttgaaatgtctggtgtttactctttagtagccattattccatcgtagaatgcacatattttaactatttccttattagcatacactacagttgttgccaattttttctttttgctattaacacacagatttagtgaataccatttcattaaacatattttttaagtgtatctgaaacattctttttattgatgggaatgctaagacatagagtatgaatatttaacactttaataatttttgccaaattacgttccaaaattatacttctgttaacagtacttaagattgcccatttttctgataacattcattgatgttgttagtgtttccgatttttgccctttacttaaagtcagctgctgtattcttagcacagtgctttctgtgacagatgtttcagatgacagtgcttcctgcctgcaggctcatctgtctgccctggtagctttcaggctctcaggcaccctccctaatggaccgactggggtcaagggctctgaaaatgct

SEQ ID NO: 43229 - DNA, 1105 bp, Homo sapiens
aatcatgtgtctgtcctttctccagtatggtaaggtcgtaattactgtcacttcctaatactctttgaaagaacatagtaagccctccagctttttctttgtaagaattgtcttggctattttagtttttttattttcagataaattttagatttagctttcagtttgttttctttccccccatttactttttatttcgtttattttttcttgccttagtgcactcactgggacctccagtgcagttttacctgggcatggtgagaatggctgtcctggccttgtcagccttagagggaaagcgtttagattttcctgaagcatgaggttagttttagggtcttgcgagatactgttcatcaggttgaggaggatgcttttcttttccccgatttgttgtattgggtcaaatacatatacaataaaattgactgttaactgtttttaagtgtacagttcagtagctttaagaacattcatattgctgtgcaaccatcaccaccatccacctccaaaactttatcttcccaaagccaaactctgtacccattaaacgctcgctccctgtgctcccccgttggctctaggacccaccattctgcttcctgcctctgtgattttttactacagtagggacctcatagaaggagaatcatgaaatatttgtccttatgtgactggcttatttcacttaacataatgtcctcagggatcatccatgttgtggcatgtgccaaaatgtcctttctttctaaggctgagtaatattctgttgtatggatagacgatccgttcttcttatccagtcacctgttgatggacacttaggttgcttccacattgtagctactgtgaataatgctgctctgaacacgagcgggcagatatctcttagagcccctgctttcaacctgctggatcctgtggttcaacttttaactattttaggagccactacattgctttccacagtggctgtaccattttacgttctcatcagcagtgcacaggagttccagtttctccacatcatcaccatgtgatgtgattttttttttggtggtagccatcctaatgagtgtgaggtggtgtcttgttctggctt

SEQ ID NO: 43230 - DNA, 1069 bp, Homo sapiens
tgcctgttgcgacttcctagtggcaggtggaggtaacaggctcccagcgtacttgccctcagtctggctgtcaccgtggttttgtttcgtctggaattatgtgggaatggaatcatacgtcatgcagtcatttgtgtctggtgatttcactggcagaatgttttctgaaaagcattcattcacatttgttgcttgtatcggttgtccttgttatatcgaacggatataccataatttttaatccggttttttgctcttgcagataaagattctgtgaacatttgtattgaagtctctttatgtatgttttcctgtctcttgggataatacctaggagtggggcctctgggtgatatggtatgttttaattttagaaaaagctgatgagccaaagtggctgcctaattctgtcccctggccacccgtgtgtgagaattccgctggccccacatcccgagctctttcattgaattccgctggccccgcatcccgaatgcattcattggccaccttcactttagccatcctggtgggtgtgtgcggtatttccttgtggccttcattcctgttgccctggtgactaatgatgttgaacatctactcatgtacttaacttgacggccatatatcttcttttgtgaagtgtcttttcaaagtcttttccccattttttaattggactgtcatcttctgagttggcagagtactatatatattcatgacagagtcttttgtcagatgtatggtgaatattttctcccggtacgtggcttccttttcattttcttagtgtcttttgaagggtaaaaacttttaattttgctaagtctgatttatcaattcattttctttatggtttgtgttttttgtatctgcctaacccaagcttttagaaactttctagctttaactttactgttaattttgagttaatttttgtgtgtagtgtggtcacagttgagggtcgctttcctgccccacaatacgtatgtctgtttcccatttgaatttccttggcacctctgatgaaagcctgtcagccatacattcatgggcctttgctcgaggt

SEQ ID NO: 43231 - DNA, 1107 bp, Homo sapiens
tttccactgttatccaggtgcagagagctctgatctcccacgatcggaagtaccgtgtgcgtgtcttacctgggcagaatgcagagaccttcactggcagctgtgtgtggaccctggggctctgttacacagccaggtgctgaggagcagggctccgagccaggccagcgaaccttccttagaccccctgtgtgcaggcctggtgcctggtgtcgggggcccagtggagaacaagatccggctgttgccatgggactttcgtctggtggggagtcctgaggaggatgtggatgaggtggagaagaggttccaggtgaacgcaagtgtccaccctgcattccagggtggcaggcggcccggggcgggtgtggggtggttgggtgggcgccccgcgtgctatgttagcgtagggtggtgcacacctggccggcaggccttggtcccgctcttcaccctccacctgtcgtgggtgcgccccgggaggggtggaggatggagggcaggcgtgggaagagctctgagacccttggcttcatggagagtgttgggcagttacccctcccttgccctcgggcctttgtgagtgtggcttcctggaactctgggggatttgtcaccagtgactgcagggggctctcccatccctttcatccaggcttcactgtctgccctaagctggggactggtccagctgacctggatggtgcggagtgtgggccctgctggccagcatggcgttgggaagcacctaggtgggtggtgggttgggttgtggccttaccgcggagtctgggctgcagctgagaaagccgtctcctaggaccaggaatctgggtttgggaggctggaggtcttggcccagcagttcagtggctgcccggtgtgtctgcctggcctggccctcgtctggtttccgttgtctgggaggcacccctgcccgtgccaggcggggcactgcgggggcgcggatgcggagtggaagactgctgatttaggaatcgaaactccagggacatccgtgtagcagagtgattctaagatgattaagaaaaccatcaatgatttaaagaaagtgttcactgcagtccttattgagcggtttgccgc

SEQ ID NO: 43232 - DNA, 1029 bp, Homo sapiens
cagtttcaaaaaagaacaagttatacagcttacactggccaatttcaagacacgttgtaaattgcataaattgagacactgtggtattaagtatagacatgtaaatcaggagaacagagtagaatgttcagaaatgattgaagaatacagtgttgattgttgtcaaagtgtccagataattcagtgggagaaagaatcttttcaccgagggtggtaaaccagtaggctcttcgtggtgaggatgagccttaacacctgtctcatgctggacacaagatttaactcaaatgacgcatagacctatgtgtaaaagtcacaaaatctggaagctagggtttggcaaagaggtcttacaatacaacgaacatgaaccataaatgaaaaaattgataaattagacttcatcaaaattgaaaacttctgctctcaaaagatacagtgaaaaggcagaccatagactaggaaaatatttgcgagatattaacatgtatctgaccaaagatgtgctccaggatagagaaggaactcttacaaattagtaagattaccatagtttaaaaaatggtcaaaagacttttaacagatactttattatttatttatttttttggagatggaatcttgctctgtcgcccaggctggagtatagtggcatgatcttggctcactgcaacctccgcctcccaggttcaagcaatcctccagcctcagcctcctgagtagctggggttccaggcgtgcaccaccacacccggctaatttttgtattttaatagagacaggtttcaccatgttggccaggctagtctcaaactcctgacctcaggtgatctgcctgccttggcctcccaaagcactgggattacaggtgtgagccactgtacccggcctgcttttaacagatactttacaagagaagatatataggtggtaaataaggacatgaaaagatggtcaacattgttagttattaggggaatgcaaattaagactgtaatcgcccaacagggttcttcttgctgcccagaa

SEQ ID NO: 43233 - DNA, 1032 bp, Homo sapiens
acctttcttctttgttgactcccaggttgatgcttcactgttgtggtgaagtaaaccgtacatattgtgggcatgtggggagcacgcagcccccatgcgggccttcccagagcggcgtggggtggacagcggtgataggcttcagcaggccctaagctgggcacgttctcagggacagggaaatgagtgctgaggcctccttgtttgcggagggtgccgcccagccaggcccacccaggtcgtttgctgtgtgagtttgccattgtcctgtcctgggtgcgtggtccccagggctgacatcacgcccgtgtgtttccgtgtgttaacttacagtgatgcttctcagggtctgtccggcttttcacattggctcgacccacgtgctctttctttctctgaggacacctggggttttctgagcttttccagagggttagggtcctcagaaggtcgcctggtgggagtggtcaggaggaagcctggcggttctgtcgcgtgcgggttccatgatgtcaggcagacctgctgtcctggaggctgccagaggggctgctggctttgctcaggggccgcctccccaggggcgctcctgcccgtgccgcgtgctcccgttccaagcgcacggcctccccagcaggtaccgccctgccccttgcacagcctccgtctttgtcctgttggttggccagtgccttgctgtggtgtgagggcgatgtcgctagcaaacagccgtcatggtagcattggggtggctagggagggatgacaggagccacggttggagggaagaccgaagtgatggtgtggcgggtatgtggatgtctgatgggactttgggagcgtggggcactggcacagagactgccaggtgccaggcctgagagtccgggcccatcttggctggtggaggcttttgcttctgaagccgcctcaccaagcctcctttccagggcccctggctggggcccggtctcctctgtcagctcctgggtggcttgtggcaggctctgggctgtgctgctctggagcacc

SEQ ID NO: 43234 - DNA, 1052 bp, Homo sapiens
gcctctcaaagtactgggattacaggtgtgagccaccacacccaacctaaagagaagattctgactgagtaggtctggggtgtagtctgcgactctgcatttgttaagtgccgggagatgctgcactgcaaggctctgggccacgtgaagagtcagtgactctgccttttcctccagctgagcaggtcgtacccaaaggccggctctggaactatttggcaagtcttctggggctctttgaggctcagctaacctgtaatcactagccctgtgtggtaggcagacttctgagagggcccccaggagctcagctcacctgtaatcactagtcctgtgtggcaggcagacttctgagagggcccccagaggctcagctcacctgtaatcactaaccctgtgtggtaggcaggcttctgagagggcccccagattccaggctccttgtgcacactcaccttcctactgcctcccaggtttcagtccaatactgagtaggtttcattgctgtgggattgtgcagatgtaattaaggtctaagatctgttgaccttgagatagggagattacgtgggtgggcttgatccactccctggtgggcttgatgtactcacctgagccctttaagtctgagtccagacgtccgaggccgagcagtcaagagacatagcaggagagggatttgatgagggagattggacgtggttgactttggagatggagagggccgtgtggcaagggatgtgggcagcacctaggagttgatggctgtactgggctggcagccagtcgggaaggagacctcattctccatctctgagctccacgtgagaacatgtcctggccgactgcattgatttttagtctgggagaccctggtcagagaatgcagccacctacgtctggacttccgacccacggagccgttggctggtaaataaatgggtggcattcgaggccgttgccttcactaatatgcttaatgtcatctcaaaagacgtcttcctcttcccaggctttttcaccttcccgtttcctgcccctcccctgttccc

SEQ ID NO: 43235 - DNA, 1050 bp, Homo sapiens
cagtctctgtaatcgcgtgagtcagtttccccaataaagcccttctcttgtgtctgtctctgtgtcctgttggctctgtgtctctggagaaccctcttacagtgcagttgggggacgtgccacctgagtgctgagccccgcctcccgggcgccagctgtccatctgtccatgtgcaactgagactcaattggtggcttgctggtggggatttggtggcatgcttccttgcttccattttttgtctggtaaattggcagcatggctcccagttgccattgaagaatgtggttacaggcatgggtgtattatgagctccaatgtgcgttaggggagtggggctgtccagaggctctgctgactgcacggctgatggcacgtggaaaggctgcccctgaccagtcctttgtctgtccccggaaggaaagcaaccatggaagacctgggggaaaacaccatggttttatccaccctgagatctttgaacaacttcatctctcagcgtgtggagggaggctctggactggatatttctacctcggccccaggttctctgcagatgcagtaccagcagagcatgcaggtgagtggcatgtgcctgggtgggagtctgctctggggagaccctgggcccgggcaggacctcttccagtcttctgtagttgaggtgggtcggtattagcagagcctagagacagctattcgtctcccaggtctcactatgggcactcctcattttggggtcgtagctggaggctagttggggccctgagccatcctggcttaaaggcctgccttgttagcgccctgagtgggcctggcgctcagcattgcgttcacacaagtgcactcacagaccctggtgacaggatcggaaagccagttcattcatctaattgaggacagaacccaaactgcctgggggagtgagcaccaggactgtcgggaaggctgtgttggaaacacagtgctgagagtgcctgggcagcccagagacaaagccacagcagtgagcagaaggactgggtgttttgtggtctcagactgtggag

SEQ ID NO: 43236 - DNA, 1050 bp, Homo sapiens
catgcccagctaattttttttttcttttttttttttgagacagagtttcgctcttttgccgaggctggagtgcagtggcatgatcttggctcactgcaagctctgcctcccgggttcacaccattctcctgcctcagcctcccgagtagctgggattacaggcgcccggtagagactgtagtggtttcctcatgttggccaggctggtctcgaactcctgacctcaggtgatctgcctgcctcagcctcccaaagtgctgggattacaggtgtgagcaactgtgcctggctacaaatttaataagtaaatattttataatctagtttgagaccaaaaatacgtaggaaacagctgggcatggtggcctgtgccttagtcccagctacttgggaggctgaggtgggaggactgattgaggccaggagtttgaggctatagtgagctatgattgggcagctacagtccagcctgggcaacacagcaagaccctgcctctaataaaaatatgatcaggaagtgggcagagtatatatgtgtgcgtggcacagggaaagtgctgagtacattatttggcagcaacagcagctggaaggaagtgagggtggaggaaggaagcagctatcagatatggggggaggtcacaggatcctgccatgtcccactgtgcctagggaaagttgttatatgtccatcagcagaaggacatctcgatctcggctcactgcaaccttggcctcccaggttatggtggagagagcatcaatggtgtgcctgcttgcatggaggtcctggtgtgcggggaccctatggcgtcctaggtgcagtcatctgttaccgaggcagggtccagcagctatagccagaggaagtaactaccttgtgagaaggggacgcttcctaggaactgacatggttctgggctcttggttctgtaatcaactccccggacattgtgtgacatcagcgttagaaggtccaggatggccgggcacggtggctcacacctgtaatcccagcactttggaaggccaaggtgggcggatcacttg

SEQ ID NO: 43237 - DNA, 1057 bp, Homo sapiens
gtgctgggattacaggcgtgaaccaccgtgactggccacattcagtatttcgattcaaatattgaaagcattcaatggttgggcatgatggctcatgcctgtgatcccaacactttgggaggccaaggcaggaggatcatttgagcccaggagttgaagaccagcctgggcaatatagtgagaccctgtctgtacagaaaataaaaaaacaggccaggcatggtggctcacacctgtaatcccagcactttgggaggccaaggcaggtggatcacttgaagtcaggagtttgagactagcctgcctggccagcgtggagaaacccctgtctctactaaaaacagaaaaattagccaggcgtggtgacacgtgcctgtagtcccagctacttgggaggctgaggcaggagaatcacttgaatccttgaaaggcagaggttgcagtgagctgagatcatgtcacaacactccagcctgggtgacagagtgagtctccatctcaaaacaaacaaacaaataaaatcaaaataaaaaaataggttggacatggtggtgcgcacctgtggtcccagctatgtgggaagctgggacaggagggtccgttgagcccagcaggtccagaaagttgcagtgagccatgatcgtgccgctgcactccagcctgggtgacaaatggggaccttgtttcgaaaagaaaaaaaaaggaaataagaaaaagaaaatgctggccaggcgcggtggctcacgcctgtcaatcccagcactttgggaggccaaggcgggcggatcacgaggtcaggagatagagaccatcctggctaacacggtgaaaccccgtctctacttaaaatacaaaaaattaggccgggtgcgatggctcacgcctgtaatcccagcactttgggaggccgaggcgggcggatcatgaggtcaggagatcgagaccatcctggctaacacagtgaaaccccatctctactaaaaacacaaaaaattagccgggcatggtggcgggcacatgtagtcccagcgactctggaggctgaggcaggagaatg

SEQ ID NO: 43238 - DNA, 1003 bp, Homo sapiens
atttattctttttatataggtattttttaaagtttattttccaatagtacatcgctagtatatagaaatataattgaattttatatttgatgttgtatcttacaatatggctaaatcagattattagtctagtagcttttctggatttgatggaattttctatgtatattattatattgatattggttatgaattaattttcttttcttttctttctttctttttttttttttttttttgagacagagtctcgctctgtcgccaggctggagtgcagtagtgcaatctttgctcactgcaactttcgcctccctggctcaagcgattctcctgcctcagcctcccaagtagctgcaattacaggtgcctgccaccatgcctggctaattttttgtatttttagtagagacggggtttcaccatgttggccaggctggtcttgaattcctgacctcaagtgacccacctgcctcggcctcccaaagttttgggatcacaggcgtgagccaccgcgcccggtgtctaggaattttctgtgtatattatattggttatgatttaatcttcttttctatccatatgcattcttttctttttcttgcttcactgttgttttaggaaaaaccatgtttttcctgcattctcattcccccacagcagtcaacacagagggaggcttctgtgcccaaatgtgtgggggtttcccacagatcaagcagcaggcacagctgggtgtcctccactcagctctgagactgtctgcctggagatagagctggataccacaggttgggggctcagttcccaagactacctatccccccagaccctgatcacaagtctgggcctctcgaacttttgactgactggcttcatgttgaggttcccaggaccgtcttttggggttcaattaatttgctggagtggctcacagcactccaggaaatgcatacatttactggtttattagaaaggatattgcaaaagggctgggcacggtggc

SEQ ID NO: 43239 - DNA, 1009 bp, Homo sapiens
tttctttctttctctttctttctctctctctctttttccctccctccctgccttccttccttcctttctttctctttctttcttttcttccttcccttccttctttccctccttccctccttccttccttccttccttccttccttttctctctctctctctctctcactggagtacagtggtcccattatagctcacagtagccttgatgtcccggacttaagcagtcctcctgcctcagccttccagctgggactacaggtgtcctccaccacgcccagctgatttttaaatttttggtagagatggggtctcagtatggttgtccaggcttgtctcaaactcctgggtcaagtgatactcctacttcgaccttcctaggtgctggatcacaggcgtcagccaccgcacccagccttctctaagattgtgttggttatgcaagatgatttgcttatctatatcaattttatgaaatttatagctcataaatatctgtggaaaaatcatgctaggattaggactagaactgcactgaggatatagattcatttgggaagagctgacgtcctaatatgtcaatgtaaatatctgtcatctttagtttctctcagcaatgttttgtaatttattttattatatatgtgtatatattatatatacatatatatatatttttttctgagacagcctatggctctgtcacccaggctggagtacagtggtgtgatcttggttcactgcaacctttgcttccgaggctcaagcgatcctcccacctcagcctgccaactagctggaactacaggtgcaagccgacatgcccatttaatttttgtttattttttgtagagacagggtcttgctatgttgcctacactggtctcgaactcctggcctcaagccatcctcctgccttccttctcaaagtgctgggattgcaggactgagccaccacgcccggccttgtaatatcttttaaaatctgtccttaaatatttcttttttt

SEQ ID NO: 43240 - DNA, 1030 bp, Homo sapiens
ggctcactgcaagctccacctcccgggttcacgccattctcttgcctcagcctcccaagtagctgggaatacaggtgcccgccaccacgcctggctgattttttttgtatttttttagtagagacgaggtttcaccgtattagccaggatggtctcgatctcctgaccttgtgatccgcctgcctcggcctcccaaagtgctgggattacaggtgtgagccaatacgcctgggagtatgttttttctacatatgcatgcttacaatagggcacagtaagagattaacagcaataactaatagaacaattataacaatatattgtcataaaagttatgtggatgtggtgtctggtggtgtgtctgtgtctctctctgtcaaattttcttcattatgtaatattttccaacctaattgaccataagtaactgaaacagtgcaatgtgaaactgggggtcgggggggctactgtgtttggaagcagtcttcccagatgtaatcaagatgaagtcaaagtggacgagagtggaccctaaatcagtgattgatgtccttattagaagaaggaaattatggccgggcatggtggctcacacctgtaatcccagcactttgggaggccaaggtgggcggatgcattacatgaggtcaggagttcgagaccagcctgaacaacatggtgaaaccccatctctactaaaaatacaaaaattagccaggcatggtggcacatgcctgtaatctcagctactcaggaggctgaggcgggagaatcacttgtaccctggaggcagagggcgtagtgagcggagattgcaccatttcactccagcctgggcaacgagcaaaaatccatctcaaaaaaaaaaaaaaaaaaaaaccaacaacaacaacaaaaacttactcgattttttgtttttattattatctttatttatttatttatttattttttgagatggagtctcactctgtcgcccaggctggagtgcagtggtgctatctcggatcactgcaagctccacctcccg

SEQ ID NO: 43241 - DNA, 1037 bp, Homo sapiens
ctgtttccccccattcgggctttcacagtggttcagtccatccgaggccgccgccttcagcgcgggacagcgcgggtcacgtgggggcgggggcgggtcctcgccgcgtggagctcgaggctgactccggagggaccggagcggttcgctctgcgcgggtgctcacgggacgggcattgggtgcatgtggcttctatcttgttttttgccggagtggaggacaaccactggttgggggatgtcttaatcatcctagaaaacaacccagtggatcacgcctgttatcccagcactttgggaggctgaggtgggaagatcgcttgagcttaggagttggagaccagccttgccaacatagcaccaccaccccccgcacgccagccctcatctctacgaaaattaaataaataaataaaacaggtggtacccagaggctggggtggagagtggggagtgtttatcggggacggaccttcaatttgggaggatgagaacgttttggagatgacggtggtgatggtacaacatggtgaatgtacttgatgccactgaactgtatactaaacttcatattaaaatggctaggccctgcgcggtggctcacacctctcttcccagtactttgggaggccaagacaggaggatcacttgagcccaagagttcaagaccagtcagggcaacatagcgagaccctgtcttcgaaaaaataaaataaaatgccaaaaaggtaaattttatgtatatttcatcctatagtttttttgttttgtttgttttcagagatagggtctcgctctgttgcccaggctagagtgcggtggcataatcacagcgccgctgcaatcgggaccttccagcctcaagagaatcctcccacctcagcctcccaaagtgccaggattacaagcgtgaaccaccgcgcagggcctagccattttaatatgcaatttagtgtacagttcagtgacattaagtacattgccaagtacttgggactgaaggtatgtgccaccgtgcccagctaatttctttattt

SEQ ID NO: 43242 - DNA, 1066 bp, Homo sapiens
acccctggctttggggatcctgaagctcgagcactggtatggtctggggtgcatttcattccgaggcgggtgctgggagctggggcaggcagggaggttgagagcgcagccctcatggcaggggagttccggacaccagggacagtcaggcggccgtgcggggtgtgactgggtggtgcgtgggttgcgcgcggcagcttctgaaggttctttagcaacagaataattgtttcagaccaaagctctgcgagatccccagaggtgagaaggatgcgggagctgctctgctcagagcagggtggtcctgccgacgccctgcgctccgctgccctcccacctgtcccccaccgcagctttggttgggggtttcggagctccccagcacacacaccatgcgggtggggggcctgggggcggtgcaacggcagagcctggggtcaggacaggtgggaaggccgtggatggcctgccagtgttccaggtgggctcacaataggggtggaagtgacctcaggacctgctgcccacagggcccaggggtaccatgagggtccagctctgagctccggggtctccgaatgtttaggagagagtagaccgggggaggatggaggaacaggcccggccctgcaggaatgcattgtggggacactgcctccacctaggcccagacgtgagggcaggtccctcccacagagtggacgctgtacacacctgggggcaccccatccctgtccccctgagcgggcactgcccctctctctgggtgcatggccaggccctcctggaggcccctcagtatctgctcctaaggacatcaggagtgtcaggcccatctccttggtcaggcctgtcctccccgccactctgtcccatggcatcccctggccagtggcctgcagagaatgtttctcggggggtgtcccaaccccctggctgatttgccccaggcttgctggggacattaggagcacagccaacttgtctcgcagccagggtcgcggcactcacctcgcgtttgtctccagtccacaggcactgaggacccaggccttccaggtccttc

SEQ ID NO: 43243 - DNA, 1016 bp, Homo sapiens
tagaagaagctttggtttcctggacaagcccaggctttctcattcttaccagggatcttccttagatgcttgtccttgggaagtgtaaatgtgttcactgcagctctttctgcatattttagaccttaaaataattgttttttgtttcgagctagccttagattacaggaccattgagaattgagacactgcttgggacatggactggagcttcatcctcagccatagagcagcactgctgccggggttgagggagctcggggagcttttccagacaaaacctttgctccaggcgtttggcagggccataggaagagctcctttgtgggctccctgagctggaactcggccttctccgcccgatgaagcaaacaaactgtgccgagggcgcaccggcatttgtgccgtcagcaagccgggctgtgtctcagcctcacagcactcctcccacgggcctgggaaggcaaatgtgttttctgaactgtgttgagaccgtgtgtgtgtgtgtgtgtgtgtgtgtgtgtgtgtgtgtgttggggtgtcttgtgaagtcctgctaacctcttgtcagcagaatattcgagaaatgcttctgagaagagagaggaagatgacttcagaggctgcttgtggtctctcactcaaggctggtagggagccccggtctgcgtcctggaggaacggcacgctgagtcctgggccagtggccggcggggctgttggcgaccacagtagcacacaagggctctttctgaggagcaggagaccctggcacgggccccacgggagtgtctggggcgtccccgcctgtggcctcttctccccgccgcagcaccaatggctccacgagcagggctcggagctggccctctcctgcttcggagccgcgctgactgggtgtgtggcggatgggaggccgccctgagtgctcctcctcccttttgtacagcctgggtggaaaggacgggcctggtgcacttcctgcgggagggaggacatggggcctgcttccctct

SEQ ID NO: 43244 - DNA, 1054 bp, Homo sapiens
tggcagggagtcttgctctgtcgcccaggctgaagtacagtggcgacatgtcagctcacggcaacctccacctcccaggttcaagcgattctcctgccccggcctcccgagtagctgggattataggtgcctgccacctcacctggctaatttttgtatttttagtagagacgaggtttcgccatgttggtcaggctggtcttgaactcctaacttcaagtgatccacccacctcagcctcccaaagtgctgggattacaggtgtgagccacggcgcctggccttttctttgattttaataatttggtttactaagtctgttccctgtccatttgctctgcaaggagtcatcagagcctggcgcttgcagtacccccaggtccacgtttagatgatcttaaaacattgccataatcttgcacgatggccttgcacttaggcagtgccagtattcctatggtatacagtgaaggggcattcggtttcagtaactctgatttgtaatcgtcctacgtggaaacacaaagcaacaagcacaggatcccattagctctgctgcccagtgaagcatccatgttgctttgtttttgtttgttctttttctttctttctttctgtgtgttgttttgttttgttttgttgttgttattgttgttgagatggagtctcactatgtggcccaggctggagctcagtggcttttcacaggcacgcttatcgtagctcactgcatcctcaaactcctgggctcaagagatttcccccacttcagcctcctgggtagctgagactacaggtgtgcaccaccacgcctagctaactctaacttaatctaatgccaactccaatggacaagcattgccctgtcacaagcctagctgaactatgtcagaattgaactctttgagcttgatatggttctagaggctattgagcctcaatttgagcctaaatttaaaattgtgtgatcatttaatttaatttccaaacgggacatgtttataaataaaacaagaccctattaaacaattttgccaagatgattgactcaaat

SEQ ID NO: 43245 - DNA, 1032 bp, Homo sapiens
actttgcggatgaggacctggggtcccttagttcatcctgccaacaggtagagcctctgctctgtgccggccctggggacacgggtgtgaacagagcagagccctgtccttgtggggcttgtgctcggtggggagagaatcatacaggagatgctgagtggactctgaaggcgggtagccagccggaagtggtcaaggaagtaaagcgaggatggagcgtgggaaggatgggcctggggtgcagttttggataagatggccaagggcaggccaccctgagaagcttccctgccccagtcctcactgagcattgaggaagtgagccgtgcggctatccggggcaaagggtttcagttgtcaggaaccagaagtgcaaaggcctgaggcagaagtgaggatgtgcctctttgaggacctgagtttttgccatgaatgagatgggagccttgtagggttttgaacaaagcgggtgataagagctgacctaggcttagcaggctaacttgaccactggttttgacagtagactgaaggggacaagtgtggacacaaagcagccaattagaagacttgccataatccaggtgagagatggtggtggccggacccaagtgagagccatgggagcagcaggaagtagggaaattgtagctgtctctggaaggtagaaccacggcattggctgacaggctgggccagacctcaggatggtgcatctcccctagctgcaggccgctgctgctctgtggggagtgaggtcctcctgtgcggcccaggtccctctccatcccatccaaattcaggcccacaggatggtccagggtaacccacagcacctgggcactctcctactacagccagtggccagcctgcagggacagacagcctccaaggccacagtcagctcggcccacacccttgctgatctgcagaaggtgcagaagcagcttttcaggcagcatggtagcagggcctgggtaggccagctctggcttaacccaagtgcaggccgtaagcactgaaggcgctgct

SEQ ID NO: 43246 - DNA, 1068 bp, Homo sapiens
ccgtgccattgcactccagcctgggcggcgagatcaagactatctcaaaaaaaaaggatttggtgagcagcacatgtgcgtgctgtccatgggggtgcgtgaagatctggtttacttctttccaccgtcacattacttaccataattgctgatccgttccctgtgaatgcgtattcaggttgtttaccgttttccctgcgaccaacagtgctgcactgtgtgtccgtgtccacgcctccgtgcgcggcggccagggtctctccgggatgtgtacttagacgcagagttgctgggtcagttccacgcaggcccagctttgccaggggctgtcaaccattgcttctcatggaaagtctcagcaaggctattaaatgaactcaaaaactatctcccttattttcagatgaatgaaaaattcagtgtttgtgtagatggagaggagcagaggagtgatgggaaatgtctctgggattggacgtcatcaggtgtgctaagacacagacgggactgttgtgaggaaggagcttgtgctcacagatttgtagaaacaggaggcacagcacacggggccacacggggagcaccaggctccagggagcaccacgctgggtcaggaggcggaggggtacttgtgggcaagagcctcgattgtggtttctgaaaagaaatgggcaaggcagcatccgcggtttaggattggctggtttgagtaatttccccagcctctgtgctatcagggtggtccctggttgtccagtgcttggccctggggtggttggcagaggcatatggctgcctgcagtgtggagcctgggccgccaatatagccctgcactccaacctgcgctgagtcatctctcctacacgctccagcctccctcatgttttctttagtgtttcaaaaatgcgaagctcagggtcttcgtgcgtgagattccttccaccaggaaagctcctcctgcccctgctgcgcagccggcccctccttaaggtcttgtaaatgcctcctcctgagccgccttccccaacagccctcatttaagcagcctccttgactgtaggtccgct

SEQ ID NO: 43247 - DNA, 1054 bp, Homo sapiens
tattataagttgtattttctttattacaagctgtagtttgtctagcctctaatcagtggttctccgttggagagactatgctccccagggggacatttggcagcgtctgcaggcgtgtttggttgtgacactgatgggtgccgccggcatctgatggttggagatgctgctgactgtcctgcagtgtgtgaggcgctccaaaacagaattccccagcccccagatgtcagtactgatgtggtaaacaaactttgttctatgtcagatggccagttttttaatggcagaattacactattatgtaaataattgatgttcttaatgatgactccccccagaacctacaaaaccctgacatgcctgttagctgtgtagggagtcattccgtgttcattgaattaattttaatacgttatagtgaactacagtcccacttgaaacattaagagcaatcttacagtgtgctagtactttttcttctttttttgtttagtttcctaactatgaaagcaggtgttctaatacatttggaactaataattcatgtgtagtgtacttatggagacttaaaaataaaactaaagggagggaaggaggaatggaaggaggagatgataattaacaaagaattccttattcacaattaatagatgacaacatttgtcataactttagatgtttcttctatgttccgttctcctccccagtcctaatactggaaccaaactgcttagaccagaatcctgagtgaccttggatcagctgcattcattcatttgttccacaaacatctgagtgccaggggctgttttcagcattgggaataacagcagtggccaaaagtcagagtccatgttgtctgcgtaatgggcaggttagggacaaataatgagtaagtgaagaaatatataatgtctccacagagagagctgaggggctggtgtgggcagagcagagtgagtgagggcgagagagcaggtggacatggggtggctggggtaagggaggatatacagtcttgcaggctgtgtaaggattctcatttaaagtggag

SEQ ID NO: 43248 - DNA, 1033 bp, Homo sapiens
ctgcatatgccgtcaaagtcctgaattggggctgcggttgaagttggagtgtcagaacacgcttttgcccttactgctatcagccttcagtcagataagtagcctttttatataaatagttccctcttgtctctgtagagctggggaaggcggggtcccttgggtttgtgtgtatgctggatgaagcagacagaagggttcttcagggtatggggccgtctctggactacaccaggaagcctggaaaaggccctccaacaaagcctgccatagatgatgcctcggaccccacgtttttagttacaaataatatacaaatagttactgagaattaaagttactttcttcaaggccatcagagtggttggtaactgtaatgtccctgaaagactcagtgtctttaatctcctaaaccatgttgaattccagtaatgggaggccagggaatgggcagaggactgatagtgaatctagggagcacctttttatcacatctaggagggggctgagcagactctcttagggactgagggggttgagtgtttatctccttcaactcctttccaagtcattgtctttaaatctttcttttcttttggaaacggagtcttactctgtcgcccaggctggagtgcagtggggcgatcatagctcgctgcagcctttactttctggactcaagtgatcctctcagttcagcctcctgtgtagctgggaccacaggcacgcaccaccacgcctggctaatttttctgtagaaacaaggactcactatgttgcccagcctggtctcaaactcctgggctcaagcagtcctcctgccctgggcttgcagtcctttttctttttgttgattgaggctgatctcacgctcttgggctcaagcagccctcccaccttggcctcccaaagtgctgggattacaggcgagagccaccacgcttggcccttcaatctttatcagggtttgagaaggggacttccataagatatgtcttagattggggaggttaagagtgtgccaggtctcagg

SEQ ID NO: 43249 - DNA, 1050 bp, Homo sapiens
tttttacttttctgtttttttagaaaggctctcactctcttgcccaggctggtctcaagccatcctcccacctgggcctcccaaagtgctgagattacaggtgtgagccacactttctaatacgaaaacttcaaatgtatacaaaagtagagaaaatagtagattgactgtaaagtacctacagcccaactaaagcagtcatcaattctgtgccaatcctattcacctgtgccctccccatggtctccaagcaaatccaactttgtgtagttggattaggaaacgttttaggatgtatatgagtggctaaaagatgaggcctccatgtaaaaacacaaccgcagtaccattagcaaacctaaacattagtaatagctcattatcaccagatatccagtgttcagaattcctccattgtggcataattgttttgtgtgactcgacatgcattgcaatgaatctccagattctcctgtctcttgcttccttttttctcttcgccatatttgtgaaagaagctgtagaagtcggccaggtgtgatggctcgtgcctgtaatccctgcactttgggaagctgaggcaggaggatcacttgaggccagaagtttgagaccaacctgggcaacacagcaagacctcagtgccacaaaaatgaacacattagttgggcatggtggaatgcacctgtagtcccagttgcttgagcggctgaggtaggagaattggttgagcctgggaggttgaggctgcagtgagccatgtttgggccactgcactccagcctgagtggcagtgaaaaaaaataaaagaaccatagagttgataaagtcggggttccagtctctcagtaccgtgagcctgtgttaaagggcctcaaggaagatctggaggaaactgatgatgagggaacagtgcagccttgcttacacctagatagcgtcctttgtcctccctccctttttccttccttcctttccttcttttctttccttcctttcttttcttcctcccttcccttccttcctttccttcctttccttcccgccttc

SEQ ID NO: 43250 - DNA, 1035 bp, Homo sapiens
caaaaattagccaggcgtggtgtaaaaatacaaaaattagccagctactcgggaggctgagacgtatgaatcacttgaactcgggagatggaggttgcagtgagccgagatcacgccactgcactccggcctgggcgacagagcgaaaccccgtctctaaataaatcaattaaataaaataaaataaataaataaataaaataagatgtaaaatactcctgaaagggcaggttgagctgaaggagtcgagttcaaggagcgtgtctgcagggctggaagtggggcgggacctgccgtggtgcctgggcgggcctgggggctcccgagcagccgccgcccacgttcttgttcttgttttgggggctggacacacaagcgtgttcctcgggggaaattcgttggcttgtgcgtgtcagatgtgtggtttcctgtgtgcacggaaaggaggcagcagcgacactcaggatctccgcctccccccgctcagccgggcggggatatttctagaacgttgaaaacaggacttctcctggctagggaaactaggccgagccgagggcaggaacctcgtgatggaaggggggccccggcctctcgcccagcttggcggccaggcccgagcgcccctgcgggagatgggcaggcccgagtcggcagtgacagcccggggaggcgggggacagcgccaggggtcttccagaagcggccgggccaccccacgctgaggccaggaagcgcctgtcctgcgccccgcatcctgagcagagcgtctacaggagacgcggaggggcagtggcattggaacgggggggcagtggcgtcggaaggggacaagggggggcagtggcgtcggaaggggacgcgggggggcagtggcgttggaacgggggcagtggcgtcggaaggagacgtggaggggcagtggcgttggaaggagacgtgggggggcagtggcgtcggaacggggggcagtggcgttggaaggagacgcggaggggcagtggcgttggaaggagacgcggaggggcagtggcg

SEQ ID NO: 43251 - DNA, 1019 bp, Homo sapiens
cggtgagcaggactgtgcttcgctggtcaccgtgaccctctctaacgaagggctcacagcttcccggggtaactggctacagcccctggtttcggctggaggaagttctcggttacgccacgctgctctctcctcggcacagccccggagagctctgtctccatctgtgtctgcctaacaaatggcttaagcattttatctcctcagttacccattatcttaattaggttttcagttgcttttcagagagcgcgattgttgttccctgagtaagactctaattagtgtgaggcggtccaagtttcatcatggaaataataccctagagtatgtaaaaaaataatttcttccccgtctaaaaaaatggaacctctcattttgccgaaaatttggaaagtaagtgaaagtatagagaaaggaggagaaatcacctgtcaggtcacctcccggagagaatcattttcaacgctttggtgcttttcattctggtgttttcttagtgtatgcattcatttacttcatttattgatcgattagagatgggattctggtgttttctcagaatatgccttcattttctgacttcatttattagagatgaggtcttgctctgtcacccaggctggagcccagtggcacaatcatagctcactgcagcctccatctcctgggttcaagtggtactcctgcttccacctcctgagtagctgggactaagacgtgtcccaccacatctggttcatctttttatttttgtggatttggggtcttgctgtgttgcctagtctgctcccaaactcctggcttcaagtgatcctcccgcctcagcctcccaaagtgctgggattacaggcatgaaccaccatgcccagcctacattagctttctttaggttaggtttctaaagtattctgtaaatataattttcatatacaggacacctctcgcttctttcttccttttttttttcctacgtaggtcaaattctaacacccctcgtttcttaattcggtcccttt

SEQ ID NO: 43252 - DNA, 1054 bp, Homo sapiens
attgtaccaagagactcgccccgcccctgtatcataagcctttaaatggagtcaactttttaattatatatataaagataaatatatataaatatatatataaactttttaaaactgtgaaaaatagctatgaaattataaaaaaaaacattctgacgtgcagaatattattttttatttcctgttagattatagtgtctagcaccggcttcaccggcctcccagtccccagcacaccccccgcccaccccaccaagtgtactgtactcaccccccaggatagagaagtgtttgttagggagagaagagggagaggcaggagccggcccaagcccagggtccctgcttgggccccagaaagcacttaaccaggccccaagccttcaagggaaaccaaggcctcaaccagacaatcttgagggaaggaaaagccagactttgggtttgttttttgggggaattattggtttttttttttatgtttcttttggaattttgtttgttggcaaattctgtgtgatcttttttcataaaaaaaaagaaaagatttaattggaaaaataaaattgtctggagtggtttatttcaggggctggagtaggggtggtgtctgggggcattctgccatatcagggcaccaagaagcaggattcgactggaagaagttgggtgccacgcgtgcaggggcggtgaccccatgcagccatctaaatgagctcatcggctgggcacagtggctcacgcctgtaatgccagcactttgggaggccaaggcaggcggatcacttgaagtcaggagttcgagaccagcctggccaatatggtgaaaccccatctctactaaaaatacaaaaaaaaattagccaggtgtggtagagcgtgcctgtaatcccagcactttaggaggccgaggcgggaggatcacttcaggccaggagtttcagaccagcctgagcaatgtggtgaaaccccgtctctactaaaaatacaaaaattagccgggtgtggtggcccacacctgtaatcccagctactcgggaggctgaggtgggaa

SEQ ID NO: 43253 - DNA, 1037 bp, Homo sapiens
ctattaaaaatacaaaaattagccgggcgtggtgacatgcgcctgtagtcccagctgctcaggaggctgaggcaggagaatcccttgaacctgagaggcagaggttgcagtgagctgagatcctgccactgcactccatcctggcgacagagcgagactctgttttaaaaaaaaaaaaaaaaaaaaaaaaaacccaacaaaagtcagcatctttatccacctgtcccggttccacaaagtgctttgttttacttcattattcgggagcctctggctgctccctgcagacggggtttcccctgctggacctcacagcctgtcatgggagcccatccggggtcagccacctggtgtcggttgcttccgcccccatccctgatccccgggacagaccagggtcttggaagctccaagctggggaccccaggcctgatgagccactctgtcctctgccccacaggtgctgagccgtccccggcccttctggtgccaagtgccaagcgccgcagccggaagaccagcaaagacactggggagggcaaagatggtggcacggctgggtcggaggagccaggagccaaggcccgtgggcgtgggcggaaacccagcgccaaggccaagggtggtaggttggcctggtccccagggcagggcggtgggcggatctccttcgtgcatccaaactcagggcttgggaacctgccgaagtgcctgcctgctgtctgtaagaactctgagccgggtgcagtgcctcacacctgtaatcccagcgctttgggaggccaaggcgagcagatcggctgatgtcaggagttcaagaccagtctggccaatgtggtgaaactccgtctctactaaaaatacaaaaattagctgggcatggtggtgagtgcctgtaatcccaactacgtgggaggctgaggcaggagaatcacttcaacctgggagctggaggttgcagtgagccaagatcgcaccattacactccagcctgggcgacaagagcgaaattccatctcaaaaaaaaaaaaaaaaaa

SEQ ID NO: 43254 - DNA, 1054 bp, Homo sapiens
gttttcctgcagtttcagcccaaagaacttcatttagcagttttgccttgtagagctgctggtgaggaattttcttggtgttccttttttttttttgaaacagtctcactctgtcacccaggctggagtgcaatggcgcgatcttgacttactgcaacctccgccttctgggttcaagtgattctgctgcctcagcctcccgagtagttgggattacaggtgtgagccatcatgcccggcctcttagtgttctcttacctgaaaatgtttctatttcaccttcattcttcagtgttgtttttactggatatagaattttgggttgacagttttttttttttctttgagtccttagaagatatcctgctctcttctggcctctggtttctgatgagaagttcgccattaatcagacgattgttttggaagtgataggttacatttttcttgttgttcctgggggttcgtgtttatctttgtcagccgtttgactgtggcatgcctcgtggcggatttgttgatgtttattttgcttggtgtttatctgacacccaacatctgcaagtttctgtttgtcatcaaatttgggaagatttcagctattgaggaaaagcaaatattcaagcattttttcttgttctttcttttcctgtttaacatacattttaccatttgttatctgacaggtctctgaggctggttcccccacacccaaactcataaactcactcgcttacttttctcttaatcatatccattcagctcttagatcccctccatggattttttatttctgaaattgtacttctcagttttataatttctttgtgttgtttgagacagggtcttgctctgtcacccaggctggaatgcagtagcacaatcatggctcactgaagcctcaacctcctgggctcaggtgatcctcccacctctgcctcctgagtagctgggaccacaggtgcatgccaccatgactggctaattattgtattttttgtagagacagagtcttgctatgttgcccaggctggtcttgaactcttgacctcag

SEQ ID NO: 43255 - DNA, 1064 bp, Homo sapiens
cttgtacgtctccctcagagctcttgggtgacaaggtacatcgtcaatgagcagtagtattttgaaaggaatttttttttgtgaacaataggtctcaacagcaggcttaaaatattcagtaaatcatgctgtgaactgagatgctgttaccaaggctttgttattccctttttttttttttttttttttgagacggagtctcgctcttttgccaggctggagtgtggtggtgcgatcttggctcactgcaacctccgcctcccaggttcaagcgatttttctgcctcagcctcccgagtagctgggattacaggcgtgcaccaccacatgtggctgatttttgtatttttggtagaaacggggtttccccatgttggcccagctggtcttgaactcctgacctcaaatgatcctcctgccttggcctcccaaagtgctgggattacaggtgtgagccaccacacctggtctgctgttccattgatagagtagtggcagaggtgattcagcatcttttttttttttttttttttgagatggagtcttgctttgtcgcccaggctggagtgcagtggcgtgatctctgctcactgcaagctctgcctcctgggttcatgccattctcctgcctcagcctcccgagtaggtgagactacaggtgcccgccaccatgcctggctaatttttttgtgctttttttttttagtagagacagggtttcactgtggtagccaggatggtctccatctcctgacatcgtgatccgcctgcctcagcctcccaaagtgctgggattacaggtgtgagccactgcacccggcctgttgttccactggtagacccctggcagaggagatttagcatcattcttaaggaccctggggttttcagaatggtaattgagcattggcttcaacttaaaagtccccagctgcattagcccccagcaaaagtcgggctgtcctttgaagcttttaaaccaggcactgacttctcctctctagctatgatagccttagatggcatcttcttagaaggctgttttgtccacattgcaaatccat

SEQ ID NO: 43256 - DNA, 1087 bp, Homo sapiens
cagattgtttcttcttactctgtttcttggccagtctggctagacgtgattagtttcattggtttctactctttgttattttcttccttctcattcctttgggtacacaagcatgtcttggagatactgcaggattgcttccaaaccataaagcgaatatcacagtaaagcaagtcacgtgaatgttttggtttcccagtgcatataaaattacgtttaaactatactgttgcctattaagtgtgcagtagcattatgtctgagaaaacagtgtacataccttaattaaaaaatagattattggccatgcacggtggctcacacctacaatcccggcactttgggaggccaaggcaggaggattggttgagctcagtagttcaagaccggcctgggcaacagagcgagaccccatctctacaaaaaataaacagaaaaattagccaggcacggtagcatgcgcctctggtcccagctacttgggaggctgatgtaataggatcactggagctcgggaggtcgaggctgcagtgagccgagaatgcgccactgcactgaagcccaggcaagagaatgagaccctgtctcaaaaataaaagaccaaaccaaaagcatatgtttacactatcctgtagtctcttaagtgtgcaatagtattatgtctttttcttttttgagatacggtctcgctttgtcacccaggctgaagtgtagtggcgtgatctctgctcactgcaatctccacctcctggattcaagtgattctcctgcctcagcctcccgagtagctgggattacaagcacacaccaccacgcctggctaatttttgtatttttaatagagacagggtttccccatcttggccaggctggtctcgaactcctgacctcaggtgatctgtccgcctcggcctcccaaagtgctgggattccaggtgtgagccaccgcgcctggacgtaatagcattatgtctaagaaaacattgtacatatcttaaaaatagtgtattgccaaaaacgctaacgatcatctgaacctttagtgagttgtaaactttttgctgatggtgggtcttgcctcgatgtt

SEQ ID NO: 43257 - DNA, 1013 bp, Homo sapiens
ctctgtctctgatgtctctggggtgctccgagctggtgtgttcactcttggcacgtgtgagggaatgtccgttttatttatttattaattattactattattattattattttgagatggagttttgctgtttttgcccaggctggagtacggtggcatgatctcggctcactgcgacctccgcctcccgggttcaagtgattgtcctgcctcagcctcctgagtagctggggttacaggcacgcaccaccacacccagctaatgttgttatttttagtagagacggggtttcaccacattggccaggctggtcttgagctcctgacctcaggtgatccgcctgcctcggcctcccaaagtgctgggattagaggcatgagctgccgtgcctggtctgggaatggtcaaatgggcaacttcactccatcgtgcctgtgtcgaaaactccactgtcctggatgagagaaacggactcatggagcagtgaggaattcagtgggcctggctccagcaggacggtggctgtgggattcacctggctctgcagagcgctcctctgtttattttttataatctgcttttctgcaattctgggtcagagagagtgcagggttcacaaggaggtaggggtgtgtccagcagggagttgctgagctggacggaggtcgaagcgagaacggtctcctcttgctttttcagtttcgattgtaggggtcgctggcatgccctgtgggtttttttttttttttttttctttagatgatgtcttgctctgtcgcccaggctggagtgcagtggtgtgatctcggccgcactgcaacctccacctcccgggttcaagtgatcctcccacctcagcctccggagtagctgggataacaggccctgtccactacaatacaatacaaatagaaaatacaacagtttgtgtattttttaaaaatacagacggggttttgccatgttggccaggctggtctcgaactcctggcctcacgtgagctgcccgcct

SEQ ID NO: 43258 - DNA, 1228 bp, Homo sapiens
ccaggtgtggtggtgtgtgcctgtaatcccagctatttgggaggctgaggtgggagaattgcttgaacctgggaggcagaggttgcagtgagctgaaatcgagccattgcactgcatcctggcaacagagtgagactccatctaaaaataaattaaataaataaataaataaataaataaataaataaaatacagcagcagcaaacgtttgtggccaaaatataaagccactaacacagtgcaagacacacagtgagtgagtgccaagtacagatcggctgtttcgatcacctgtgaagtttcagcttaaagcaagcaagtggggcttctaagccatgtctgtgtccccactgcgcacgggattccagagaccagcaagtggctccttcttcgttttttttttcccttactggaaaagagagactggaatccttcttcgtgtaaacttgtgttctgaactccccctgccatcctggtggatttccttggcgtttctgatctttgttcttggcacgatttggtaaataggtatctgaccgcacagagatgtgtgtgtgtgtgtgtgagtgtacgcgtaaaagcgcacaagaaagaaaatgctttcttccttctttcaccttaaactctcattctgcctcattcacaaatatcccagaattccagcactgttgttttacaagatccatctccccacgcccgtcactctgccatcactgtccacgctcagggtccagagcccaacccttcagggccatgagggtggacctcagcctgcgagccttgtctggccagggtgctgaccggcagtgtgtctgcgtttcaggctgagcagcaagtctctgctgacatcagatgattatgagctgggagcagggataagaaagagacacaaggggtctgaggaggaacatgatgccctcatcggaatggggaaagccagggggaggaaccagacttgggatgaacatgaggcctcgtcggacttcatcagtcaggtgagtaacccagtcttccaggtgtgtgagatctttcagggaggtgtctggagggtgtgttaagagttcacgctcccttcgcaggccctttgttcctgtacagaaaccttagaagtggttgtcttcaatgccggaatgactcttctccaatcttccttattgtacagagggggagattaaggcccagaggaggtcagagacctaccgacgtaacacagcctcagagacaggag

SEQ ID NO: 43259 - DNA, 1056 bp, Homo sapiens
tagtgtgttttgtgtattgactgaccggcccaggtaggcattggtggtcgccgagctgactccctcccatttcctcataaaagacatgcctggcttcctcctgccctctttggggccttttgagaccctaaaatgatgacgcagtgaagcaggaaggtttagcaggtagtgagtgcgcccaatgccatcgaggtgtggggccttgtgccccccatctggccccccttgtcctgactgtgagggtccgtgcagggccggggtcctggtggaggtcccccatcagccctggttcgaaggggctcaccagagctcctcacccccagcgctgccttttggggttctgcgtggaacgctgtgcttatgacacatgggctgggatggaatgtctgtctctggcctgggacggggtgggcagcctggaccccaggccctgcatgaggttctcctcggactcggggacccttggggggacagggcaggtgcgggcgtcggggagggggaaactcgtgccgtgctgaccctgcctgccggccccttcccagcaggagcggttgaaggcgcaggagcaccgggcggagatggaagagaaggggagcaagcggggcctggaggctgcgggcaaggctggcctggccaccgccggccccgggctgctgccgcggaagccccctggcctggccgccggccccgcgggcacctacggcaaggccgtgagcccgccaccatcaccccgcgcatcccctgtggctgccctgaaggccaaggtcatccagaagctggaggacgtgtccaagccacccgcctacgcctaccccgccacccccagctcccaccccaccagcccgccgcccgcctccccaccgcccaccccgggtatcacccgcaaggaggaggctcccgagaatgtggtcgagaagaaagacttggagttggagaaggaagcccccagccccttccaggccctgttctcaggtaggatgcagctgagaccctcagggtctcactctgcccctggagcggtaaaactgctcatccatcttttcattgacccgttcg

SEQ ID NO: 43260 - DNA, 1042 bp, Homo sapiens
tgtgccaccacgcccggctaattttgtattattggtagagatggggttttaccatgtctgccaggctgaactcctggcctcaagtgatctgcccgcctcgtcctcccaaagtgctgggattataggtgtgagccactgtgcccaggtgtgtgttttaggttttgacggtcattggtcttagcttctaaggtgtcgggtgagataataactggggtgagtaggcggcagccagttacttgatttggggagccaggtcttgagctcagcctagggcgagaggcagggagacccccataccgcaggttggtatgagggattccagtcaagtctttcgagaggccagtgagctctgggcctaactcagtgccccctggcaccctgaggcttgcatccttcttggtgaaacggggggatggcaactgctcggtccttgggtgtgggtgtgagcagtgggtggggcaggggggcactgtgggggcttggagtatagtctagagatggaaggagaccaggcaggatggcctggcatgggctgtgcttcttcggggtttattttagagcctcttttgtgagttgcgggatgccttgatcctctcctcaccctaatgtgtatctctttgcgttggccctgggaacattggaaatcacatttatggctggacagggtggctcatgcctgtaatcccagcactttgggaggccaaggcaggaggatcgcacgaggccaggagtttgagaccagcctgggcaacatagtaagaccccatctctacaaaaaagagaaagaaaaaaattagtggggtgtgatggtgtgtgcctgtggtccctgctacccaggaggctgaggctggaggattgattgagctcaggagttggaggctgtagtgagctatgattgagccactgcactacagcctgggtgaacagagagagaccctgtctttaaaaaaaagaaaagaggccgggcacggtggctcatgcctgtaatcccagcactttgggaggccaaggcaggaggattgcttgaggcctgcagtttgag

SEQ ID NO: 43261 - DNA, 1031 bp, Homo sapiens
gccaggctacagcttgcatttttttcatggaggtgaaattcacgtggcatacaattaaccatttgaaatgtgtatactttagtggtgtttggtgtattcatcctgtgtaatcaccagctatctatggtttcaaaattgaatatttatttatttgagagagagtctcactctgtcgcccaggctggagtgcagtggcgtgatctcggctcactgcaccttccacctcctaggttcaagtgattctccttcctaaaaacctcccgagtagctgggactatagggacacgacaccatgcccggctaatttttgtattttaaatagagacggagtttcaccatgttggtcaggctggtctagaacccctgacctcaggtgatccgcccgcctctgcctcccaaagtgctgtgattacaggcatgagccaccactcccagctctgaatttttgttttaagcaaggacaaatggcatttggctagaagcagacacggactctgaccttgtagtaggtgcttttagcttctctgagctccagggtttgtaaccataaataataacaataatcatagaccaggctcaatggctcaggtctgtcatcccagcactttgggaggccgaggtgggaggatcgcttgagcccaggaattctagaccccagacttcgcaacatagtgagatcctgactctacgaaaaagaaaaaataaaaatgagctgtacatggtggtgcacacctgcagtcccagctactcaggaggcaaaggtggggcgattgcttgagcccgggaggttgaggctgcagtgagtcatgatcgcaccacctcagctccccaggtagctgggactataggcgcctgccaccacgcccagctaatttttgtatttatagtagagacggggcgggggcggggggtggttttcgccatgttggccaggctggtctcgaactcctgacctcaagtgatccacgatccacccgcctaggcctcccaaagtgctggtattataggtgtgagccatcgtgccggctgtg

SEQ ID NO: 43262 - DNA, 1038 bp, Homo sapiens
aatatatttttttttttgagacagagtctcactctgtcgccgaggcttgagtgcagtggcactgtgtcgcctcactgcaacttctgtctcctgggttcaagcagttctcctgcctcagcctcccgagtagctgggattataggcgtccaccaccacgcccggctagtttttatatttttagtagagatgcggtttcaccacgttgaccaggctggtcttgaactcttgacctcaggtgatctgcctgcctcggcctcccaaagtgctgggattacaggcgtgagccactgcgcccagccgcataaatattattttctaatttttttttttgtctttttgagacagggtctcgctctgtcacaggctggagtgtggtggcgcgatctcggctcactgcgacctccgcctcctgggctcaagtcattctcccacctcagcctcctgagtagctgggattacaggcccacaccgccatgcatggctaattgtttttaatttttgtagagatggagtttcaccgtgttgcccaggctggtctcaaactcctgacctcaagtgatctgcctgccttggcctcccaaagtgctgggattacaggcatgagtcactgtgcctggcctaaaaaaaatttttttgggatggggtcttgctctgttgcccaggctgttctttttttttttttttttttttttgagacagagtctcgctgtgttgcccaggctggagtacagtggcatgatctcagctcacggcatgctccgcctcccgggttcatgccgttctcctgcctcagcctccggagtagctgggactacaggggcccgccaccacgcccagctaattttttctttttgtttttagtagagacggggtttcaccgtgttagccaggatggtcttgatctgctgaccttgtgagctgcccgcctcggcctcccaaagtgctgggattacaggtgtgagccaccacgcccggccaaccaggccgttcttaagctcccggcggtcctcccactttggccttccaaagtgttgagat

SEQ ID NO: 43263 - DNA, 1087 bp, Homo sapiens
aaaaaaaaagagggacacagaccacgcagtaaacaaaatggtaaaggtctggtctggtctgagaggtgaggggctgtatcagcacagcccacccccacccgactgatctggaggggtgacctttttcctgcatgcaaagggcagaaaagtgtggtgaaggtggacggaacacaaaagtcagagcctggcgtatctgagctggcagaatggctggagctggtgggaggggatgtgggggaggtgggatccttcaggtccctgaaagccagtcatgaggtcttggaattttaaactgaggaatgaggaggcagtggagggttttaagtggaaggagtaattgaaattgagggacatttcacagaactggtctggactcttaaaaaaatgtcaatggcatgcaaggcagaggaaggcggagaactgttcctgattaaaagagactggaaaaatgcaactgctaaaggcaatgtatggctctctattggatcttgggatcagggaagaaattgctacaaagaacatcattgggacaattgacaaaactggaatatggactgtagattagttgatagtatcagatcactgttaggttttatgaagtggataactgtgtgtggttctgtaagagaatgtccttgttcttaggaaataagaatactgaaatgtgggccgggcgcagtggctcacgcctgtaatcccagtactttgggaggctgaggcgggtggatcacgaggtcaggagatcgagaccatcctggataacatggtgaaaccccgtctctactaaaaatacaaaaaaatagccgggcgtggtggcgggtgcctgcagtcccagctactctggaggctgaggcaggagaatggcgtgaacctgggaggcggagtttgcagtgagccgagatcgcgccattgcactccagcctgggcgacagagtgagactccgtctcaaaaaaaaaacaaaagaaagaatactgaaatgtttacgggcaagggacatagagtctacaacttgtcctcggaatggttcaggaaaagaaaaaatatctattttatatctataaatatacatatataatatatatattt

SEQ ID NO: 43264 - DNA, 1039 bp, Homo sapiens
cctctggcctcagcctgccaaagcgctgggattacaggtagaagccaccgtgcctggctggaaggaagaaaatgcagccgattaaggaagtgcccagtgcagtgcccagcacatagtaggtgctcaataaatgtgaactcctgcccttgttattccctgacctatccctgagctgctgagctgggctcaggtccggctgtgtttgcagccacctgccaccccgagagtgcaggactggagcccttcggggagggttgggcaccaggacaccaggagaaaggctggcggggacctaatgcagaaggcaatttatggtgcaaacacagcacttgtgcgtggaaggaaaagattttctttgaacaaacgagactctcagccctgtttcccagtagcacgattacttcagaactgtgcagcttccacaaaacaaaaaaatatggtgagggatgaagggaggtgagaacgcccttgcagctggtggaacaaatgtttcggggctgcagaggggcggcaatgtgcagatagcgaggccgggcttgggatggaggcccgggtgcacgtcccaagcctctgccatcagattaggcctgagtctgggcatggtggctcacggctgtaatcccagggctttgggaggccgaggtgggcagatcgcttggggtcaggagttcaagaccagcctggccaacatggtgaaaccccatctctactaaaaatacaaaaattagctggtgtcgtggcacatgccggtaaccccagctgctcgggaggttgaggcatgagaatcacttgaacccagaaggcagaggttgcggtgagcggagatcgcaccattgcactccagcctgggtgacagagcgagaacctgtctcaaaaaacaaaataacaaagttatgaattgaggcattatttgagggagggggaggaaggggcgtggtaatgacagactcatggtatctctgtgtcttcaactattggcctttgtatttgcagagtgtttcatgattatattaaatttcacaatgtctaacaattaata

SEQ ID NO: 43265 - DNA, 1073 bp, Homo sapiens
ctgattccagcagtgcccgatggtgggacccacaccagaccaagccttcgcctcccagaggcctcctggccctcctgtcatggcctgtgagagccacacccctaggccccgtctcctagtctgcaggccgcaggaccagctgcccacggccccagggggcaggggctgtagatgagggtctcagaggtggtgggagcaccccccccacccacagttcctgggcatttctttagagctttaaaatggcacctggagaccaccaggcgcggcgatcagatcgggtggtgtggtgcctcctgggactgaccacttcttgctctccgaccaggcaggggcgagtggcctgggaggttcccggaccctcagggggcctgtgtctctgggcaccgcagctccgccccactccttcctccagaacattccccactcgggctagagaattgcgtctgctccaggaatgcatcctagcgtgtgtacgatcgcgcctgggtgtcctgttctcatgagcaagcggttttaaccagcagcataatttatactcatagacaggactgggggaagggctgttcctgaggctggggtgcagtgccttggaaagcacccctgaaacagtggaccttgtatttttagtgtcccctgcaaccatcctctgacttagagcaagaatttccgctgctgctacccccgagatgggcttcaccagatgttaataacgtgcttattttctctaagtgctattttggcaccagcgttagttgcaatttatattctgcagcatttgatgctgggaaaagaacccaccctaatggtccccaattggcagagctcggctgttaagcagcagaccatatgctgcctgctggaggagcgtggtcagcacttgtccccgtgcctgcgtgcgtgtgcctgcgtgcacgtgtgcctgcgggtacctgtgccctgtgtgtgcacatgtgcctgcatgcgtgtgcctgcgtgcacgtgtgcctgtgtgtacatgtgcctgcgtgtacctgtgccctgtgtgtgcacgtgtgccttcgtgtacctgtgccctgtgtgtgcatgtgtgt

SEQ ID NO: 43266 - DNA, 1044 bp, Homo sapiens
cccgcctcggcctcccaaactgctgggattacaggtgtgggtcaccatgcccggccttgttctgctaattattaaaatattaggagggaaggtagaagtaagtgtctaacctctgaccctcatgagcctcatgggtccttacgggccatgtcctttggtttccgtgtggctttctcttttggaggatggagggtacttctttgttcccagggaagaaaggtgggacacattccagcacacctgtctagggcctggcgagggcttagcaggatgggaatcctgtctggagagggtgaaaggactgtcgcagtcagagttcccaggaaacctccgatacccgtgtggggtgtgcagataggctcttcctccatggccttcacggttgccatggtagcagcctggctttgcaaaactcagagcttccatccaggcaaatatgtacaggaagcaggagcaggctggagccagagggtcgtgtagacacagtccccagaaagatgatgtagtggagatgattccgggcactctctcctcggcgtggtctttacagagatcagctgctctgagaggctccccttggtaaagccttctgccttcctttgtccccgatctggggacttcatgtctcattaggtccagctcttctccctcttcatcgtataaaccaaaaaggcatcaggcattttgactcaggcccacattagggaagaacaccttgtaatttgccagatatgaactacagcaatggaaaaggaagtgtgcatggccaggtgcagggctcttgcctgaaaggctagcgttgtggagggcagatcactcgaagccaggagttcaagaccagcctgaccaacagggcaaaaccccgtctttactaaaaacacaaaaattagctgggcacggtggcacatgcctttaatcccaggtactcaggaggctgaggcacgaaaatctcctgaacctgcgaggtggaggttgcagtgaaccaagatcgcaccattgcactccagcctgggccacagagtgagactctttctccaaaagaaa

SEQ ID NO: 43267 - DNA, 1053 bp, Homo sapiens
gcatttgcgaatagtcaagtgtgtgggccttttacctcaagagtgctggagatttatagtctcaccattttattttattattttttttttttagacagaatttcactcttgttgcccaggctggagtgcaatggcaagatttcggctcaccgcaaccactacctcctgggttcaagctattctcctgcctcagcctcctgagtagctgggattataggcatgcgccaccacgcccagctaattttgtatttttagtagagatggggtttctccctgttggtcaggctggtctcgaactcccaacctcaggtgatccacctgcctccacctcccaaagtgctgggattacaggtgtgagccactgcacccggcccagtctcaccattttttgaggtgacagaacagagagctgaaatttctgaagctacttctggattggcaacagcgtaatgccctgtggcatgtcagtgacttctctccccctagagagtgagttgacaggtttcactgtaggaaccatttaaaagtaagggagcagtttgtactttgttctgcttctgagacaaggctggatggaagtcagcaactgaaatctagcacgcatggggacggacaccttccaggtggctttgcaaggaaggcaaggaaacaaacacagaacccggtgactttggcctgtgggctcagattttcttttggattctttgccaacagacccaaaggtctcaagattattatcacacttgctgggcttggaggaggtggtggccggatacatttgtctactggttcttgagaaagctgtttatgtgaagaaatttcagctcccatcatgatagggtcatctggaattgaatttaatcttctgctttattcattaatcattattcaggcagcagaaaatgaataaaggaagacggaagtgctttctttatattgcaaagtgaagacctcatgaacagccaaaacaccttaatgtattttgaggacaaaagggcatcataaacttaaccagcaacctccatgatgacgtgaagaacgtggcctggcggg

SEQ ID NO: 43268 - DNA, 1043 bp, Homo sapiens
ggttgtctgaagattaaaggaggggatgtttgcaaaactcttagcacctttaaacttaggtccttggaaatgctagtggattcacttatcttctccttccttagatgcttggaaagtaagacactggcatttctgtcattcttgatttcctggtcatttgggggcacttaatttctctgtgttggtttcctcctctgtaatgagatctgttaatctcaggatttcacaaggggcaggcagagaggcttgtcacagccttttagaactagaagaaacttaagatgtcatttaggtccacaagtgccaatatgagagtctttctacagtatctttgtccaaaagtagatgtgagtggactctttggtttctgaaaatcccacatcatgtccccttaatttcttttctttcttttcttttctttttcttttttttttttttttttttgaggtggagtttcactcttgttgcccaggatggagcagtgacgcagtctcagctcactgcaacctccgcctcccaggttcaagtgattctccctcctcagcctcccaagtagctgagattacaggcgcccgccaccatgcccagtttatttttgtatttttagtagagatggggtttcaccatgttggccaggctggcctcaaactcctgacctcaggtgatctgcccacctcaacctcccagagtgctgggattacaggcatgagccaccgtacctggtcttcctttaatttctagattttgattttgaacctggtgtttctataacattcacttgactgtggtgatgaatccaattagaataatcagggctctgcttttatcttttaagatagggatccccagtccccatccccaggccacacaggaggtgagcactgggccagtgagtgagcattacgacctgagctctgcctcctgtcagatcagcagcagcattagagtctcaggagcgtgaaccctgttgtgaactgctcatgcaagggatctgagttgcacactccttatgagagtctaatgcctgaagccatctctccacg

SEQ ID NO: 43269 - DNA, 1017 bp, Homo sapiens
attgagcatttctgtgccaaagggagtaagaaagagaaagggcaaccacggccctaactgaccatcagtgggatgagagagtgatggtgactgctgtgaggaacatgcggctctgcatgagcgacatgggtctgggcctgaccaggccgtggtggggtcttattggcggagatggggagaactttactccaggcccagagaatgacacgagcaaagctgggtgaagggtcagcaagtagacaggtgtgtccagagcagaaggaagcaggactttgaagataaatagaccctgttgagggctttgcaatgcagaacaaaacaaggagggtggattttattttggagacttcccctacccccgtccctggagctgttgctggcgtaatggagggacacagtgggatcacatgctgcttgtgggagggtgaattttgtagatccttgaaagggagtgggagggagggagagatcagatatagaatatcaagggaattggaacaccttgccaatgtagtcactatggcaagtcatttctagtaacctggggacatgccgtcctcctacagccctcccagagcccgttcgtacaatgttgcaggtatttgctgtgattacttttcccattttccagaagacctaggtgggatttggcctgaaggaacctggttctaagggcaggttgggggcaagaggggagacgtggggcagtagtcaaaagcgaggatggcagcagccaaggaagaggctttggtgaagagcggccgaagcgagaccataggacacgatcttgggcacgcgtgtctaggaggctgccccggcctgctcctccttcctgtggtgtgtgtgggtgccctggagtagatcattgggcagttgctgctttgctgcattcccaccggccagtgaatttgttttagtcctcaggtgctttacataaggaggaaaccatgtaaccttcacaagttttttcccagtcatttaaaaaggcttgttttccagccgaaggcatgtcgaata

SEQ ID NO: 43270 - DNA, 1004 bp, Homo sapiens
ccacaattttttttttttttttttttgagatggagtgtcgctgtgttgctcaggctggagtgcagtggtgcaatctcagctcactgcaacctccaccttccgggtgcaagcgattctcctgcctcagcctcctgaatagctgggactacaggcacatgccaccatgcccggctaattttttgcatttttagtagagacggggtttcaccatgttagccaggatgatcttgatctcctgacctcgtaatcctccacctgcttcggcctcccagagtggtgttttgttttgttttgttttgttttgttttgttttgttttgttttgttttagtttttgttgagatggagtttcgctcttcttgcccaggctggagtgcaatggtatgatcttggctcaccataacctccgcctcccaggttcaagcaattctcctgccccagcctcccgagtagctgtgattacctgcatgtgccaccacgcccggctaatgttgtatttttgtagaggcggggtttctccatgttggtccgtctggtctcgaactcctgacctcaggtgatctgcctgccttggcctcccaaagtgctgggattacagggtgagccaccgtgcccagcctaccgcagttttttttaaagggcatatggttcattttttccctctgccaagagggatgtgcagcatgagtgagaacaaagtctgttttgaactactgaggtttgagtttgttccagcagcataacctagcacatcctgactgataaggatcataaggaccataactgcccttggagttggagaacaggagcagatttgagaggtagaggattagaaggtgatatgttgcatgtgaaggtggggagaaagccagaggtctcacaggcgtgtctggtttggaccactatgtagttgatgatgctgtttacaaaactggaaatggaatccaaaagattcaggagagattacttttgttttggacatgttgagtttttaggggagacatc

SEQ ID NO: 43271 - DNA, 1035 bp, Homo sapiens
acttccatgctatataacactggaagccctagctagagctatttggcaggaaaaagcaaaagcatctatatccgtgcaagttcacagataacatgatcttatacatagaaaaatctgcaatttccacaaaaaaacttgttagaattaatatattcagtaaaggtgcaggatacaaaattagcacataaaaatcagttgcgttcctgtacactaacaaacactccaaaaagagaaattaagaaaatctaatttataatacatcaaaaaagttggaatacttaggaacaacttaaccaaggagtgggtaaagacttatacactgaaaactataaaaaactgctgaaataattaaagaagacataaataaatggaaagacatccctaaaatgcatatggaaccacaaaggatcccaaatatcctagacagtcttaagaaagaagaacaaagctggaagcctcacacttcctgacttcaaaacttattacaaagctacagtaatttaaacaggcagacatgtagaccaatggaacataatacagtgctcagaaataaatccacacatttatgatcagctgatcttcaacaagggtgcaaagaacacccaccgggggaaaaggtagtctctgattaatggtgctctgtaaactgaatatccacatgcaaaagaatgaacttagacgctgataccatatctcatatcataacacaaaaatcaactctttaaatggattaaagacttaagtgtaagacctgaaactataaaaactagaagaaaacgtaggtggaaagcttcatgacatcagtcttggcaatgatttcctgggtataataccaaaaacaaggtgacaaaagcaaaaaacaggcaagtgactactaagatgctttcagcaaaggaaaccatcaacagagtgaaaaggcagccggtggaaaggaattgaaatcctttgggaaaggatctcagcatgttcctgtgttcattgcagcattattcacagtagccacaagatggaaaccacttactgacatgttcgtca

SEQ ID NO: 43272 - DNA, 1016 bp, Homo sapiens
agcagctccagagggcctgtgatacctcagacaggcaccagaagaagcaagagcttgcaagctcctgaaaaaaggaaaacaaaagcctgagcacttatattagcctacgatttagcaaaatcttcttgcaggaagcctattttagaataaagtatgagtatctcatgtaatttattgagtactgtactgaaagtgaaaaagagaatgattgtatgggtacttgaattacagtttctactgaatgtgtatcactttcacaccacagtaaagtcaaaaagtgtaaaaccattgtaagttggagaccatctgtatatgcacccgacatcagtgcacccaaatatgtgaagcaaatattgacagccgaagggaaaaataacacaaaaatagtaggagattgcaatacctcactttcaatcattgttagcaccaccaggcagaagattagtaaggaaacagctgacttgaacaacactatagacctaacagacacatacaaaatattctagccaacaggcacagaaaacactttttctcctctgttgcgcatggaacattttccaggatggagaatattagatcataatacaggtcttaacaaatttaagatcaaaatcataccaagtatcttttccagccacaaggcgatacacttagaaatcacaaacagcaagaaaattcacaaagtatgagaactaaacacactgtccgggcatggtggctcccacctgtcatcctggcactgtgggaggccgaggcaagtggatcacctgaattctggagttcgagaccagcctggccaacatggcaaaactctgtctctactaaaaatacaaaaatttagctgggtgtggttgcgtgcgcctgtaatcgcagctacttgggaggctgaggcaggagagaatcgcttgaaccagggaggtggaggttgcggtgagcagagattgtgccgctgtactccagcctgggcgacagagtgagactctgtcacaaaaaaaaaaaaaaaaaaaaaaaccaca

SEQ ID NO: 43273 - DNA, 1025 bp, Homo sapiens
ttgctttatgtgcatctttaaatggccttcagatggaaccgtctggccattttaagcaggaagcctattcattagagaaccacatggcaggtaatctactttggctggttaacttagacctttcactcacacgtggtcagcttcagttggatgaaggcagcaacaactatctaagggttgaaaggttggagtactagcctggcttactttgcaggagtgacttctctagaactgctagcatgtcagatcagctcaaacatgaggtcatatgaagaggtgggcagattgaagtccgacaggcttccccactgcttttgccccagggtgcagatattagaacagaggctaccacttgtttctgtagaagaaaaactttgtccttcattttctgtgcctccaaatgtcacttaacctccagaagagttgtgttggtaaacataatgaagggattaaactagaaatgaattttgacagtttatagtgagagcttctgatttctgtcatgtggaacttcatgtctgtagcatttcagtatttgaagttcttaatattgttgcaaatataaaatgaattggggagagatgaacctctcaaacatgttttgttttttcaagaaatcatatctactgttccatctgtatttcatgtagaggtgtatttatgtatcatttacttgagaaaacacgtaaaaacagaccattttaaagctagtccgtgtctggtttgtcgccacatcaaatatgcacatgtaatgagttgtctggaactcaggcctttccctacagacgcgatttttgctggtggctaattctcaggtcagccttcaaaggtttgcataacctcagtgcacaccagtgaattctaggatggagaattaccactgatgacaatggttttataggaaaatgtactctgaattcttgtcgccctctgtaataggaggagtttgctgctttttttcctctctttgggcctcaggcgttgtgttccgtggactgggcaggctgtggtggtagggaagcggg

SEQ ID NO: 43274 - DNA, 1074 bp, Homo sapiens
accatcctggctaacatggtgaaaccctgtctctactaaaaatacaaaaaaatagccgggcgtggtggtgggcgcctgtagtcttagttactcgggagggtgaggcaggagaatggcgtaaacccgggaggcggagcttgcagtgagccaagatcgagccactgcactccagcctgggcgacagagcaagactctgtcccaaaaaaaaaaaaaacaaagttgcttcatttctcacatttcagaattacctaattatcttttattgactgttgtcagagaacatgctgtgtgatttcaagccttcaaaatttgttacggcatggcatacagtctgttttgtgaatgttctcatacacttgaaaagaatgtgtattctgcagttactggataaagtgtcagttaggtcaagctctttgatagtactgttcaagtctatccagctataagtgggttcatcttgcttccttaaggtctgtcaatttaagctgtgtgtgtgtgtgtgtgtgtgtgtgtgtgtgtgtgtgtgtgtgtgtatttgcctgcctcggcctcccactactggacccagcctttttttttttttttccccctaatagcgacaagatctcactatgtttcccaggctggtcttaaactcctgggctcaagtgatcctcctgcttcagcctcccaaagtgctaggattacaggcatgagctaccgcacctggtaattttttttttaatcaaagtctggacattatgaatgaaaaaactggaagttccaaatgatactcctccattgtggtttaagttttttaggtgtgcaaattagagtaccggcaaatcatcttgatcctgtcatggtttgctctttattaagtctgttttcattttgctcttaacccttaagatttggctctcctaggatcttagatgaaagctcagtgtttaccagcattcctctactttggttgggcttgacctttaatctctctcaacaggctgggagttgtggctcatgcctgtaatcccagtactttgggaggccaaagcaaatgcatcacctgaggtcaggaattcgagaccaccctgg

SEQ ID NO: 43275 - DNA, 1065 bp, Homo sapiens
atgtcagcaaggtcaggtgatggtagcgttttgtaggccatggtaaggatttcggtttcaccatggtgagatttgtggtttaaaagaaataactcaaatgccgtatgaaaacatgtcaagggatggagcctgcaaggcagtacttgggctagaagcagaagcatgtcctttggtcacagaagattcagttctaaaaagatcgttgaaaacgttgattttaccctccacacatgaggatgtacttacttatctgtcctagtttctaaactaattttcattggacagttgaagaaaatcttgatgttttatgttaaattgtttagcccgcccactgaagattttgagtttaatttttgatttaaaacctttcctattgtaaaaatacacagataataggattcttagagctgttaaactctagactaattgtttgcatatttatatccataatgatggatgttattttaccatattttgtccacatattaaagttaacacaattttcgttttctttctctgaactcatcatctgctttgttcttccttaatagcatcaccatcctgtggtcacctgatctcagcgtctaggtcaactttgattcctttcttcttgccctgatggccagtgacatacacagatcccatcgactctaactctgcagtcagtgtcttgtattcttctcctccccctaggtactgttggctcttgtttcctggcaccggttgtctcctacatgccatcttacacattgcagccaggttgatttttctaaagcacagctgtcattgcattgcttcccattggctagaaaataaaatctgagctctgtttcagttatctgttgatgtataacaaaccaccctaatacttactgcttcatagaataattttgtttgttgacagttttatgaatcaggagaattgagaagtgctcacctgggccatttttctctggtcgacatgttgtcagcagaggtggccagtgctggagcatccgcttccacaatgtcttcttcgttcacatgccttgtcaaagactgctggaaggccgggctccactggct

SEQ ID NO: 43276 - DNA, 1050 bp, Homo sapiens
tgacctcaagtgatccacccgccttggcctcccaaagtgctgggattacaggcgtgagccactgtgcccagccatgggacccactttactcttaatttccccaattcctagaacagtgtgtggcccacaggaaatccgcagaatatatttgcagaatgaatgaatgacttgccaaacgaattagggcaaatcagtagatatcgagtaaacatccacaaccacctgccccatacccttttcagctctggggagatggtggctccttgtggggtcggatatgggggtctcctttcctttcaccctcctgcctcgtgggggagtcaagtctccgcaggcggagagcccggatgcaggcgcgactaggcggccctctctatggtgagccccccggtccctcctccgcagtacccggagtgcctctatggttcttcctgtccttagtcgggagggggcgctgtgcgcaggcgcgaggtgacgccgcggcagggccggaaggagtgcagcggctgccacggagctcgcagctgcggcttctgaggagtaagcggcgcggtagcgaaggccgccgaacctgcctggctagccggcgacttgagtgacgagtgagtgtcggctgcggggcgcgctcgagctcctgggcgggtctgtgaggcgacgcggcctctctgaggggcgcctctgtggagctccgggggtgggggcgggggcgcgggccgtgagggccgccgagctgaggggcgcgggccgaggcccgggcgggatcgggccaaggggctgggctgggcgtctcgagcccggtgcggtggcgaggctggagcgacaaaggcgctgagcggccgggtggccccctctcgccacttcgcgaagtttcgcgggccggcccctcgggtctgctgcgcgagggcaacagcccgggagaccgcgcttccctcccccgggcccgaggccgccgcggaggcggtgtccgtgcacccgagcgcggcctggaggagcggcgggaggcgggccgtgcctgtgaaccccagcccaggcgggcggcgtttttcctcc

SEQ ID NO: 43277 - DNA, 1059 bp, Homo sapiens
aaaaggagagattataaaatcaaacacaatgtacgtttcagttttttaattttcatttttagagatagggcctcactctgtcaccgaggctggagtgcagtggtgcaatcatggctcactgcagccttgaactcctaggctcaagcgatcctcccacctcagcctcctcagtagctgtgactacaggcacatgccatgacgcccggctaattttttttttaaattttttgtagagacagggtcttgctgtgttgcccaggctggtcttgaactcctggtctcaagtgatcctcctgccctcagcctcctgagtagctgggattacaggctgtactttttagttgttttaccaggatgcatggcacattgggaagtgagaggactgtgaccaggagccaaaagctctgcgttcctttctgtagaatataggaagacacctctttacagatcattctgtcaacagtgcttcccttgatttgtgcgatgatgtgagaaccttgcgttggatgttgtaacttgagctgtgtaattcctataatattaaagtaatgtagaatattgtgtttgtgttttttaaacaggagtatgccaaaatggtccaggtcttacatgcatactgtatcatttcagcaggcatccgtgtaagttgcaccaatcagcttggacaaggaaaacgacagcctgtggtatgcacaggtggaagccccagcataaaggaaaatatcggctctgtgtttgggcagaagcaggtagtgatggccggttacttcaacgcctcttattgctctagtgattatagcgggtttccattgtcccttccagtagaatggagaataaaatcttagaattgattttttttttttttttgagagggagtctcgcactgctgcccaggctggagtgcagtggtgttgtcttggctcactgcaacctccgcctcccagattcaagcaattctcctgcctcagcctcccgagtagtgggattacaagcatgctccactacgccaggctaattttttgtatctttagtagagacggggtttcaccgtgttggcca

SEQ ID NO: 43278 - DNA, 1030 bp, Homo sapiens
aggatttctactatcttgcaaaagttttttgtataaaatgaaaccttggctgggtgtggtggctcacacctgtaattccagcactttgggaggtcgaggcgggtgggtcacttgaggtaaggagtttgagaccggcctggccaacatggcgaaacctcatctctactaaaaatacagaaactagctgggcttgtatgagagcgcctgtaatcccagctacttgggtggctgaggcacgagaatagcttgaactggggaggcacaggttgcagtgagccaagatcatgccactgtactccagcctgggcgacagagcgagactctgtctcaaaaaaaaaaaaaaaaagttattttaatggagtttaaaatattttctccttacaggttaacctcaccctacagatgaagataatagagcaagaaaaagaaattgcagaactaaagaagcagctaaacctcctttctcaagacaaaggggtgagggatgacggaaaggatgggggcgtgggatgaaagtggacttaacttttaaggtagttaactggaatgtaaatttttaatctttattagggtatagttggtacaatgcttcgttgtatttagtaagcctttacaagacttgttaaagatgtcagagtgccccaagctgccgttccttcccttcctgccccacaagctccttttcctgaatttcctacctaaatattaaccatatgcctagtctctgaaactaaaaacttggacctcatcctcaattattttctcctttcaactctgttgaccctctgtctggtcttcctctagaaggtaccgcagaaattgatgtgtgctccctgccctcgtcactgcccaagcccgggcctgcacatactcactggactgttccagttttgacagctgccagtcttcctgcccctttcacactgcagctgaagttcattacctgaaggacgcctcatcatttcattccttggctccaaaccttctgctgcctctaagataaaagctcaacttcttaacagtgtacagt

SEQ ID NO: 43279 - DNA, 1034 bp, Homo sapiens
cggaggctggggctggaagagccagatgatggttctggaggcggggcctgtttgttctcgtccacttcctggcactcagctgcagggtgtgctggcaggactcactccccttggggtagcagctgtggcctcagcaggcacaggaggtatctgctggtgttcacaaagaggagcggagggctgggggccaaccccacagcgaaggccggtaggaaacttcctggggcctggtgggtgagactccttcccggaaaggccggaggggcccgcagggtttgcaccttctcatggctaggcctttagatgtccaggtcaaactctgacccttcaccacctgcctgctgttctgggctgtctgtatgtctgccgggggctcatcactggcagggctggtgaccccggaagtggtgggcgggtccctcgagggtgttttggtcactggtgagttcagcactctattgggaatttccagttgtacatgatcctggtacctccccgggtagtgctgaagagtgtgcccgatggggttgctgcattccctgcgcagtacacagtcattggaccaccggggagaggcaggggtggcctggcgtgggggtccggctgcagctgctgccctggacatggtctctgtacatgttttttttttaaatgctgaggaaaatatgaagcttaaaatagaatttgttcaaattgtgaatcctggccaggcggggtggctcatgcctgtaatcccaggcatgggattttgggaggcagaggtgggaggattgcctgatgttaggagttcaagaccagcccggccaacatggtgaaaccccatctactaaaagtacaaaaattagccgggcgtggtggtgcacacctgtaatcccacctccttgggaggctgaggcaggacagtcacttgaactgggaggcggaggttgcagtgagctgagatcacaccactgtactccagcctcggcgaaagagcgagactccgtctcaatataaatagtgaaccctgtttcagtgaatagtcgagcttagac

SEQ ID NO: 43280 - DNA, 1063 bp, Homo sapiens
ttaatacaggggagggctgtgattgaagttagaggtactttgtttctggttgacaaagtccatcaactgttgggtgctggtttgtgatggtttctttgccagctgaggaagccttcctgcttatttctaggttttagaccattctgcagcattgactttgttgaaaatctagattgttcttaagtgtcagatgttaatgtatttagaatgacattaatatttagatgcccatgtaatgagtaaaaaaattagagaaataaaactatttttttttacttcaaggtccttatgttatggccaatgttgcaacaaaaatttttcaagaattggtagaaggtgtgttttacatacataacatgggaattgtgcaccgagatctgaaggtaagtgggggcgatgaaatcattgaaagcagtgggagctttgtatcagggacgacttgatgttggttgattaaactaaataagattacatgtcctagttcatttgcttaggaggttataattactgtcagataagtcattgttcgatagatccagagtatggaaacattaggtcgaatttttttttttttttgagacagcatttcgctctgtcacccacgttggagcgcagtggcacgattacagctcactgcagcctccaactcccaggctcaagcgatcctcccacctcagcctccctagtagctgagactacaggcatgtgctaccatgcccagctaatttttaaatttttttttgtagagatggagttttactatgttgcccaggttgatcttgaactcctgggctcaagtgatcctcccatcttgacctcccaaagtgctggggttacaggtgtgagccactgcacttggttataagttgaattttaaagtagtaattttggggcatttgaaaatcctctgtggagtataagtactttttttcaggtgctctgagtactgctataatcaggggtgctaaatgtatttagtgctgacagaaatgctcatttattattgcagacttagaggtaaactctatttctataattattcatcttaaagtttaacaaaatc

SEQ ID NO: 43281 - DNA, 1056 bp, Homo sapiens
gctgagcccaccccagaaaaagaaaaacgctttggagaatctgacactgaaaatcagaataacaagtcggtgaagtacaccaccaatttagtcataagagaatctggtgaacttgagtcgaccctggagctccaggaaaatggcttggctggtttgtctgccagttcaattgtggaacagcagctgccactcaggcgtaattcccacctagaggagagtttcacatccaccgaagaatcttccgaagaaaatgtcaactttttgggtcagacagaggtagattactttcccagaccctcctaatttggccagtattggtgactgtgcaggtgtgtggccttctctcgccctctctcagctctggcgcttctgccctgcgttcagtctcttgtactggccatgttccccttgccatggggcctttgcgtttggttctcccttcttcacttagttaactcctccacgtccttttctggcctccccgacctggccatttacagcttcagatcatcttgagtgtgtaccctagagttggcggcctcactcacactctgtttgtgttgtatgttagcatcatgctataaagatatatttatgcaaaacgattttgcagcatgactttaggtgagtcccagtaggattagcagctcagtattcgggatattctttttaattttaaaattggttttatgttagttgtagttttcaggaggctcttgttgagggtcatactgatacaaccctccttccatggccacgctgccaccatgctttccccagtattttaagtagtaatattaaaaacatgaacattaggccgggtgtggtggctcacgcctgtaatcccggcagtttgggaggccaaggagggcagatcacctgagatcaggagttcgagaccagcctggccaacatggtgaaagcgcgtctctactaaaaatacaaaaattagccaggcgcgatgctgtgcgcctgtaatcccagctactcaggaggctgaggcaggagaatcgcttgaacccgggaggcaccgtactccagcctgggcaactagag

SEQ ID NO: 43282 - DNA, 1050 bp, Homo sapiens
gtaatcctagcactttgggaggtggagttgggcagatcacttgaggccaggagttcgagaccagcctggccaatgtggcgaaaccccgtctttactaaaaatagaaaaattagctgggcatggtggcacacgcctgtaatcccagctacttgggaggttgaggcagaagaatcacttgaacccgggaggtggaggttacagtgagccaagatagttgtcactgcactctctgtctcaaaaaaaaatttcttttacgttattctagagaacattctccaagtttaacgtgtttataaatatagtatttttcctattgaggtttttgtatatattgctattattacacgttattctctgtgtacactttaaaattgccattttattaaagatgtttctaataatagtttttcatattctttttatagtactttgccagacgtttatcaaaatggggctgctgtcttctttcacttgtagtgacgagtttagctcattgagactacatcacaacagagctattactcacttaatgaggtctgctaaagagagagttcgtcaggtaagccctaaaaaatatactttgggtatgacaaaaatatactttaattttaagataattatattttaaagcactgtgaaattctgattataaaacaagtttttaaaagtataaactctaggccaggcatggtggtgtggctcatgccttaatcccagcactttgggaggctgagatggatcatttgaggccaggagttcaaggctgcagtgagccatggttgtgccactgcactccagcctgagcagcagagtgagaacctgcctgaaaaaaaaaaaaaaaaagagaggagaggcaaaggagaggccacagatggactgggatcttgagacaatttcaatttatttttgttttgttttgtttcgttttgagacagagtctcgcactgtcatctgggctggagtgcagtggcgcaatcttggctcattgcaacctctgcctcccagattcaagggattctcctgccttagcctcccaagtagctgggacca

SEQ ID NO: 43283 - DNA, 1019 bp, Homo sapiens
ggtctcaaactcctgacctcaggtgatccactggcctcagcctcccaaagtgctgggattacaggcatgaacaaccgcgcccggccatcctctgcctaacttctttctttatgcctgggtcttggctgtcttctcaaaggaaggaagccatcctagtcccacttccttgcgtattgatttatttgtactattggacacatcagaaaactgtttctcctctgtctcacggcatctttctgctgatcctccagcttccaggattcagctccaaattcacttccagaaagcctttcttgattaacccaactcagcataactattcttttggtttttatctgcttacatttaaatatttcatgtttcattaattagaatatacggttttgtcattatgagacaggtttaccattaatttaaaaatattttcctttttaatttttagaatctgatgttccagcagaaatccaggtgttaaaagaacccctacaacagccaaccttcccttttgcagttgcaaaccaactcttgctggtttctttgctggagcacttgagccacgtgcatgaaccaaacccacttcgttcaagacaggtgtttaagcgtaagtaagaataaatgaatcttgctaaataaagcttgtaaaggctgggctccgtggttcatgcctgtaatcccagcactttgggaggctgaggtgggcggatcacccgaggtccggagatcgagatcggtttggctaacatgacgaaaccccctctttactcaaaatatggaaattagccgggtgttgtggcaggcacctgtaaccccagctactcgggaggctgaggcggagaatcagttgaactggggaggtggaggttgcagtgagccgagatagcgccactgcactccagcctgggtgaaagagtgagactgtctcaaaaataaataaataaagcttgtaaaaatactgtgttgctgttctcacttattcatgggaggtaaaaattaaaacaattgaactaatggagatagag

SEQ ID NO: 43284 - DNA, 1052 bp, Homo sapiens
acacagcacccaaggggagggctgggggcaccggcacgggggcagcgtgcagccctgccctgtcaggctgtcagacaagccccggggggcagcaggtgggctcgggacgggctgggggagggacggccatggcacttgggggctccagggtgactcccatgaggcctcccttcaaccaggctttttggccccacaaatactttaagcaaatcattaaaattataacagttaatggtttgggggtgtttaggctgtaactgctaactcctaggaaacagccttttccctggacacagatggtccatacgctgagccacgtgaaactgctgatgttttgtttagatgcacacacatggcagcgtttcatacaggtcagcaggttagaccggcttttgaccatattcatcgctatttaaaacctgtggcaaaatgaacgcttattttacagactttctaatttgaccagatttcttaatgaatagacacagaattaactaaaaacagtctcaccccatgtagtgcgccgtgtcctgagagaggtgccctccctacgaggagggaagaacaggccctggggtgcagaggcccggcacgtagagaacccagatagacgccggtggtggaactggtcaaactccacgcccgcctgggaggttgtcaggttgctgtggatgtaaggataggaggtgcccagtgctccgctcaaggaaggctggatctgggccccacctacagagagggctcagggctggaccgggggcattgtgtgcttgggccgacccgggccggtggcagacgctgttctctgtcgggagatttgcgtccccaggaccctgttacacagtgggctgttgggttggtggctggcttttcctctatggacttcctcttcctgccccacctgcataggcacacacaccttgaatctgcaccctctggagggcatctgtactcctgtgcaaaatgcccagtccagagacaaaacctcagactttgtgcacctaggtttccttctcagcagcggagactgttctttgagttgccttgaagtg

SEQ ID NO: 43285 - DNA, 1039 bp, Homo sapiens
gtggcctttctgaaaacgcagtggtctgtgcaggtccagggccccctcttggacccgcgggctccctgtgcacggagcgcagactcacggggcccttctgcttctaggagggcgtgtgaagacctggaagcgccggtggttcatcctgaccgataactgcctctattactttgaatacacaacagtaagtaagggccaggcctccttgccgcctcccagcagtcccggagctgccctggggccgagggaccctcaggctggtgacccacagtgagccccgccgtgtactttcctcttgtaggataaggagcccaggggaatcatcccgttggaaaacctcagcatcagggaggtggaggacccccggaaacccgtaagctcttcctcctgaaccttctctcctgccagccacctgggagccatcctcactgcctgcagggaacctgccccaagcccccctgaccgcctcccctctctctttctccaccagaactgttttgagctctacaatcccagccacaaagggcaggtcatcaaggcctgtaagactgaggccgacggccgcgtggtagaggggaaccatgtggtgtaccggatctcagccccgagcccggaggagaaggaggagtggatgaaatccatcaagtgagtggggcctcgggggcggggccaggcccgtcttctcgtgccggttggagggcgggggatggtctggaacatggatgcttccgtgtgcaagagtggaccttctgtctccagaaaccccagagggccgggctgccaaagccgacgttcagatctgagcctgcggtcctgtctgaggggcctctggggctggtgggaaaggggaggtctgtgtgtcacccacgacctaacctgtgtgttttccttttttcaccagagccagtatcagcagagatcccttctatgacatgttggcaacgaggaaacgaaggattgccaataaaaaatagctttcctggctaaaagacccaggtaaaagacccaaccccagcagaaagacaccgcgggcggcccc

SEQ ID NO: 43286 - DNA, 1062 bp, Homo sapiens
aaatacaaaaaattagccgggtgtggtgacgggcgcctgtagtcccagctactcgggaggctgaggcaggagaatggcgtgaacccgggaggtggagcttgcagtaagccgagattccgcccctgcactccagcctgggcgacagagcgagactctatctcaaaaaaaaaaaaaaaaaaaaaaaaaaaaagccacagagggggtgcgtaaacaatggaaatgtattttcttacagttctggaggctggaagtccgagatgagggtgccagcatgattggtgtctggtgagggctctcttcctggcttgctagtagccgccttcttgctgtatcctcacatgctggggagtaaggagaacttactcactctagggtgatgttcttataagggcacaaatcccatgaggccaggacctcatgtaacactgattacctccaaaagaccccgtctccagatagcatcacagtgggggtttgggcttcaacatatgaattgtgggggggacacggacatttcgttcacagctgcaaaggatgatctcacatgcttcagacacaactcaaaattatatctacctccccatgcccctattaaacctgtaacactatgaagcatgaagacattgtcagagcaaataaattccttccagctaggatggtgttttctaagtctcagagtgatgacactttaaacagggagctttggtttgttgaggtgcattatttctagaagtagtacttgagttcattaatgagtaagagggaaggtttgattagatcaaggaagctgaaaacactctgcagcctctcctttattcctgatttcctagaaatgccttaaataaaatatataaatctatatgacaagcaggggtccactcagtggactagaaattgaggaatccctggaagaagataaatgggatcagctggagaaggaaacactccccacagcacatacaagaaagaactgccgggggcggcaagagcagcttcagagttccccgagtgcagaggaggtacattcagggaacaggactgtgggagggacgtcgagactgg

SEQ ID NO: 43287 - DNA, 1044 bp, Homo sapiens
ttatatggacattttttattgcatttagatcccctggataatccaggataatcatctccattgaagatgctttttcttttctttttgagatagggtctggctctgttgcccaggctggagtgtggtgtgatctcggctcactgcaacctcccacctccccggctcaagtctcccacctcagcctcctgaatagctggaactacaggtgcacaccaccatacctggctaatttttgtatttttcatagagatgaggttttgtcatgttgcccaggctggacttgaactccagagctcaagtgatctgcccacctcggccttccaaagtgttgggattacaggcatgagccaccatgcctcgctctccatctattttttttttaatctaaaattcttaattctatttgcagagttccttttgtcatgtaagttaacattcacaagttctagagattaggacctggatatctttgggggtcaatgattcagcctactacaattttctgtggggtcttgaaaaacatgaatattatgctgttggtgggagtgttctataatctttctgagactttgttggttgatggtggtggtgagttcttctctatacttgctgattctttggttcattaattattaacaagagagaaaggcattgaattctctgactataattgttgatatctctcagctctgttgttgctggaatcacatattttgcagctttgtttggtgcatatacatttagaattgctatgtctttttgatggatcattatatagtatctgtctctggtagttttctttgctctgaagtttactgtagctgttttattaatatagccacacctgctttctttttattaatgtttgcatgatatctttttcatccttttacttcagccaatatattcgaatataaaatacgtgtatttgaagtgagttttttgtagacagcatctaggtgggtcatgtataatttttaaattctactctgccaatcttttaatatttaacatttatatttagaccttttacatttaagatga

SEQ ID NO: 43288 - DNA, 1121 bp, Homo sapiens
aactgggagggaagcaaagtcttgagggtgcagagagatcaggaaaagaggcaagtttaaaactcagatgcaaacgggggcaagaaagcagaacaggtaaattgttgcaggttatggccagagaataatttctctggagatcaggctcgttggagagcctgttccgacagtgaagattcaggtggtgttagcagggtgccttgtggcccgggtcccgatgcctttaaaccattatttgagctcctgccctttggtttgatcatgtgctcacatgacaattttccaattataaatgggatccccacttgggggataataatcatgttaatatctaggattctcttacctgtgataagtttttatttgtttctatgaattgatcaatcagcattgagagaatgcagtaaactatatggccaaagactcatatttgtttggtagctgttatttcttattgttaatttatacatgggcacactggtttgatacatacatttctccagtgtgctgaatgtgtgtgtgtacctgagaggtggatctgttcctggcacgtaaagcagtcctggagatgagcactgctgggtgaggctgcctgggagacaccccggcctcaccaccctgcaaagactgagacgctgtcttgacatcatctgagctgtgagcaggctctgccctcctgcagggctctttggagtcttcgtgctcactctgtttcctttgcccaggaggctcttctcccagtccccactcttggtctggccaactcctcttcctcctccaagtcccttttctcttttctctcgtagagtttatcagtgttttgaaataatacatttgagtgttaagtgctgcgttccctactaactaaacagaaagcgtgaggagggcagaagccctctgcccgtccccactcatgcatcatccgactgcagacagttgtctggagagagcaggcaggcagtagtgtttgatgaagtctaaggcgtgggttagtacaggtgagaggggaaaggcctgggtaactcagggagccgagtggctggggtgactgtggggaaagtgaaggcacagtaggaagtctgtgagaacagctctgtgtggagccacaaaatcactgattt

SEQ ID NO: 43289 - DNA, 1076 bp, Homo sapiens
ctcttatgcctggaggtgagaagccctaatttttgcactcaatgtctattaacttttcaggccagacttagggcagagagttgctggcttgacaagttttggggaagaaataccatttttagagcacctgcaattaatcatgagactaggtgtgcatctattgaccacagtcaccttgggaggcacaagttttacctcctagagaactgaaggggcatgtcccaggacacccatggcaagctgtgaaacttgcattgtggaacccaggtctccctcacctggttctttttttgttcccaggcctctgtgcagcctcacgattggtgacccttggtccattctggggtcccagcacagggactgcctagagggtggcagtggggtctgggaggagtatgggaggcactgggtaggatggtgttgaatgtagtatgacagggaattcctgtgactcagagcatctggctccaatcttgagctcatccccctttaggccttcacttgttgaaaatgtaaatgatcctggacctacatagagtcccttaagaaggcccctcttcacgcctgtaatcccagcacttttggaggccgaggcgggcggatcacaagatcaggagtttgagaccagcctggccaatatggtgaaaccccatctctactaaaaacacaaaaattagccgggtgtggtgacgagtgcctgtagtcccagctactcaggaggctgagggaggagaatcgcttgaacctgggaggcggaggttgcagtgagccaagatcgtgccactgcactccagcctgggcaacagagtgagactccgtcttaaaaaaaaaaaaaaaaaaatgccaggcgcggtggctcatgtctgtaatcccagcactttgggaggccgaggcgggtggatcatgacgtcaggagatggagaccatcctggccaacgcggtgaaaccccatctctactaaaaatacaaaaaattaggtgggcgtagtggtgggcgcctgtagtcccagctactcgggaggctgagacaggagaatggtgtgaacctgggaggtggagcttgcagtgagccgagat

SEQ ID NO: 43290 - DNA, 1074 bp, Homo sapiens
ggcaaccatcaatttgctttctgtctctatggatttacttattctagatatttcctataaatggaatcatacaatatgtggtctttgtgtttggcttcttctacttagcctcatgtttttgggccaggcatggtggctcattcccataatcccagcactttcacaggctgaggcaggaagatcagtggaggtcaggagtctgagaccagcctgggcaatatagcaagaccccatctctattgaagataatgttgctggccgggagcggtggcttacgcctgtaatcccagcactttgggaggccgaggtgggtggatcacaaagttaagggattgagaccgtcctgaccaacatggtaaaaccctgtctctactaaaaataaaaattagctgggcctggtggtgcagcacctgtggtcccagctactcgggaggctgaggcaggagaatcacttgaacccaggaggtggaggttgcagtaagccgagatcacgccactgaactccagcctggcaacacagcgagacttcgtctaaaaaaaaaaaaaaaaaaaaaaagataatgtttctgaaattcattcacattgtttcatgcatcagctcttccttccctcttttttgtttgagacagggtctcactctgtcacctagggtagagtgcagtggcatgatcacaactctggccaacctcaacctcctgggctcgagtgattctcccacctcagctccctgagtagctgggaccacaggtgcgtgacactatgcctggctatattttattttattttttataaatgcggtcttgctatgttgtccaggctggtcttgaactcctggggtcatgtgattctcctacctgggcctcccaaagcgctgggattacaggtgtgagccccctcacccagccgcttccttccttttggtggccgagtagtattccactgtgtggatttattaccatttgtttctccatctgtggatggacatacggcctgttcccaccttttggttattgtgaacagtgctgctgtgagtattcacatacaaggatttgtttgggtgcctctgctgggaac

SEQ ID NO: 43291 - DNA, 1027 bp, Homo sapiens
tccagcctaggtgacagagcaagatgccatctcaaaaaaaaaagccagctgtgcatggctgcagtgctgcgtgttcagtgtcgctcgctgtctctccaggtgattctcataggcaccgcagcgggaggcctgctggcgcagatcggcggctctcccactttgctgcccagtagaacctcttgaggagcttttaacactgctgaggtccaggccgcaccctgggccagttcaatccgaatctctggggaggtcagagagaggctaagaaaacaaagatcctttttcatgtagagcagcatggtttatgaaggccagtccctgccagagtgggtcccactgtgtagtgagcgtgagtggagaggcggtgtcccctcctctctgtgccgcaggacttgggctgtcattgcagacactgcagggctccgactttgcgtgctggtgcgtgtgttcactgtttaggccccatgcttgtttcttgctcctgcaggtttacgagctgccgtttttagtggctctggatcacaggaaagagtctgttgtggtcgctgtgagggggaccatgtctctgcaggtaacgttggaacctgactttccagccctgggagtgggtgcgggagcgggagcccacagctgctcggctggggaaatccgtcagtaaccgcatgagacacaggggaaaatggtgaggacagaaaatgaggatgtgagcctggggttgggaaatactccctttgcaaaaagggatgaagctgtttcatcttcactgagaactgtcagcagcagagcggccagcaggttggcccccccgccacaggagctcccagagggcacctgcttgacccctccctgcctaacttccctgagcccagccaggccccacacccgggagccctcccggggaatttctgcaccagagccagatggcggcagtgagtcagtcttgctgcagagagtcacgcccctggccaccagccccgctggaggctcccggtttggatcctcacaggccctcgtggcctgccgttct

SEQ ID NO: 43292 - DNA, 1974 bp, Homo sapiens
ggtctcaaactcctgacctcaagtgatctgcctgcctcagcctcccagagttctgggattacaaggtgtgagccactgtgcccagccccagtaataccctttttagcaatttttttctccaatccaggatgatgcgttacatctagttgctgtgtctctttggtctccttcaagttttaagtttctcagccgttctttcctttcatgatattgacattttgaagaggacagtgcagatattttgtagaagggccttcaatttgcatttgtgtgatggtttccccatgattagatttatgttttgcatttttggcgggaatggtccatgacaaccatccttcctagtgtatcatatcaggggatacatgatgccagtttgtcccatttctggttatattaacattgattgcttggctgaggtggtgactgccagccttgagaccatttaaatatcttgtcccaggccgggcgtggtggctcagacctgtaatcccagcattttgggaggtcgaggccagcggatcacttgagctcaggagtttgagaccagcctgggcaacctggcaaaactccatctcactaaaaatataaaaattagctgggtgtaacagtgtgtacctgtagtcccaggtgcttgggaggctgaggcaggagaaacacttgagcccaggaggctgaggttgcagtgagctggggttgcaccactgtactccagcctgagtgacagagcaagacgctgtcttaaaaaataaattaaataaatatatatgtctatatcccaccaggtgcagtggctcatgcctataatcccagcactttgggaggccaaggcgggctgatcacctgaggtcaggagttcaagaccatcctgaccaacacggtgacaccccgtctctactaaaaatacagaaattagctggacatggttgcacacacctgtaatcacagctactcgggaggttgaggcaggagaatcgcttgaaccagggagttggaggttgcagtgagtggagatcacaccattgccctgcagcctaagcaacagagcaagattctgtctcaaaaagaaaaaaaaaaaagaaaccaaaacaaaacaaaaaacaagtaagtaaatgtcctatccctctctgaattctcatctggcagtacagcatccattgattcttgtctgaatcacttattaccaggatggtggcaaaatcatgatttttctttttctttctttctttcttttttttttttttttttttgagacagagtctcaggatcctggctcactgcaacctccatctcccaggttcaagtgattctcctgcctcagcctcccgagtagctgggattacaggcctgcaccaccatactcggctagttttttgtaattttaatagagacaggttttcgctgtgttggccaggctggtcgaactcctgacctcaggtgatccactcgccttggcctcccaaagtggttggattacaggcatgagccaccgcacctggccaaaattgtgatttttctaaattcatcatttcttctacattaattgtcattctcctataaaaaagagctttttatccctacatcttactgtcaatatggatttatagattcttaaattattcagtgggttgtaattatgactgtttattttgtattaagtacagtgtttatttgatgctcaaaatgttccagattttgtcctgcagactggctccagtgttcttttcatatgaccccatcatgttctgagcacttcctaacctctggattttgctttttctttttttgggactgttgcccaggctagagtatagtggtatcatcacggcttactgtaacaccataccctcaacctcctgggctcaagtgattcacctgcctcggtctcccaaagtcctgggattacaggtgtaagccaccacgcctatgtatttattttaaagatcatgagattttactaatatcttttttttg

SEQ ID NO: 43293 - DNA, 1022 bp, Homo sapiens
ggaggatgcagtgagccgagatcacacccactgcactccagcctgggaacagagcgagactccgtcaccaaaaaaaaaaaaaaaaaaaaaaaaaaaaaaaaaaaaaaaaggaaaaggaaatatcaccagaacggatatcactgcactcttcacgaaaaagaaaaagaaaataccagaacggatttcaccgaccggcagacctgcaatcgactcagccagcgccttccggatcagcgtttctgcgcaggcgcagacagctccggcggaagaggcggtgtagggctcagtgcgcttgcgccgatctcggcctcagcgtgagcatgcgcaggtccccgccctcgctgcgtttgcgcttgagcgccgataatttggtggcggcgtccggagggtgctggtttgttctcggtgaacggcgcgcggggtctctcctgagtgcgagctacgggaccttcgccatgccggggatggtactcttcggccggcgctgggccatcgccagcgacgacttggtcttcccagggttcttcgagctggtcgtgcgagtgctgtggtaaggacggcggctacgggggcggtggagcccaccggagagggagcggggggcgagctgtcccttgagacggtgacagaagtggcttcccaagcactgtcgcggtcccagcgctggccacgcatcctcttatcgagttctcaccactgcccgaagaggtgggcagtggtgctgtgtccatttgacggatgacaaaccgaagcccccagagtgtgtgggctgaccccgggggacaaacagggggtttcgaagtccgcgcagcaggacgcgagcacccctttgtgtgcagcgccgagacctggccctggggtgccacgagggtgttaccgccggcaaaagccttggcctcgagttctcctttcttgaggcgggagcagccacttgtgcccttccttccctttgtacggggcacttgaatctgcaacacgaaggataggaaaaaataccgagccggttgtggctgcatttcgtg

SEQ ID NO: 43294 - DNA, 1955 bp, Homo sapiens
gccactatgaatttagtggcactttcaatcaaatttgtatttttaaaatacaattgcttatttcctataccttactatgtagaatcttgtgtgtgggagacttctaggaatgggaagaaggaagctaagtttgtcaatatcagtaaccttttgttttcttttcttctctttgaaattctagtactcaagggaaagaagctcagtttgccagcataagtgccaaagaccatcaccagcatctgtccttcagggtgctcggacagaattcttaccacagcaaaggcataagatgcttgatacggaaaatcagaaacttaactcttttgttgcagatagtcatcagtggctctgtaaaaacgcagaggaaaagagccagaaggtttctgtttaatgcatcttgccttatctttttttattactgtgtacaaagatttttttacacaaagaaacttaatgctgtattaataaattcagtgtgtagcttcaattgggatagttccaaaagtgaagattttgtgaggaataagtgcaaattttttttttattttaaaaaattctttgaaactcttaagtctttgtgtctgcaatgaaattgtactccttgacagttgatagattatatattcttccatccctcaaacttgcattccactatatttattttttggcaaaagatgagctgtatttgtttgaaatctgagacactatgttcaattggatgtatctgttcaaatttattcccacgtgacgtggaagtccttcgttggatgtcacaacactacatttaaggttggtaaggatgacttggaggtccatggttttcattaccaacattttaagattctgaatgtcgatggagtctcactgaagagtcaccaaaggtgcctgccctcctcccctgctgggaagtgtcagttggagactgtcccaagggtgctgaagaatccagtggcaggggttctggctgctttccatctgagtgtgggatgggaggggtgttcatgatcatttggatatagcaatctactctgagaaatggaacacaaggagttacctatcactttcacttataattccaaaagatgactacaaccatgtccatgctcagattcaaacagttttccatatcacttttgggtggtaagatgatttaattacagttttttttttaattggcagcaccactaaccattccttacattcttttttgtatgtgtggttttctttttatttaacccgcagccgacatcgtagtttcttgttttgttttgttttacagagctgttgcatgacttatgttaccatcctaaaaaacactatattaaacatggaataaattgtctttttatgaattaggctttttgaacatcctgtgttgggatttttttgtttttcaattggcaacaaaagctctgtagggctgcagacatttaaagttcacataatcatctgtaagacattatgtattttgtggaaatactagaatttttttcctgattttgccattatatggatttgctattttttgattaatgcaaaagtatatgactttgttttttatgtgatacaccataaatattaaagtgttgaatactaacagtgctgactacaagaaggatgtagtattttggctttctgcattacaacgtcttctggaggaagggagcaggatgggtttcatttgtatctagtgtgtgtcttaacatctttctaaatcggcagtgtaactgcatagtttaacttcctgtctgtctccctcattttactcttccctccttgtcttatgttttggcttttgtgtatcagagcatctttctttgcagcatcctagtcttgcttcagtttctgtggtctcttttcatcctgcttgaagattcggagtgtggaaggaggctaggaagtctggtgcagtaggtgagcagacctcttgctgcccagcccagggtgggtggggc

SEQ ID NO: 43295 - DNA, 1032 bp, Homo sapiens
aggttgcatgctccttatgaaaatctaatgcctgatgatctgtcactgtctcccatcacccccagataggaccatctagttgcaggaaaacaagctcagggctcctactgattctgcattatgacgagttgtataattatttcattgtatattatagtaataacagaagtaaagtgcacaatgattgcaatgtgcttgaatcatcccgaaaccatccatccaccctgctggtctgtggaaaaattgtcttctatgaaaccgatcactggtgtcaaaaaggctgggaccactgggttatgcagttgccaagctgttgttctattttgggccgacatgccccactccccactcatcttaggctgctttgtggtaaagaaagcaagagtgtttcctctgagctcctggtgggcagtgggtcgtgatggaagcttgccatttctcttccagatcctctggaccttctccatctacctggagtccgtggctatccttccgcagctatttatgatcagcaagactggggaggccgagaccatcaccacccactacctgttcttcctgggcctctatcgtgctttgtatcttgtcaactggatctggcgcttctactttgagggcttctttgacctcattgctgtggtggccggcgtagtccagaccatcctatactgtgacttcttctacttgtacattacaaaaggtatgttgggtgcgacctgcgttgtttctagagtgacgtgttcttttaggagtgcccttgcccagcactcttctaatctggcactctctcataaactggctccagagaaacactttcatgattggccaataacattctggatcaggatgttgtctttttaaatataagaaccctttttcttttgcaatagcttttcctaaagtgacacattttcactgtaaaagattcatctggtgtttcagtgaacattaacaccagatacctctctatgcatacacagacacatgacttaaactgtacattgctgttctatacactgcttttatcccctc

SEQ ID NO: 43296 - DNA, 1050 bp, Homo sapiens
gaaaccccgtctctactaaaaatacaaaaaactagctgggcgtggtggcgggcgcctgtagtcccagttacttgggaggctgaggcaggagaatggcgtgaacctgggaggcggagcttgcagtgagccaagatcgcgctactgcactccagccttggcgacagagcgagacgctgtctcaaaaaaaaagaagaaagaaaatcaaaaattagctgggtgtggtatcgcacgcctgtaatcccagctactcaggaggctgaggcaggagaaccacttaaacctggaggcggaagttgcagtgagccgagatcgagccactgcactccagccttagcgacagagcaagactccatctaaagaaaaaaagttaatttcatggtcatgtctggttatctagaatggacctatttgcatgtttgcagatcgtgtaggttttcatggagttttttgtttttattttctggtttggcaaactctagtgcaatgttcatgactggtgtaaaaaaatcgtagatgagaattaagcacccacatatttaggtgtctgctgacagtttactgtctgattcatttgaaatagaaacttgaaactgtatttcattatcttgacttcagtggtaccaaacacagagccctgcctgtcccagtgtgggaagaacaaggtctccctcctgtagcccacattttgtttgcttttcatgtacagatgtgcactgatgtcgtgtctgtgaccctgcttagcagcactctgcacctcttgcctttaggaaagctggtttgtggtgcccctagtactgtgcagtgagctgatctgctcctgagtgcctcttctttccctgctgaacaggcaaacggtgctgcttcacatcctggggccgatcaagtcactgtgctaccctgggtgtctgatgggtgctgggagtgcctggacttttctttttttttgagacagagtctcgctgtcacccaggctggagtgcagtggcatgatctcggctcactgcaacctccgcctcctgggttcaagcgattctcctgcctcagcctccc

SEQ ID NO: 43297 - DNA, 1037 bp, Homo sapiens
ctctaaaaaaaaaaaaaaaaaaaaaatacaaaaattagccaggcatggtggcatactcctgtagtcccaactactcaggagggtaaggtggtaggatcgcttgagccctggaggttgaagctgcagtgagccgtaattgcaccactgccctccagcctggcagcctgggtgacagagcaggatcctgtctgaaaaaaaaaaaaaaaaaaaagaacaggggctctcaggatatgtaataggagtctgatttctttctttctttccttctttctacaaatactgagcacctgtgcaccaggcactattctaggccatttggttattagcatacccaaggaagtaatatttcaactgaatcctattggtatggcacctaaacaacctccccccaacattttgtgttcaagagcattttcataagcactgttgaaaggagacaaagcagtatgtgagtctggtctttactaaaaagcaaatttgagtcacttataatggattcttcattaccaaatgatgggaacctagtattcaggaaataatgagcttacttaaaaatggttaggtccccacttgtctaggcaagttaaaactgcaggcattagaggtgtgtgagcaagaatcctctctccccctcaggatgcccaggtttcagaggaatccatgcttgcttggttgtagtttctaagcacgatgtcctgaaagtctggcgtgagacccgaggtgctcgtgtctttttactttaacttctgtgtgctggtgagaggagagaagcagctgttcttctccaggtgctgctaaggccttagtggaaataacgcccatcaagtttttattaatgttgagctggccacagtctaggtcctggtgagaggcctctctgctgtgagccttggctagatgcgctgagggggctcagtgcatgtgtagatggatgtgtgtcttgtttatgcatgtagattttgttttgtatttattcacatacatggtgaggagatcgagaccatcctggccaacatggtgaaaccccatctctacta

SEQ ID NO: 43298 - DNA, 1012 bp, Homo sapiens
ggcggatcttgagggcaggagatccagaccatcctggctaacacggtgaaaccccatctctattaaaaatacaaaaaaattagccgggcatggtggcgggcggctgtagtcccagctacttgggaggctgaggcaggagaatggcatgaacccgagaggtggagcttgcagcgagccgagactgtgcactgcactccaacctgggtgacagagggagactccgtctcaaaaaatcaaacaaacaaacaaaaaaaaagtttttgttcttggccggtcttagtggctcatgcctgtaattccagcactttaggaggccaaggtgggtggatcacttgagcacaggagttcaaaaccagcttgggcagcatggtgaaaccctgtctctaccaaaaatacaaaagttagccagccgtggtggtgcgctgtggtcccagctactcagaaggctgagtggggaggattactggagcccaggaagtcgaggttgcagcgagccgtgatcacaccattgcacttcagcttgggtgacagagtgagactgtctcaaaaacaaaagacaaacaaaagagagaaaagtttctattctcaagaaagctgcaatgtagttgaaatgataggaaaatgtacaaaagatggccgagcacggtggcttacacctgtaattccagcactttgggaggccgaggtaggtggatcacctgagtcaggagttcaagaccagcttggccaatatggtgaaacccatctctactaaaattacaaaaaagttacccgggcgtggtggcaggcacctgtagtcccagccactagggaggctgaggcaggagaattgcttgaacccaggaggcagaggttgcagtgagccgagatcgcaccactgcactccagcctgggcgacaagaatgaaactcttgtctcaaaaaaataaaaataaaaaataaatattaaactttgctgatggacatagaagatgacctgcatgtatgttcatactacggtcctggagagcacc

SEQ ID NO: 43299 - DNA, 1050 bp, Homo sapiens
gtaatcccagcacttcgagaagtggaggtgggagtatcacttgagccaaggagtttgagaccagcctgggcaacatagagcctcatctctacaaaaaaaattaaaaagaaaaaaaaatgccgggcacagtggctcacgtctaatcccaggactttgggaggccgaggcgggcagatcacctgaggtcaggagttcaagaccagcctggccaacatggtgaaaccccatctctactaaaaatacaaaaattagccgtcgtggtggcatgcatctgtaatcccagctactcgggaggctgaggcagaagaattgcttgaactggggaggtggaggttccaatgagctgagatctcaccattgtactccagcctgggcgacagagcaagactctgtctgaaaaaaaaaaaaaaaattagcctggtggcatgtgcctgtagtcctagctacaagggaggctgaggcaggaggatcccttgagaccaggagttccaggttacaatgagctatgatcgtgctatgatcgtgccactgtactgtagtctgggagacagagcaagaccctctctcaagagaacgagagagacagagaaagagagagagtttctagccctgcagcggagacccacgggccttccccctgcctctcacttccaaggtaactactttgagagcaggagccacagtccctttagctttgaacgccagttcctggctggcacagatagcaggggctccctgaatacatgtaggattaagttgaaaggaggccagtgttgggtacggagcctcatttagctaaggaagcaaaggagtggacctgggcaagagcctgggcaagagcttagagataggactgaaggtggcagaaacggggttcctgccagatatctgagtgggcagctgcagatgggcctggacagagaagcaagcaggaagactggaggcgtggtgaggggctcgtgggttccagtttcctccagcagagccatctagagacgaggtgggagacagtgggtggtggggatccctggctcagggcttggcctggcg

SEQ ID NO: 43300 - DNA, 1026 bp, Homo sapiens
tacctgggtctccctctttaaccaaatgctcgttttcatcttgtttcttattttctgttctgttcccaatgccttgaatgataccctgtcatggcaggtgcttagtaagtatcatatacgcaaatgaagtctggtttatgcttccaccacctccagaaatgtctttaaagggtctgtttctacctactgtgatttcctcgcattatgagtttctcaaagggtgcctccagtgccaagtctttaggctttgttttttattttatgttgctcgcacccaggatgacatctctaccaccattgagcctgggctctagtctggtattttctgtgataccagttacagagctgctcttgttctcatcaggcctggaaattgatcatgacctattccaaattataattactaatcacctttccacctccctttatttactaaactatactaatctcttcttcttctatagtggtccctgtgaaaccactgaaattctcatcagatattactgatctctctggattactggattttgtccagtgtgaaatgtcttcattgtcctctgtatatcctcagtttcctttgacttaatgtaaacaaagactagatgctgtcatgctatgagtcctagctggatttgcagtatgtcttcatctaaagtttccagttgatatcatcgctagcctcacaagataagcctatagttggttacattttacttcctaaagggaattttaattccttgtcccttaaggatctcaacaatattaggcctgtattacctggaaaaagtaattttctgttgtttccccaaaactctgactaaactccgtttggttcacactcctaatgtcttctcttcatgatactattgtccctacagctttacatttcattagggtgtgctttccttccccacataacacattctttaagtctgacctcaaatcttcaacccctccctgacttttgtcatgacttctgtatctcccttccctcgacttcagtttcacctaggggtgataggataa

SEQ ID NO: 43301 - DNA, 1197 bp, Homo sapiens
aagcgattagagcagcagccagtctaccacacagacacctgctgttctggggcttcaggagtcccagaggaagctccctccttgcttggctctgtgtccttctgctcagctagcattttgtctttttttcttagacactaacatcatttgtcttggggtttgggatatgattttaagaggcacttctttctctcaaggtgcttatgttctccttggaggaggtaattcatggatgtaattatgggagatcatgggagtcgttctggtcaatgcctgggaaactctgaagtgatgatgaagcagaagtctgattttaaatgcatcctcagccgggcatagtggctcacaccagtaatcccaacactttggaaggctgaggcagaagcatcacttgagcccaggaatatgaggctgcagtgagctatgattgcaccactgcaccccagcctgggcaacagatcaagatcctgtctcgaatgaatgaatgaatgaatgaacaaacgaacaaacgaacaaatgaatgcaccatcaaagtattgtgattcagtcattcaaggaagggaaaggtggcatttgccagccctggaataattcgggttagtggcagaggcttgtaaaggcactcaggagaccagcattaggggcctgagtaagtctcctggagggctggtgagatttttgcttccttagaatttggacttcctgttaagagactgagggatgggaatgcagataaatacccagatggacccaggagcccccaatgctggactgagttttggttttgtcctacagagaacttcaagccttctaatttgaaaagtgtgtcatctgttgaaaagctgaaattaatagagactgacattgtgaaaaacaaatgcagtgggggtttgaggggattgagtcagtgacactcaagggtgtctagctgagatgctagacagaggactctcctagctaatgggattctaaaaagaatgaaatattctttctcaggaagatcacttagaatctcttaatggaaagactcaaatatatacgatctataggacagaagtgtgactgaaatggtttggttatttctaagtatgtttctggtcaagatcgtgtccctggcacatatgtatatatatgtgtgtgtgtgtgtgtgtgtgtgtgtgtgtgtatattttttttttttcctctcagacggagtct

SEQ ID NO: 43302 - DNA, 1034 bp, Homo sapiens
cagccacctgcttagcatttctttggagtgtgtccaaaggacccctcaaggtcatagatgcagcaggttcagaataattatttggagcccccccacctatgccttctcttgttcctattgattcattgttccatcgtccagcctgtagccctatcgagaaagatgggattctttctaaagttgtccattttctgacctcgcgattgttttgagtttgtacatgtcatattctagatggtttttatcctgtcccctatcccctccctgctgttgtaaaaatagcttattttttggcctctctactgttgtagagattttctttctatactgctactttcctccacaagcccaggcatattgcatttcccatgtcgagtatttctcctgaagtgttcatcatatcgtgcttcccccatgggaaaagcacttgcgtggctcccagagtggctactacgaaaatgaggttgcctgaagctgggatggggaagactgtgggtaaagcaggcttgagaaaaggccagaattaggtttcagatgtttaaaatttgggctgtgttggtatgcagtgagtggcagcatcaggaaggcaggtaggggtgtgtgtgtgtgtgtgtgtgtgtgtagtttgggagctgtgttagctgtgttagtatgcaatgagtggcagcatcaagaaggcaggtgtgtgtgtgtgtgtgtgtgttttgggacacgaatctggtgtgtgtgtgtgtgtggtttgggacaccactctagggggtgtgtgtgtgtagagtttgagacacaactctgttgtgtgtgtgtgtgtgtggattttgagatatatctctctgggtgtgtgtgtgtgtattttgacacacaaatctgctcggtgtgtgtgtgtgtgtgtgtgtgtgtgtgtgtgtagtttgggagacacatctcgtgtgtgtgtgtgtgtgtagtttgggagacacatctcatatgtgtgtgtgtgtgtgtgtgtgtagtttgggagatatatctctgtgtgtgtgtgtagtttgggagacaca

SEQ ID NO: 43303 - DNA, 1056 bp, Homo sapiens
tttcaaaaagcctcccttatgagcattgttatttgtccttctgtactctgcattcctggctcttaacattgaatcctgcatgtttagaagtggagtagaagctcaggcaatggatagaataaattttgggggttctcaattagggattggaataagaatccatgcctgccatatttgaggaacgtcagtgacaatttggaatgcagtgagcattgtgatataagaagttcttgaagggttttgcacagaggagtgacctgatattaatcatgatttaaaaggatggttctgtggcagtatgtgacaaatgggctataaggggacaaaaacaaataagtaagatagaaatgtattgccaaagtgcaggcaggagatggtgtgggcagggtggtgatggtggaagtgataaggggtggttgcattctggactgaatatggggtataatatagacaaagaagtcgaggataactaaggtttttgacctgaatgactggaaaggtgaaatttccattttctgaaatgggagactctatataataggaagaatggactttatataataggtaggtgttgagaaatcagaaattcagacttgggcatgtacagctaaatctttaaatggacctgccgagtaggtatttggggatagaaatctggagttcaggggagaggtcaggacaagagatataaattttatttaacaatttatagatggtatttaaagtcttgagactggatgaggacgtgtggagagtgagagtatacatagaagagaagaaatccaaggactgggccctgggtcctccagcatttggaagtttgtatgatgaagaggacctggcaaagaaggctgagatggagtggccagtggggtagacagaatgaaaagaaagaggtgtcctggaagccacgtgaggaaatatttcacagagagctaattttggtgctgctgattagatgagaactgaaacatgatcattagatttgacaacctggaagtcattggtgactttcacaagagctgtacacacacacacacacacacacacacacac

SEQ ID NO: 43304 - DNA, 1028 bp, Homo sapiens
gcatttagtgctataaattttcctcttaacactgccttagctgtgtcccagagattctggtacattgtatctttcttctcactagtttcaaagaacttcttgatttctgccttaattttattatttacccaaaagtcattcaggagtaggttattcaatttccatgtaactgtatggttttgagcaaatatcttagtctttatttctaatttgattgcactgtggtccaagagagtggttgttatgatttcagttcttttgcatttgctgaggagagttttgtgtccaattatgtggtcaattttagagtatgcaccatgtggtgatgagaagaatatatattctgttgcttttggatgcagaggtctgtagatgtccatcaggtccatttgatctattggtgagttcaggtcctgaatatctgttaattttctgcctcaatgctctgtctaatacagtcagtgggatgttgaagtctcccattattattgtgtgggagtataaatctctttgaaggtctctatggacttgctttatgaatctgggtgcttgtatattgggtgcatatatatttagcatagttaggtcttcttgttgaattgaaccctttaccattatgtaatccccttctttatcttttttgatccttgttagtttaaagtctgttttgtctgaaattgagattgcaacccctgatttttttctgttttccatttgcttggtagatttttctccatttcttaattttgagcctatgggtatcattgcatgtgagatgggtctcttgaagacagcataccaatagatcatgtttctttacccaacttgccactttgccttttaattggggaactgaggccatttacattcaaggctagtattcgttcctatccatattctgaattctgtttctgtcatttcagccatctcagccttgttcagaacccttgctggagaggtggtgtggtcatttggaggaaagaaggcactgtggttttttgagttgtcagagttcttgggttggttct

SEQ ID NO: 43305 - DNA, 1032 bp, Homo sapiens
agttttctcaccatcatagatacactgatttttacatgtagatacattaatatctacaaaagactttttttacaaaaagagggaggggaatccgaagtataaagtgatcggtacactatcttagcatttcagtgccattttgatgaaaggatcaaaggccctgtttatactgatataatcccattgcctctatcccctcactaaccacttttagcaacttgtcctaccaacacttcctgagactcttttcagccagatggcaagcacattcctagctgctctcagctagaaggatcacccatcagagacgttttcttcatgtttctgacactcccacctgttggagaagaaaaaaacacaggtcatccaagccaatgaacttagattctcatgtggaatgatttatgtattttaaacaaagccttcatcttatttagaaatcacttgcatgaggcactcttttgaaaatgttctcctcatctggaaaataatttggctgtataatcgtggtattcaggaagttagggcaggtgtttaggtggaagagcagaagggagtattccaatgaggctgaagagtgaggggaattgaccccctgggagaagggaaggcatgtcagggccctccttttaacaggaaaggattgaagaaggcagtgaccctgagagaagaggagaagccaggcctgggcgccaaacacttttgggcctgttgctttgaagggtagaaagagtggccataatatttctcctgacccagcagatttgaaaagattcctccagcagacagtggaaagccccttgcttcctcagccattcagtctgatttctgaaataactatgctatttcctggttgtggtgaagtggcagggcccgagggtttgatcagcttttcatgggctatggccattagtggggttggggtgcaggtgggagtttgttaacacaagagcttgttattctcggagcttcaggccctggtttggaaatgttaactggccaaccagccacgggagttggaattccctaact

SEQ ID NO: 43306 - DNA, 1046 bp, Homo sapiens
tgtaagtaacggggggcagtttgctctaataaaattttatttgtttcctgcaaatgggtagcacatctgatatatcaaaggatcctgaaagctagggtagtcattttgttctcacaactcagtgccctggttgctcactcgtcaccacccctctcctgacagaactactctgagatgggccgacatctttctagccacaccttcatgttaaaaatgcctcagccaactcacaccagctagagaacagttgatggcaattatgggaatattagcaacactaagttctctttacatagcattttttcctgacagaagccaagacagttgaaatctggcttggcattcaatccataattaccctcattgcacccttcccctaaataatttccaaagtgatatgaatgaggttggaactgtagctgagcttagtatttgctttttttcccataaatagtcggtgtcatagacatactattttatctcttcatgcgcatgtagtcaaattgttagactgatgcttaataattgttcggagaaaagaatgtgacttggcaaactggctgttgtttctgcctcacactacggggaaagggaataatgataccctgtgtgtgtttgtgaacattctgaggtgtactgttcccgtcatcttagctcccaaagaggggatatcttcaggctttatcatcttcatgtcttctgctgcagagaagcctccaaatccatgggttctaggtgttcattgtatggttcatgagtgttttaggtgaacaatatttaaaaatccatacttacaaaggaattcaagtagaagatatctgttttgtctataaaggaatctgccattatcatcttttaaatcacatgtttgaaaatataatttgtattcctgggtcctcttatttatcttttatctttgagatgcattcttactctgtcactcaggctggagtacagtggcacgatctcggctcactgcaacctccgcctcccgggttcaagcgaatctcctgcctcaacctcctgagtagctaggattacaggtg

SEQ ID NO: 43307 - DNA, 1048 bp, Homo sapiens
tgccttatctgtagcttttgaatgtttttatctcatttaccctctcaactgcccttacagagaggcataattgacctccatagtgctaaacacagggccttgcatgcaactcctaataataatagcattaagcattacagttttaaagaaagcttctcatatacattttctctcttatttatctcatgcttattttccagatctaatggcagaaattcagaaaggttaaataacttgctcagggttacaaaggcaggaagcttctgatccaggcatagcccaagtcttctagccccagattggataccctttctactccaccacattaccaggggttttaataattttttgttgactgaatgcatataattgtccccaaagtattcccctctgcaaaaaccttctatatctccctctaacatatacacatcagtatgtgtgtatctcttattggattatattccaatgtggctgcattgctcaggctttgcgataggaccacatctgtagacgggggttagaatagcctttaacgggacaaatatctggggaaaaagtcctcagaatgatctttaactgttaagatagaaccttcactttcttaagtaaagacttttaggcatgtaggtaagtttcagtgtcaggtaggtttaggtgtcagatggttgctaagctaatcttcccccgcattcccataggagaccaagagctggaaaagcaaactaaatcttgtaaatcggtctatttagttgtaactttcttctcttatgtttatttcttgtctgttattctggagtctttaggaaagttgtggttagagattctagcctgatcaccattgtgttgtggaaaactatggaaatagtcattgcatgtcccctgtacatgctaatgtttttactgggaagctgtgccctgcagacactagtgatggaggcagcaacttcagggatatatcatccaaggatataatctccccatgtggagattctcatttacactgccaaccttacagtgacagtgggttttctttaaaaaagcaaaaaca

SEQ ID NO: 43308 - DNA, 1044 bp, Homo sapiens
gcctgtcactgttgaaaggtttgcggtcataagaggaaagtagcagaagccctacagcaaataggcacagaaaattaacaggccccctgcagacatttccagtgaagaacatctcaactcactctgaattagggcctctctggcctgagttgagtgtaagaatcctctgagaagcaagttggatgtggagaatcctggcttctacctaaggattttgattctggaggcctggggtggggctcagagatctgacttttaatgggctcccagataattccttttctgggatccatagatcacaccttgagaaatactttctcagagcaccatcgtgaaatagctgatgttcatgatgatgactgatccatcaaaaaaggcaattttgctctattttagaagatagacatttaataagaggtatctgacttatatgaagatttcttatgtcttaactttttttttaatagaatatgctttacctacatggaaaagtcacttaaaccactggatttcccaggaactctactatattaaggcttaatgtgctttttagtacttacatgcatgtttacctaaggcttagagcctagaaatttgtatatcacagacactcaaaaattacttattttgtttatctagaatcagtactaacctttctaacgaaatctcttctcctgcttcagctaaagcccccttggtgttctctaggttgatacagaaaactgaaagagctagaatggagccccaggttagttaatatctattattgaatactcagcagcaaacaattctgacagttaatgtacccatgttaatcacaaggaatttgccaggagcactctgacactgtcctgtcctgatatgcatgttaaaattgcccacaggttcacaaaggaatcctcccctctgcattttcccccattcgtgcggtgtgtctattgcctatagctggttcttcctcttaggagtaatcagcctaagacagagcaggctcaccaccaggtcctacagatgcctccatcattttactctgcagtttgttac

SEQ ID NO: 43309 - DNA, 1046 bp, Homo sapiens
gagcccagtgtctatgtgtgtcccttactagctgagtggccttggacaagtctgatcatctgtgattcaggaggattagatgcactaattagtgtaagcacaggactgattctaaatattcgttgcatggttgtggaggtggtggaggtattagtagaaaataggggactaatattaaaaagtcattagaatcagagaacattgcagagttcaattttagaatacatttagcagaaaatacatgaattaagagagggtgactgaatgcaatatagttctgtggagtggaaaatatgaggtatatgtgttcagtgatggaccactgaatatatagatagtagtcattgttaattttaagagtctagattggagactagaaaggtcctctggttctagttagtgaaagtatttgtacaagaagtgactcttaagtattgcaacaatgttccaagagtatacatattgaaatccatctcttaccatcatcatgatcacactcactgccacatctctgttcccagaacagggcatagacatcagtttctgaaacctaatagtacctaggggaaaatccggtcttctctgtgatatttccagggtagagcattctaagccagaaaccaagaagctgatatttataaatagtgcccctctccttagtcataggaaccctgacaactatcaaggaagaaatcaatcagcaattgcaggttttgttgtgcacagtagcactatattggcagtggatttgggcctaacccagcacctaagcctgtgattgggggagattgtttttattgaaacagccccattaatcaagctcctttcatccaagagtagagcagagtagttaaaaacaggagctcagaagtcaaaagtaaacttgtgtttaccagttgttgactttgggtaaattacttcgtccttctaaactttgtttctcacttgcaaaatgggttgatatccccttcataatgtgtggcgatgacataatgatgttaagtgcttcacacatgtaaagtgcttggtaagtggtagaacataat

SEQ ID NO: 43310 - DNA, 1017 bp, Homo sapiens
ccaatgggcgtacagttccaagagtgtggagtgacccttctcagttgtgagattatgaacccaaagtttaatgtcccgaagttttgctgtagtgtagatggcaaggacagtctttctctgctgttctcagaagatccaatcttcaggttctagattatgaaggggttgattgtcttcagccagtgaaccgtaaaaagctttctttacctggtgaaaatacactgtagcataataatctactgttataacatcagcctttttgcatgggaaagcttttatacaaccagaaaacatgcactgaaaatcacaatggaatgaaagccctttataaaaatgtttaaatggtccctcaggtaaccaaatatacctgaagctttgactgttttcccaggaatatgggtttgacaaagcaaatgttggtcataaattattttagcaatttagaagtcacgacaccaatatatatttaatttgaatcattttatcttttccatgatgactcatggaatgcaaaacctttaataataaaagcttaaaggactctggaaggacaaggtggccatcctgattctccgtgagtccatgcttaatccatgcttaattaacattagacttatgtcctcttgaataccagttgtttctccaaattaggtgcatagcactgataactgatgggttatcataggtaatttgacttagaccatggagttcattcaaagtgtatatctaaacaatttcagtattggccgatttagcatacaaatctggcaaaatatttgcttggtattcaattaatttttgttctacttgacttagcagttttataaaccagtcagtcttttcattaaagtttcaggaattcttacccagtacaaatgataggattttaaagttattagaaacctgtattcaagagggcttgtcagggtcctttttatcctttcacgaacctcctaaaagacgccatattctaggattttgtgtgcttgtgaagttgtcagaaactgcatcagcatt

SEQ ID NO: 43311 - DNA, 1270 bp, Homo sapiens
cttatattactagcctctttttgttgcaggatctctccctctaaattacagcagttcattcagcaagtagggaaggtaattcttgttaatcctctattctgttggcgattcttccacgtacttagtagagttaaggcaaaaacttaccgaattggaagtatgtatcagaaggaattcttaattattcactttgaaataaaagaattttccttataggttccaagtagtagactgtactataatactgctcttctgaaataaattgaatatttttaccttgccaaaactatcattgaaggctggaattttaggtacagtatttttctgtgaatgattttatgttgttaaatattcttttaaaaattcatatctgtaattgttactgtagaaaaccaaatacaaagaattctaaaacctttgtaccgtctctgtgtatttgagattacttaaaatatctttttttctgttccaagttctactcagtgaatgtggattacagcaagctgaagaaggaacgtccagatttctaaatgaaatgtttcactataacgctgctttagaatgaaggtcttccagaagccacatccgcacaattttccacttaaccaggaaatatttctcctctaaatgcatgaaatcatgttggagatctctattgtaatctctattggagattacaatgattaaatcaataaataactgaaacttgatatgtgtcacttttttatgctgaaagtatgctctgaactttagagtataggaaattaactattagaatttaaagaatttcttgaatttctgtagtttgaaaatacgactttaagctgctttagtaaaacacttccattttgtgtatagactgttggtaacttcactagagcatacataacaactggaactggaaattatacaaaagtaaattgggaaggatactccagcatctgacactggcaaaatggaaacctttgagtttctcttactggctgttgaagtgtgtgcagtttttaacaatggtttttacttggcatctctttgttgtgattttcaaggttataagttgctttggtcctaggattgaagttgaaatctgagtttatcagtgctaaccatggtgctagtagtcaagagatcttgagaattttggctgctgagtcttggtgcagggtgcaggttttcttttcttttttcttttttttttttttgagatagtctctgtcacccaggctggagtgcagtggtacaaacatggatcactgcagcctctacctcc

SEQ ID NO: 43312 - DNA, 1049 bp, Homo sapiens
tgataagtgatggtttattatgctgtttaatattattagaaaagtggaagcaattggtctttactaataaaatttttagttttaaactgtcttgctcactgagaagcctgaaactattagaaaataaacacattacatgttactaatatttagtatacaagttgatactggcagcctctctcagtctacttggtatatataatattttcagggaatattaggatttgatcaatgcaaacctcaaagtacaaaatgcatttatatagtaatagttgatgcaaatcataattcaaataatattctctaatttaattttttatcaatttctcattagctatggctagattgtcattgtcttctaccccataatatggcataaagagagtttttaccaggaaaaaatgaatcagctttgtcagtttcttgttcatttgagtttgcacactttgtgcagccttcaattcatgttttctatatacttttcaagtcatatatttgtttgggaaaaattggcttgtgccactctagattatatactcctgccttctctttatcaatgtataggaaaactccaatacattaaactccagtatatgaaaaggttgagcatggctttgcattggttaatcttgacctgcctacagaatagtatatataccaaatgaactgagtgagatttccactatcaattgttgcactaaaaattaatactgcttaatgtagttcttattttctagataaaaatatatgagcaaaaattgatgtgcacatgaaacagctggaaaacattttgcagattctgatgcaacaggcctaggttaaaacttgagagcttgcattttacaagctaccagatgattctgagactgctggtcccttgaccatacttggagtaacaagttcttacaacacttcagaacttcttacaaacaccttaggaagcttgctttcagtttgaagacagctgtagacatggagtgtcatttaaaagttttctaaaagacaaaataaacatcaagtttattttaaggaccaaagaatgagatacc

SEQ ID NO: 43313 - DNA, 1023 bp, Homo sapiens
acccaagggaggcatgctaagatttaagtatgttaggtcaggctatatccaggaaggggaacacctgtgtccagctgctgagggggaaaagaagctcagcatgtttgggaaacagcaaaaagaccaccacagctggagaatattaagcaaaaaggagatgtagctgaagaatctggtgtcaaggtagagatccgaattgtgttacagatgtaagggagctattggagattgacacaatcttcatttagcttccacaatgatcactgtgcaatgtagatagaggagtgcagggaggtgtatacaatttctctcatgtacctcgtcagatatgctcagctgtccccgtctctgggatcattgaccactcattttgtcccggccatcatggcttccaaattaatgtgggtatagcccagcattgccttcctcttgcctgtgccttatgactgtcctaggactaccttgaagccactgaggagtgagacgtgtgggatcttactagtgtccctgtaagcataatctggagttgtaggagagttatgtgtccaagttgaatctttgatcattagaagggagccagtgaataaaagtttcttcctccctcatgacagactgtcaggagatggtggagttcttgtggtctcttaaaatgtcaccttagaagaataagcaatccattgttttgataccaagctagcacgttaacacaccctcttattagctcttccaccttctctgcctcacctaccttttcccttattcctgcatccttggcattgcacttctgatacaagagaagcacataagctttggtcctacctctgctttctggggaaagcagggtacgacaggtgtaagaagaaaagtagaaacaccagttaggaagttgaccaggcaagagatgatgatgaggctgggtgctgtggttcatgcctatctataatctcatcactttgggggccagggtgagaggattgcttgagaccaggagttcaagacaagcctgggaacatagtgagaccc

SEQ ID NO: 43314 - DNA, 1088 bp, Homo sapiens
tttgcttaattcaagtgccctcaggagggcaattagctcagctagttgagcacttgtgcctgaggacaggcacgctctcagcagtgtcattcaggctattgcataccctcctttatggatcccttgttctacaaaagaacttctgttcgtaaagagagtccagtctgagttctctaagggggtttctttgaggtactccttggccacataggtttgtgctactgtctgtttgcagtcatattcaagctccccagcttcctttgggaggaaggtggctgggtttagggatggacaggttcttaactggacttcagatccctctaatagcagagcttgatatttgaggaggcagttgtccatttgccagagactctccttaggagacagcagtcctgccacattacgtgggtataaatcgttatgttatttcccatggttaacttagtagcctttggtaccagcaagtctactgctgcaactgcccagaggtaggctggccatcctttagctaccaaaccaagctccttgtttaagtagcctatgtgctgctgggctgaacctcaggcccaggttagaactctcagggccatttccttcctttgtgatacataaagattaagtctctcctatgggaagactaaggacaggtgcctcaagcaaggcttctttgaattggtcaaaggcccttttagtctcttgttcccaaattagggagtgagtcttagctgcctgggtctccctaataggtgatataaggaatgagctacttctccatacccaggtatctataatctgcagaatcctgtaatgcccaagaatcccttcagttgcttgagggttttgaggagggtaaaggaggagatgggcttaattctttattcccctactgccctggtcccctctaacaagactagacctaggtacttcactgaagtctgagagagctgagccttaagattttgagaccttatatcctctgttagccagaaaattaagaaaagccttattatcctcctcagagatttcctcagctggggcacaaaggaaaatgtgatctacatattgtaaaactttaacctgagaataaa

SEQ ID NO: 43315 - DNA, 1029 bp, Homo sapiens
ttttctctttctggacctgcatggattgtctcttcttggcctctctgtaaatctttaattctctttgcccattgctgttctttattgattttcctcaggattcaatgtagccagcagatcaatgtgatgatctttctgttccaattactgccacccattgactagaagacatgacatttagttcaaaagtcttggctgagaaaaatctcacagaaattggtaccactggatgggcgtgaaccagtgaccatccctaggcaatcagcccagatcagggccagcagaatcatggcagatggaattggctgtttgctaagttatggtgaagctcattatattagttcattttcacactgctgataaagacgtacctaagactgggcaatttacaaaagaaagaggtttaatggactcacagttccacgtggctgaggaggtgtcacagtcatgaccaaaggtgtctcacatggcgggagacaagagaatgagacccaagtgaaaggggtttccccttataaaactaccagatctcttgagacgtattcactaccatgagaacagtatgggggaaatcatccccatgattcaattatctcccactggatccctcccataacacaagggagttatgggagctacaattcaagatgagatttggatagggacacagccaaaccatatcattcatgttctgagttgggaaggcaacagttctaaattcagaaagttctcagagcttggttgtcaaagattttcaatttttgctttatttattgaaggcaggtaaactaaaactactatggacaaatatttctgtcaaaagactgctaggtatgataacctcttcactcagcatccactttattttcataattattcaatagcacaccataaaaatcagaagtgctttcctgagtggaagtagatcaattatgtgattatcaattaaataaattaagtggggataattagaagaaagaaaaccaaaatgtattgagcgtgatgctagggattttaattaacaatctt

SEQ ID NO: 43316 - DNA, 1035 bp, Homo sapiens
gaataaatatcttcaaatattttacacagtttgactcttttcatcaacaataagatgcttcactatgttttatgttaccagaaattcagaaatataaatgcaaaataaatgttaacacttagtgtatacttaaattcttcagcttttgtgaaaataagagtattgtacaaatattcttcagcttttgtgaaaatagcattgtagatacaaatgaatactttttaaacttagtaattggaattaaaatactatgaaaatagatacatttttatatcagtttgacaactttgcttaatatacaattgtatgagaagaaaacaaattcagtttcttcccagtatattctcacaacacaacaatcaacacagaaggtttctgtgacatctggtcaccaagaagtttgtgggggagttctccccaataactaatcaattctgcagcaaacatcagctggatgtcctcttaattcaatgcagttctgacactatctacctgtagtagcatcagatgccacaggttgaggtcactgtcccccaattcctcagacttaccccttcagatgccaatcacatgcccgaggttgttttacctgtgcttctgactggccagctataaattagagttcccactatctcctcctctcaggcttgattaatttgctagaacggctcacagaacacagtgaaacacgtttactgctttattataaaggatgtaacaaaggacacaggtgaagagatgtgtagggcaaagcatgtgggaaggggtgcagaggttctatgccctctccaggaacctctgtgtattcagctatctgaaagctcatctgaacattgtccttgggcttttatggtgacttcattacgtaggcatgattgagtgaatcattatccattggtgattgacttaaccttcagcctctcgccttccctggaggttggaggggctgggctgaaatgcttaaagctatcttggtctttcctatgaccggcctcctatgacctggctatccaggagtccccagccattggtcaa

SEQ ID NO: 43317 - DNA, 1057 bp, Homo sapiens
ccgtagaacattacattgtctttagtaaatataccaaacacaaggtatctatagaccttcatgtccatattataaataattaaatcagagaaacaagaagataaaaaagccaggagagagagagagagaaagagaatcatttggaatgatgcactcaagaaaagagatggctaaagagatagaggaattaagagaggtcatcttaggattgttaacagtaagcaggctcagtaatacctacctactcgctcagatttcaggagcaccacgagcaacattgtatttttaattacagcctagacatattacattataccctctctcggactatttgacacaattctacttcaagttagctctgaaaagtgtattatgcaaatattactatagtttatggagagaacagaaagaggatgatgttattgatgttttccaaaatcatgttagtcaaagattttcttcagttacaggtatactttaaaatatattttcatgctttcaattctttcaacaaggcaagcattgctaaaataatataataatagcctaaatatatttctacattttagaagtttgcatgcatgttcttattctctgagaattaaaaatggcttttgtttgttgaagaaaaaattctggatttcattctggatacccctcatcttgtcctctttaagtacagtagcattaaatctttactttcatagggaaccagttggtgtctgagtgtatttctaaacagactatgctgctattcacaggcttaaagagaacaacccctcatgtattggcttgaggaatggatgttatgggctatatctaagctagaaatattctgtattcaccttagagagttggttaagagtttgaatgtttctgttattttttatgtgcatgggaaaagtatatatttctaaaaaaatagttcagtatgcctatatctgattaatataacttcatacctaaaaaatctgtatggaagaaaagaagatagaacattttttaacaacttttttccttttagattcttaggaggactttggaatcattaattgga

SEQ ID NO: 43318 - DNA, 1031 bp, Homo sapiens
gcgtgggcggtagagggactaggctagactttttggacgacttggggagcgtccctgtgcgttttaaggcagcaagcgatgtttgttcctcacccgcctcctctctgtccctctgctgtctttgaaaaggtcaatttccagcttgaaaactctacacttttcttttgcgcacatgcggttgttgcctcctcttactctacgacccttggttctgtttttggttgtttcctgctgttatcctgctctttgaggtcattgtaatttactgtaagaaactttcgccggatctgcaaggtatgctagccgcaagtggacctgaattctcagaacagagttgaattccatactgcacgaattccacctccaaccggaccctcagaaataattcattggtgaacattttatccctacaataaatcaccaagttaagttttgtatatccgtattatactgtattatggtttttgtatatatatgttagaatcagttttggcactgtaaaagagatctctgtggagcgaatactcccctcctacttctttaatccatgacaaagaacatttagtttaaaatacagtgaagttaaaccaaaactactttcattagccctttttgcttgttttttgtgttcatacagataggaatattaatgaaaggtgacttgttcttatattgcaagtttccttacgtttttcagaaaaagtctgatctgtgttcaaccatctgcagcttgaaaaaacattatgtacaacatttatagcagtccagggtatagttttgtcttatcattttttgatcttaactcattttactgatgtaagtttgctttgtataaggggaatacaaacactatcctatacaaaacttaaaaataaaatactaaaatcaaatttattattttctgcaatgatattttttctggtccttctttggtttgcttacagcgttactaaatctttatgaataactttaaaaaatacatgtaataacatatatctgttcattacagttagataaatatttccaggaaa

SEQ ID NO: 43319 - DNA, 1050 bp, Homo sapiens
aatgtccatttatacagagctgaagggtgtagtgttccatcagctgctgcttatgccagttgactggaagtaatgattaatgctcattggtcctgcttgcaagtaacctgacactatttatggccttgcagtgttcctaatgtatagtgaatgagaagacaacattctcaaatcagaaacataaacaggaactggtgggtctgaattccattcaaatatgtcatttcagccccacagtgtttgtctaacttggattttacaggcaggaaagggggaagggatggataatctgcttgtgagttgtactagcttggaaaaaggcaattagaagggggtggagtgtgcttttatagggtgggacttttagtttcttttttaataaaacaaccaggatatttaggcccagaactgcttatttcaagtgggtaaagtgaacatacaactgtttttataagtggaactgagatttgaaattaaatgagacagtttaaagatacatgtttggatctctcttctctctctctctctctctctgtgtgtgtgtctttgtgtgtttttgtctgtttcatgaatatgaacaaaagaagggaacatataacattttttaaagtgtttacataactaagtatctgtttttaggtttcgaatatagttttagaatttttacacttaaatgatttctatacttaaatgagttaactaataggtttgaggaaaagagacattttatttcataaaacattttcaactaggatatgaacaacttgaaaaaattttcaaggaatttttatcagattaaatagatggttattgttcttattttgtgtgtgtgtgtgtgtgtgtgtgtgtgtgtgtgtgtatggtttctatttagttgtttctaacaatctggaaaattttacaggagagtaattcaaagataaatatgaaaagtatcaaaaaaaaaaaaccaaaagaacaacaagcatgtgttattgtgattcatttaactattctctttaaaagtatttttcaactctctgttctggtaatttttttttttagtatgtg

SEQ ID NO: 43320 - DNA, 1030 bp, Homo sapiens
taccacataaaaataaattaaaaataatattattaaaaatgatatcaagcatttaatttcagccctccaccatgaccaaatttacatttcctgactttttatacaaatgttgctattgtgacctcttacagtatctaatataaaatgagttctgtcgaaaggcatttaaaataatcatttcagagggaaagcagagaaaaaaaatcaaaggttagtatactaaattttgtggctatataatatgtttaacacagtagaattaaagtggctgaaataaaacacaaatatccaaaatagtgaatgttgaatgaagttgtaaagttgcattatatgttaaaaaacagtgaacaatttgtacagagaagttataagcgttcttgattcttttcttttggcttttttcgctttgaattctgtacttttaagtacaagcaaaaaacatttagtccgtatataagggaggcaacagagtatagtgtaattacaattggctaagagttgaggctcctttattgaactccaagagtttgaattctggcttcattgcttattaacggtgtgacttttggcaaataatgtaaactcttcatgtcagttttcttatctgtaagatgaaaataatattattataatacctcacccagaaagttgttataaccactaaataaacataaattctaaaaaatgtacttaggttatagagaacacttaaaaatcattagcagctattgtagtgtacagcatggtaattatagttaagaacactggattatttacttgaaatttgataagagggtaacatttagtgtccctatcatgtacatacacatacatacacacagtggtaactatgtctggtgatgaatgtgttaattaatttgattgtggtcatcatttcactatgtgtatgcatatcaaatcatctccttgtatgccttgagtatacacaatttttatttgtcaattttacctcggtgaagctgggggggaaagaaaataagattctcaagttcattaatagttaaggaag

SEQ ID NO: 43321 - DNA, 1027 bp, Homo sapiens
ttaaagccttacaatttcatgcttaagctgcctacattcttgtccaagagcattctcctatgaatacttaatatgttgtaaaacgataaaacaggacaatcacttcaccagtttgagaaatattccattttggtattcacctttctggcacacagttttagattatgattagcaatgtttaattgtgagcctttattagacagaatgtaaaggtaaacaaatgtatagctggagctttttctgtttttatttcttcaagtggaacaattttttgacttcatcatttcttgttcttaatttccatttattagtgtagtacatgtactttttaaacttcccctgtcatattttcttcccttttaattatatcttaccttttataggttaaggaagatgtaagctgggtattggaagatataagctaggtattggagtggaaataatatgtaatttccatgatattttttatttatgtaagacaggtgtgatgtttcaattctgccagctaaggagaatgaagttcttgtttcttacagttggatttcagtttcctaaaaatcttacattcataaactttcctaacaaaatttcccatagagtttgacattgactacaattccttaagagtgtagggttgtgattttgagaagccccttcagggaccattggtttttcaggtacactcagccaaatctaattgtaattgcttgagtagttatcatcacctcatttgttgagagactttactttcattaatgcttgtgtaaataaagccatatagtatacatttctttttcttttagcatgtgtatttgttaacgtaaccgtcagtctggctaacattgaacaagacaatttatttgtacagccattgagtttcccttttttagaattctagatagataccctaatatttctggttgaatggagttggaattcttgttttggccataaatgtattgttaccatgagaatatcaatgtccattctctcttcaatggtatgttaatggtgtgtgtgtgtgtgt

SEQ ID NO: 43322 - DNA, 1034 bp, Homo sapiens
gaggtcccctactattatagtattgcaatctctctcttcattcagatttgtacataattgctgtatgtatttaggtgctccaaggttgaatgcctatatatgaattttatgtggtcttgctattttaacctctttattaatatagaatgaccttctttgtctctttgtgggccttgactttatctattttataggtatagctaccctgctacccctcttttcttttgttttttattcatgtggaatgtcttttttccatcctttcattttcggtctgtgttcttaacagtaaagtgaatctcatttaggcagcatatggttggatcctgtttagtttttactccaaccacttttgccttttagttggagaactttctgtatttatattcaagctaattattatcagatagggatttgccactgccagtttgtaactttgttttctgattgttttgtaggttccttctttccttttttttttttttgctcttttcctttgtggttttatgaagttttttgtggtggtatgctttgatactttctttttatattttgtacagctataatataggtttggctttgtagttataaggcttacataaaatatttttatactaggcctactttaaggtgacaacttgcctttaattacatacaaaaaatctgtgcgttcactctccctttctcttattttgatgtcaaaatttacacttaagaataatttgtatctcttaacaacttactgcagctacagttgtgtttaatagttttgtcttttaactcttttaaaagggattaatttggtttatacattacccttacaatattagagaattctaagtgcaactacgtactatctacaccattgagatttttaatttcatggtttttgttattaattcatagcctttttccaacttaaacttcctttagcaatttctgtgaagcaggcctattagcaacaaactctctgagcttttatttttgtgggaaaatttttaattatctttcagttcagaaggacaactttgcca

SEQ ID NO: 43323 - DNA, 1035 bp, Homo sapiens
tgttttcattcttagatttatttatatatttgtagctagtcagggtaatgagagcctcctttgttttcacagtccttgagactatgctgtgttgtaagatgttatactgcccccagtagatgagactgactagtcattttttcaacaaataatgtactgagcacccactaagagttaggtgtaaggcaatggacaaaacagacattgtctctatatggagcctacattctagaagaggaaataaaatgaaatgttgtattatcttgaaaaatggtaaaaatttcttattgcttcatttttagaataagatggtagtatagaaaaaagtaatgtaatgtctttgtatattcggatctttttgtctcttgtatgagagatcgtgtagaagtattgtaaagattgcaagagctaaaatataaaaaatgcttaagacatagtgcttaatttatattggctattattatgtgatacttgtattattttgccactttttcttcctgactcatgtagatgattacttctagaatagactatctctaaaacgccatatacaagctccacctggtacccaggcgaccatcattgcattgcccagattacagcagccacctcctacctggtctctctgcatcctttctctctttgctgaatcctttctcctccctgcagccagagtaaaatttatgctcttgtgattcctattgctgctataaaaattaccacaaactgaatggcttaaaaccacattctcttacaattttggaggtcagaagtctcaatttagtttcactgagctgtgtcaaggtgttggcaaaactgcattccttctggaagatttgggggagtatccatttcctcgcctttctctaaattctagaggctggccatgcatggggttcacttctataattccagcactttgggaggttgaggtgggtggatcacctgaggtcaggagttagagaccagcctggccagtatggcgaaacctcatctctactaaaaatacaaaaattagctatgtgtggtggcagg

SEQ ID NO: 43324 - DNA, 1044 bp, Homo sapiens
ccaacacgcccagttaatttttgtacttttttttgtttgttttgagacagagtctcactctgttgtccagactggagtgcggtggtgcaatctcggctcactgcaagctctgcctccccagttcacgccagctaattttttgcatttttagtagagacggggtttcatcatgtgagccaggatggtctcaatctcctgacgtcgtgatccacccacttcggcctcccaaagtgctgggattacaggcataagccactgcgcccggccattttcgtgtttttagtagagatggggtttcaccatattggccaggctagtctcacactcctgaccttaggtgatccacctgcctcggcttcccaaaacactgggattacaggcgtgagccactgtgcccggcctatcttgtggatttttatcttcctgacactccattatttttttcctagcccaaacatataccctataccacacacaccctataccatgctggctctaggatgactttgagtaaattcaatgttgagggttaactggttaggaattcagcaagcgaatttagactgaatttgttaatcatgacaagcctccctccgaaaaaaataaaatcattcatccaagtacttcatctatacacacactgatgaacatttatctttaggtagtaaaggagccctcccagccctcgctctcccactgacatgctttttacctgagttcccggattttagtgattttttataatgtttgtgttaccatcaattctccttttcttcaccccactctgtcacatgctgtggaggactctggcaagagggcacggcccctgtctttgcataccatggagggttgtggaaaagcagaagaaattgtcagccagtaaactgagttatttccctgctctgcattagctgcaaaaaagaacatacatttgggggaaaaaaggcaggcaggttttattcctggccaggaatggaaaaggagagagctcttgctctaaagacaccttcctcccaagctgtgggaagctggggaactttaagg

SEQ ID NO: 43325 - DNA, 1119 bp, Homo sapiens
atttatccttaagagaatagtcaggctttctgactgccatgccttctcttgttttcttgaccaaacttttttattctatgtgctaaggacagaaagtaacaaatgttcattactaacacactattgagggagaataagattgtcagtagaatgggcactcccagttgttaagcatcattcatgcaccaaacactgctctaaatgttacagacaactttattcttcaccaatgtaggatagcctttattacctgcatattatagacaagggaaacaacttcatgcaggcaattacctctccaaggacatcaaataaattcacagaaaagctgtattcaaatacaggctttgtcaaatcccaagcaacaatcttgatttagagatggctttggagccagcggcctgagttcaaatgctggttctgctgtttcactagccaggaaacttgcagcaagctaccaaacctctctcttctcagttttctcatttgtaaaataacgttagcgatgacagtagagatactaatatacctcatgtagttgataggaagattaaataatacatgtaaagcattgagaagagtgtctgacacatggtaggaacaaaataacttcttctttttttaatcagacggcaaacttgatgtcaattctaactgtgttaatgaagagcaaccagaggctgaagtaggtatctctcaaaaggattccaatcctgaagattccggggaaggaaagaaagaatctcttgaaagcgaagctgagttggaaggcttacaggatgctcctgcagggccacaggtgtctgaggagtaaaagccagagcaagtgccagtgtggatgatcctcaccctgcaagaagctggaaaactcctaggaatgcattgtcctcaccttgttatacctgcgtggcaccatggcaggattccacatttcatagaatacaggttttcaagcaaacccctgttgaccatgccctaatttcctattgatttctgttctataattgaatggatattcctatggaaaattttttgtttcaaaatacaggaaaaacattcctattacctttctgaggctggctttccagcaattgtttcaaaggaaaatagatcccctta

SEQ ID NO: 43326 - DNA, 1069 bp, Homo sapiens
tgtgtgtgtgtgtgtgtacacatgtatttccctaaagtgattggctggtcaaaactgtacagtaccacataccccatccccaaggccccatatttacccatttagcaactttataagatgaaatccttatacttcatttatttctccacattctctgtttttgccttgtcaggccacaggtctttcctttctgccttctctgatacttcctcaaaacctgtgccaatcatacctgtagctgtggactttgctgagagagtctagtatttttagcacaagctgtaatgagagtgtcattgacagggtgttgcttctctttcagtaatccataccaccagctgtgtgatttgcctgtcatctatcttcacccactcatatgaactcactctcttactgtcctctctctcctcccctttgtctccatttttgcatttttgtctttagatctctgttctcatttagattttggttataggaccttttcaaatgggttacgtaggttgtatattctttgacacccatcatgacaaaactattaatacctttctttctgaaatgtgagtcatattttgcctagctttctgactcatatcagagttcttttctctccgacatatagaagttattctacagttttctaagttctggttttgcaaatgagaattcaacttactttccattgtaaactttacatttctcattctggaagagcatttgattttcagtttatccttgaaagtaaaaaatttgaaaaggatacgtcttgttgtatgtgtgtgttcctattaatcacactcagtgagccctgtaagtctagaggactcaaatctagtgattgtaatatgggagcaaaatgatgtactggcttctccacctgcagcatttattttctatattagtagtattattttatttatgtatattcagaatttataaatttaaaactagtaaaatatttaagaatttcaattacaaacatttaaacctaaatgattaagtatttacaaagataaactttaaacatattattcaaatatgttattagcagattaattaaaataaaatatca

SEQ ID NO: 43327 - DNA, 1032 bp, Homo sapiens
atctatgttcatcagggccaatggagtatgattttcttttctcataatgtttttatctggctttggtatgaggataatgttggccttgaaaaatgaatttggaaatgttctcttcaattttttggaagagtttgagaagaattgacattaattctttaaatgtttggtaaaattcaccagtagagccatctggtcctgagcttgtcttgtcttttctgggagatttttgattattgtttctacttctttactcattattgttctgtacagattttctatttcttcttgattaagtcctggtaggttgcatgtgtttaagaatttattcatttcttctaggttatctaatttgttggcatataactgtttattgtattctcttatgattctttgtgttgctgtgctatcagttgtaatgttttctctttcatttataattttatctatttgattcttcctttttcatagttagtctaattaaagctttgtaaatttcatttatctttttaaaaacccaggtcttggttttgttgatattttctattgcctttctcatctctattttacttacttatgctatggtcttcattatttccttccttctgctaactttgggttaagtttgtccttctttttctagttccttaaagtttaaagttaggttgtttatttgtgattattcttttttcttaatataagcatttatattatatgcttacatatagtatttaaatagcagctccctcttagaactgccttcattgcctctcataagttttgatatgttacgtttctccatttttggttgtatcagagtttttaaaatttaccttttgatttctttgaccaattgattgtttaggagtgtttaatttccacgtatttgtgaaatttccaattttcctcctattattgatttctagtttcatgtcaaacaatgctactctttttattatctttttaagaagatttaaaaaatgaaatatattatgactaatatcaataagatggtggaatagaattttccaacgc

SEQ ID NO: 43328 - DNA, 1026 bp, Homo sapiens
tttataatgtttaggactcatggtaagagaggcagaacttaaagggcagatgctgtctcttaatggcaaaaagggaagtccaatggtgaggcaataactgtttcttgctgtttaatgaacagctgcttaaaaatgcagcatgtcagtcaccagcgtagacatcagtaaatgaaaggagtggctttgaaacgtgaattttattaagtatagcaggagattctgctgcagatagacccagaagacattttgagaaaataatactatcccctgggtgaacgatactcaaactgtaactatagtgccttagagaaattgatcaggttcaagcttcatggacgttaagccatagtttagatatttaaaaacatcatagaccagcccagggaagaaaatttcaatgaagtatcagaatgtatgatgttaactttatcaagtcattattacttcataactaccttctgggtatgttgcttgttagtgttttgcattctaatttatactgtaggtcctgaggtctggaagcttgatttctagtttgtcccctaagtccaggacatattctcttaacacattttgttaaacacattttaatgctctctaaacacatttttacgtcatttagagctactaaagatagagggaagttctaatgcttgcttcaagattttttgtagccctgtgagatcgagattggtggtataaaagaaatagtacaagctttatagtcagtcaaatcccagcccatcaattactaaactgggaaatgttgggaaagttattaaacttagaaaatcagtttcctcttttatatcatggtggtaatactgtactctattcccacagttattctagagaatagagataatgcccataaagaggaagccacgcagcaggttttcaatgaatggcagtattatttgattaaagctgtcttttctagggacttctcttcttgttgtctgatgccccctcctggacagtccagaacctgagctgagcaactgtcaacatcacttgcttgaaact

SEQ ID NO: 43329 - DNA, 1027 bp, Homo sapiens
tgtatactcccataatactgacttttatttgctaaaagctaaaagaaaattctagtaatttagtaaactatgccttttgtaatgtgaatttagttgtgtgatggattgaacttcagcatctttttcctgaaagtacataaatacatacaatttactaactaagcaaaatacattattctgtatcattcatgttttgttctattaaatatatggagatgttgagaatatcttattcttgtgaaaaagatgcatcagaaaatagacaaagggtctagcatttgccttatcaaactcatacagtctcttccaatagtaagaaccaaatcatcttttcctaggaccatcatgaatctactttgccttgaaaatgttaaactatagccttaaaatttattcattattgtggggctatgaagttctgtattctgtcagaatgactactagaaatattttttctacattagaatttaatgtcaagttacaaaggctaaaatgtaacttgttctctgacttgtgaaatatcaatcatttcgtaaaagcaacaaaagtaacaattcatagtagatagctaactcaaacttattcttatttcttatattttgtcaggtggatgacaatattccacttagggtaatgctgcttctcatggatgaagtattcgacttaaaagaaagaaatcagtggttgcgaaggaatatcaaaaacctacttcaacagcttattagagctacatatggcgatactattaataggtagcactctttcctcctcgcttttaatctgatcttacttagctattaaactcttacttctggaagtagattgctcaacctttgtaggagaatttttttctctgggccttttaaggacatcattaaagcagtctgttgctctcagggataatttacatccagattaagttgcttgctctatgaaagtcacgtttatttttttcaccttctaaaattttaaccttcctcatttacattaatttactttcagaaaaatagttgaccatgttgactgg

SEQ ID NO: 43330 - DNA, 1033 bp, Homo sapiens
attggtctatatatctgttttggtaccagtaccatgctgttttgactactgtagctttgtagtatagtttgaagtcaggtagcatgatgcctccagctttgatctttttgcttaggattctcttgtctatatgggctctttttacttccatatgaaatttaaagtagttttttctaattctgtgaagaaagtcaatggtagcttgatggggatatcgttgaatctgtaaattactttgggcagtatggccattttcacgacattgattcttcctatccatgagcatggaatgtttttccatttatttgtgtcctctcttacttccttgagcagtagtttgtagttctccttaaagatgtccttcgcatcccttgtaagttgtattcctaggtattttattctctttgtagcaattgtgaatgggagttcactcatgatttggctgtttgtctattattggtgtataggaatgcttgtgatttttgcacattgattttgtatcctgggactttgctgaagttgcttatctgcttaaggagattttgggctgagattatgggttttctaaatatacaatcatgtcatctgcaaacagagataatttgactttctctcttcctatttgaatatcttttctttctttctcttgcccgattgtccaggccagacatccttccaatactgtgttgaacaggagtggtgagagagggtatccttgtgccggtttttaaagggaatgcttccagcttttgcccattcagtatgatattggctgtgtttttgtcataaatagctcttattattttgagatacgttccattgatacctagtttattgagagtttttagcatgaaggggtgttgaattttgttgaaggccttttctgcatctattgagataatcatgtggtttttgtcattggttctgtttatgtgatggatgacatttattgatttgtgtatgttgaaccagccttgcatcccagggatgaagccaacttgattgtggtggataggctttttgatgtgctgct

SEQ ID NO: 43331 - DNA, 1077 bp, Homo sapiens
tttttattggaggcagattatatagcacataccaaaattctggactcctagaaggaaagtaggtgttcagcataaacatttcttatacagatagtttaggtatggtaaaccactcttattgattagagaatgctgagaatcttccctaaatttaagttcccatattccatccgagggacaaacttggaagcagtcttttctagacagagcagtttcaggctgccatgttaactctgcagcctgctttaattacatggttatgttcctttttatatatgtgtggatatatgtgtatgtggcaaaaacatttttaaagtttagacccaaaggccgtagttataaaagattcattttgagtcagtcaataggaatttatgtttgtggaattgtttttgaaaactaatcatttaaaatctatcatagtctatggattcacctcatttaataaataatcagaataatagctaacagttgttatattaggcagttttctaaatgtcttacatgtcttatttaatctccacataattctctgacttaggtagtattctcattttatagataaggaatctgaattaaatttaaaaattatttctatattaacaaaagtattaagctaaaaactacagagctggttctagtatatttcaatgtaaatgttaacataatatgtctacttatttttatctagattttcttgccatataaggatcataattgaaaagtagcaagttacagtagatggacaagcaattaagggagaaataatctaatatattaagtttattactaaattttttgttattgtttcttaatctttgctttttttctgttagcctaaatggaaaatattattgtgtatggaggggatggagggtatacaaataatatatagtttacatgcagggaaatgagtaattgtaatgcatatatgatgtagaattctttactcttttttttccctataaaattttaaaaatttgtttcctgatttttttttctcagtctttagatgacctttcaaatgtttcttctgatgactcagtacaacttcatgcctacatttcagacacaggt

SEQ ID NO: 43332 - DNA, 1050 bp, Homo sapiens
aagaatatttgtagctttaaaaatgtctaggataaaagatctacaatcaacaatctttttttacttaaaaatctagaaatgaaaaataaatccaaggcaaacagaagaaaggaaacaaagattattgtgagaatcagtgaatagaaaacagaaaaaccatagtgaaaatctaaaaccaaaagttggttctctgaaaatatcaacaatattgtcaaacctttagctagactggccatgaaaaaatggaagaagacacagataaccaaattcataaatgaaagaggagacatgaaccctgaccctacagaaattaaaaggagtaagcaaatattatgatcaactttatgacaacaaattaaacaacttaaagtggacaaatttttagacacagattgccacactaactcaagaagaaatagaaaataaaataatttgcttaataaggtctgattcttgctagctatagaaaaaatgctaaaatcttggtctgtggtaaaatcatatttttttaagtataggacaagaaaaatgtttttctctaatttgaaatactttttgaatgaaaatggagaaaaggattacagtaaacagaaatttatatactgtttcgctaaaattggtaggtgatctttgacgaggccaaaagcagcctagaaaagagttgacacactgacctgagttgtttgatgatacatgtaggttgtgataaaaactcatatagtgagcaaaatgactcctatttttaaaataagactacttgaatattaaaaaaaaaaaatgtgtcaccagaaaaggacagccaactttaacaggattttctaaatttctttactaaaagtaatttatttggaattgaacttcagtttgacaagtttatctgtctatttaaaaaccatttttcctcaaaaagggatttaacttatgatgacatcattatgcttcaaagtatttaaaaatgagcattgtaggcctggatagcctatatgatgaatttatagatgaaaaagacctgattgacaaacagttgatctacctaccaaacaagccata

SEQ ID NO: 43333 - DNA, 1050 bp, Homo sapiens
tttgtaactcttaaaagtagtttccagattctgttttcttctttaaaggtcatctttaataattaactggtcctggctgggtgcagtggctcatgcctgtaatcccatcattttgggaggccgaagggcctggattgcttgagtccaggagttcaagaccagcctaggcaacatggcgaaaccctgtctctactaaaagtacgaaacatcagctggctgaggtgggagaatcaccggagcctgggaagtcaaggctgcagtgacctgtgatcatgctattgcactccagcctgagtgacgagagtgagaccctgtctaaaaaaaagaaaagaaattatcaatctacttttaaaatatagcaaacgcaaacattttatgactgaatttttttatctgtagtaatttctcttcctcttgaatttattatttttgcttcagaagtatacctgttaccataaaatatttcctaagggaatgatacagtgatttcaaataaaatttatagatttcaacgggcttgtcttttattggtaggagtttacactagacaagttttagctgaggacgttatcttcccagttttgcaagtattaagtctttgttaattggcacagttttaaattaagaggatcacttatgcaattatattcccagaaagtgtcagcataggaacaactatagaaaagcccttctagttgttgaaattgttttcttagattttgaaaatgttttaaatatttttatttatttctttgttcttcctttcttcttttgccttttctttttatgtttattgtataattcaggttttaatggccagtttattagcactgttaagaagtatagttgacacttgaacagtgagagggtttcgggtactgactccctgtgcagacagaattctgtgcataacttttgacccccaaaaacttaaatactaacagcccactgttaaccataacccttatcaataatgtaaacaattgattaacacatagactagtatctgcatatattttatgcattcatggcatacctttttgtgaattt

SEQ ID NO: 43334 - DNA, 1025 bp, Homo sapiens
aattcttgtagcaaacttagagttgtaaggggaaaatgagatgatgtgggtgaaacatttagtaaagtatttgccaaccagtaaatgacatttttagcaaatcacttgactctgtgcctctataagctggcacatagtaagtgttcagtaaagttaacttctctgttattattgttgctattatgttcctaggttgtgtacacagattctttgaccctgtcttagctcttttttttttttttttgtagagcaagggaggtggagagggcaaaattaaggcacatgaaacatagagaaataaaacaatcatttctgtggtattgagagcggtttgtcatgtagcgatagagtgaaccacagtagctgatgaagacctgaacggagttgagaccaaaactggttttcaagaatgggttatttggatagatagagaggaaggacatgttaggaaataagaatagtatgagcaaatttctaaaaaagaagataaggatagtgtagtagaaactataacaagcaaccttgttgttgatcttgaaagtgaagtgtgggtggtaaatccctccatcattgttccccttaacccaagattagcagaaagtacataatatattctttttttttttgagacggagtctcactctgtcacccaggctggagtgcagtggcatgatcggtggagagcagtggcacgatctcggctcactgcaacctctgcatcccaggttcaagcaattcttctgccccagcctccttagtagctgatattataagcgcacgccactacacccgactaatttttgtatttttagtagagacggggtttcaccatgttggtcaggctggcctcgaactcctgaccttgtgatccgcccccctcagcctcccaaagtgctgggattacaggcgtgagtcactgtgccccccagcgaaagtaggtatatgctaatgccactgtgttcctaactgaaggatcttcctgtagagggaggagggatagatacataggtttcaggattcgctgg

SEQ ID NO: 43335 - DNA, 1053 bp, Homo sapiens
cgtgatctcagttcactgcaatctctgcctcccaggttccagcgattctcctgcctcagcctcccaagtagctgggactacaggtgcaagccaccaccctggctaatttttgtatttttagtagagacggggtttcaccatgttggtcaagctggtctcgaactcctgaccttgtgatcctcctgtcttggcctcccaaagtgctgggattacaggcatgagccaccacacctggccttgtcacaagattctttaggaaatatattggattaaaactttaaaaagtattattgtataattcacaaaatgttcatagttgttttaaacttcagaacctaatacaatctgtcaatttcttgctttgccaaagtcacaaattgactttttagtaaatgataagccatctgtgaactctggaaaatatacttggtagtagattcattaaattataaggaaattttgtttttatatttgtgattaaatttttctttctaggggtttagtggttactctcctgtttggaaaaacaaactcagagaagtacctagaacagtgtgaacactcatttcttcctccaacatcacctggggttcctaaggtaaatcgtttgagggaatataaaacctcaaagtccagttctttgcaatgataatagagtaatcatctgtatatatagcgtgacaaattttcgtatagtttactaatgctcactgggaatttatgtgagattgtctaattatacttagaaaatatattttaaaaggccatcttaaaaactttcttagtgttagatttaaaaagtgggaatacaaacttgagaaaacgatagaaattggttagtttattttgggtatttttcctgctgtcttatcatagtatttcaaagcatcatgcatatgatttttaacaatgtcaatgagtattctggtttgaatgaaataaattgcagaggaatcagaggaaaaaatggatacttttcattactttgaaaaatacagcttgtaattagattatgcagtatctataattttaataattcaggcctaattttta

SEQ ID NO: 43336 - DNA, 1032 bp, Homo sapiens
tttgtacatactttgttgtatttctcatgctaggatttcatttaacagtttgtataactatttctgtcctgtacctttgcattgccactaggattttttaaaaaagtaattgcagatgctctgtaaatctctctatacatataaattttgtatattgttttgtggagataaattttcaagtatacacttcacattttcaaaagttactgaaataataccatgaatgtttacaagaagaaatttaaaactatgtaaaagttttgttggttcttttctaattcatgtggagaattatttactaatttacttatattttttctgtatttcaggccagtctatccatatggggatggggaagccttggcattgtcctttttctgataacctttggaccctttgtaatattttatttgacattttatatcctctgctttgtgggtgggtaagtatactcaattataattttataattcatgtgtcatatcttgttaaaatggaaacaaatgactgagaaacgggagtatgatttatttgtgaatgccatttttaataaattgcttttactaaagttaaaaaaataaggatacccataaaaataaaaacagtgattgtcattatttgtatcagaaatatgggtagtccttcaataataagatgtccatttccaaaggtatgaactttttttggtgataatgtgtaaagtttaaaaaatttttcaaattccttttggtggtgtttctcctttaaagttgaaattttcttttgcattatgttaataagtaagttaaattgagactgcacatgaagttttacattatagaaattgtgattagacttcaaacaaatgttaattttttcctttaatgaatgttgtcatttcggtctagaaaattcaaatacctgattttgcagttttctcttcatagttatttggtgtacgtttatgttttcccttaagttgataaacctttacaagagaggtttcagtcataatttattgtagctttgtatgcagagcatttggtatcagac

SEQ ID NO: 43337 - DNA, 1050 bp, Homo sapiens
gtcctccatcatgctgagatcatgctgacttgaaaaagaaagccaaaaattagtcgttttgtttgaggtacgaactctcggtacatcttttgcaacagatttttcaaccagttttatctgttatttttccagtggtttattgaattgtattttgttttattcctttcattcaaactgaggtgaatttcttttcccttattatatttatgttcctaaaacctatgggaatgattttggaggtctaattaaatatcagtctatttattgcacaaaataaaaggaaaataatcaaaaagaaatagcaacactgaaatagtcttgggtactttgaaggagttatgttaggttttaattgacttaagtacaggtcagatctctttgtcttctacctttgctctaggagtcagtttgtagggctcggttttgagtgtccttaaatttgaggccatcgtattgctgtgacatatttactaaaacaatttcttgtattatatttgatcaatggatttgtagaaaacgtaaatggcttaagataggttaaatactattcaaatatgtctttttcaacttttaagttcaggggtacatgtgcaggatgtgcagatttgttacataggtaagtgtgtgccatggtggtttgctgcacagatcatcccatcacctgggtattaagcccagcaaccattagctgttcttcctgatgctctcgctcctcccatccacacctgccagacaggtgccagtgtgtatttttcccatctgtgtgtccatatgttctcatcattcagcttctacttgcaaatgagaacatgcagtgttcggtttttttgttcctgcattagtttgctgagaataatggcttctagctcgacccatgtccctacaaaggatgtgatcttgttagtctcttgttcctttttatggctgcatagtattccatggtgtatatgtaccacattttctttatccagtctatcgttgatgggcttttgggttgaatccatatttttgctactgtgaatagtgctgtagtgaacatacatgtgcatg

SEQ ID NO: 43338 - DNA, 1080 bp, Homo sapiens
ttactatttctttacttttatacttcatacttttcaggaacactttaaattgtccagttctagatttgtgagcaactatttataggtttcactttttcaacatacaagaaatgatatagacttagagtgaaaaagggccttatatattatctaggcaaactcttcttatttatgcattagaatttttatgcatagagaatcaaagtgaaattcacaaagaaccctcttacttagattaaagtataaacggtatatggggctggaaatttataattgctgcactgattcaaagtttttgtaagaataaatgggttaactgcaactcattttattaatttgacacgtaacttgatttctgtattttttcactgttaaactttgaaatataagagcatcagacatcaccgcccacagagtgcttcaaatttatttttcttttacaattaaagaaagcttttaaaagtacagtgtatgtgtaggctttaagagctactctagttatgcaagagaactatgaaattgcttttgaatgaagagttcattcaaaccttctcaaaaatattcaaatatatttttggtcagaataaggtaagtagtaaaatggtaaatttggtaacagtttgttttagaaataagaaaattgctaagtgaaaacaagactttcacataattatagtatatcatgttaactagtaattaaaacccatgtgcttttactaagcgaaatagatatcatgattaaagcttttatacttttaaacattagtctattttgcgtatagcgatcttatttcacctgtgtttgaattgtgaaacgcaaggtaactttttgaggctatgacaccagatagatgaagcctgttttaagtcatggggatttaggccacatcaaaaggatacttttttttctttttaaaattttattctttactcattcattaatttaattaatttatttagagatgggggtcttacactgttgcctaggctggttttgaactcctggcctcaaatgatcctactgccttggcctcccaaagtcctgggattacaggtgtgagctaccctgtccagcccaaa

SEQ ID NO: 43339 - DNA, 1090 bp, Homo sapiens
cctatggtttgccctaggtctcctttctctggtccctgggctccagggccctccgcctccgagctcggtcagcaccctggggttgttgctcggcccgaccggtttgtttcccaccctctactttgactgcttcatgaagtggacttttttatctcaagctgcacatgtatggctcagttgggtcatccccctcccccacatccatcaccttttcggttaaatcgtggtcatcacaaagttcagtttagcatctgccaccttgatttgcgtgtggcccccttgttactccctatggaatagtttttttctttggacctgaaatggaagtagggcaactatgacgaaccaatcaatttcccttttctagtgcctaatgggcattgcaaaaagccgactttttgaagaagtagagtttgcctttactagcaacactttaaggggaagaactaaatcggtgcaactaggtacttgacccaggttagcccagttatgtgttgtagtatctgcaggtgtaggtgtcactgaacataaaatactgaaccttgtgatttgatgaaatacctttttcgaagcctttcactttaagtactgtgaggatcctgacgtgaggaactgaccggattgggcatttttatgggctgaactgaataggaaacagttttagtgggcaatgggaagtattcctacatgggccaaaaaggaaatacaaacatttgtaggtgagtggcttttattttgtgaaaagtgatggtaaagcacgtacttgcctgaaatttcaggtccttggaacgtgactaactttgaggaactttatactttgctgtttgtacttaatctaagcacagagcctggcatatgataaatacttactggttgattgtaacttctacagtacgtatttttagttgtttgaagttcattttatatttctaaattctacagatttttcattcttggagttaattgagattatggttatagcataagtttgtgttgtgattagcagtaatagattagaaaaaagagttataagtagcagaagtttcatttttaccttaagtgtgatattttagtgggaacagttagcctt

SEQ ID NO: 43340 - DNA, 1042 bp, Homo sapiens
tattttaaaatttggaaatggaacatatgtctaatcaattcaggtgctaaagaggaaattaaaaagtctggaaaatattgagaaaatagacaaagttggaggcatcacactaccctgcttcaaactataaggctaccataaatgaagcagcatgatgttggtacgaaaacagacacatagaccaatggaacacaacagataacctagaaataaagccacacacatacaaccatctaatcttcaacaaagctgatagaaacaagtgatgaggaaaggactccttttattcagtaaatggagctgggatagctggctagctatgtatagaggaatgaaatggacctctgtttcaccacatacaaaaattaactcaagaaggattaaatatttaagtgtgaaacctaaaagtataaaaatcctgtaagaaagcctcagaaacaccattctggatgtaggccttgggaaataatttatctataagccctcaaaagcaattgcatcacaactaaaaattggtaagtgggacctaattagactaaagagcttctgcacagcaaaagaaactatcaactgagtaaactgacaacctacagaatgggaaagaaatttgcaaactacgcatccaacaaatgtctaatatccagaatctataagaaacctaaacaatttagcaagtgaaaaccaaataaccccattaaaaaatgggcaaaagacatgaacagacacttctcaaaagaagacatacatgcagccaacaaacataaaaaaatgctcagcatcactaatcatcagagaaatgcaaatcaaaatcacaatgagatatcatctcacactagtccgaatggctattattaaaaagtcaaaatggctattatttttaaaagtcaaaaaataacatgttggtgaggttgtgggaaagggtacacttatacactgttggtgggaatgtaaattagttcagctactgtggaaagcattttggagatttctcaaaggacttaaaacagacctaccatccaacccaacaatcctattattggat

SEQ ID NO: 43341 - DNA, 1048 bp, Homo sapiens
aatgccaactttcacctgatggtgatttccataccttctttgtttggttattaataggcctccaacattggaataaaatttctatttctcctagtgtttagattcatttaatttaactatttaatttacatgaaggactcgaagcccaatatgtttgagacatttgcccaagaataatttggcctagtctagcattcttttctctacttggaaccatgatttttgtactttaagtacgatagtaaaatctaaaattggcctgggtaccagaactactcattttcttcagctgaacaaggattccccaaggctcagtatcattttcttttactgcaaagttttagataaacaaagcagataacaagaacacgactgtctcttaaataatgagactggacactactctatgtatagacttaacacctggtaagttgtaaaggccaagttataggaataagaattactatttggctattatatcattttgcttcctgactgaaaataagtgtctttatttaaattaaaaattctaatagtagtattttgaatacatgtaactttctaaatacttctgatttcattttgatttttaccatttctgatacaaagccttgcttgtggaaaaatgccctgagaccgttatttttgccttttataaggataattaccactaacaatactcatatgaattcaagactgatggaaaaggaaagataattttttttttttttttttttttttttttttttttgagacggagtctcgctctgtcgtccaggctggagtgcagtggcgcgatctcggctcactgcaagctctgcctcccgggttcacgccattctcctgcctcagcgtccctaatagctgggactacaggcgcccgccaccacacctggctaattttttgtatttttagtagagatggggtttcaccgtgttagccaggatggtcttgatctcctgacctcgtgatctgcccacctcggcctcccaaagtgctgggattacaggcgtgagccaccgtgcccggccggaaagataatttaac

SEQ ID NO: 43342 - DNA, 1064 bp, Homo sapiens
gacaagctggttgaagctggtaatcaatgcatggccatatttattcattttccacacacttgaccatctactttgtataacacattctgctaaggcccagggatacaatggcaaacaagatagatgtagttccttcccttgtggcatgtcataagagaaacagatgtgcatatacacacaataaataagaaaattaataattgtattaagtggtatgaaaaaaagggggaggattgttcactcactgttacctgtgttagtatctgcaaatgcatgaatggttgaactcccatgtcagcatttttgttgccatttatttagtaccagacatagtgctggtctcacagcttaatatttggtaatgaataaattctgctagtggtatatgttgatctgaacttacaatgatgggatatagaattggcagagtggcagatgttcacaattgtctacaagtagatgtgctagacaatggaaggatgcaggccaacctctttgattacaattgagattcatgtgactattgagccctggaaatgtagcttgtccaaattgagatgtgctgtcagtataaaatacataccagattttaaagatgtaccaaaaaatgtaaactatctcaatttttatattggtgaaatcaatatgtcttggtatagtggcttaaataaaacaattttagcctttctcagtttatttttctgcaaaaagattaaaaattgtacatgaagctcatgttaactttcttttggtcagtgctattttaaaggaagtatgagttgaaaaaaaattgaaataaactatatcatattactaggacttaatatagtggcatacccaggaaatgcttagtaagtgttcccttcacattttaaaatttgagtatacaatcatgtttgacaatatagaaatttaatttttagtgaaacaattctaaaccccttttccatagacacaagaaagatggcaaatttatgctattcctggaaaaatacattgtggcttagcaaataagcaagttcccacgttacttttgttttgcttcaagtaatacttctgccagt

SEQ ID NO: 43343 - DNA, 1039 bp, Homo sapiens
aaatattatttttaaggaaaaattaatttgtatcattcaaacgtaggtaagtttttgaatatcctcctaaaacacatacatgcacacgatatatgtcccatccactttattcttttcatagtagcagaatgattttaagggcaaaaaaatcaattatcattattatttcaaaagttctcaattctacacaaatactatttctttataaaggattcaaagaatatagcagtatatgaaacaggaattcaaatgggccaggcagtaatgaaaatttatcaatgacagaggacagggcagccagtctgtgccttggaaatggaagctctgtgggaaaggtcttccagtttttcataagctggaaatgcagatattgatacaaaatctgctgaaatagatccttttttactctttactttctcctctcttcctccagcagttctctgtgtgtatacacatgttcgtatgtatacttgtatgtgtgtgtatatgttcttttccttagctgataaatattttaatagatcagaactgttaacccttgatattgttcataaaaatatagatcaatttaaccatgacaaaacccacaagacacttccaatttttttcatttttcaatatcaaattaatacaagtagtatcctttgcctgttaaactgggatcttataactggactactaaagttggcagtagatttgtatttggaaattaacaaacttaactttcatctactttgtgtaaattattattttaaatataaacatgtaggccagccacagtggctcacacctacaatcacagcattttgggaagctgaggcaggaggatcacttgaggccaggagtttaagaccaacgtgggcaacatagtgagacctcatctctacacaaaataaaaaattagccagtcatggtggcatgcatctgtagtcccagttactcaggaggctggggtaggaggatcacctgagcccaggggttcaaggctgcagtgagctatgattgcgccaatgcattccagcctaggcaacagtgagac

SEQ ID NO: 43344 - DNA, 1049 bp, Homo sapiens
catatgaactcaaaaggaaataagggaagcaaggctagctgaaagcaagcaatcattcattgttaagatgttttgtttattcctaacagatgattttccttaaatcctaggtctgttgaaaatcacacacaaaaaattaaatgccaccaccgttgtcattcttttcttttccattttatgattcacaaatttgctcttccaataccaaacacctacaggttatagcttggtagttggtgctgggagggagatataaaggctgcaccttacatgttctctggctttggagaagtccttgatacagtaattgaaatgtcacacccagatatatataattatttccaacaaagaaaaacatttaagattataacagctacaaaaatacagagaatgagggcaaacatggaacaaaataataatgcaagtatccttctttaaaatttctattgcaaaaagatctaagcccactcagtcattcacattattggcttttattcccttggcaaataatgaacactggtagatgtggtgggcagaattatgcacccccaaattcatatggtgaagtcttaacccccagcatctcataatgtgactgtatttggaaatagggtctttaaggagataattgaagctaaatgtggtcattatgaaggttttttttttttttttttttttttttgagacagagtctcgctctgtcacccaggctggagtgcagtggtgcgatcttggctcactgcaaactccgtctcctgggttcacactattctcctgcctcagcctcccgagtagctgggactacaggcacccaccaccacgcccagctaattttttttgtatttttagtagagacggggtttcactgtgttagccaggatggtctcgatctcctgacctcatgatctgccctcctcggcctcccaaagtgctgggattacaggcttgagccaccccatcctgccaatgaagggtcttaaaccaatatgactgatgtctttatgagaagaagggattaggacccagaaacacagaagacaaatcacatg

SEQ ID NO: 43345 - DNA, 1076 bp, Homo sapiens
actcttgctgctataggaggtcctttccctcctgctgctactcgcctgcccaggactctgtttcctctatagctgctggtcctttctataatggctgctgcttgaggattggtgagcagggcaaggagacgccatcataggtaaacaaagcagggcttctggttaggctgtggtcctgtgtgcatcaggggctgcactgcgtcagcccttaccagttaagaaggactgagggttgaagaagccggagagccacacgacagccggaagggtaaggtcttgtgtccaagtatcgagttctcggcatcgcaggaggaggtcattgaacctggtttatgggagggaggaagaaaaacttgctgttcagtaaaatagccattttccagtatgttctgttgtgggcggttagggcagggtggtggtggaggagaagtataccactgctagctggtaaaatccttccctgacaatttgcagggcactgtccctttaaagggctagtttgtttcccattggagacttgatgactgtagcgtttacattagagcaagatacactgaggaatgtggaaaactcatttccatttatgcaacagcttttattagagcctcttcatgctatgtggtgactatacaaaggtcatcaccctatgacttggactgacaagcgccaacttggaggtatggacagggtgtctgaggaccagggatggcaaggctgtgatggtggttacaagaccagagttgccgggaaatctgattgataagcagagggaacagcatgtgcggaggcagtggagcacgtgacggcagtctaagcacgtgcagtagctgcctgaaagtggggaggaaaaaggttaattaggaaaacaagtcagccaggaatggcacgccggtgggttgagaaacgctgctgttacgtacatgttctcttctcggctcctcacaattgggcaaggtaggaagtatttgcagttgacctataaggaagctggctcacagaggctagggacagatgaacctcttcgataaaattaagagagaagtgaaaccttgaattgtaagtttcagaggctgctt

SEQ ID NO: 43346 - DNA, 1042 bp, Homo sapiens
tcttggaaagctgaatctgtatccattaaacagtaactccacgtttctccctcccctcagcatctggcaagtgccattctgctgtctccgaggattcaaccactctaggtacctgttataagtagaatcataccgttcttggttttatcgagactgggttattatcatttagcataacgtcttcaaagttcatccatgttgtggcatgtgtcataatttccttcctttttagtgttgaataatattcaattatatgtatgtctcacattttgtttatccatttatccatcgatggatacttggattgcttccaccttttggctcttgtgaatcatgatgccatgaataagggaaaggatataaagtttttcttaatcttcttaacactttgatgccctctactattactactaggcactagtagatatattaatactgttggtaatatttggaattctggcatttgcagtttccttggtgtcccacagagccctatgagttccaccgtgcatgttccctgaacaagtttgagatccagtctgtagatgggaagtttcttaccaacactcagattctcaggttctctgggaatgttggaggtcagacacaccagacccctgttcctgcagggcagtgatcagctggagtggaggagtggcctgccttccctgatatatgtgttcagcctaccagtcagcaccatcccatattgtcctacagctgacctactgccctgttacccacctgcttggccccaaagcctgttgagttggcataatgtatttcagagaaaagctctcaggtaatctgtatggcttataagggaaacctgcagtcctttctgaaaggggagctgtgaatatgactgctttgtagaaagatgtcttaggattctgggtgaaaatttttaattcccctcatgtaggaatgtcacagagtgtacctttttgacttagtattttcctagtaaaatacacctttcttaagaaaatggctacaaagtcagatgcatgtaaatgctttcagcaagggtttgttgatc

SEQ ID NO: 43347 - DNA, 1052 bp, Homo sapiens
taagagctgtcaacagtgcagctcatgggagctccagcttgctgcagctccgtaggagagaaactggtaggcactgaatgtcagtgttctcctcgtactctgttctagctccagagtacaggatggcccatttgagaaggaaatgatgctaaatgttcttgtaaataggcaggagcacgctgttgaaggggtaaaggggtatttttctggtattggtctcttagctgcaaagtgctcccatctgatcctgttgtttaacatgtaattccagagccccagaagctggtcacagaaaggacaatgatttgccactctaatagtcttgtatttaaaacgctccttggttgttctgtgttctgctggctaccccatccatagcagagcaggattctcaaaaatcaggcgaaaacctcagagatcataatgattctgatcaggtacacaggccaggaaacaatgagataattgtggcctaaaacaattacaaacattagagtaaattaatgaaaaagattagaacatcattggaatagaataagccaggcattacatttaaactgctcttgagagttttcctttactcaaagttatgttttagaatatttacctccagtatacagttttgttttagaaaagactcggctttattcaccaaaatggaatagattacaggctacttaaagtaggtagggatagagataagaaaatactactggggccattttgttctttttgtttatgaaaagcagtgctttctgtagtttttttgaaataggaccattcagaggcatatttggtaaataccactgaagttaacactcagaaaaatgtatcttccatagtagtaaatgctagcaccctgcatgcagcacagaaataaagtgtggagtctcacagtgcaaggggcctgagctttagttcaaataaatcgttgatgtttcctgcctgttttccttcatgatcatcagctgaggatagagggcttgctgactgggttagtacactgatcagatagtcagttgagcaccggttatgtgctaggcattggtagg

SEQ ID NO: 43348 - DNA, 1051 bp, Homo sapiens
aaaaatttaaatttaaacatctaaatctatatcttaactagttgttttaagtaaagcaagtcccatacactttgccagggatttgtaaaaagcaaacacatacttactaaaatcctgttgtttctgggtattcagtccttttctgctcagtcttctgacttaaacacataatggaataattaagttatagactagctttagtttatattaagcagattgaagtcaaacatttcattatgagtgcaaaatatatactttcagtaaggtcacactgtttttacacacacacatatacacacacacataaattatgcacttttacatcaaataacacataaatccaatttcaaattgcctctccaagtgcatggaatgatccataatgtttaggaaaaatgaataagttgcattgtacctagacctcttcagccctgactcatgatccattcctaatgatacatacatctttttgtttttaattttcagatgtaacatttattcatgaaggaaataaaacttttttggataatcttgtcaattttgaaaagctggtacgtaaatttcattacttctcccttttttacagtaacagaaatgtatgcctttctttcctgctctaggaaataaatagttttagtacttttctccattggatgcatggcgaattcaaggagcttatttgcttcattcaaggagcttatttgctgcatgttgtacgctgccaacaaaatgtattccaattaacaacaagtatgttagcaaggtttttgtgaaccaaatatgaaaatctgcgttttgtttttaaaaatggaatatgataagatgaagaactgagggtatattattgaaccagagctaaaactgtaaggctgctgtcaggaggaatccacactcaggagattatgttttactgctttataggcatctctcagtgtctcagcctgcatgctttcaaggcacagagggaaaaagttcctctcctggggatatatgtttgtctctcaggactccaagcttaaatgtgaggctggaatttgcagggtcttgtgtg

SEQ ID NO: 43349 - DNA, 1071 bp, Homo sapiens
agtccccatctcttcatggagccatcgctggggcgggtctttctcactggctcctgttgtatgtataattgagaaacctgcataccacgtaggttaacccaaactactgataatagttttatgtccagatatatgtctactggaaagacattttatgtaacgttgtctgcaggatattaagctatcataataatgttaatcacttattaccagatctgtatgtgctgagtaatttacatacggtatctcgtttaacacttccagtaaccccacgagagaggctgagtaaccactgtagcttcatacagccaagtcagggagagtgcttcgatttttaaatgcaattatatgtttgactctgaagcccctgcacatttctttcatttgtacatgccttacttggacctttcctgtgctgtccttcagcaggccacagtcctgtgtaattctgtcagtgaaacataaccaactgggtgctgcacagcatttttgagtaaataatgagattgattttaccgctccccatgaaggaggacgatctgacatgtagctactgtggggcttgttgcggtagaggaaacccccactctgaatatcctctatgcctcctctgccacccatacgtggccttctcaggtagctccctcctgtgcatccccacggctcaatctaccactgtccaaggccaccttcagaaaagaaggcaggcctgggcaatgccttgatggaataaataggtgctgtgaaatatgttccaagagaagccagactccatcctaccctcaaaagcctcccctgccaactcttgacaccacctaaaattgtcctactggaatcatagatttagatatttcatcaccaaaagatgtcagttaaaatctaacattgtaagggaagaataatacctgaaaacaccagtacctactatcactttcacatagattaatcttcttagaaaacaggaattagagcactgaaggaatgagatagaaaaatttaatgttccttggcaagggcaatggacaaccttgaataaatagagttatttaaccttgaataaatagagttaat

SEQ ID NO: 43350 - DNA, 1005 bp, Homo sapiens
cagagtgatcttttcatcctaattttggttctaattctcagagttggatatataaaatgtgacctttgatgtcttggttcagtttgatctgtatttgaaggcattgccagccattttcatttactgatggcttctgtagaacaattttagttaacccaagttctgccaatgctgattggcatagtgtgcatatctcagaattattatgacaatttgcactgtttgatagtctcccagggaaggtgtttgttcttccaaacaaaccaacaaacaaacatccaaggcactgtgtcttcgtcagcacattctagaaatccacagtagtgagatcaggatgaattaatattgttaagtattcttaacactccttgaatgtacctttcctacttttgataattgagaaaattgagaaccatatcatattgcagatcgtgtacttgagcttctggaaattttcagtgtacatgtgttatttgtgagtaggcacagctgcatataacagaaaagctctaatgatgatttaaacatggtataaatgtatttctctctcatgtgaaaataagtatggagaaatacagtccgcagccgataaagccactctgatatcagtcagttctgagattccttatttgaacttgatttcctgggccctgatggacactagcataactgtccaggcagcaggatgaagaaagtcatgaagagcacacttgcccgtcacacacggcttctgcttttacctcatggaccaaaacttagtcttgtggccacatctagctgcaagtgaagctggcaaatatattgtatattgttttgttgtgactttaaaatatcaggggagcaacatgcccagggagaaaaaatcaaagtttgattcccaaaaaaggggcaaatggcatgtaattttgtaaatagaagcttatgttaagtttgttttgatattgtagacccaataccataattatgtatttgtttcttcaaagaaatatggacatactatgtttt

SEQ ID NO: 43351 - DNA, 1028 bp, Homo sapiens
ttcaatttttgaaaggcaaaatattttaccaagaccatgatttaatccaggcagtggaaaagatgagcttattataaggtgaactttgcggtggtgtcatgtcctgggactgtggttttaagtatatcttcgctttttctccaactcttaaggcaggggtgatgtgcaagctccaggaaagagatgaaatcggacgaattgaactagtccagaagctggcaaaagaaaactatcagtttttgcagacggacaaaaaagaacaggagaagtctgaacacgtaagccttttgcctcttggggatgcaggtttgaaggggtggaaaatgtttttgcctgattgcatgtttgaacgaaagactattttattttaaattctttaggttttgggggtttttttccccccaagagcatcctccttagtaaaaatgacagctgctcatagctctaagcaagtggcttatgacacaggatttataagagactcttctcaaaagtaaattatgtagaaatatgagaatacatttaagcaaatatgaatccttatctatttatgatcctgcttgggtggctttcaagtttgattttggaagttttgccttatcatatagtttgtagaacatgaattttgaaaaaacatttcaacatatttttatgtttagtacagaggtggatctagttgccaaatgaatgtgtcctaagtcactagaaatagatgaaaacacaaaaagagattatagatgctctcaccaagtgggagggtcagaagggagttttcccagtatcttatgaaggcttgtgttccaacaagagttatattgtttgaatatagttaaagctggaggaaagggacgttccgcttggtcctcctgaaagcagttattcagattgagccttagaactgagagtgctgccgtcatgctgggaagacaatgggaccactttcttgtgccacacattgttatctgttgacttggttgttgttggttatgagacttcactctcagtgctgcactatccaggattgctca

SEQ ID NO: 43352 - DNA, 1035 bp, Homo sapiens
aggaaaaaggacatggctgtaatggaccctttccattacataaagtctacaaaaacactctaggaattatctggaagcagtgtgactttccgcattctaacttatcagcttagcctcctttctaatatcctctggtgctacacattttgttaacttggaaacctcttttcatcgactgcaagtctctgttgctgtgataaagctggcaggccaagaagggcctttgaatgacacagctcatcagtttccacccttgaagttctgagcattgttttatttttaaacatgaattcttccagtgtttgtgacaaatagagtattcagaattgatcagacaaatttaaaatattcatattacaacccaggggtctgcttgctcaaacctaaagtaaatacggggaagtgtttatggtgaattatgtattactttcaaagccacaattcttaaggatgtaaatttaggaaatcagctaaactttgaagcatttaaaagatctgagaagtacttgggaagcatccaaagacaggaaatagaaacatgaacattcttaaataggagataaaaacgtattctagacttccatctcatatttacttaaaatcaacaaccagaacaaaacctattaggttgtttctgttttttaaggctaagtttttatgttggaaattgtagaaatagaaaagacaaacatctcatctgggtttgaatgaaatttgtgacttttgttcatagtctaattgtcaaacacctgaggtgatgtgagttaggctaagttgtgcattatttatattagatgcctatttggtaagatgggtatgtgggaggtccttataaagggacagggagcatgtcatgtgtcctctatgctgctagattggatgaagtcagccatcacatgggtggtgaaagagaagagagtctgagtgtctggaataaaacattaacccggtggtggtgggggggaatttatgtctctctcttctgatccgtagtcagacgcgttatccattgcgctactgatgtctctctcttaa

SEQ ID NO: 43353 - DNA, 1034 bp, Homo sapiens
ttcatgatatcaaagatctcaagaaaaatctaattctcattcttccaccatcccacttcttttttcataggaatttgctttgttaagcaaaacttacttgtctagaatatagacatcatgggtaggggaaatggggagatgttgatcaaagcatacaaactttcatttattaaattgagcaagttctggaggtctaatgtacagcatgagtggtgatgggtgttaataaatttgattgtgctaatcacagtgtattcacaaataatcatgtggcacaccttgaatagatatctttgttaattacatatttttaagtataaaaagattttggctttatgctaagtgagacgggaagtcattcaaggattttgagtagagggacatgaactaacttacattttagcaagactatgctggcttctgagtccaggtgagagatgttgtggctgggaccacagtggcagtgatggaggtggtgagacgtggtcaggtgagagatatgtcttgaagagccagtaggatttcagggtggatacaaggcagagtatgagagaaaggggttcaagaatgacttccagttggaaggatggagtttccatcaattaaggtgaggaagactataggaagggcagggctttttgttattttccttttgggtaggagtggacataatgataatgcatccagtttgatggttagagggatgagggtggaggaccataggtttttgtcatctctgcatcctcacagtgacacccttagatattgcagacctcttgaacttacagagacatctgcctagagcaccaggactcagcactctcccctggagagttaccaggtctggcttggggcattggtaagcagagaccttgaaaggtaacccagggaattcctaaaggagagcatctgttggcataaaccctcagggagggatcttccttccaggggtcactctatttctcttctctttctgtcttatgtcacttgtcactgtcattacctgctgattccagtaagagtttctttatttt

SEQ ID NO: 43354 - DNA, 1026 bp, Homo sapiens
agtctctctgaagagctgaaagagatcttactggttatattggtagaaattaagtaagaaaactgaggctccacaattggtatcctgctgaaggtcatcatgaggaagttaagagtcaggagccccttaggctgggcttctcagtccagggtctctgagaagttagcctcaggctgcggtgaagggtggggctaaagcggaacttctcaaactgaagcctgcatcagaatccctggagggcttgttaaaacacatattccagggcctcagccttagagactttggttcaacagctcatggacagggcccaatcatctgcctttttatcaagttttagggtatgctgttgctgcatccacagaccacactttgtaacactggactagaaggcctcaaaagtttggtgactgtcatcatcagaacattgcttaggtcaggagtatgcctggctgtttaccacctccgtgatgaaggccagacccaaatagaggactctgactataagaactttattgaatgaataattttggaaactcccccttggtggtttctgcagagtaactggcagtttaaaaaaagaaaaaagtggggaggatttggagcatcatcgcccatggcagctatgctggctattctgtttgtccatcctgagtcctctctgcccttccctgttctggtctgcaccgtggaggctgcctttgtggatgttcatcaccaggactctgttgccctctggcttaggttgggttcagtcagtggtaggtcaggaggagcaagaggccagcagtatctattcttcctgcttgctctctttttctctgtggtgcttgcagtgtctgtgaccgcctataatggcagctgaccctgggcagtccctcctcaatcgcgtcacctctctccagcctccagtacagctgtgtctccccttggctgtcaggcctcgaactgttcaaggcttgtcatgactggtccctttgtgctgtagcatctccttgggcctctgaaccttgcccacacatctttgat

SEQ ID NO: 43355 - DNA, 1028 bp, Homo sapiens
tgtttctattatccttgacggttactttttcatggcacagaatactgaagacatgagggctgccaggcagtctgcgacaagaattgctgagggtttctgtataaatagatctatagtatttatttgcgttcatactcatgtttcttgctgcctgggagggtgtcgtataccttgtcaatatacctatttagttttattttttaattactctgaatgtggttacctcagataatgtatgctttattaaccctctttgattctaatactgtattatttctttttgggactttccaaacacatttcgtaactgcatagccagtttttattgaaggaagtttgattgtcagtttttccagtgttggaaacccatactttttgactatttatttgactgtttatttcccctttcttctgccttggaactacctttgtgattttggaatcttccccatcaaaggagtaggaagggggttgaaagaaggagaaaaacaagtgaaatatgaacttgtcttaggcagctcaggctgtcataacaaaataccgtagactgggtggtttaaacaacaggaatttattttctcacagctcaggatgctgggaagcctgagatcaatgtgtaggctgattaggtttctggtgagggctctcttcctggcctgcagatgaccactttctcgtatatcctctcatggccttcccttggtaaacgcagaggaagagagggctccctcttctcataaggccactaatcccatcatgagggccccaccatcatgacctagtctaaccctaaataattatcaaaggcctcatctccaaataatgtcatgtttggggttagggcttcaacataagaattttgtagggggcatacacttaacagtccaaaacacagggggtttgaaagaaagagagatacaagtagaatatgtatcagactggttggttggtgacttgttagcatctgggattgtctggttaaccaccttggattgggcagtgatgctaatgcaaacaaatcatggctt

SEQ ID NO: 43356 - DNA, 1032 bp, Homo sapiens
ttgagaggttgaggcaggagaattgcttgaaccctggagatggaagttgcagtgagccaagatcccaccactgcactgcattccagcctgggacagagcgagactccatcaaaaaaaaaaaaaaatttacaaaaaacaaaaaaaagaccattgcatgctcatatttcacatacacaagttgtagttgaaaacaacaatttttaaggaaaagtttttggagaaaaactcaaaattctgcaaaggggggaaagaccatagttaactgaatttaagaatagttcagacatgcagattaaaacctcactgcttttgcttctacagcctttcctttgccagcctgcattactgtgagtcagttacacttaaaagggaaatctcttttgaaaagcaaaccctcccaagagattaatatctattaggtgtcaacggcatgtcttttaacagttgattctaactgcctctttattcccacttcccaaacacaaatgtctaatgcacacagctgaaccttgtcttctaactttattcaatcaacaaatatttattgagcatttaacacatgcatgcactaccctggtctcttgggatatgtcagtgaacaaacagataagaatccctgtcctctagaaacttacattctagcaacttaaaggaaacttactattcagatattaatgtcattaagcatgttgatttctaaggaaagtcgagtccactacagtattgtgatatagtgccggtttctttttttctttttttttcttttgagagggagtcttgctctgtctcccaggctggagtgcagcggcacaatctcagttcgctgtaacctccgcctcctgggttcaagaaattctcccacctcagcctcctgagtagctgggactactctggcatgcaccatcacgcctggctaatttttgtatttttagcagagatggagtttcgctatgttgaccaggctggtctcaacctcctgacctcaagtgatccacctgcctcagcctcccaaagtgctgggattataggcga

SEQ ID NO: 43357 - DNA, 1042 bp, Homo sapiens
ttctcattatacacttatcacagggcttttaattcccacatactttacacaggcaccaaatgtatcatttcttttcattttctaggctatactgactggaagcctggtagctttgtgcaactttcaggccactaaactggccaagacacaactggtaggcacaccaaatttctggcaggagcagcagtgtggaatccatttcccaccaccttccaagactaggagttatatatacttcattttatcagcagccagcccttcaaagggaaatgttagctctcacatgtttcagcttcatctagaaaatctcaataaaaaagacaagttattgctgatcatctttcagatttaagcatgcatgaaagtgagaaccttgttccctgctcatacatcttacatacttgcagaccagaccatggtagaagctggaagtacaaagtggacatctaccaaacttactccaattattttaatgcaatcttcactaacagtattatgtagaaaaataaaacatgtgggacaagtgcgaaaaactgcataggacaccaagcatatactggaagtatttcaggagaagcagtgcgtatgactttgttggccatgggagagctcaggatgctgttccttgggaagggaacccaacaacaacaagggaagaaaacgtgggggagtttctcgggacaggaaatacctgagcagaaccttaaaagatgggttgaaaattgtcaggtaaagtaaaaaccttctgcacagcaaaagaaacgatcgacaaaatgaaaaagaaacctatggaatggaagaaagtatttgcaaatcatatacactgataaagggttcatgtccaatgtatgttagagtgtgcctacaactcaataatgaaataacaaaatctgattaaaaaatgagcaaagaaaatgaatagacgttttcccaaaaagatgtacacttgaccaatagatatatgaaaatatgctcaataatcacgtcactaattatcagagttacgcaaattaaaaccacagtgagatattacctcatgcta

SEQ ID NO: 43358 - DNA, 1053 bp, Homo sapiens
tcatattccaatggaagtgtccatcagagtggttctaaatcttggctacgcattggaattgccagtattccagggtttgcacaacttgcttgtaagaaatcttagggcagtgtttatcaacctatagcaggcttcagaaccacctggaggtttgttaaaacagatttttgggccctgtccccaaagttcccgattctgtctttctggggttggcctaagaatctgtatttctaacaaatttcctgtggctccaggttggggacctcactttgtgaaccactggcatagggcattgtcttgcaaagcgcagtcctgtcccagagtatccaggttggaattagggactcaaatgcaggttcttggccctggcccaaatctataggatcagatctcagagggtagggaccggggatctgcctcataaacaagtgttccagatgattctttcacttgcagaagcatgagaactgtcatccaatgggtctttgaactccttcatctcatatacagcccagcttttaaatactgtcacattttgaacgacaactgcacagcagaactgcatttacagttgaccattagctgctgctgtgacttgcttctggttatttaaaatgcccacaagggatctcttagcccatgcttcataaataaagcccaaagaagaaatatttattcattcatttttttaaaaactctccagttgtcaagtttccgactcatcagggggaaagactgattagtggttgtttcatgcttccccacacaagtgaaatcaggaggagaaaagcattctataaaagagcttatttcccttcctcttcgcctctcctgcctcctcatttacccttagctattcagtttcatcagcccttgtgagaatatagctctgactttgagtttaaaggggttgggctgcttggagagcagtgccctccctgctgctcttgcatctgggaagctggatcaccacggggacttcccccaagccggaaaaggtcgaccaaatccccattcagaggtggagggcgggaagccaggcccaggctcgga

SEQ ID NO: 43359 - DNA, 1028 bp, Homo sapiens
cttcaaaacagagcagaaatatgagaaatcaaaatagtttatcccctgttccctgccttcctactcttcttgggcaggattcaaaggagaaaaagctcagcaaaaaagcaatctccagggactggtattgggattagcaactgccaggaagacaaataattctcaccttagaaatcctggttgttcttcctgaacacgtgagaaaacgggctccctgtgcttgcatagaaaagtgaagatttctcgagcttggggtaagattctcagccctgggcatcactgcaagggaaccatgtagttcctgcttactctgcagtttttaccccgagactgaaggagttcgctcaggacccagcctatcaatctattgatttggggagaggagagagtaaaagtcatttatcctttctctgtaatcctttaactgtacttttctcttgacgtttgttccagttgttaatttattgccttgcagctccaaaccgtcctttttgtcttgctttgtgatcctgaagctagaatctgcacattaccgcattaccggctcttctttgaccggcgggtttgggtttggtgtatggcgcggggaggggggggattgtctgccaatagagggcgctgcagggagcctgcaaagctgaaaggaagggaggggtcactttctttccgtttctcacacaaatatgagcaaattggagtgtggagggtctcaggagcgttcatttcagtggtgacagttctcagggtgctgtgacgagcaccctctggcagcctgtttcttctttcctgcagtagccacgccctcgcttccagagtctttccttacttacctttccctcagtcaagggtggtagcagccttctgtaatttctacctcaattatatcttaaacttttcctttatgctttttaggagttaatcatcctttgtctggttatcagttctttatactggatttcccctgtttaaattactaatgaatcccagtgaagaaaagcctgggacccaatggcttcactgctgaattc

SEQ ID NO: 43360 - DNA, 1043 bp, Homo sapiens
aatataggtacatgtaataatttatgtctatgcacacctcttttatttctgtatttatctgaatgtgagtgtgcatatcttttttttaaacatgagtcagcatgataactaactacagtccagcactggagtttattctagcttttctcctttccatatttgtaacttctttatccaatagtgagaaactggctctgcagtatgcactcatgcatcacttaaatgataggaatatattctgagaaatgtgtcgttagatgtttttcattgtgtaaacattgtagagtgtacttacgctaacctagatggtagagcctattatacatgtaggctatctgcaagcctagtgctcctagctacaaatctgttgagcatgctactctattgaatactgtaggcagctgtatcacggtggtaagtgtttgtctttctaaacagaaatgaaacagtaaaaatacagtaaaagaataaaaatggtacacctgtataaactttccataaatagagctggcaggactggaagctgctctgggtgagttagtgagcaagtggtgagtgaaagtgaaaggttaggacattctgtacactaatatagactgcataaaacactgaagacttaggttacactaaacttataaaaaacattcttcaataattagccttagcttcctgtaacttaccatataaacttttttgactcttttgtagtaacacttagcttaaaacatgctgtacagctgtataacatcattatatccctattttacaagcttttttatatattaaattatttattcttttttacttcttaaaatttttgttaaaaatgaagatacaaacatacacataggcctaggcctacacagggtccagatcatcaatatcactgctttccacctctatatcttgtcccactgaaaggtcttcaggaatcataacacacacagagctgtgatgtcccatgataaaaattccttcttctggaatacctcctgaagtacctacctgaggctgttttacaattaacctttaaaaaaaactgt

SEQ ID NO: 43361 - DNA, 1029 bp, Homo sapiens
attttaaaatgctatggttttaacaaggtgctgcttcctatttaatttaggtgtcatgcattgtataagataaagtacactctgactaagcagctgtggtttctatttctccatgagttgcaagccaactgataacctgggattatagaacttaaaaagacgtttttctcccttattctgggtgcaattttttaaaaaaacattacttttctagattttagtgactttgtatgggtaccaaggattagagtaaatatgacagttggtgttgtccccactattcttgcagcacctccccccacacccacttctttcacttactgatagaagggcctactctggctggtcaaacactgggactagctccccttttagctaagagaggtgtggaagcttgattcttccccttctttgtgccaccttttttcactgcgtgtacgaggtcctattttagcgtgctcttgctttttgtgtccctttggttttttgcttctctgtaagtcttttcatctactgttccctcctcctccctgttttgagattccgtttctattgctagaaagctgtagctggttgctgcaatctgcatgccaggggcttcgtgtaagagtggataatgcattccttttccatactagagtttatctttcattttatgcacactggctatattcccttcctaggactaccgttacggtgattttcaccccaacattcaattcaagttatatgagattggtgttaaggttgtctttccagtacttgtctatcattgtcttttcctttatactgtatatttaattttatgtctaaaccagttcccatgttgaaatagagacagggtcttgctgtgttacccaggctggtggtcttgaacttctggtttcaagtgatcttcgatcttggcctcccaaagtgctgggattataggaatgggccaccacacctggctccaggttgttcttttacttcctccacctcaactctcactaaaaccagcaactgcggatttaactttgtgtgtaattt

SEQ ID NO: 43362 - DNA, 1030 bp, Homo sapiens
gaataatgtaactgaaaaatattttttaaaaaccacttaaaaagaaaaataatttgatgggtactttaagcattgtagatagaaattaatgtataatagtgtcctcccagtctttgtatgaaaaattaaaactctctagtcctttaatgagcatgaatttatacttctacatttgttgcttagtaaaattatactcagtactttgagttattcagatttatgtttaatattgttaaattcttcatcagagagcataaatatattgtcttctatactttgtaacttgtgcatatctaaagaaactaacaacgaacattttgggagatgtttttgtgtttttttatagtagagttttagagtacatttgtcttaataggaagtttttaccataaacccaagattttatttcacgtattgttgctttctcttatatggaacttattgtgtacctcttacctttatttctaatcatttagtgatactaatcttttcatagtaaatatatttgtttctaattgtattcctagagtttacattcctaaagaataaacgacgactttggctatttttgtgtgttccctaccttcttaaggctatggaaataaactggagtttagttttttgaatttttgtatatttgtgtaaatgttctccatatgtagtactttatacaacaagtgttgcctcttgttttattgaaataaaaactgaaaaaaatattttttccagatcagtttactcatttaaaaaattattataaaaatttgcagaagttttgatatgaaggaagagaataaaggaggaagacttaggtaagttgagccattgagagcttttgggggtaagtgataagacaatgacctcattcctggctttgtgctttacatgtcatagggctgaggagtatgacaggtccactcgtattcatccaaagatgaagatgagctctatgggccatgcaccagtggcggattatttgtcatatcagaagcacaggcaaatttaggtaacatcactttgtccttctaac

SEQ ID NO: 43363 - DNA, 1009 bp, Homo sapiens
aaatcagattgctggtaggtgtgttgttttgaagtgttttatctggatttagcatgtgaagatccctttcaattattaaggtataataggctgtaaagctgatttaccctactgctggactttggaaatcctagttagtttggactcctataattcagagcatacgtcattggaagacttcctggaaatcagtgtaaatcttgcaacatagctctcaagataccactgtataatatgtaattgtttgtctgcaaatgcatttttcatctataaaatgtcatgaaagaaaataaaggtagtgaaatatggacaaaggacatttatatattaactaaagttgtttatgtttgtgttcttaaatttaaaacacgaagaaaaagaaatgtctttcttgttagtgaacaggcctgttttaaatatcttagtatgatatcaaaagaataatcaatttagttacctcccaactaaaaagtaaaaatgaaaaagacgacatggcagaagttgaaacaaacttgtatgtatctgtatgtgacctctagatggaaataaaagtttgatgtttgctagccgtggtccttttggctatggttgcggttcccctgtaaagcaaatgtacttaagtcatcattcagagtgagagagagaaagcacggctgaggctgagtcagttgaccgttgaggaagacctaaggagctgtccagttcttggctctttttcactgtgactgcacagcggtttccttcttcatagtcccttgctgtagtcaccaagagagcatgctagtgttttcctcttgttcctgcttatgcagagctcagatatatgaaaaatttgtatgctttgaaggctgccaaagcatttatactctggacatagttttaactgcaactgctttggctaccagtttaaaccgagttcttcaaaaagcatgaactcgttttcattcattagccctgtttacaatgtggattttgacataaatgaatttgattttcttttagctccagt

SEQ ID NO: 43364 - DNA, 1028 bp, Homo sapiens
tactgctttgacctcactttaagaccactctcaccctggttcattagactccttcattctaacacttcaacgtactaagccattctgccttaggggcattgtctagttatttggagtatttgagctgaaatttgaatagtgaaaggtatgttgacttcccttactccagattgttgtgtggctagcagtttttcatcattcaaacctcagcttaaacatctcttcttcaaagaggttttcccagaccacccatctaagtacttttatcccctattaccctacttcctctttcccatcttatttttttattgcattttctgctatttaaattatcttgtttacttggttccgatattacagtgtgagctctgttcccttattatatagtgagggaagaatctatctttttggctgttgtatccccagcatctaaatcaatgtctgacatattataggtgctcaacaaatttcagttgaatgcatgaataagtgagtgaatgataaagaaatgtataacatagggtgagcaagttgttctttcttttcttgttttgttgaagaacagtataacaacatgatagtaaactagattaggggatatttacttataattccagtatttaaagaattttcatttagttttttctatgcatgtatgttttcatggttgtactctatttaaacttttttggtattttgtttttgtttagttaatattgtcagacattttccctagttctcctagtaaatacagttattttaatggctacatgatatcacattgagttaatattccatcatttgcttaatcattcttctaatatgttaagaaatttgtttctgagttttgctattataaataacactgtaaggaatagcttaatgaatacagataacatttttctccattgaacagaatatattataaacataaaatgactatattaaaggatatttgttctggtatggcatttaaaatatctacatctcataaattgtaaaagaatgtgtatgactttgttttgggg

SEQ ID NO: 43365 - DNA, 1035 bp, Homo sapiens
tctttttttcctctttctccttgcctctttgttttcctagtttttggaaagaagaaagcaattggcccttttttctttttttctgttggagctcttctctttttcttttacttatttgtctttatttattattgcatttcctctaatttctcctctttctatcttttctgggtagaagagggaaacgagtgaatgaggttttctcatggaagacgccaagtaaaactttcctttttgcttttttttttttttccatctccctttaccataaaagaatatacgtaattaagccatgtgaatgtactggtgtgtttgcatatctgagtcaccaaaaattattacacagccgacaaatacattaaattagagcaattaatggatatttattctcttttattatcagtaacagaagaatctttcaattttctttacagcccaatctcacattgtagtgtttttaaaatgaattttgaaaagttttaattgtttacattttaaaatattttaaagctatcctagaatgtattttaggattctgtaacgcttcatagatctgccatttttttcttaaggttaagaattattcacaacatattttaatggaaagtattataatggaagtttaaaaattactttattcttaacatttctacacatttcagaatacgcatctctggccatggttttgctgttgttatcaattcaagtttctagaattgtattttgaccagtcctgttatttgcttggctctgttttttatttttatttttttagtaaactttattttttagagcagttttaggttaacagccaaattgagtggaaaataagagagttcttaaatacctcatgaccccacattcatagcctcccccagtatatcaacatcccgcaccagagtggtacgtttgtaaggacctataatttaaattttgaccagacagtgcatcctcatgtcaattaaataggatgatttttaaagaaaggttggttttaactgaggtattattttggagagatctgtttgacaacta

SEQ ID NO: 43366 - DNA, 1646 bp, Homo sapiens
tttagtatgaggcatctgtcttcaaattttgttgttgttgttgttgttttttgagacagagtctcgttctgttgcccaggccggagtgcagtggcactttctcagctcactgcaacctctgcctcccgggttcaagcgattctcctgcctcagcctcccgagtagctgggactacaggtgcgtggcaccacacacctggctaatttttgtatttttactaaagacggggtttcaccatgttggccaggctgatctttaactcctgacctcgtgatccacctgcctcaggctcccaaaatgctgggattacaggcgtgagccatcgcgcccagcgtcaaattttgccaagaataatataccaacataattttccattaggtgcttttcaactccagttatgccttctgaaatgtgagaaagctaagctagtatttaagaaggtcactacctttgaactagtacagtgtgagaaaatttaaatgtttttgctataatagtatttaaattcatttggctcctttagatcttgttttttaaaacaccattcatgaacacaacattttctccctctctacagacaaaattaacttttcccacattcattaaataaaatgatgacagaattgtgaataaaaggtattattactgcactaatatttaagatacccttcctttcatttatcagtggtagcctgggtccatggtattttccagagcttgtcttttcagacaaacagctgtctttttgcctttgggtgtttcacagaaaatattttacctcgtgacggtcagctagtatataagctgaacattgtaattcatgtttttaatgaatgatctagttttagcctagatgatatatatatatataaagtagtaatctttctattcactaatttttttaaacatttatattttggttcatttattcttcaattttatagttagatatatatgttagacatgtatacacagtatacatagacatgtatacatgtaactatgtatacatagttacatatgttagacatcaatgtgttttaaatatatataatgcattttatatatataaattatatatataatttagatttatttttattcagaggattaggaatctgctgtttatttgactgttattcccttttatataaattcccccagtattaggttactcttgatcaaatgacggaaatggaatgttgcctcgagatcttttgtgtcatacttttgaaatattgaagaatgccttaatctcgtctttatgtaagcagttgcagtaaaacctttttttcccccgtcgggagaattgtgaaaggtttccaaatagtccacatttgcttgcccttctggtaaataaaactctcttattaaacttaaaaaaaattctattcacttatatatcccaaggtgaaatatgacccacttttaaagaatctaccaaagtataagcaatggcaattttcatttcttattttgtttatctataatatgttccctcagcaaagatttgcgtatgagggcctgtggtgagtgctgtggttgcagagatgataagacagttcttgccctcaaggagctcacagtaaagtgaaaatgaatcaaatgtctttattgtaaaaatttatgctgtttaatttatgcac

SEQ ID NO: 43367 - DNA, 1052 bp, Homo sapiens
acaatacaacttcatatgtagaaaaccccaaagattccacaaaaaaaacccagttagggctactaaacaaattcagcacacaaaaatccatcgtatttctatacactaacaatgagcaacctggaaacaaagtttttagaattccatttacaatagcagaataatacttttttttttttaattgagacgttcttgttttgagtttcgctcttgttgcccaggctggactataatggcgcaatcgcggctcacagcaacctccacctcccaagttcaagcgattctcctgcctcagcctcccaagtagccgggattacaggcatgcgccaccacgcccggctaattttgtattttcagtagagacggggtttctccatgttggtgcggctggtcttgaactcccgatctcaggtgatctgcctgcctcggcctcccaaagtgctaggattacagacatcagccaccgtgagcagcctagcagaataatcttaaccacaggagcaaaagacttgtacaatgaagactacaaaacactgctgaaagaacttacagatgccagtaaatggaaagatacttcatattcatggatgggaagacaatattgtaaagatgccaatactacccaatgcagtctacagattcagtgcaatctatatcaagatcacaatattttttgaagaaacagaaaaatccaacctaaactttatgtggggccagacacggtggctcacacctgtaatcccagccctttgggaggccaaggcgggtgcatcacctgaggttaggagtttaagaccagcctagccaaaatggtgaaacctcatctctactaaaaatacaaaaaattagctgggcatggtggcgggcacctgtaacctcagctacttgggaggctgaggcaggagaattgcttgaatctgtgagccgagattgtgccactgtactacagcctgggcaacaaaagcgaaactccatctcaaaaaaaaaaaaaaaattatatggactctcaaggaaccccaaatagccaaaacaatcttgtaaaagaacaaagt

SEQ ID NO: 43368 - DNA, 1033 bp, Homo sapiens
tgttttcaggatgactgtatgagatcttcttgacctattaggtaaggtctggtcaacttcttatggtagcttttccttaaactttcctggtattcctactgcatgagaaggtgtccttcctaaagctaatgttaacaaaagcctgatttgtagcaaataaacatgggtgtcctggctttcttttctaacagcaatcagaaacggagactgttcatctgtttatcccagctctatcagtcggtgccatcatcggcaagcagggccagcacatcaagcagctttctcgctttgctggagcttcaattaaggtactgttctaccagctgtggttctctggttctttaagtaagttacagaaatatgaatcttcttgccactttataatttgaatagaatgtaaaagacactgttagggttacataaggatatgaagaaacccccaaacaacagtggcttacaccaaggaggctaacttctctgtgcagaaaacacagttaggaggtgaacatccgggctgggtgttggctctgcccccaccaagtccttggacctaagttccttccaagccaccttccccaggtacggccttggtccctcttggttccagattgacaccattcagtgctccaggaatcaggtctgttgcccagccagtaggagaggagaacataataaagagcttttcttctagggaggtttcttgttagctactgtgggatatttctacctatatttccattgcccagaacttggccagacgaagttgaaggggcaaaatacaggctatgcacagtcagctaaacattttgtaactacagaaggtaacataccagaggacaaataatggtgtctgccgtaatagataactgtgtgttctgaagattctgtattttgatgccttatttaaggaaaataaaggttggccaggtgcggtggctcacacctgtaatcccagcactttgggaggccaaagcaggcaaattgcttgaccccaggagctgaagaccagactgtgcaacatggtgagacccca

SEQ ID NO: 43369 - DNA, 1682 bp, Homo sapiens
atacaacaacatggacagtcttaacaatctgtgttctttgcagaattccagtggatattttattctacatgtgttccaggcagtgatacaatggagttctcaactttataactgaatattttcctaaatcatttatccaaatcatatatttccctaaatcatatattactgtttttatttcttattttacattgattgacaatctgtaaagttcagcattaattattccctgccttaaggggaaaaaaatgtttttcccatacttaaattataattatcccagacaatttgaatgaaaatccctgggggtaggggtgaggcaaaggtatcaattttgaaagctcccgagatgactccaatgtgtagccaaggctaacaacaactgtttgattagttaagaacttgtgtcccacttaaataaataaaaatctcagtgggagcaggtggaagctcaaaaatgtgtagtttcataaaggtcatcaggagttttatgctacccgtttattgtcaggaactgttcttttcaagagatggggactcactatgttgcccaggctggaattgaactcctgggtgcaagtgatcctcccacctctgactcccaagtagctgggactacaggcacacaccatcacgcccagctaagaacttctgttctacaaagaatgtttactagtctttggaggggcgcttcaatgttgaaaagaacagtttctatcagtaccaattgcaagggagaaaaagttcaggataagcacaaatacatactagttgtgtatatccctttttctaccttgttctatgctttgaagagtgaaaaaaaactcacctctttctctctggaccacctgccatcccaactcgtaggaaatatcatgccaaaaacctctgtgggatgttgccgttatgtctgtttttacccttctaactctattttggcatactacatgtatcaggattaggtttgggtatgtattgttactagaaaaaaaaatggcttaaattcgttttcctttttcatgagaagagttcaagggtagacaatccaaggctggaagtggttccaccatatccttcaggactggtgcttctatctgccttgtgtgccattccctggcccaggataactgctcaagctccaactattgggtctgtttccagccaacaagaaggataaaggattgctggatgtggtgacagacacctgtagtcccagctactggggaggcggaggtgggaggattgcttgagcccaggaatttcagtccagcctgggcaatgtggtgagacctcatttcaaactgaaaaaaggataaaggatcaaaattggcagcatccttatttaaggacactgcctgaggatagcttttcatacttctgtttgcctcatgttggccagaacataccactggctgtgtctagctgcaagagaagctgggagacaatccctgtgtgagggcagcaatgtgcccattaaacacaggatctgttactaaaggaaaatacatgttggggacagctatttgtctgcttcactggatttggcactattgcctgttaaaggagcctcccagagcctggaagagaggaagcaagcttttaagttctctcaaaaagcagaatctaaattctggaggagaaaattccatattccagattcccattcctgtggttattttcat

SEQ ID NO: 43370 - DNA, 1050 bp, Homo sapiens
gcaattcacctgccgtttctagtatgttttggcctggaaatcatgtaacagaatgatagccatcaaaatttcagctacaagtgaagtgtgcatagattcattacgtgccccctgaagtggctggcatgtttttactttgatgctaaaggggactggtagaaagaaccctggagtcagagcccaggtctggcccactgcctctgacacaattttgtgtcactgaaggtcagactccttggctctggatttgttttctcacctgtataataaaaaaaacctgaactataagaattgtgtctaaagcctttaaggtcacacatttctagtttctacagaattaaataatatgaaaggtttaaggaggaataggggagaatgagcctaaaataggaatctgagagtacatctagggacttaactttgaacatgtccactagtttatgtgtgtgtcataggattggtttagggcaggtgtgtccccaacacttctgtataaaatgacacttactaaaaggtacaatgagctgatcatgtgacgtaactctgtgctaggaaagctcgcatctaacccacatttctgctggttcccctaaattagctttctctctgggtgggttgcttaacctctctgtttcattcccagtttgtaaactgaggtgtccctttaactctttttttctctctatactggtgacatgttccaatcaacaaagcttttcacattacaagtgatcacagaatagaacattcttggacatcagtcttttacacttacatggatgcttcagtagccaaaattcctagagtgaacttgtaggtaactatttttaaaatatgtagataagactgcatattctctggatttagtcatttttctgacttatggtatagttctgtgtatcaggttcctatgttagaaaaattaagaatgctttgagagaagtgagatcatattaagaacttatatttctccagcacttctacagtcttaaatgtctgaatgacttaaatcagtggcagttttgttttaagaatgggaggaggaggtcg

SEQ ID NO: 43371 - DNA, 1029 bp, Homo sapiens
attctggagattatgcataaggaagctcaagatataaaattgtgagtaaagaagattgtcctgtgaaagaggttgatatttgtgctcttgtatttttgacatctctgacacaattcttgggaattgccaacaaacagagggaaatgatatcctgatgagctacagtggttggcactgttgatctggttgtgaagtgtatgtcttttaatatttaaatattttcattcacatttgaacataggcgagtggtgataacggggaagagaaatgcagctatagaagaaggcaacttggggaacctaggaccaggaggtatcctggattaacccaaaacaggagccccaaatcttgactcatcctttactcggagctcattggagctctgttcttgtccactgcctggccccaccttggagcagcagggagtgtggaggtggggaagtgcctaagtctcttctaaggcaaactggagatttatctgggtaatgcaggcgggaactctatttcttccacaggaactttgagtgaaggttgggttctgtgccacgtttagcgtacagaacagcgctgcactgaaagtagaatcgagagtaaggcactggagttagtgtggggacctcattaccaaccttaatttgtagagaactttaaatatgttttagtaatattatatgtgggtgccatatcataagaatgtaattattaaagtaaaaattttaaagaagaattattttagtatagagaaaaataggcctggtgtggcgactcatgcctgtaatcccagcactttgggaggccgaggcgggtggatcatgaggtcaagagatcaagaccatcctggccaacatggtgaaaccccgtctctactgaaaatacaagaattagatgagcgtggtggcatgtgcctgtagtcccagccacttgggaggctgaggcaggagaatggcttgaacccgggaggcggaggttgcagtgagccgagatcgcgccactgcacgcctgcctggcgccagagggagactctgtctc

SEQ ID NO: 43372 - DNA, 1048 bp, Homo sapiens
agcaggcctaagaggacatgcatgttcatcataggcaccatgcctgcattggactagctgacccatttctcatgtagaaccaaaaagaactgtactgagtggtggtccatacccacctgctccctgcagtggcatctgatcctgccttcccctgctttgaagcaggagatgttgggtgctggttacctgaatgcaaaattaatcgccctgacctcatcatgtaggagtgggaaagacaactggaccataacctagtcagtcggcctggctttaatcttaaaatttaagggcttcttgcttcccttgatccaccgttacctgcagaaattcattatatggcttcccttccttctcatgtagcagattagaattgttccttttcgagctactcatttccctgtcagatgaaagagctgtgacttaaattgaactgtttgttttacttaaggcaggaagatggggataggggaagggaagcaatttttgttatatccgatgattcatttgcagagctctgccagtggatttaattaactcttgacattgaaattagtcattatcagaacctcgtttctggaatggtctcagagggccattctaatctccaaagccacattcctttctctcaggggatcggagcttagtaatccttagcacagtgaaagggtgaaaataaactgcaaagagggatgctaatgtgttgctggaagacaggcatccctgaaagtgactggggattgaaacagcagccgggaagatgactcctaagattgggactgttatctaagacactatttttttattagttatttttaggtagcccttaatttgtttcatgcccttatttttagttttatcttttactcttgaggtaaatcttcagatttcaaccaaacatttaggaaaatgaaagccaaatcttgattttattggcatgatcaagtggtcactctcatggccatgagttatttagccctttaagtgtttgaatggccaaaggaactcaacaaatacttaattttcccaaaaacacatatttttgagtagc

SEQ ID NO: 43373 - DNA, 1070 bp, Homo sapiens
ggattacaggcatgagccactgcacctggccccagtaaacttcttatcaatacatttaaattctaccaactggcaaaattactcatcatcttctcagcgacccttaaaatagcaccaagagcaaagagttaagtaatgatgacaggatcctggtctggcgctgtggctcacacttgtaatccaagcactttgggaggctgaggcaggtagatcacttgaggtcaggagttcgagaccagcctgaccaacatggtgaaaccccgtctctagttaaaagaaaaaaaaatacaaaattagctgggtgtggtggtacacgcctgtaatcccagctacttgggaggaggaaggagaattgctcaaaccaaggaggtggaggttgcagcagtgagccgagatcgcgtcattgcgctccagcctgggcaaaaaagtgagactctgtctcaaaaaaaaaaaaaataaaaataaaaagacaaaaccaggctcctgagtaatatacatgttggataaacatctttaagttctgtttaactgaatacatatgtgtcaaataattatgacagtcgttcatctcatgtcttgcatctacggtgggtttggtgaaaatactaaaattttttttcctcgtgaactcagcagatcaccatatgacatagatgaataacaaactttgtgcctagaaagattctagtagttgacttaaattcagtaatttaggagctgcaatcatgagaaagccgccattctgcatgttaggttcctcctgtaccttttcagctgtgtctgactgtggatggagcactgtggtttgaggggttaggaactctgcttagatggcaattagacagtcaggtacacacagtagtggctgtctgcattctgcctggaacagcctgagtttggagccattggggcccagaaggtacactggggactagagccccgggccacctgacctcttcagtgagagaatcttttcttttccccacaaagaaaaatctttttaaagcagcacaataaaagttagaagttagtttttgccaagttataaagttgtttcttgtgatacatgt

SEQ ID NO: 43374 - DNA, 1100 bp, Homo sapiens
aatgcctccaaaacatgtttcataatacctgtaaggtagagctcaaaagttagcagctattatgtatttttccaacatgtttgattgctgcttctgctcccctgttattgtttggtatacttcatttccagtgatggctggtcactgatgctgaggagccaggcagctagttttaacgtggttgtagctgcctctgttagttaaagctctatgaatgtcacttaagaagagtcctcaaatacggctgtatctttaagacagaacttaacgtggaaattcctgccaccttgtggctaaaataaatcaaaggttaatagtacacatattttagaaaatattaatacatgtgttcattttaggcttaagtcttgaattattaaaataaaaatttgacaagtttaaatttcatttcattagtttcattaaaaatggaagtatgtgtttagtgaatgcaccttttcttgttcctcagagcgagagaggctcacctatttccttccctcttccagagatgttgagataagccagtcaaggacagacattactcatgagaggatttgtcatgtgtgacaaagaaataaccccctagaaaatgtgtagacattgagttcttatactttcttttgtttggggttatcctgatgtttatttttgttagggaataggaatgtttattcatactttgaaacttcaatcattctgaggcaggagaattgcttgaacctgggaggtggaggttgcagtgagccaagattgcgccattgcactccagcctgggcaacaagagcaaaactccgtctcaaaaaaaaaaaaaagaaagaaactatcattgcagttcctttgtatcattgtgaagatctgtataaggtaaatatggttatgtttagaagtgtttgaagcaacttggccagtggctaaaggtaagaaaattcccatttaaactttaacaattatgtaaataaaagatttattttggaaaaagaaataaagcagtgagacaaagggattttttgccattcagggataaccactgttaaatttgccatagagttttgtagactttgtcccatgcattataactttcagaattacaaagatca

SEQ ID NO: 43375 - DNA, 1168 bp, Homo sapiens
gaaaagtaaaacgagctgcaagagtaggagctcagctaggttactataggcagtactcactcaggagggactatgaaagaaaagactgagaagaagatggaaatgtgtataaggtaaatggaactttatttgtaaaatcaataacactcacatggttcaaaatataaaagatttgaagatgcacatagtacaaatcttcctcccagtattattccctaactaccttatctcttgggagataaccatgtggaaaacaaatgctacatgtatgtattcctccttttacacaaatgataccataacatttgaatgttttgtgtatataaatatattttttatagttacatagtatttgattgtacagatatggcatgactttgattaatcgcagtttggatatttaggttgtttccagtctcttgcagttatgaacaatattgtagtgaatctgtttttgcatgtcgtgtgtatgtaagcatgtatccacatgataaattcccagaagtagaactgcactttaaattgtgttgtagagctggagctagtttaaatttccatcagcattgtgggggagtctttctccaattctccctaacacaggactttatcaaactttgccaatctagtatgtgaaagtgatatcttgtgtttttcacttctcccataagtgagactggaggcttttaatatgtttaaacacattctgtatttcttctgttggtatcctttgttcatgtaaaattttttggcaatttatataaggtctcggacattatagaaattgtggtatgagtcataaaacaaatttatttttctttctcttctttttttgactaattttgttctttagttgtatcatgtaagaagaccaggaaaattttaccttttataccctcagtagaactggggataaaagtgagggcagggagaaagcagaggctccatattgttttaatttttatttattttgaggctgggttatgagactggcagtctttttttttgtattttttttgtagacatggggtttcaccatgttgcccaggctggtcttgaactcgtgggctcaagcgatctgcccatctcagcctcccaaaatgctgggattacaggcatgagccgctgcacccggccatgttttactttacaaagatttatactgaatact

SEQ ID NO: 43376 - DNA, 1044 bp, Homo sapiens
agctgggactacaggtgcgtgccaccatgtccagctaatttttgtatatttagtagagatggggtttcaccatgttggcccggctggtctcaaactcctgacctcaagtgatccacccacctcggccacccaaagtgctgggattacaggcgtgagccaccgcgcccagccgtggatgaactttttttttttaaaaaggctgaacatttgagggtttcacgtcctaaatacataacgggggaattctagaaagacattttctatgaggctttactttgcatttataccccttcctccctcccctgtcgttggaatttaaacttacctaagcatagagaaatgtttcctttctggtttaagattttatttaggtatgggaacttgtgaaagtgttggaaatatagagtggaaagctttttgttttttttcgtggttttttttttggcctttaagactgtttaaaagaagtatttgtggctgacatagaatgattagcagtactgagaggggacaagaatctaggagacaaaaacaggtgcataagtagcttatgtgacaggtaacaggaacactgtcttatcttcctgtttaatgcagaattaagcaaaatgcggccggacactgtggctcacacttataatcccagcatttgggaaggctgaggcaggcagatcacttgagctcaggaattcgggactagcctggccaacatggcaaaactttgtctctactataatacaaaaagtagccaggcgtggtggcacatgcatgtaatcccagctactcaggaagctgaggcacaagaatggcttgagcctgggaggcggaggttgcagtgagccaagatcatgtcactgcactccagtaagactctgtctttaaaaaaaaaaaaaaaaaaaaagcaaaatgtgagaacttaccaagtgtaagttgtatttattctttgagagttcagtgggctggagtggcatgataccatttgataggccttgatataaaagagcatattcaaataatggcctgccttaagattgatgggattac

SEQ ID NO: 43377 - DNA, 1050 bp, Homo sapiens
gtggatatttctttattttgttttagaattatatatcaatatttaactggaaatgattatttggaacctgcaatacagattgttcttcattttgtaatatagccatttctcacaaatagatgtaaaagaacagttcctgagatgatcttgcccatgacagataagtagttcctgtttgtataaactgtgctgagctgtttgaaggatgttcccttcatctccatatccctagcgctaagggtgattctgtggagactttttgcctctcttgttgcaatgagtagtagtcaaggtgactcctttctagaaacccctccccaatgactgacattggctttggtgcttggaagggtgtgtgtgtgtgtgtgtgtgtgttggcaaggtgtttgttggggcaagtaagcattaaatatcccgctttgcattttattaatactttaatctcactgtgatttttgtaatgcttgttccacttctatatcttttgtataaattcctgacaaatacctgtttgcttatattattatggacttttaaagacacctagaactggctgggcgcagtgactcacgcctgtaatcccagcattttgggaggccgaggtgggcacatcacttgaggtcaggagttcgagaccagcctggccaacatggcaaaactctgtctctactaaaaatacaaaaaattagctgggcgtggtggcacacgcctgtaatcccagcttctcgggaggctgaggtggtagaatggcttgagcccaggaagtggaggttgcagtgagctgagatcacactgctgcacaccagcctgggtgacagagcaagactctgtcttaaaaaaaaaaaacaaaaaaaccaaaaaacctagaactagcttcctttgccctgtagaacaaaaaaatagtgtgactcctttttaaccttttattgttcatcacagatcctgagcagtgagttcaaaggtaagacatggccccttcccttatgaggtttatgggatagtgcagctctgtgttagagccacattgaaggagtaacccatttccagaga

SEQ ID NO: 43378 - DNA, 1047 bp, Homo sapiens
gctgtcctagttctttgcttgactcccccagactgtgtggcatgttgggggaccctatgcctgaagggggtggaatgaaagaaagatagcagatcaatagctgggactcccacctattgaattccatgtggcagttccaaaggtttgcatttaccaacacggatggatcaccaagatgacagattggggtggtgggggagggtagcaagataaggaatgtcatacttaagcaagttacttaaaatcgacctcagtttattcatatatgaaatggggataattgctacattctgaggcataaataagatggattatataaaatgtttaaaacagtatttgacactctagtgtgaaaatttaaaactcaacaaatattgctctttgggtatatatgtgaatatatgagcatatacacatacctttttaaaaattgagaaattcacataatataaaattgttgcgggaagtcagggaccctgaacggggggaccggctgaagccttggcagaagaacataaactgtgaagatttcatggacatttatcacggaacctgccgacatgtgatgtctcccccagacacctagctttaaaatttctctcttttgtactctgtccctttatttctcagaccggccgacacttagggaatatagaaaagaacctatgtgaaatatcgggggtgaatttcccccgatatcaaatcattttctttttatacttttacttatttatcatcatcatcatcgtcactattggagacagagtctcactctgtcacccagggtggagtgcagtggcgtcatcatagctcactgcatcctcctaactctgggttcaagcagtcctaccaccccagcctcccgagtagctgggagtacaggcactcaccaccacatctggctaattatttttatttttgtagagatggggtctttcctatgttgcccaggctggtctcaaactcttggcctcaattgatcccttgcttcaagtgataacttggcctcccaaagagctgggattatggatttgagccaccatgccc

SEQ ID NO: 43379 - DNA, 1652 bp, Homo sapiens
ttttttttttttggtagagctaggtttttctgtattgcccaggatggtctcaaactcctaggctccagcaaatctctaccctcccttacccctccacccctgcgttggcctctcaaagcactgggatttacagacatgagctaccacacccagccttgcttaagtattgagtttgttatgggcttctagaattttgatctttatacttacttgtctgaggtgtcactaatgggcaaggccatttttgttttaccataaggtgtatagcaattggataaaaattaatggtaggaggatagttattgagatggcagatgaggcactgattgtgatataagtgaatttgtatttagctgaacttttggtcatgattaaaatcctgacagatgtagtgcttgaatttgtttttagcaattttactgcttctgtctataaaatatgttaaacaatgagagaatatttctcttacgatacagttgaaatcctaggaaactttatcttggaaaaaaaaaaacctggtaagatcaaatttcattttactcaaactacagtgttttctgaaagatgcaggagttgctatcctgccaacctgttttgttgtattcagagataataacctgtgtagtgcccattacatagtgaagttttttgttttttgtttttttaaaacagcatctctgttgcccaggcaggagtacagtgctgcaaccacggctcactgcagcctcaacctcctgggctcaagtgatcctcccacctcggcctcctgaatagctgggaccacaggggtgtgtcaccacacctggctaatttattttttgtaaagatggggtcttcctatgttgcccaggctagtctcctgagcttgagtgattctcccgcctcagcctcccaaggtgctgggattacaggtgtgagccactgcaccaggtcacatagtggcattttaatgaacagtgcaaatgttacatctttgcccagtgattactgttaattttaaactttggactttgacgttaaaaattaagttttaaggccgggtgcattggctcaagcctgtaatcccagcactttgggaggccgaccgaggtgggtggatcatttgaagtctggagttcgagaccagccctgccaacatggcaaaaccccatctctactaaaaatacaaaaattagctgggcgtggtggtacgtgcctgtaattccagctactcaggagaccgaggcaggagaattgcttgaacctgggaggtggaggttgcagtgagatgaggtcatgccactgcactgcagcctgggtgacacagtgagactccatctaaaaaaaaaattaaaatttaacttaaaattttaaaatcagccatcactttaatgaacatataagcatatacaagtagagagtatataataaatcctcatgtacctgtcaaccagcttcaaaatttatcaactttctgtgcttgctggtatgaagagcttttgaagaatcattttccttacaaggtggtgactttttgagaaacgggtgtagcctattgagcactgactttagagtcacgtagtgtgggttcacatcctgactcttctcgtatttcctgtcccgctgggcatgtggcctttcctctttgaaactcaatttttgcatcttgaaaa

SEQ ID NO: 43380 - DNA, 1030 bp, Homo sapiens
attaaagatttatcatccaatttctttttcccatctgtgtagtcttgtaatttaaaaaaaaaaacagtactgaatatattgcatgtaatttcctgcttttttctcacttaaaccttaagccttttcacacattaaacattgggagttagtcgggtatggtggctcacccctgtaaatcccagcactttgggaggctgaggtgggcagatcaccaggtcacgagtttgagaccagcttggccaatatggtgaaaccccttctctactaaaaaatacaaaaattaggcgggtgtagtggcgtgtgcctgtaatcccacctactcaggaggctgaggcaggagaatcacttgaacctgggagatggaggttgcagtgagccgagatagtgccgctgcactccagcctgggcgacagagtgagactctgtctcaattaaaaaaaaaaaaaaaagggaataattctcacttttgttctgatttataacaacttaaatcgttgaattagtaggtctttttaaaaaacagctttattgaagtatgatggacataaacacatctttaaagtgcacgttttgataagttttaacatacatatacacatgtgaaaccattaagatttacctatgatgtgtgagtcaagagcctattccctttcatagctgagtagtggtttgttgtgtagatatactactatttacttgtttacctgttgaacatttgggctgtttccagtttttaactactacaggtaaaggtgctatgaacatttatgtgtaggtctctatgtggatgtttgcttttgtgaggacccacttgtaacccccagagatagtatgaagattattttaaactaaagacatttgagattcaacagatgcagaaagaagcctaatcagaaattccttactttaactaaaggcagaaacttctgggaatgaggctgctaaaaatctcctcccttggggaatgttcttggactggaaaaaaaaaaaaaaaaaaaaagatggagaagaccactcatctgcataaaca

SEQ ID NO: 43381 - DNA, 1047 bp, Homo sapiens
ttgcagtgagccaagatcgtgccactgcactctagcctgggtgacagagtaagaatctgtcttaaaaaaaaaaaaaaaaaaaagccaggcgcgatggttcacgcctgtaatcccagcactttgggaggccgagacgggcagatcacttgaggccaagggttcaagactaccctggctaacatggctaaaccctgtctctactaaaaatacaaaaaattagctggcgtagtggtgggtgcttgtgatcccagccactcaggaggctgaggcaggagaattgcttgaacccaggaggcggacgttgcactgagccgagatcatgccactgcactccagcctgggcaacagagcgagactctgtctcaaaaaaaaaaaaaaaaggcaacaataaatccaaggtgacaaaaacagctgtaaagtttttagctgtcttttcaaaaacgaaagttgtatgctgtacagttgtggtcttggcattcctgtgctgcctatacacaagctatgaagagggagaaaagggggtaaaggtggttgtgctgttacaggttttgtatttaattctagctggcatgtgagggatttcattcatgtgccagagtgggaggtcctggagtggggttgccctgctgtctgaatcttcccaccagctactcctaacgagctctggtggtttaccctaatctagcggcactctttgctttcctgtagctcagtggcttcatctgttttcttgtcttggtcagtcaagggacagatctacgcttgtttagttggtattttggcttcaaactgatttttttttttcttttcagaagcctcagttaaagaatgacttaaatatacttcttccccattataggtgatacaggctcgttgaataaaatttggaaagtaaagttcaaaaatatcttggcatattacctttcatacttctatgcaggtatacacacaaattgaattagatcagagtgaatttttaggctatttgatattaacaaaacttttatagaaattctatgttgctttatactttcccccactaatgga

SEQ ID NO: 43382 - DNA, 2082 bp, Homo sapiens
tcaatttaccaccagtgtaatcagcactcaagtgtcaaataaatgctaataggaccacagccttgagagtggggactctaaatactcagtggtgaaatacattaagataaagttcttcagtacctagagggatttctatgcagaatacattttgtcatttcatgtaggggatgcagcattcctattatgagatgacaagatagaaggaggcatgtgttggtgtaaggccagttaggtgttgaaggaggcatggcgtatggctagttagatgatagaaggaggcatgtgttggtataaggccagtttgagaccttagaggagacggctgcagttcaacatcagagctgagatggtgctagttcatggctcctgtctcaggcttgacactgacagttgacaacacggtgctctcctgggccttaggccattctgtcaccctccctgagctgtggagctgagctccttccctgtccttgcttctgcctcttcttagaagcctttttgaatttatcagagtgcctactatgtgccggaggagaatttgctgcacaagacaactttgatgtcttatccaagtcagcttctctgaactcgcaaaaaaacagattccttctagctctgattttcactaaatgtttctgaggtcttggttattctccacataaacctggagacatacttttcattaaaatataaggcagaggtatggggtttctgggtctgaacctcagaatagtcgaatggaagacagggtagggactttgagggcagcttcttactggctatgagactttggataaaagtgacaaccatacagagtccctttcccatctgtgaaaatgggattaacaaaaaaaagtcctttcagggtcaatgtgagaaccagcgaataagacaagtgcctcgccctgctgcactgtgaattaactttttttggaggcatttgtcctttggctgaaattcacatgctgtgtgctccagtactgtgaagtactttacttcctcaaccccatccttctcttagcttcaggactttttgcatacattttctttgccaagaatccatttgctcttttttttcccccccaacagtcttattttgttctggatcctttccatctttctttattctcaccaattatttagccctcaatttagacatcattcctaccacgcttggattagacatctctcctgtatttctcccatacttaacactatggtagcacttaacatgtaggcttgcattatctcatgtattttttttttcttcagaaaactaggtttattgctacacaatctgccagtaattccagctattttgggtgatttcattatttgacttagcattgtgtgtgtgtgtgtgtgtgtaagtacatatttcagaagtcagagtcttctctgttgcccagtgcagtggtgagatcatagctgactgctgcatcaaactcctaggctaaagtgatcctccctcctttgcctcccaaagtgctggggctataggtgtgcacccctccctgccccctacccccaagccagcactttatatttaattgtcttatgacttgtgtctgtttctcccaccagagctaaggtgggtagggctctgtcctcccatgttatcaaagacccagaacaatggctggtgtggacttgctggtcagtattcactcactgaaagtgtattggttgggaattttttcaactctgtaatgggttattgggttaaaaaaaaaaaaaaaaactcactggatttttttgtgtaggggtggggtagggggatgggtataagaaaataggatataaatttgttgtctcgggtcattgaggtttgtatttttgttattttcttctttttttgagatggagtctcgctctgttgcccaggctggagtgcagtgatgtgatctcagctcactgcaacctctgcctcccaggttcaagcagttctcctgcctcagcctcccgagtagctgggattacaggcacctgtcaccacgcccagctaattgttgtatttttagtaaagacagggttttaccatgttggccaggctggtcacgaactcctgacctcaagtga

SEQ ID NO: 43383 - DNA, 1062 bp, Homo sapiens
ttacaccttatacaaaaattaattcaagatggattaaagacttagatgttagacctaaaaccataaaaaccctagaagaaaacgtaggcaataccattcaggacataggcatgggcaaggacttcatgtctaaaacaccaaaagcaatggcaaccaaagccaaaattgacaaatgggatctaattaaactaaagagcttctgcacaacaaaagaaactaccatcagagtgaacaggcaacctacaaaatgggagaaaatttttgcaacctactcatctgacaaagggctaatatccagaatctacaatgaactcaaacaaatttacaagaaaaatacaaccccatcaaaaagtgggcaaaggatatgaacagacacttctcaaaagaagacatttatgcagccaaaaagcacatgaaaaaatgctcatcatcactggccatcagagaaatgcaaatcaaaaccacaatgagataccatctcataccagttaaaatggcaatcattaaaaagtcaggaagcaacaggtcctggagaggatgtggagaaataggaacactgttacactgttggtgggactgtaaactagttcaaccattgtggatgtcagtgtggcgattcctcagggatctagaactagaaataccatttgacccagccatcccattactgggtatatacccaaaggattataaatcatgctgctataaagacacatgcacacatatgtttattgtggcactattaacagtagcaaagacttggaaccaacccaaatgtccaacaatgacagactggattaagaaaatgtggcacatatacaccatggaatactatgcagccataaaaaatgatgagttcatgtcctttgtaggaacatggatgaaactggaaaccatcattctcagcaaactatcgcaaggacaaaaaaccaaccactgcatgttctcactcataggtgggaactgaacaatgagaacacatggacacaggaaggggaacatcacactctggggactgttgtggggtggggcggggggagggatagcatttggagatatacc

SEQ ID NO: 43384 - DNA, 1059 bp, Homo sapiens
attagattcaacagacataaaattcttgtcagtctgctataaaaatttgtaaatgcttaatctccacttataagtttgtcttgtcatgatatggtctctatcttcatctcactctttttcttcccacagtcacccaaaatgacggtatgttcctaaaatactttcccgtggaaggtgtaagttcccctcttcctggccaaatgctcaaatgttttactcccatcacctcctttgttttgcataagtatcactttctataaaaattatcatttaatgatggaaatgaacttaactgcctttaccatcagcagtctctttttatccatgataaaatttgcagagtagtttaacaggcataactcaagctgtttatttcttcttagctttatatacttacggataggaagtcatgcagtacaagtgtgcaaaagttctgcaaagtatatgttacttttgctgatcacatacaggtaaatccatcttagatgatctgatttctaatacaactcaactctaaaagtctaaaaatatctctgagctatgtattaagcaggtggttttggacttagactgcatttctttgtttgtttttgtttttgagacagagtcttgttctttcacccaggctggagcgcagtggtgcaatctcggctcactgcagcctctgcctcctgggttcaagtgattctcatgcctcagcctcccgagtagctgggacttcagggacacgccaccatgcctggctaattttcgtaattttagtagagatggggttttgccatgttggccaggctggtcttgaattcctgacctcaagacctcaggtgattcacctgtctcagccaaccaaattcctgggattacaggctttacaggtttcagccaccgtgcccggcctagactgcattttgcttcatgccaatccctagggcagcagtgactttttttttggagacgagtctcgttctgtaacccaggctggagtgcagtggtgcaatcttggctcactgcaacctttacctcctgggttcaagccattctcctgcctcagcctgtcaa

SEQ ID NO: 43385 - DNA, 1018 bp, Homo sapiens
ttgtatatattcacaaatacctttcctcagttttttattccaatctggtagacaaaggtggtgctcagtaagttaagtgttggttgaattgagggtgtatgatgcttttcaaagcttgactatcaacccagatagagatttctgtgttcatcttgctggattttttttcttgttttgtgtccactactcctagactctcacatgtgtccaggtatatatacaaagattgaaattgtttaattagcttactctggctaatggtaatgactgatatttcagatttctttttaaaagaaggcctatatttgatgtgtctatctttcactcatttttatgcctactctcatattcttagctcatttccttctctttagtactctgcctttgggttttagagtaacttaatatcacacatgtgggttgtgtcgattatgagcagagcaatatgcgaacctcttttttttttttccatttgattttttcaagactctgtcacccaggctggagtcaggtggcacgatcacgactcactgcagccttaaactcttcctgggctcaagcaatcctcctgccttggcctcctgagtagctaggactacaggcacataccgctgtgccccattaatttaaaaaaaaaaaaatttttttttttgttttacaaacagggtcttgctacattgcccaggctggtctcaaactcctgagcttaagcgatcctcctcccttgacctcccaaagtgttgggattacagtcgtgagtcaccgtgcctggccaagtacctctctagatggattctcttcttgttatattcttagagccaaccctagatatagaagggaattgtgctattcttatttttaaaaacaacaaagtaattgggaaatggaaaaacttgccaaggtcttgcagctaccattggctgaattaggatttaaactaggcagaacctccttttttagctgctactgtatctaaactgtatattcttctgtcatctcaaacgtggaaataaggatg

SEQ ID NO: 43386 - DNA, 1513 bp, Homo sapiens
gggccaaataagggaataaaagttggccacctgagccagcagtggcaacccgccagggtccccttccacactgtggaagctttgttcttttgctcttcacagtaaatcttgctgctgctcactctttgggtccacactacctttaagagctgtaacactcactgcaaaggtctgcggcttcactcctgaagtcagcaagaccacgaacccactggaaggaagaaactctggacacatctgaacatctgaaggaacaaactccagacacaccatctttaagaactgtaacactcaccgtgggagtccacggcttcattcttgaagtcagcgagaccgagaacccactggaagaaaccaattccggacacaatttgattagtattttgtttccctgaggcttccctttttgattctccaatcagaaaagcaaggaccttagataccttgcgtggttgtgcacttcctgtaactgtatacatgtccagggctaacgagaggcaaacagacggaaaagaagcaaacaggttcaatccatccccttggaactatagcttcttccctccatcagtgttttagatcagtgatccccaacctttttggcaccagggactggtttcgtagaagacaatttttctttctttttttttttttttaatcagaaaattttgatcatggcttttatttctttgcaacagtcgtccagaggttctgaagagaactcaccggttgtagagtctgtgttaatcacccagcattaatatttccattgctccatcatcatgtgtaagcctgtccacagcattcttctccagaagcaaacttgctcaacctttagtttcacatcagtgaaggcgaattctttcaccaagatggacttgtttgttctcaggaaatccatacagccctggttgaagagttcagaaactctttttatgcattaaaacaattttttcatggttggggaaggggagtggtttcgggatagaaactgttctacctcagatcatcaggcattggttagaatctcataaggagtatgcaacctagatccctcgcgtgcgcagttcacaatagggtacgcacttccatgagaatctaacgctgccattgctgatctgacaggaggcggggctcaggcatttaagcctgctcacctcctctcaccttctgctgtgcggcccggttcccctttcttgcttctccagcctaaactacaaggcttctcctaagatctgtctgtatccactaacaacttgaaagttttttgctgctgagtctaggctggggcatagcagagggaaaaaaagaagcaaatcacttcagtttctgtagtactatagagttcctagtctgtctgttatctttactttgagtcttcaaattattgtttgatactttctgtctagattttttaactgctttcagtgggagaaacaaggtgggtgtgcttattgaaatttgtctggatctagaacctggaactaaagtttaagttgtttctttgaatattgtt

SEQ ID NO: 43387 - DNA, 1101 bp, Homo sapiens
aaccctgcattcctatgataaactccactttattgtggtattttattctttttgcttggtttaatttgctaacatttttgttgaggacttactgtgtctctgctcatgaaggatattggtctgtagtttgatgttttttgtattgccattgattttgttatcagggtaacacagccttaaaatgtgttgggaaaacatgtttaccttttctggaagtgatttgctgaattggtgttatttctttaagtatttgatagaattcacctgtgaaaccacttgaataatttctctcagaagtttttttttttttttttttggagacagagttttgcttttgttgcccaggccggagtgcgatggcccaatcttggctcaccacaacctctgcctcctggttcaagtgattctcctgcctcggcctcccaggtagctgggattacagacatgcgccaccatgcccagctaatttttgcatttttagtagagatggggtttctccatgttagtcaggctggtctcgaactcccaacctgaggtgatccatttgcctcggcctcccaaagtgctgggattacaggcatgaaccaccacacccagccctttttttttttttcttatgctcaaattcaatatcttcagtaattatagtgttcttcaggttatttcatcttgggtcgtttgtagtgttcaaagaattggtcaatttcatccaagttgtttctttttttctttttttttttttttaataactacatcatcatggacaagttgcataaagctttgtagtattcgcttatcctttaatgtctgtggggtctctagtgatatctccactttttaattctgatactagtaatttttgtgttctctctcttaaaatcttcatcagccttgcagagctttatctgttttattgatttctaataacttcatgatgttgaagctgaatgagcttctctgtctccatgattttgagaggtgaaggtggctgggcttctgggtcaggtggggacttgaagaacttttctgtctagctaaaggattgtaaacacaccagtcagcactcagtttctagctaaaggtttgtaaacacaccaatca

SEQ ID NO: 43388 - DNA, 1102 bp, Homo sapiens
ttcacaggctgtggttttattttttgcatgtaaatgtctcattctaacaccaaaaattgaaaatattgttccttttccattgaattgccctcacacttttgttacaaatcaattgaccatatttgtgtgggtctgtttctggactcttttatcccattgatttatgtgtctgtccctttgctactacactttcttggttacggtatctttataagtcttaaaattgaatagtattattccttcaactttattgtttttcagaattgtggctattgtctttactttgcttttccacgtgtattttggaaccagcaagtctatacacaaaaattctgctgggatgtttattgggattgcaataagttaacaacaaaaaaacccttttggaataattatcaactttactaagttgtctttttatgactggcttatttcacttagtatgctgttcaaccatgttgtagcacaggggtccctaacccccaggcctcagactggtaccatctgtggcctgttaggaactgggctgtaccacaggaggtgagtggcaagtgagcgagcattactgcctaagcttcacctcctgacagatcagtgacagcattagattctcataggaatgcataccctattgtgaactgcacacgttgagggatctaggttgctcactccttaggagaatctaatgcctgatgatctgaggtggaacagtttcatcctgaagccatcccccccatccccactctctgtccgtggaaaaattgtcttccatgaaaccagtccctggtgcgaaaatagttggggaccgctgtcgtagtatgtgtcagaattttcttttgaaagttaagtgtagtattcctctgtctgtgtattctaccttttgtttattcttctgtccatgggcatatggattgcttctaccttttggctattgtgatcaatgccaccgtgaatgtaggtgaataaatatctctttgagactctgctttcaattcttttgggtatgtacctagaagtgggattgctggatgttatagcagttcttcttttcctctccttgaataaaccagtgaaaaagatgttatagcaattatgtttttaa

SEQ ID NO: 43389 - DNA, 1072 bp, Homo sapiens
tcgagaccagcctggccaacatggagaaaccccatcttaactaaaaatacagaaattagccgggtgtggtggcacaggcttgtaatcccagctactcaggaggttgagtcaggggaacctcttgaacccgggaggcggaggttgcagtgagccaagatcgcaccactgcactccagcctgggtgacaaagcaagactctgtctcaaaaaaaaaaaaaaaaaaaaaaaaaaaaaaaaaaaggccagagtcttaaggaaaggatttctcagtttctcctaatgttatttccttgaaactactctccagtcaaaagaatcaaaactcctaataagtactcaaaaaatgcccaaagctgggggtaccttccctgaagtgaagcataagaccttatgtaaaggaagacattaggtaaatgaagtggtcctagaggaaagggcaaggaaggttgtcattttgggggctgatgaggaaggtgaaacaatatttccctgtgtttactgtgtggggaaacagcctatgcaccaggttctccatgctggtggggcccccacatcactcatgactggaatgactgttttccgagcaaagatttgaatacgtgatctgacaggtacttatggggaatacatacttaaaaatcacagtcttgctagaaaattcagaacgtttcttggttttacttcaacacttgcatatttgatttttttcctggacttaattgatctgggaagatgagtattaagtgaggctctggtcaaagaagggaaaccaagtattccttatttagaagaaacaagtaggcctggtatggtggctcaggcctgtaatcccagcactttgggaggctgaggcaggcaaatcacttgaggccaggagtttgagaccagcctggccaacatggcaaaacccaatctctactataaatacaaaaattagccaggcatggtagcgcatgcctgtaatcttagctactcaggaggctgaggcacaaaaattgcttgagcctaggatgcagaggttgcagtgagctgaaattgtgccactgtactcctgggcggcaggcgagactcta

SEQ ID NO: 43390 - DNA, 1054 bp, Homo sapiens
cggtgggttataagattaaactttttacatgttcctgttttagattaacatttatttagggaattcagtagcttgtgggataggtcctcaagtgttgtaatagcaagattactagttcaatccccttattttaagatgagccatattaaatatgatttaaaatgtaatttaatatgattttttttgttcaggagctacatctggtatgatgtagctttctatgaaacagccaaatggtagaaaccaagtttaagtaaattattagagtactagcatatctgctatgggcagagtttccttttaattcattcataatctcttcaaatttagagaatttagcttttagtttattgcattttcccttattctgggtatttgccgtatctaacttttcttaatttttgtatttcactttactctcctcattgtcctttgaggtagtgtcaagttagtggattatctctgttttcaaatgggcaaatatgggcacgcaagataaagttaattaagcaagagcacatactgaatcgtaagatgcttggaactagactttggaattcttcacctttgactccctttaaaaatttaatgattatttacatattgatcaacaaaaacaattttattgagagttcgttaggaataagatgggctgctgctgttaggtgtttctttccttaaaggcttgagggaacactatttcctttttgagaagggtcactttgtatgtttttgtttgtttgtttgtttgttttttgagatggagtttcgctctcattgcccaggctggagtggaatggtgcaatcttggctgactgcaacctccgcctcccaggttcaaatgattctcctgcctcagcctcactagtagttgggattacaggcatccgccaaccacgcctggctaattttttgtatttttagtagagatgggattttaccacgttggttaggctagtctcaaactcctgacctcaggcgatccaccagccttggtctcccaaagtgctgggattacaggcgtgagccactgcacccagcctgtatatatttt

SEQ ID NO: 43391 - DNA, 1044 bp, Homo sapiens
gtctacatgagctgctctattggctcttaaaaattaattttaattttgatttttttgtagataggcagggccggtgtggggggtctcattttgttgcccagggttgtctggaactcctggtttcaggcagttctcccaaagtgctgggtttacaggcatgagctaccctgccgggcctatcattgactctttcttttgtgattaaacatgcttttaataaataatgattgaattttcatagtaactaatatttctagcagagtgggcagtttttaaattgtttatttttattttttgagatggagtcttgctttgtcgcccaggctagagtgcagtggtgcgatctcggctcactgcaatgtccgcctcctggttcaggcgattctcctgcctcagcctcccgagtagctgagattacaggtgcctgccactacgcccagctaatttttgtatttttagtagagacggggtttcaccatcttggccaagctggtcttgaactcctgacctaatgattcccccgacctcagcctcccaaagtgctgggattacaggcttgagccactgcgcctggcctttaaatttttaatctattagcctgagaactaaaatttaccgtatttcccctctggtggggaacccttaaactgtgttgaaaaaaaaatttttttgtttgagatggagtctcactctgtcgcctaggctggagtgcagtggtgcagtcttggctaactgcaacctccgtctcccgggttcaagcaattctgctgcctcagcctcctgagtagctgggattgcaggcgcataccaccatgcccagctaatttttatgtttttagtagagacgaggtttcaccatgttgatcaggctggtctcgaacttctgacctcgtgatctgcctgcctcggcctcccaaagtgctgggattacaggcttaagccactgtgcctggcctgaatttttaaaattaatgcaaatgcttaaataattcaatattttggggtttttgttttttttttccattctcaaaaatgtgtggcagt

SEQ ID NO: 43392 - DNA, 1370 bp, Homo sapiens
aaacagggatttgccaaagttggtttattttggagatgatttcaagaagaagtgagggaaggggaagaatgaattggggagtgaggaaaagccaatgatagatactttattgagtttcctatagggaaacgggacctccaagaaattcacggaatgcctcccaggtttatctatctgaaaaattggagcttcctgcccgcaccctcatacacctatatttatgcaagttcttcttaaggattttgtctgtccagtgtttctgggctgctcctgtactctagagactttggagaaagccctgagataaagaagcagccttgtgtaaggtgtgtgcttttgggtggaaagaagcgagacaactgaaatgtgtgtgggattgattgtccaccacagcgatgagtcaggtgatgtgataaggagcacaaaaccatctgctgcagaagggaaagaataaagtatttatcctgtctttactatacttagtatgcttcagagcatccaaatatttgatgagggacacttgttctttatggaataactctggctaaaaaacacagaaggcatgatagaatgagaaaatcatggttttcaaccttgaatgaaatagtgggtttaggcagtgatcactagtagctgccaacatcatagaaagatatcagaggtaacaactcccatggaagtacagaacactccctatggaatattgcctctctcaaatatgaaacaagagaaaccaagttgagcctttggatctaactacaactttatagggaacagaggaatgtattaaacactattacaggagtgtcactagcaaactccaggtagtgagaaactcaaagacaaatgacagcattttaggtttttggttttttatccaaataagttgcaagaaaaagggtaacatttaggttataagactagagtcataagcaaatgccacatatggatcttatctgaatactgatttgaacataccagttgttaagaaagatattttttaatcaggaaaatttgagtactgactagatagtattaagttttgctcattaaattttttccccccaaccatttctggcaattttggccccaccccccttttttttttttttttttttgagacagaattttgctcttactgcccaggctggagtgcaatggcacggtctcagcttgctgcagcctctgagttcaagcgattctcctgcctcagcctcccaattagctgggattacaggcctgtgccaccatgcctggctaatttttgtattttcagtacagatgggttttcacgatgttggccaggctggtctcaaactcctgacctcaggtgatctgcctgccttggcctctgaaaatgctgggattac

SEQ ID NO: 43393 - DNA, 1029 bp, Homo sapiens
gcagtgaggcttttatttaaatagtaactgttcaactgcgtgtgtttctgtggttgtaatactggtggtgactttttagtttaaaggcacatatacaggctgggcgcagtggctcatgcctgtaatcctagcagtttggtaggccgaggcaagtggattgcttgagcccaggaccagtctgggcaacgtggtgaaaccacagcttatgaaaaatacaaaaattagctgggtgcggtagcgcatgcctgtagtcccagctacttgaggggctgaggcaggaggatctcatgaacctcggaggttgaggctgcaatgggcagagatcatgccgtttgcactccagtctgagcaacagagcaagaccctctctccaccaaaaaaaaaaaaaaattaaaaaatgaagcacatttacttagttaaaatctcagtatgaagactataaaaatctttggttatttagggatcaaggattagtttgtgccctgttttttttgtttgtttgtttttttcctgtttgacattctacattaagatgtgcgtgcccttctagtagtcacattaagaagtaaaacaaaggcccagtgtgatgatgtgtgcctgtatcaattgtctttcgaacagtgttaggttttcctaacttgcacatgtcctaaggaagtataaaaactttgactatgtttcttcaaggaacatttaatcttctaaaagaaagacatagcagtgtgtaaatgcaagcaaacaatagtagtaagagagtacgtagaaaaacattcagtcttttttggactcttctagtgcatactcatggcgtcagtcaagttttcatccatgcacgtctggctgtcagactctgttctacatagatggagataacgtgtgcaaatgtaaaagataaaatatacctctgttttagttaacgggactaaaacatagctgttaccatggagatctgggagctggggataatggaaaaaaccatgtttagattctcacttagaactgtgatgtaaagagactttgttcccttgc

SEQ ID NO: 43394 - DNA, 1050 bp, Homo sapiens
ttttttgtatttttagtaggtggggtttcaccgtgttagccaggatggtcttgagatctcctgacttcatgatctgcccacctcggcgtcccaaagtgctgggattacaggcgtgagccaccgtgcccggccaaacatgtcactttttattttattttttattttgaggcaaggtctctgtccccagcccggagtgcaatggtggtatcatagctcattgcagcctcaaactcctgggcttaagggattcttttgcctcagccttcgagtagctagggcttacaggtacatgtcactgtgcccagctagttttaaaaatttttgttgagatgaggtctcacttcgttgcccaggctggtctttagctcctggactgaagtgattctacttcagcctcccaaaatgttaggattacaggtgtcagccaccatgcctggcctataaacatgtaactttttaaattgaaattgaaaaatatgtaacatttttaacaactataatggtggaaagtagaatcgttaaattttttttagcatctcagtcttatgagtttattaagtagattttacattattgctactggaaatctgtcatcttttctgagaaagtaatttaactggaagtgtgacatagttactgaagttttaaaggaccacaactagggttattataactaaatttatttaactaaatttttaaagattattttatcagcctaacaaccattataagcgtgtggggtccttgaaatgacttcccagtagaaaggaattaaaaaattttttaaaaatagagtcggtctcactgtgttgcccaggctggtcaaagggaacttcttgaaacatcatatgcattggatcttttgtcagttagtgtacttatttgtctcatttaccttagatggtgactgaggttggatatttgccttgaaatgatctatgttgatgtgaccttgagtcttctttataaaatttgtatgtggcccagtgtagtggcttggtggttcatgcctgtaattccagcactttgggaatgccaaggggggcagat

SEQ ID NO: 43395 - DNA, 1059 bp, Homo sapiens
agcctccgcttctgggttcaagcgattctcctgcctcagcctcccgagtagctgggactacaggcatgcaccaccacacctgactagtttttgtatttttagtagagaccaggtttcaccatgttggccaggctgttctcaaacccctgacctcaagtgatccgcccacctcagcctcccaaagtactgggattagaggtatgagccactgcgtctggccctaaaacactcttataaaagagaactgtttttcatttttgtaagtttctttggcctaagaggcaactggaaactggtaactactactgcattcagtttgtcgtcatgtattgttttgattgaagtatatgaggaaaatccagccacatatggatatgtgtttagaaaaggaaggagtataaataattacagatattctttggtgctacatcaaaatatgacaagtggtagttaaaaaaaaattcctttttaaatttaaattgagacaggatctcactatgttgtgcagactggtcttgatctcctgggcttcaagtgatccttgtgccttggcctccccaaagtgttgggattacaggcgtgagccactgcacccagctacaagtggtagcttttttgcggaggtgcgggggtgggggcttactggtaaagaccggaaaaccacctgctggacaaattctaaaagagctgtaacaccaagtggtagtttttttaaagtctagtttcaatgtggaatctgaaatcatatcagtgaattttttttgtacttgttacaaaaagaatccattgattgtcttatactcggaaaggatctttatccacgaggattgggaggctgtcaaagctcattggtaatagatagaagtttttcaaaatactagtttttacttaaaagctcaaatttagtcatttggcaacagatacttcaggaaaatcgttttacctgaagtgacagactcattttattcctttttgagaaaatatctgccagatactcaagtttttaagtaactacattttgcttctagttcttcaggtagaaacggtgcttgactggtt

SEQ ID NO: 43396 - DNA, 1020 bp, Homo sapiens
aggcctcagtaggaacctttgcttagccctgtgatcttgtgcaaactgattaaactctgagatttctgtttttaaaatctgtaaatgagggtaataagacctatggcagagggttgttgggaattaaatgataatgtctgtaaaggacttcttggattatctggtactaaagtgatattgtctcactaataagtttgtgtgtttaccatgtggtagtggaaaatgggggatgggtgtgcctattcccgtatgaccccgtggtttatggtttatgtttcatatatacggagacataggagtgtttcacatttctttgtaaaatatgggttatgcactgtgaataagttaagaattggtgctttatatctaggtgcatggatcttagaatccctaaaatgtgtttagttatggaattatcttaggagagatcatacgtaaaggaaataatagaccaggagatgaattcctaattccaaagaggtagaaacagtataaaaatgaacgaaggatgagaagtggcagttcagaagggcacagctgaaaagtcagtctgtgtacaaaaagatatccaatctaggctgggcacggtggttcatgcctgtaatcccagcacttggatgaatcgcttgagctcaggagtttgagaccaggctgggcaacatggcgaaaccccgtccctgcaaaaaataacaaaaattagccaggcatggtggtgcgtgcctgtagtcccagctaactggggggctgaggcagggggatggcttgagcccaggtttgcaccactgcattccaagctgggcgatagagtgagatcctatttcaaagaacaacaacagcaaaacaaacaaaaaaaacacccttgtctaactagttattagggaagtgccaacgataatgacattttctgcctatgaggttggagaaaaatgaataagattggccgtatctggtgttggcaaggttgtggaggcatggccactcatatagctaaagagtaaattggcaaagacttcttggcac

SEQ ID NO: 43397 - DNA, 1377 bp, Homo sapiens
taaatgcatgctgtagcttgaggatgaggaatttgaggtcttgggaagttagaatggacatgatgcttcataggatcctgttggacaatgtgtgtaaaggatgaatacaacgtcacccagtagtcattccaatggaagccgttgtatttttctccttgagattcagatggggaagctggatggatgtaaatagatttgatggtgataacagaaacatggaagatctttgttctcttttgggatgtggactcaagtaataatctgcaggtggtgtgtttttaatttacaatgagcatgtattaccttttttgttcagatacaacatagatacaacagattgtataaatattaaacaggttgataatttttacatatgtgcacattcagattaattcaaaatacataaaatgtggaaaatgtttttcaatcctcactctctctagtagttcccagggcttgcttacactcgttgctgaatatattttctagaagctctatgcatgtgtccacagacatctttgaatatagtaatgaaatcatactgtttataatttgtgcttttactaaataatgtatcctgaagaatcttcaatgtaggtacaaatagttctcttttgtaaccaacagatgcattgttcagcataggtgtgcaataatttagccatccttttcatagtaactttattcaagtgtacctacgtgtatgccatcagacttcttgttgagaagtttaaaaaaaatttttttttttttgaaacagggtcttggtctcgcccaggctggagtgcagtggcgcgatctctgctcactgaaacctccacctgccgggttcaagggattctcatgcttcagcctcctgagcagctgggattacaggtgtgtgccaccacacccggctaatttttgtattttttggtagagacggagttttgccatgttggccaggctggtctctgaactcctgacctcaagtgatcctcctgccttagcctcccaaagtgctgggagtactgagtgagtcatcgcactcagcccctggttgagaatttttataacgtaaattcttaaactgggaattgttatgtcaaaagatgtggacatttaaatttgaaagctctctgaaaaacctaaaactaaatttcttctttgtttttgtttttgttttttgagacagagtcttgctctgtcgactgggctggagtgcagtggcgcgattttggctcactgcaacctccgcctcccggtttcaagggattctcctgcctcagcctcccgagtagctgcgactatgggcgcgtgccactacgcccagctaatttttgtatttttagtagagacggggttcaccatattggttggccaggatggtctcgatct

SEQ ID NO: 43398 - DNA, 2483 bp, Homo sapiens
gggctaaaaggaccagggaatctttgctgatgtaactggccgtccttgtaacctttctccaaatgataccttattgttcagaagaagctggagtttttttttcctggcagagttgactgatcttaccctaagtgaaaatggaagctgctagtcttcttaaaggctgggctcagaattggcacattacttctgtcacattctattgattaaggcaagtcatcaggctagctcagattcaggggagatatggaaatagactccatctttagttggtagagtggcatgcatgtaccgagagaggaattgatggtggctatctttgtatgtcatcttccacaaattgaaggaagggtggagtagtggtttcaaaatgcttgcaacagaaaatacctgaaaattgcatttagcacagttgtaatattccggcaggagatgatatgttactagctttggaggtaatgagtagtggctattctctgtatagctgtaaggaacagccaacaggatttgctgatggattagctgaggagtatcagaaaagtgaagaattgcaagattttttggccagagcaactgggtggaagatggtgccatttaccaaaatggagaatattgggagaggagcagattcttgggtagaaaataggaactttggttttgatatggtgtttctaatacttactagaaatttaagtgaagaaggttagtaggcagatatatcaatttggagctcagggggagatgggacatagaagtgacatttggagacttcattagcttgtggcatttgaaaccatggaattggacatgatcatcaagggactgagcctatggctgtaggatgaaggaaagaccagcaaaggagggtgaggaaggacagtaaagtagaagaaagcaagcagggcaaactgtttctgggagataaatgaagaaagcctgtggagaaggagggtgtaatcagctgtgtagaataccaccgagagtgatgtagatggatgaataagtgagtgagggtggtgttaaatctcggcctggctctgctgtaaatagaaggagaacgatttacaaattttggagcaacctgggatgtaacctttctttcagaattcatttattcaatttttgttcactttcttagttttttatttatttatttatttgagatagaatcttgctctgttgacaggctggagtacagtggtgcgatcttggctcactgcagcctccgcctcccgggttcaagaggtcctcctgccacagcctcccaagtagctgggactacaggtgcgcaccaccatgcccagttgatttttgtagtttttagtagaggcagggtttcaccatgttggccagaatggtcttgaacccctgacctcaggtgatccacctgtctcggcctcccaaagtgttgggattacaggcgtgagccactgtgcctggcattttcttagtttctagaaatatctgagtacttatgtatatgttagagatggaagaatctcctcagtagatcctctgactcaatggacaaggcttgtctgtgacaaatgacgattgatctactctttttttttttttgagatggagtttcactcttgtcacccaggctggagtgcagtggcgatcttggctcacttgcaacctctgcctcctgagttcaagtgattctcctgcttcagcctcttgaatagctgggattacaggcacccgccaccatgcctggctgatttttttttgtatatttagtagagacagggtttcaccatgttagccaggttggtcttgaactcataacttcaggtaatctgcccacctcagcctcccaaagtgctgggactaccgctcctggccagttgatctactcttgcacttttttaacatttctggtgagtgtgagctcactttcgtttttgttttttttttttttttttgaggcagggtctcgcacggttgcccaggctggagtgcagtgatcacaggtgtagactacaggcacctacaggcacatgcctcctcgtctggctaattttttttttaatttttagtagagacgatgtcttgctgtgttacttaggttagtcttgaactccttggctcaagcggtcctcccactttggcctcccaaagtgctgggattacagacgtgaactactgtgcctggccttcactttcttacaaattcattctgctttcttattaacataacattgggaaaattgtctgaacctatcttaggttccaaaagagtgtagaccaagtccagttcttcttcttttttcgagtcagaatctcactttgttgcccaggctgaagtgcaatggtatgatctcagctcactgcaacctcctcctctcaggttcaagtgattctcctgcctcagcctcccgagtaactgagattacaggcgcacaccaccacacccagctaatttttgtatttttagtagagatggggtttcaccatgttggccaggctggtctcga

SEQ ID NO: 43399 - DNA, 1545 bp, Homo sapiens
tcaatgctgcctccgacttcaaagtcttaggacagcaaaagctgtttttaatgtagaacgtttaaacacaggtacgaatagcagtggtactccttccttatcagtgtatggcttaggtgaatcttgcgattcgggaaagtttctcacacatgcagagacttgaggttctgaatgttaggaaactttcttggctggttaaataattataaactaggttatctttcaagtgctcagtttaagatcagcgtgggattgcctaagtggttgtagctaaaaagattttttttcctaatttcatattttctcaaaacaaattcagagatcttgaaagatttcttactttggttttaataagagtttaaaaaaattagatgcatgttgataagtggcttctactgtatggctgtccacagtaactctgaggaagatgttacggaaacatgacatgtgccaggagccagtggaaatcgagaatcttggcttctgtttctggctttccttttgatttgtgtgatcagttacattctcttttcaggccagatgccattatgataaactacaaggggtatatagtattttgttctgaggttttgccattgtgctcaaaataaataggttatcagctaaggcttaaaaatatcttttggaattacagagatctggggtttttcctgtaaggagcttgacttaaattttttttctgtagctctgttgtttttgcctgtgtacctctttcatgcagttagcaagggggaaatgatctttgccacgctttgaaactattatgagcgacacaagtttagttaatgtgtggttataggattgggattttgtattaaagtgaagctgtcaaactaccttcatgtatttgaagtgactccattataattgtttttagcagcagcatccaggcagcaacttttctagcaataactaatttttggaaggtgtgagttatccattcagtaactctggtggttggtttggtctgggaggaaggagaggcggaaagacgagatggttagctgtgctattcttagctgagtttcctttatcaactgttgcctctgattcaagcttccagagtcataagacaggaggtggcagtgtggtagcaatgaccaaggggtaggattggtattcttagttaagatctcagccccataaatctgatgttacaaattggcttggattgccagaattttgcttgaaggctgatggcaagcatacatagttttgagtgttccattaaaattaagggtgtaatgtatcatggtctgaaattgctgtttggcaagtattcagtattggtaaataaacacagttctaaatattgacatattctgtgaattttgttgccctgaaggggactactttgtagtacataaactatagatattttagagaattatcctgagaccatataacttgattaggaaatagtttaaagttattgtagaaatatccttgggccaggcgaggtggctcacacctgtaatcccagcactttgggaggccgaggtgggtggatcacgaggtcaggag

SEQ ID NO: 43400 - DNA, 1034 bp, Homo sapiens
ctggttagatattggtgagagagtgtgtgctggagagcaggagggtttgctatgcatttctctggtgctgtgcagaaatagatggctacaaaacatctcatctgtatgcctgtgtagatttcagctctcttcccaggcaaagcattttcacaaatcttgtttttaaggatgagttggtttggatttttcttgttctcatacttaaatttcattaagataattgaaagggatttgagtgacctgatagatttagttctagttgggaattttggtaggggtcacatgattttcatataaattgagcttggtttaacaagaattgaaaatcgagggagaagtcatattcccgtaaaaagaagcttaaagccatagcctgaattggttaggaaaaaaacataagcccattttacaaattctaattgttattatgtttggtcagtatgtcttaattttgttaaaatgttgaataaataagcaaatggttgtgcctcaaggactggcattttaacatttgagagagtttctaaatttaaaaatgaaatgttttggatttttacaattcatcgagctacatgtaaatacagattactgtgccttcccctgctgcttttcttttgctaaccgatgggaatttctccccaggtgtaggggattaatttaaaaacattacctgttaacaactgcctgttttattcttaaaggcttttgcttagtccaaaagcatatatatacttagttacttgttactttataataaacaggagttcctctttaggaaagcacataaggtaagatgtcaccagtgacagcaagtatttatcaatgtatcttcagtttattaacaatgtagatttaaattttcaagttcatttttcaagttcatttttaacaatgtaaattgaattttcaagttcattaaaatgctcaggattttaaatgatacagtactatcttactaacaaagtaaacagggatgagaacattggaggttgtttttactgatagaacaatcatgttccttgcttgtgttgaaa

SEQ ID NO: 43401 - DNA, 1057 bp, Homo sapiens
atgaggatagaggagtaatttaaagagctaaagtgtaagggcagtgtgacagaagggatctaggctgaaaataatcgtgacaaccctaacaaaggttaaaaatcacttttagtaatctgtgtaatgagggaagaaaaatggcagtttaattatcattaaagtgttggtgcttaagttgccttaaaaattcatttatggtggggtgcggtggctcacgcctgtaatcccaactctttgagaggccaaggcaggcggatcacgaggtcaggaaatcgagaccattctggctaacacgatgaaaccccgtctctactaaaaatacaaaaaattagccgggtgtggtagcatgcgcctgtggtcccaactacttgggaggctgaggcaggagaatggcttgaacctgggaggcggaagttgcagtaagccgagatcatgccactgcactccagcctaggcaacacagcaagactctgtctccaaataaaaaaagaaaattcattgatatggaacactgggatccctgataatgtcagataagttaaccattctatttgacattcacaagaatatcaagtgcaaacatgtcacaataggctgggcgtggtggctcacgcctgtaatcccagcactttgggaggccgaggcaggcagatcgcccgggctctggagttcaagaccagcctgaccaacatggagaaaccccgtctctactaaaaatacagaattagctgggcatggtggctgatgcctgtaatcccagctactcgggaggctgaggcaggagaattgcttgaacccgggaggtggaggttgcagtgagctgagatcacgccattgcactccagcctgggtaacaagagtgaaactctgtcccaaaaaaaaaaaaaaaagaaaaagaaaaaaaaagtcacaatggaaaatgttcttttttaaaaacttaaaagggatatggatttatattctttttttgagatggagtctcactctgtcgccaggcccaggctggagtgcagtggcgcaatctcagctcattgcaacctctgccttccgggttcaa

SEQ ID NO: 43402 - DNA, 1033 bp, Homo sapiens
caactagggatgctgagacagaaagttattttgagcataactactcaaaatagaaataaaagcttagatatttctggacctccactttttctgtttactattaagatctaaatgtggccgggcactgtggctcacacctgtaatcccagcactctgggaggctgaggtgagtggatcacctgaggtcaggagttcaagaccagccttgccaacatggtgaaaccccatctctaataaaaatacaaaaaaaattagctgggcatggtggtggacacctttaattccagctacttgggaggctgaggcaggagaatctcttaagcctgggaagcataggttgcaatgagctgagatgatgccattgcactccagcctgggcaacaagagcaaaactccatctcaaagatataagtgttttcaactggcgggtaagaaaaactgctgctgttggttctctaacttcttacaacggtggttcccacttaatcttatttaggtcctggagccctaaaaaaaaaatctgaaaaacctgcagtctgtcttcccagaaacacttgtgtgaaacgttctggtgtttttgtgttgagacagggtctcactctgtcacccaggctggagtgcagtggtgggatcacagctcactgcagcctcgactgccagactcaagcaattctcccacttcagcctctcaagtagctgggactacaggcgcacgccttcatgcctggctaatttttgtacttttttgtagagaagaggctttgccatgttgccctggctggtctcaaactcctgggctcaaacaaattgacctccctcagcctcgaaaagtgttgggattacaggtgtgagccaccacgtccagcagagtatttggcttttaaattataatcttgtgcatagaataagatctataagaatatacaccaggggccgggctcacgcctataatcccagcactttgggaggctgaggcaggtggatcacgaggtcagaagatcgagaccatcctggctaacatggtgaaaccccg

SEQ ID NO: 43403 - DNA, 1067 bp, Homo sapiens
taattgggcggaaaagtccttagctgatttggagtcccaccaccatggataacagaaacgcaatagtgaaccaatgcaaagttcactgtcaaatgccccaggtgtactgaggtgggataaaaagttttaagacaggctgggtgcagtggctcacacctgtaataccaacactttgggaagccgaggtgggtagataacttgaggtcaggagttttagaccagcctgggcaacatggtgaaaccctgcctctactacaaatacaaaaattagctgggcggggtggcgggcacctgtagtcccagctacctgggaggcttaggcaggagaatcgcttgaacccaggaggcggaggttgcagtgaaccaagagatggcgccagtgcactccaccctgggtgacagagagactctttctttttaaaaaaaaaaaaaaaaaaaaaaaatttaaaacagcctgaccagttagcttacgtccttgtcatttcttgggtggagggatagattttatgtctttgaatagtctacttgcaaaggggcatgagacagaaaaatcagttaaaaggctgtccttttcttggggttagcaaccatactgttttctgttacagcaagggtctagcccggtgcttgattacttactactcagttattaaatttattatgtgcagaatagcactggctagaatttgagcttagaaatagaaaggagcatgtttttgccttagggcctttgcatttgccaccttcaacctagaacgtttttctcctgtctcatttcatttgtcacctgagaacattgttattcacatatccattattcccttactcttaatttttttatgttgtcactgtctgatttaaaaaaaatagagactcctgaagagtttcttgtttgtttttgtttttgttttgagatggagtctcgctctgttgcccagcctgcagtgcagtggcacgatcttggctcactgcaacctccacctcccgggttcaagcagttctcctgcctcagcctcccgagtagctgggatcacaggcacctggctaattttttgtatttttagtag

SEQ ID NO: 43404 - DNA, 1064 bp, Homo sapiens
tgggaggagggtgaagagtatggtttaaaaagcatttagagaaatttagtaaattctctttgttagaaactagagttttgaacaattttaaagactataaaattgttttttttttttttttttaaataaactagttacttgcactttacctgctggcttttccatttggtagataacattctgaactccagcagagttttataatccccacgtgcttaaatatactaaatgttctttttccattaaggttaatgttcgtgaagaaattgaagagttttttccaagaatgtggaagataaatcaagataaaagaaggctaatgaaaagtattaaagatcagaaaattaaaattgaatgggggaaaaaattgaacagaagattggtcagatagaagcacttgaatatttttttaaggctattttgaattgtttgaattggggaagaatacacgaagtatgaaaaatgaaaaactcaatgaagaatgaagagaagtagaaagcaagagtgaagtagaattaaaagaatctggaagaatgaatgggtcctaggttaagtaaatgtatggtttatgttccagtgtctgtatgatcaagttgtagatgaatttgcatgattacttagttaatagagaattggtgatctggttcaagtagggaattattgaggacagttagcagtattaacagtgggttattattgagctgaaattttttctggagggtgttgtctaaccatttgtttttcaggagcaatcaatataaataattacggtactttaaatgttaggtgttaggcatctacatgaccagtgccatttgtaatactgtcttctttgttaggagtctcgctctcagtcaaaatctccaacgggaactcctgctcgtgtaaaatcggagagcaggtcaggatctcgtagtccatcaagggtttccaaacactctgaatcccattctcgatcaagatcaaaatccaggtaagtgtgtttaagataatacttaaaatattcttctggggtttttgaggacaaagcagttgttggctgcattttgtgtagaaatttcacg

SEQ ID NO: 43405 - DNA, 1028 bp, Homo sapiens
ctttatataaaggacttcttatagcctgattcctaatgcagagttcagtgaaagtgacatttatttggtaacagcttttgagaaatgttactttatttctaaataattatatacttggcagtttattcttccagttaagtttactaatagttactgatttgttaatataagtttgtaagttgtttttgaaagttaaaatgaagctgggtgtggtggctcacacctgtaatcccagcgctttgggaggccaaggcgggcagatcaaggagtcaggagatggagaccagcctggccaacatagggaaaccctatctctactaaaaacacaaaaattagctgggtgtgatggcgtgcacctgtaagctgagctactcaggaggctaaggcaggagaatcgcttgaatccgggaggcggaggttgcagtgagctgagatcaggtgccactgtactccagcctgagctacagagcaagactccatctcaaaaaaaaaaaaaatagttaaaatcatagtgacaactttgtagctaggagttagagacagctaagaggactgtttttagcttagatgtttccatgaagaaatttgtgcagactgagatttcctctgagataaaaagaaagaagggcagacaacaaaggaggttaggtatttgtgacacctttgataataaaaagcaaagcttcttttaaaataaatctgatgttggccgggcgcggtggctcacacctgtaatcccagcactttgggaggctgaggcgggcagatcactagaggtcaggagtttgagaccagcctggccaacatgggaaaaccccatctctattaaaaatacaaaaattagccaggcaaggtggtgcatgcctgtaatcccagctgctcaggaggctgaggcaggagaatcacttgaacccaggaggtggaggttgcagtgagcctagatcgcaccattacactccagcctgggtgacagaatgagactcctccttcttaaaataaataagctaacatctcttaaaaagacattc

SEQ ID NO: 43406 - DNA, 1511 bp, Homo sapiens
ctctttcctcttccccacggtccagtcagcgggttaattaggccatcggccctcgagccgagacttgtctcttatttagttctggggagcgcctcgtcgacatgagtgatgtggaggaaaacaacttcgagggcagagtgagtacaaagccgcgggagccgtctaggcggcggcccaatgctcggggtttcacgggaacaagcgcggtcgggcggggttgcgggtagtcccgcgaggagcaacctctggagccatcgcgattgattcctcccatcccaagatggcttctgggttccactccttccccaaacaccacggataacacccctcccccttttttggaggctgactgatacctggacttctgggtcctcttccctccccgcccccgcattgcttcctcccttctccccacccctgaggcttccttatgtctgctccgaggtgtgggtccccgtcgcggttgggcgggaggaggcggcagggagctcccctccgtccggatagtggtaggtgcttcctgcggtggcatttctggcgaccccgagcatcgtagagggtctcgggatcgaaagtgcgcggggctgctttccgggcggggagaagctggcgtgggactagctggggcctgtgtctccttggctctctatttcagtgagcggccgcgtctctgttggaaccggcggcgttgcgtctaaaaaggcgaaagccttgaggttgaaggtgggacgagcctaatgaagtggttagtcaacgaccgcaccgacccttaagcgttcttaagacgagagctgtgaggggaaactacgcaaggagcccttttcccttaatgtcccttcgactttcctttcacttcgaaatgaatgtggaaatgctgtcacgccttatttttctaattcctcgatgttgggttttttctcttctttatatctcaacttttaatgctcttcttcctatgacctttcatctaaaaactgaccactcctttacaggtttttacggtaaaaaaaaaaaaatctgtctttctttaatcttacatagctgaacgaattcattggctcagtatttttaagataactagtcagtatatactgttctgtaacttaaaagatgacctgaaaattaacaggccctctcccatttctcttctcactctatcccccaccgaagagggctcagaaaaaagtttttattaatatatttggggtcggagaaatacaaacatcacaaagaatacgatatccccagcttaaatgtactggaacgtttgtcagtgagtttcatttccaaagtttaccctacatagggaattgtagaagtgagttagtagaagtgagttcgtgtgaaaccctggaaagaaaacaaaagccccatgcaacacgttccgggctgttgtgtagatgtttattctagtcactaggggaagcacataaaaacacctgaggtgtgtgtgctgaagggcgaattttgtccttttggggagttcatgatataaacatctagaaccaaaa

SEQ ID NO: 43407 - DNA, 1052 bp, Homo sapiens
ttgcagtggaagaagtgtaggtgaagtatgggtgttggggcagtgagtggatggaaagaagcctttcagactgccggtgggtttgaatcccctgtgaagggcagccgggagcccaggagagccttgggtcaggacaatggaaaaggccaagtgtgaggttcctagtggactcttaatgtctccttaccaaatggtgatgatagagactatttttaaaatcattatttttatttgttattatttttatattttcttagagataaggtgttgctctgtcacccaggctggcgtgcagtggcatgatcattgctcacttgtaaccttatactcctgggttcaggtgatcctctcacctcagcctctagggtagctggtgttgcccaggttggtcttgaacttctgacctcaagggatcctcctgcctcagcctcctaaattgctgggattacaaatgtgagccaccacacagagactatttttagggtggtttttgtttggattacaaaagagaatagtagaaacctggagatgtgagaaggctgacagttcagatatgagatcagacatttatcattttaaaaagggcatgtccactgaccttatcaggaagtcagagataaggaattatatgatgaggaattgaatgactgggtagaggtcagagagagaatcataaatatgggaagggaataatttgactggagatggtaataagggccaggggattgttttccaagactggtgggtgggtagacaagatgcccccagacaggcctaggtggccaaggaaggctgtcctctcgcggtgcatccagaataggggctgctgttctctctctgtttagttgtcttctttgtctagtccctttcagtcttcaccctggaaaagtacacatttaaaatggtctattgatccacctggatagtggttaaacaggcgctaactttattcattagtcctttctgtgcacctttctatacgtattgggattgaaaaccaatgaaagagaaaagcttctagtggagccctggtcactggtccactgtgtgcc

SEQ ID NO: 43408 - DNA, 1025 bp, Homo sapiens
aaatacaaaaattagtcgggcatggttgcacatggctgtagtcccagctactcgggaggctgaggcaggagaatcgattgaacctgggaagcagaggttgcagtgagccaagatcatgccactacactccagcctggatgacagagcgagcctccatctcaaaaaaaaaaaaaaaaaaaaagtaacaaaattatttctggacatctaattcccagaattcccggtcccaacactctgggacgctgaatgcatgtgggaatgaggatggggaaagcagggaggttaggaaggaaagagacttgagaatgtgacgctggtttcaagagtctgcaagaaattgtttcttctttcacaggaaatccgacgatgactcttgggtgagcaacggcacctatttggaacttagaaaagatcttggtttttccaaactggaccatcctgtcttatggtgaaaaagtaaagaagaaagataacattagtgtatttctcctgtgcttgccttctgaagtggcacaaacctgtgtttatatatttaaaagatactctaggatgatcacttgtgcttagcttagcattgtaactctttaagtctatattttcctcagtgcgtttctttacaatttcaaatgttaccctgattgtttatatgaatgtagaacaccttgacatttctttttatatataaactatttaataaaaatgaaagattgaatgttcatgtgtgggttaaaaaaagaagctttaacactaattttccaaaggttagggaagattccaattaaatttatgccttataaaattatgttgtagaaaaaaaatcaacctctcccaggtgcattaagaaataagaattcccagggttactcacccatgcgtaagctacccaagtttaatttggtagctgaaatatctttttgcctcagacagctcttgaattgctcatacagaacaattctgctggtgctggagtctgaagaatattttcatttgcattttagtggttagggagaggatataagattaat

SEQ ID NO: 43409 - DNA, 1112 bp, Homo sapiens
agtctcttttaaatgagtatattttcacttagtctctgcctaatccacatcagtgtatgatcctggacagtttgtatgtgttctttttttagttggccgagtcagtggaatcagccttatttcacagatgaggtgacagaggctgaagggactgaaaagctgtgaaggtcatacagccagcagatgatgttgcagtcagggcccaggtccatggaacaacaaaaacctttccctcgttcccggacactagtgcagcacatggcagatgctccagaaataggaggaaatatacaaaataataagctatcaatgtaaatctccccagaaagctttgtaaaactcttaaaagcaatgtgggccaaataaaccattcccaaaggcctgtgtaagccataaagaaataagcaaagttactgatatttgaaggttgagacttattcagaaaatgtgttgaacccatctaaacataatctgctaaacattcattcattatctaacacaatagtttaaaaaaatcaaggttgggtttttatgagatgtgtgtatactgtaggggttctcttgtaattcatatggatgtatatttatccctgttttatggggtttaaaattattacagaagaggcgtatggtttttatatactgtgtttacattcggccatacctgtaaagatgccaaattcttcatcaaagctatagtgctcctctcccacattgctacattgtttttgtgggatgaatataatctacttcataataatccactttaaaatatgtttacattatgggggagaggaacatttcatagctttccttccatttcatagtgggtcatgccagctggggtggagaagtggggagtggggattgtcttgagctgattaatggttattattattatagatagtgtctcactatgttgcccaggctggtcttgaactcctggatcctgggctcaagggatccttctgcctcagcctcccaagtagctggaattacagggctatgccactgcaccttgattttgttttatatgatcccatggtttcaaagctagctccgttgttttcatcgaaagacagctagtgaagaaaaggagaagaatgtagcat

SEQ ID NO: 43410 - DNA, 1026 bp, Homo sapiens
tctgcttatcttacacctattgcaatcttgtcagctgtacattttgaaccaaatattgtatattctgccagtttttaaaatttatgtaggactcttctcatttggtggaaagccttgtttttctgtaggtcacctggaagccagaggaattgatttggaaagtggcggctagctgagtgccacatttattttatttggagcaataaacaagacagtgagaggtagctccccaggggacccactgagatggccatgggcatcctgtgtgtgtggcaggcaggggaggggcatagtgcctatctaataggacataggatgcagtccgtaactgtgtggcttgctgctctcctcccaaggctgttctcctacagctccatagattctggccaacccctcattcctagaatttctaccctgtgtgcagttatttacaagcattttcctggcaaaagagtaaagcatcatctagagctgctgccaacatttcaagagactgcagtcaccatcactttcatcctcatgtgtctccttcatcggtatcactatgatattgcagtaacatttgttatttattacataccacgcattgtgttatgtgctttacctgcattccctctctcattcaatcctcatgacaaccatttaaagtaaaagttattattatccccatttacaaatgtggaaaccagggttcaggcacatcatttactcatccaaggtcatggagttaataggtgatggagtggggaagaatccagggctgatggtggagccccagctgttgattactctgttgtcctgcccattattttgctcaattaaattgtttaaagcaaggagctaagtgtgtttcataggcgtcgttagaaaattttagttccatttgacccccatcttctgttggcagaggcagcaccattgtgtgtgtttgtgtgtgtgtgtgtgtgtgtgtgtgtgtgtgtgtgcgtgtgtgtgtgtacaaattgttgtgactttgttaagatgtttcaggtccatcactaaatg

SEQ ID NO: 43411 - DNA, 1029 bp, Homo sapiens
tagaacattaactctccaatcttgggtccacccattaattggttctgtgaccttaaactctccaaacctcagttttttcatcaataaaattggaataataatagttcttttctcatagcattgtggtaaggatgaaaaataagcacttattccagggtcagactcaggataggtgctgagtaaatataaatgtatgtttttatcattataattaacattaatttgaccttcaagtcttatttgtgaaagtcctgaatgcccatagtgaatagttctagctttttttctcccaggaacttttacagtatcatacgtgtatccactcatacctttttagtgttgtacaaaagcccactaaaatatacactgtatatgtgaatatatacttttaaaataaaaaatgccttactctacacattaataaaatgcttttgtgacgaatacaatagaatgtttaataattgggctacatttgacatctttaggcataacctatacctaaaacaagtgaaaaaagttgatgaattcttaccccatcctgctaagccttgcccttgcttgggtggtaaatgattttcccctctcgccctctatgccagcatctatctcttggtagtagctgcacagagcattgtgttaagaaggactttgcagctgagtctgcattcaggggaaagattgccgtgtttttagctgtgacttctgggcataaggcagggagagcacagcatggacattgtgtttgtcaccccttagtgatagagaagagttaaaatcaagagctctctgttgcaatctttatattgtgttattggatgaacttcaggcaagtgtaggttgtctcagttctccattcataaaatggaggaaaactcaactcctgctttttcctgtggaatgcggtaagagaaaattgagtgttttcagtggctaaaagacattgacagtctttggagaaaagtcctctgtaaatttaagaaactggtataattacggatgagctgcttttactttggccagttctggaag

SEQ ID NO: 43412 - DNA, 1025 bp, Homo sapiens
catctgatacatgacccactagggtattttgtttcttgttatttgagagtgttcagttagcacttatagagcattacccattgttagctggctgtttacatttctgaaaagatgataagttgatttttgtaggaaatagggaagttttaaaacttcatgctcacatttcatagtaactcaattgatagtctttttagataagtaatgaaatgctgcctgtggttgccaattgttaaaactctaccaagcttccgcaagcagttgtcggttaagggagcgtaataacacccactgataaaattcaaaccaccagatgttattttaagttcttgggtggtgctatcttttcttaccctttaaactgctaagtcacatcctgctttgcatttcaatttggtataaattggatgcagcagacataggtctggcataagatgctcaaacaaaattaaataccaaaattaaagaaggcagttctgtggagtaaatctgtcatttctggatgcaagattatgttagagcagtggctcaacccttgctgtgtatccaaatcacctgggagtgtctcaggatgcccttgccctggcctcatccccagtgtctggaccagttagtatgaaatggcaccaggctttgggattttgtagaagcttcccagggtgatcctgtcacgcagccggggttgagaaatgttgcaggaggtgcccctcccgacccagctcacagctttgtcctccatgcttctctctacctagtcaagccctatccacatcttcacggctccctgcaggccacctcttcctaagctttttctcacaactccagccccactgagctcttcccttgtgactgcccatagcacctaccagatggcccaccctggggtgtgttctggcttgtttcatttgtgacatcttatctccttgatcacagtggtttcctccttggattaagtttctgtcacttagtttccatcactgaagggttagcacagcagtggacacatagtagttactttataggat

SEQ ID NO: 43413 - DNA, 1082 bp, Homo sapiens
cgtattttggtcttaatttgcttaacttttcttctactgttgggcattgaggttgtatacactttttcctattataaacattgagtccaaaggtatcaatattttatagaattttgttagtgatagccaagtaggtttcccagatattttaacttatttatccacaatatgtgtcaaaattgccagtgctgcttctcattaggtgttgatatttgaaattgtttttctagatttcataagtgagaaatagactggatcaggtaagagagggttgattggagtgatgcaagggggcagctctcagagcccctggcaggcagcaggaagcactgctgtgacacaggagggcctcccactcagcagacagagccccatgaagatctctcttctccccacccggccgcccgcctgccccactgcagctccgcatcttcctggtctcctttgggtttctatttgcctgcccctgtctcattgcatgtgcgtgctgtctgtctgcctgtctctgtgcctcacactctgtatttctctgggactcctgtctgtcaatctctcttatcttttagtctctccctccctctctctgccctgccgtcccatactcatccctgcttgcccagctcatggttaaaaatagctgccctggcagtcctacccatctactgagttcagtggtcttcagagtctgcctaggtccctgtgtgtctaacttcgaaatacttccacgttctgaggaagggaatctggttggctcagctaggtcagcacagtggctaccctttgttggggttactccagtggacagggagacatgaggcacagacctggatgctgattcaccctgagagtggaagaggctggttctaggagcaggttgctgaggagcagagacgctcttctagctctgactccccagtcctgaggagctccactctgtagagagaggtcaacaggcatgcttgggctcctctgtgggcctagtgatggccctttctagatagataacctattgtgattgatggaaactatcttctaggattagatttgctgttctgaactgaggaagattcgcttaattggtt

SEQ ID NO: 43414 - DNA, 1049 bp, Homo sapiens
aaactagagaatgctcttgcagagaaggatttattcctcaggagttaaacttgaaaggaaagccatctttgtagaattcctttgagacattttagtgcgtcttgcctcaaacaggcctgtccactggctgcttaaaaggaagacagattttattattaaataagaaccagcaaggaaagatggggaaactgtattgggtctttgagtattccggctggaattgggatatttcttcttttcttgaaaagacatctggccacatgtattataggcagacatcaccccccagtgttccaaaaactcagacaacaataacaaagtcagatgtgcatgcccgtgtcagcccagaaggctaaccacccaccctctacatgtgcttctggggttgatgttgaaggggctgagggaggtttgttatcacagcggtaggcctgtaaacagtctaccaggataatttctgtttcagctgctggctttttaaatccaactctgtgctaacatacatggtgtttaaaacacctaattctgtggtcatgtcatttagaaatctttagtaacgttttttgaatgttaattgtatgtatagttccactggctcttacaaagagcagaacgacatataaaaatgatgaattgctatgccttctcccttgtcttcttagtgtataaacacacaaaaaagaaatgaaaaagggtaacagctatatatagttgactcttattctatctaaagaagggaagacaagcagaccacctgagccgggacaaatgtgactgctaggcagaaccgtgagcagctataggtctaagtatctcaagaataagggaaacttgttgggcatctaacagccttctgattactgtcagatcagtgagctgctcatacaggcctcaggacagctgattaagttggagataatcagtgtcacccaaacacttaaaaatggaattggctgtctcagaaagtatgggtagcgagtagcccatcagagtatcagcagccattaaactcaaccttgtacaaagtgggcaggcattgaggaaatgtt

SEQ ID NO: 43415 - DNA, 1056 bp, Homo sapiens
acataggcatatacatttgctccaaactcatcagtctgtacacttaaaaggggtgctgtattctcttactgctatacagaaataccctgagactgggtaatttataaagacaagaggtggccgggcacggtggctgatgcctgtaatcctagcactttgggaggccaaggtgggcagatcacgaggtcaggagatcgagaccatcctggctaacacggtgaaaccccgtctctactaaaaagacaaaaaagtagccgggtgtggtggcgggcgcctatagtcccagctactcgggaggctgaggcaggagaatggcgtgaacctgggaggcggagtttgcagtgagctgagatcgtgctgctgcactccagcctgggtgacagagcgagactccatctcaaaaaaaaaaaaaaacaaaaaggaaggtttaattggctcaccattctcaggctgtacaggacacatggttcgggaggcctcaggaaacttacaatcatggcagaaggcgaagggggagcagacacatctttcatggcctgagcaggaggaaggtagagaggaggaggtgctacacacttttgaacaacaagatctcacaatactcactatcatgagaacagcaccaaaggggaaatttatctccatgatccaatcacctcccaccaggccctacctccaacactggagattaaaatttgagcagggacacagacccaaaccgtatcaggtgcattttattggatataaattatacctcaagaagcattttttttctttacaaaaagagatagggtagtgagaagctaaggtgtggaacagcaaagcacagttggtataaagtgtaaaatatttttatcatgccattgaattttctgtagtcctattttctctctcaaaatggtaaaccttctgttattatgcccttaccacttgtctcagaacacagacataactacaagcaagtgtatcacggtgaaaaaaactgaacaatccacccatacacattttcatcagcaagcttcttctgtgcctgaggatattttgccaacttaagca

SEQ ID NO: 43416 - DNA, 1138 bp, Homo sapiens
caacgtggatggatatttgttcctggagccttaattgcattactaatgtttattctggtaaagaaaggcagtgtggcaaaatgacatgttttcttaggagcttttgtgctggcactccatgctgttatgaatactttttatgacctggcttatgaatctaatcatttataatagcatttctgtggggaaaacaatggattgcaaattccaagctgttgacttataaacatatttttgaagcatgaagtattgataaattggagactgttgaaatagtccataaggcctgggcttagtttggggcccatgaaagcagagcctgaagcaaggagttgggtgcaaataatttatttgggaggtgatcttaggaagcagcgctgagggagcggggagagaggcagggaaggagaaagtcaataataacagagtgtgttatagttagagcatttacacagccatccctgtacccctctgcttgaggttgtgcactgggccatttgtacttccgcctttctgggtcactcttgccttcaggctgagttgatgccacccagcttcaaagaaggctctggggacaaaagagacacttatgctgtctttagtgggagctgtcagcttgaggccaccctactctgaactccccgccatggcaatggctgaaatcagaggtgggtggagggaatatgacaaggggacatcaagaggatctgctgccaacatccaaaatggattgattatatacagttcagctaacctatttcattgaatcaaagactgtcaattgtaagatcccccattaatttatgtaccactaagaaagaaaatgtcccactgaggaaggaaaatatgctgccaggtaaactatgatggctgttaaatgtgagacacacccaatgtcagagatattaaaatatgagaaagagtgtgttccagacttggtggaacacagtatgtgatgaatactgtgaagctatgctgtaggtctgtatgtcatattatggaaagatgtcaggaatacattgttaaatgaaaatggcaggttatacagtgtgtaaaatgtggttctgttaacgtgaataagcaaattgataaattctaggtgaatttacgctcaactactaatatgaattctccccag

SEQ ID NO: 43417 - DNA, 1030 bp, Homo sapiens
ccatttattaaatggagctccagttgtgccttgatctaagtgacttggagttctattttcattcatttgttcagcgtttactgggcacctactgtaccaggatctgaaataggtagtggatacaaatctgcagcttctgtttagagtaagcttccttccctgtctgaactgtttgatcactgatacaatctgactgcttcctaatgtgcctaattctttttctgatgatctatttagttttcatactgagagtaataatgaatgttcaattaataaacttttatttaagatgattattcaagtctgattacaattcagcagatacgtaatacttttttttttaacacaatactttaataagacacatttaaactcaacttctgagcagcctttctggcagggataggaaattagaacctgctggtataattttttttgaaagaaaccccagggaagagttgcttggttaggaaagatggggcttactccttggcagagctgacaaatgatggcatattgagaattgaactatagatgggttgccagaataattaaagtgatgaagcaaaactacttaagtgaaggctttaatcttttaagatagtattattagcaaaagcccagagtatgtatttatttaccttttagagacggggtctcactctgtcgtccaggctggagcacagtggtgtgatcatggctcactgcaaccttgaaatcctaggctcaagtgaccctcctatcctagtctctcaagtaggtgggactacaagcatgcaccaccatgcctggctaatttttagatttttttgtagagacagtgtcttgctgtgttgcccaggctggtcttgaactcctgggctccagggatcctaccacctctgccccctaaagtgctgagattacaggcattggccatcccagagttattttaaatgagattggggaggggaagcggggttgatagggaattgggtagggaaatattttaaatctgggaaccttgatggtactcttgtttatagattca

SEQ ID NO: 43418 - DNA, 1033 bp, Homo sapiens
ggaagcgagatctgtgggtcttgctgtagctagttaactcaggctgaggtttagcaagtcatggacctcccacatccttttaacagtactgtttctcctctctctcagatgacttgtgtgagacttagccaggtgtcaatggatgtgaagggggtttggaggaaacaagggcaagacaacattctggctggacagggagccagctggaggggtggggccacatgaatgggacacacccttgagggaagtggttctaaacctcagcagtgtcagagtgtcctggagggactggtaaaacacttgagttgagtccgtcgcagtggctaatgcctgtaatcccaacactttgggaggctgaggtgggaggattgcttgaggttaggagttcaaaaccagcctggttagaatactgagactcagtctccacaaaaacaaacaaattaattatttaataaaacagattgctgggccccacccccacagtttctgatttagtgggtttctgatttaatgggacctgagattctacaattctaataagttattaggagatactgactctggttcatggaccccttagcaaatccaagcattggttcagcaggcagaagaccaagtcttaaccagcctggagtccattctgattccgagaagaaccagagaattctggttatcattagattgtcataacccccttattttatataacacttccacatttgtaaatcactttaatatatgtttcttctcacaacaaaataaccctgtgaggtaggcaggggatttattaaccttgttggacgactaaggaaaataagattgaagacagatgactgacttaccctaggggcaaaaatagttgagctcatacttatatctagattttcttactgtagatttattgctccttctacattgtcttttttccttggaaaatactacattttattcaaatgattttgagacaaaacaaaattagggagatgtagaatcctttcgctcatgcattaacagtaaatattttttgaagaca

SEQ ID NO: 43419 - DNA, 1053 bp, Homo sapiens
tttaagctatgtgaacatttaaaaattcttttataataataaatggaatagcagtgtgaagaattgcttctttagttattaatctaaatgattttgttttgaagttggtgatatatttccttcatcttggaaaaatacagaagactcactggtaatttccttgttcttagccacattgtttgtacccctgaaattgaattttctctggacttggtttataactgcctctacctaagtctgttgtttgagagccagaatatggttgtttctagatgctccaagaccccttgagtatgagtggaatatgattcttagggaataataataatattgtgtgggtttaaagccaagaagcaaatttctttcataaaagtttctttagatgaaaattatgttgctgtctatatgtctgtgtttacttatgaaaaaaatatctgaggtaatcagcccagttctctgagtgggtgtgggctggatgaacaatcttagtggaattttcatctgtgatttctgagattgtgtgagagtagatctgagttaaaaaaatagcttaaatgtaaagcagagcagaatcaaattgcaatgagcaatccagtgtgggattggcagaggatctctgacagttactataactaaagtttgctattttgtttaccctctacagttaaaatactaaaatctttatttttagtattgtgtgggtcagatactttcctcaatgtaacatttctccaaatatgtattaaaatgtagtacttgtaaagattcccacactggtttcctgtcttgatatcaaatattgtaatagttacaagaactttaaaattatagtttacatcttataaaacaaatatttctccctccccaagtaatttgtggtggacagtcatctgaaatgtttagaagctaaagctaatatatatattttaatctacatatatgtatatatatgtgtgtgtatatttatgtatgtatatattttttaatctcagcaactcttattaaatttgaagtagatgcctccctagaattaaagcatgcgctaagattttt

SEQ ID NO: 43420 - DNA, 1029 bp, Homo sapiens
taatttgaaagagcctttaaaatatgaacattctggcctaaaacccttcccatctccatcaactcagtggtcaataatgctcaaattttcggaaatttgagcaaaatgtataaaacatactcgtttactaaacttacttttgttatacacaagcaactctttaacatctagaaagactagatgttgtaaattaggtattgtttatcctttatatacacagataagtacaataaaatgcatagaagtaaggaacagtggttaatcttgcctcactgtggacatcagcatagagctctttgcacttccttttcctgtctcctcccctgaaacagtgcacaaacacaatgtgtactactcaaggggtggtttggccattctcccccaaacatttcttatggaattttaacaaaaagacatttacaaaatgtatcattttacaacctctacttttacttttaacaaatgtatcaggcactgaatacctacaaagcctagatatttcaaaaaagtacttagcattgtcaatgatatatacagtagtgaggaataaaatgcacacaacaatagttatactgagagacaggactagctggatttcctaggtcgactaaaaatccccaagcttagctgggaaggtgaccccttccacctttaaacatggggcttgcaacttagctcacacccgaccaatcagatagtaaagagagctcactaaaatgctaattaggcgaaaacaggaggtaaagaaatagctaatcatctgttgcatgacagcacagcgggagggacaatgatcgggatagaaacccaggcattcgagccagcaacagctaccctctttgggtcccctccctgtgtatgggagatctgttttcactctatttcactctattaaatcttgcaactgcactcttctggtccatgtttgttaaggctcgctcgagctgagctttcacttgccgtccaccactgctgtttgccgccgtcgcagacccgccgctgacttccatccctccggatccagcaggg

SEQ ID NO: 43421 - DNA, 1051 bp, Homo sapiens
aacttgaccaattcccttgaagcgggtgggttaaaccctgtaaatgggaacaaaatccccccaaatctcttcatcttaccctggtggactcctgactgtagaattttttggtttaaagaagaaaaaaataaagctttggacttttcaaggttgcttaacaggtactgaaagactggcctcacttaaactgagccaggagagctgcagatttattaatgggtgtgttagtgtgcagtgccttgcaggaatttaaactctctacccttaaagaaggaaatgtatttgtacaaaagccacagataatggtccttttactcaagcgacctgctggataaatgacagcctgcagggattgagtttggagatctagtctcaattctgcttccgatttagatgcagttcacttttgttttttaaagtaagttttattaatggaaaggaagaactttttccaagaaagcattttgaaagccactgggggagggggacatttatgcttttgggctgtggagatcctttaggtggagagactgctctctcatccctagtggaatggaggtttgggttggtgagtttctatcaatagcctgctctctatagtgggtcagtgactggcaccaaattgtagtcctgttccatggacattgccctgttttggttttatgagcttttggccaggcacaggacgcagggtggtagggaaaaaaggaaatggttcctgtgcccgtggtgctgacaggtaagggaagggccttctgatgtattttatgggatgcttcagaaacctgggggttgcttgtgtctctgggaagcccttggtaaagaaagccaccattttttttacttaggtatattccagtggtttatcatcgggagagggatgataatggaggaaggctcaatgagggagaaagtattcagctgcttgatgttagagcttaatggcaggacctaccagttgcttttcacagaaatgctgtgtattgatcctaaggcagcatgtgttctcttttgtgtggccattatccattctcccacttttccatcagtg

SEQ ID NO: 43422 - DNA, 1049 bp, Homo sapiens
tgacccctccaggagggtggagaagcttgtctggcaacagcctacacaaacggcaattctgaagagcaacaaacaaaccagtttagccccaattcccattttgcataagaatgcgccccacaaaaacaacacccgaagaacattagttgatcaccactggttgatcgttaccagttgcaaacactaaagtttgagccaagacagaattttaaaagtcccctggaaggaactttgggtaaagtggttttgtggaaactggtgttaaagtgtcattagactgaactcaaacgttccatggggagcaccagatgtttcaagcaacagatcttggtaaacttggtttcagaaagaagttaagccagagaagggtttggacccataaaccaaagggaacttgttagtcactaagtgactgccaaggtacctgttttcgttatgctaataagaggttacacaaattccaggaaggaggattgctaggtgcaggggatggttaggtcacagggggaccgcctgccggctggcctctgaatagaccctgaccatggctccttaatccagggaagcagcaaaaacgaacagcaattgggctgaaaacagggcgaaggtccttgcgttaggccgggagagtcgttcttaaaaacatgcatcctcccagaggtcacggcctccttcacatcgtccaggtcgggcacgggtcccagagaacgacaccccagtgtacatgaggtactgagcgaagacagtgggcattgcttctcccctccccatccccgaactactcttgccagccatcacacacaaggaaaggtattctctataaccaaacggatgatttcgtccacttcttccttaaacacctaaaaaccacagcgacagcactagtagcccttcattcggaatcagagcagcagcatctgcgaacctgcaaagaccaggggctaagggtgccaggacacagcgagagtggcccctgctcagatccgacacaagcctcgggggctcccggcggcgtagacgccgcacttcgctcgcttcccgctctgcac

SEQ ID NO: 43423 - DNA, 1117 bp, Homo sapiens
atacaatcagaccctgcccccttcacatcttacattctatttttgttttttttgtagagatggggtcttgctatgttgcccaggctagtcaaacaattcttcctccttggcctcccaaaacactgggattataggtgtgggtcatcactcctggccagatctcacattctaaagagagagggaaccaaaaatacaagtgaactaatgaaataactgcaagttatggtaagtgaaagagctagctagctatgtgaaaaaaggagacaaaggaattcaaggcatagataatatccgaatggtatactcatttgcctcttaccatagtttatttaactggcttcttttttttttttttcttttcagaaggagttttgatcttgttgcccaggctggagtgcaatggcgcgatctcagctcaccgcaacctccacctgcagggttccagcgattctcctgcctcagcctcccgagtagctgggattacaggtgcctgccaccacacccagataatttttgtatttttagtagaaacgaggtttcaccatgttgaacaagttggtctcgaactcctgacttcaggtgatccacctgccagcctcccaaagtactgggattacaggcatgaaccaccacgcccagcctaactggcttcttaatggtgcatagttgtttctaatcttttcttgtaacagatattaaaatctcctcatccatacttctttgcacacgtgtgcaagtaggatacattcctggaatttatgctgggtcaatggatatgtgtgttttttatttgatggattctactgaaaagcccttcaaaaaagtttgtgccaattataattcctaccaacaatggataaaagtgccaatctgatagatgaaaactggtgatcatggcttactgcagcctcaaactcttgggctcaagtgatcctctcacctctcagcttccccagtagctgggactacagaaacatgccaccatgcctggctaatgtttactttttgtagagataagggtcttgctgttttgcccaggctggtttcaaaacttctaggctcaagtgatcctctccactcagccttccaaaaggactgagtcatgcaggccaagagc

SEQ ID NO: 43424 - DNA, 1031 bp, Homo sapiens
ttacatttactccaatttgtttttttaaaaccaatttatcgatgcttcatctcactcctggcctttatgctttagcctctttctagttgaaagaactcttcagagttctttttagagaggacctgagcagtaaacccagtttttgttacatggaattattttgagacagtcttgtcctgtcgcccaggctggagagcactggtgagatctcagctcactgcaatctccgcctcctgggttcaagtgattgattcttgtgtgtcagcctcccgaatagctgggactacaggcatgtgtcactgcgcctggccaatttttatatttttagtagagctggcgttttgccatgttggccaggcttgtcttgaactactgaccacaggtgatccacctgccttggcctcacaaagagttgggattacaggcatgagacaccatgcccggcctacatggaattattttgccttcatgcttaaatgatgagttaactggtaaaaatataaggtttaatgttttccctcagtactctgtcttatggcatttattactactggtaagtttgctctcagtgttatttataatgaaacttttctatctcaggtaatttaaaaaatgtttcttcttagttcttgacgttctgtttcaatctggtatgtctaggacttaatttgttttcgttaggagctctgtgtagtcctttaatctgaggacttttctggaaatattttgccataaactcattttaaatattgcttatctttcatattttatagtttcttctgggactcctattagaagtaacttagatttttctcttctatcattgtctcaattttgctttcatattttgcatcttctctggtatattctagataattttcttagatctttcttccaacttacccttttccttagctgttcacatcacttccactgaattttcaatgaaaatgacttttttcatatctagaatttcatttgggctcttttctagatctttttcttttttcatgatagtctgttcttgcctt

SEQ ID NO: 43425 - DNA, 1050 bp, Homo sapiens
tgccatcactgatactgcctggaagaggaatatctcccaatgagatgccctgaaaaacgaaggagaaacacttcaaacatgaatagccctatttctgaagcagttctattacctaacaactttctttcccctcttttgtcaattcctctacatttaatagagatagatgctgttggcagtaacttcctagttaaatacaggcaatacaatacgagatgtgagtccaaatcagaatacctggaattctgagtaacctagaaattaagatggattagtataaaagctgactggattttcttaaaaagtctaatgttacaatcttgtaatttgctactttataataagatgcaactcatcctagcggttggtaatcacattgtggagggtcagggataataaactacagtgaagtagtctggaggagagaggctgtttaaatgcctctaagcgctaaaactacaaggctattgtgaatattgctgcaataaacatgggggtgcaggtgtccctttgatacactgatttcctttcctttggataaatacctgataattcttttagttttttgagaaatctccacgctgttttccatgactagtctaaatttgattatacctttgggattatttggaaagaggaatgctatacatatttggttaattctaagctgaagtgcttctgtaaaaataagcattactttaaactgctgtgtcatccaagtaaaggagttgtatttgttcaccaaaaggtcagtgcagatatgttcctgcgaggataaaagccaaagttccaattacctccagtgaattttcaggctgtgatgaaagcaactggaataagtcttccagagagaaagaagtatctgtcccattcagatgtctctgtagagaaacacaaaaagtgcatctttcacataaaagactgaactggttggggctttaggctttatctttaaaggatcaccaggtattatttccacactggatttttatgctattatgttccttggttggaagttctactttttattatattttgagacggatctca

SEQ ID NO: 43426 - DNA, 1732 bp, Homo sapiens
gtgttgctttttaaatgtgtttatttggacatttatctgaattaagaaaaccaaaaagaccaggttaatttgtttctatgataatttgttttggttttgataatgtgaggtatctaacaggtaagtcaaatttaacagcaggtaacacatagaaagcagctttctgtttgaaatagctgagttcgtcaattaaagacgtacaaatatcccaactttaagaaaattttgaaggtttaaaaatgtgtggatgtacaaagacgttgaactttgaaatacatcaggttgatatgcataacctcaaaataccaactcctatccagccaaggtcaagggaatatcacacaaataggggagaattaggtaattgcacaatagactgaaatgaactgattgaaggagggtttactgaagcatgggggtaatgttggatattcaacataggcttatttcctgtgtgtatatgttgtgttgagctgtttctcttgtagaaattgaagtttaaggtagttcttgtgtagctttgagacagtgccctaaatgaagaaaggctgctttttggccaaggctttatattgttgctgtgtaacaacttacctcaatacttaagagcagttcagagaaacaaaccagcatctatgggtcagcaattgggagcaacttaactgattctgggtaaagctcaaggttccaatcacagaaaactaggattggagaatttttttaatatccagagtggcatactaacagctttaaagttaatcctggttgtcatcttccctcggtgagtgatttgagcaagaaaagctgtaaaatgaacacgctctacgaagtagtcgtgctatcttgcatcctttatggtcacagaatgtggtgggagggttcttttccctggtacaattaccaagcaggcagggagcattgggaactctcagatgccagctgtcacactcaagggggtgcccttactcagtttattcactagtgtgaaaccagatttctgtatgtgtaagcttttccatgtagcccaatttggtagatgccaaattgcttgacctaataaatactagttaggcattgggagctaacaatgtaaggcaacaagtctcagtttgtcactgatggttgaaaagtggaaaacatctgtcaggacacctggactgcatgttacataaattcgctctctttaaggtttggaactaatatactgagatgttgacaggccctacataatttttgacatttccactatttagtaatgcactaacactggcttgttttggggtagtggaggggaattggtaacaaatcagttgagttgcatggacttaacagagaacaaatcgttcagagactgagatggggaatgatttagctacttgagtgcgtttaaaagacgttaatattaccacacaaaaccctgtatactggttctgaagctctgctgaaccgaagcctaccttgagaccaggggaccactagaaatctaggtctttttttgcttggagttgccgtacaattggcctaaaatctgatcacacttgtgaagatgctcaagtgatagttttaattggaaaaggagatgtccaacccacttgggttgtctttgttcttgtcttcctcattctgattaagacgttagatgatgcaatcaagactgctcaactaggtaggtaatgtggagggtcctaggcaatggtcagctttcgggcattggctttgtaatctagttggt

SEQ ID NO: 43427 - DNA, 3460 bp, Homo sapiens
tttaccaaggatagttattcagtccttgaagctattttagaggaatttcattaaatatttcacatggaaacttggaaagctggaaatggatgtgaggagacagttcaaaatggtattgaaaatattaagtgattacttaaaggcttattttataataggtggcaattttggaggtagccccggttatggaggaggaagaggaggatatggtggtggaggacctggatatggcaaccagggtgggggctacggaggtggttatgacaactatggaggaggtaataaattcacctgcaacctttatgtgggaatttggaattaatgtctttgtaacacttgatcttttgtttccatgtttgtcactagatgcccataaaatttgtggataagtgtttgcttttatttgtttttatgggagctttgtcctaagtccttggtttaatgtttgtattgttctgagtattccaattttttaataggaaattatggaagtggaaattacaatgattttggaaattataaccagcaaccttctaactacggtccaatgaagagtggaaactttggtggtagcaggaacatggggggaccatatggtggaggtaatttataaaaattgaggttattcagatttttgtgattaaaggattagccttttgtgacttaaagggaagataacatactaagtagtttgtactgtgggcagtgctccatgtacggtcttagtgaaaataaagaaattttgcataaatctccacagaagtactcagcaagcagttatgacatcaaattgggattagggatgttggaggtgggggtgttcagtagtttaatttctggtggggactcataaacagctaaatacagttgcaacccacattgcaagtggtatacattggaatgagggtctttgaagttaaatccttaaaccatgattcaaaccattgcttagcttatttttgaggtttttagctaggagtaaactagctttgtcttgggcttgatgtacttttaaaaaaatcccttactcagtccaaatgaggatgagagggtgaaaggaccctttatttaaaagaatagggtcagccacgaaataaaaatgtctatgaacccgagtaatttatctcctgagtaattctgctaactggctgcaaaggattaggatctgcttgtttaaaagactggatggatataaaatagaatcaactgtagtgttaggctgatcatgggaaatcaaagtaagtttgttttctcttgctgttccaacaattataggaaactatggtccaggaggcagtggaggaagtgggggttatggtgggaggagccgatactgagcttcttcctatttgccatgggtaagtagcttttgagttttacaattattattatcttgggagacatagctgcaggagtaaaagctttttaggatcatgttatctttccttaaaatctggttagatggataatttcataacctattttttttttactctttacttctgttgaaacaggcttcactgtataaataggagaggatgagagcccagaggtaacagaacagcttcaggttatcgaaataacaatgttaaggaaactcttatctcagtcatgcataaatatgcagtgatatggcagaagacaccagagcagatgcagagagccattttgtgaatggattggattatttaataacattaccttactgtggaggaaggattgtaaaaaaaaatgcctttgagacagtttcttagctttttaattgttgtttctttctagtggtctttgtaagagtgtagaagcattccttctttgataatgttaaatttgtaagtttcaggtgacatgtgaaaccttttttaagatttttctcaaagttttgaaaagctattagccaggatcatggtgtaataagacataacgtttttcctttaaaaaaatttaagtgcgtgtgtagagttaagaagctgttgtacatttatgatttaataaaataattctaaaggaaattgtgtaattatagactttttattttaaataagttaaggagtgggtagtataattaaggtccgttgcaaagctgttgttatatttgtataagataaatgctggtcagatgtaagtgtgttgtctgcaattcatcaggattaaattatgtagataacttaagggatatctctgcaaggagaaacacctttttagatcttttagatgctgcttcttcaatgcaaggaaaggaaataaccccagcgaggtactcttcagggacacaggtctagtacaagagaactcttgacggctactaagttcagccagtcttaaaaaactgtgctgtttctacaaaactttaactacagtagtttataaggatgccaacgaaagctgagggtgtagagcaaaatagttctaagcttcagttaaacttctttaggtaagatcttatttacttttcctttcttaattttcctccctaaaagataaactaatactcttaaatggtctttcagtatagtggttcttacgtagtttaacatagctataaattgagtttaacaatttataaactcaagagaataatttttataaaccctgttttccaatctgtcatttacttaaattattttggttgtttttccctttttttccttcttttcccaccccctccccctccatgtgaagatttgggtgcttaacatatcatttttttccctgccggaattttagcattgatatgaaccatggacaagtatattctgctgccacaaagactgtaaagtgcttcatttcaacagctgaggcaagccaagtgatcattaataaagcttttcttggttccttcagtggtgttggtagtaaaatggtaggtaaaagttaggctgcaagttcaataaatcatgagatttcccatcgttacacccttgtgtattcacatttcttggatcaaacattttgagtgaactaggggtttttattaaagacatttgttgtatttatggttgtaactgtacatgcttatcaggatgagactgaaagaaggtagggcaaaaatggttgaatctattttcagatagtagttcatacttgagtgaagtgtcttgtctgcattatgaagcctggtatgtatccagtactaaataggtgggttaaatgtggtaattctagttcagtgtcttaccctgaagagaaagttgtaggttggctgttgaaattcattccttagatatgatcagtttgattgcccggctttattgcctttacaggaatgtgatactcagggcttactctatacaccaatgagtcttctttgatcctaagaccaccactgaagttgtttaggttcttttggacaaacatgataaacttcttcagatactttttttttcctttggcaggaaggtgtcttgctgcaggtaactaatgaagaagtggtcaaccacagagtcttcaagaaataagaaat

SEQ ID NO: 43428 - DNA, 5798 bp, Homo sapiens
aagggaaggctactaagatttttctggcgggggttatcattggcgtaactgcagggaccacctcccgggttgagggggctggatctccaggctgcggattaagcccctcccgtcggcgttaatttcaaactgcgcgaccgtttctcacctgccttgcgccaaggcagggggcgggaccctattccaagaggtagtaactagcaggactctagccttccgcaattcattgagcgcatttacggaagtaacgtcgggtactgtctctggccgcaagggtgggaggagtacgcatttggcgtaaggtggggcgtagagccttcccgccattggcggcggatagggcgtttacgcgacggcctgacgtagcggaagacgcgttagtgggggggaaggttctagaaaagcggcggcagcggctctagcggcagtagcagcagcgccgggtcccgtgcggaggtgctcctcgcagagttgtttctcgagcagcggcagttctcactacagcgccaggacgagtccggttcgtgttcgtccgcggagatctctctcatctcgctcggctgcgggaaatcgggctgaagcgactgagtccgcgatggaggtaacgggtttgaaatcaatgagttattgaaaagggcatggcgaggccgttggcgcctcagtggaagtcggccagccgcctccgtgggagagaggcaggaaatcggaccaattcagtagcagtggggcttaaggtttatgaacggggtcttgagcggaggcctgagcgtacaaacagcttccccaccctcagcctcccggcgccatttcccttcactgggggtgggggatggggagctttcacatggcggacgctgccccgctggggtgaaagtggggcgcggaggcgggaattcttattccctttctaaagcacgctgcttcgggggccacggcgtctcctcggcgagcgtttcggcgggcagcaggtcctcgtgagcgaggctgcggagcttcccctccccctctctcccgggaaccggatttggcggccgccattttcatggctcgccttcctctcagcgttttccttataactcttttattttcttagtgtgctttctctatcaagaagtagaagtggttaactatttttttttcttctcgggctgttttcatatcgtttcgaggtggatttggagtgttttgtgagcttggatctttagagtcctgcgcacctcattaaaggcgctcagccttcccctcgatgaaatggcgccattgcgttcggaagccacaccgaagagcggggagggggggtgctccgggtttgcgggcccggtttcagagaagatatcaccacccagggcgtcgggccgggttcaatgcgagccgtaggacaaagaaaccattttatgtttttcctgtcttttttttcctttgagtaacggttttatctgggtctgcagtcagtaaaacgacagatgaaccgcggcaaaataaacataaattggaagccatcggccacgaggggcagggacgaaggtggttttctgggcgggggagggatattcgcgtcagaatcctttactgttcttaaggattccgtttaagttgtagagctgactcattttaagtaatgttgttactgagaagtttaacccttacgggacagatccatggacctttatagatgattacgaggaaagtgaaataacgattttgtccttagttatacttcgattaaaacatggcttcagaggctccttcctgtaatgcgtatggattgatgtgcaaaactgttttgggcctgggccgctctgtatttgaactttgttacttttctcattttgtttgcaatcttggttgaacattacattgataagcataaggtctcaagcgaagggggtctacctggttattttctttgaccctaagcacgtttataaaataacattgtttaaaatcgatagtggacatcgggtaagtttggataaattgtgaggtaagtaatgagtttttgctttttgttagtgatttgtaaaacttgttataaatgtacattatccgtaatttcagtttagagataacctatgtgctgacgacaattaagaataaaaactagctgaaaaaatgaaaataactatcgtgacaagtaaccatttcaaaagactgctttgtgtctcataggagctagtttgatcatttcagttaattttttctttaatttttacgagtcatgaaaactacaggaaaaaaatctgaactgggttttaccactactttttaggagttgggagcatgcgaatggagggagagctccgtagaactgggatgagagcagcaattaatgctgcttgctaggaacaaaaaataattgattgaaaattacgtgtgactttttagtttgcattatgcgtttgtagcagttggtcctggatatcactttctctcgtttgaggttttttaacctagttaacttttaagacaggtttccttaacattcataagtgcccagaatacagctgtgtagtacagcatataaagatttcagctctgaggtttttcctattgacttggaaaattgttttgtgcctgtcgcttgccacatggccaatcaagtaagcttcagctttcagtaattgttatcttagagattatgccacgtgaatgtattttattgtacatatggttaagctgagtaattcatattctgtattgtcatatatcaaatatagacatgtccaccaaaaattaaactttttaagcttcgagtgctgctggtcataaaaattaatttgtcctggttataagagtaatttttaaggttatttctaatgcatatctttaaatattttcgtaactgagagtcatatggagaaacttagtgtttgttgtaaaaagttgtgtttttttggctgagatacttagaatcaccaccagagggggcagttaagggaaaataaatgatacttttcagatattgaatagtgaaataaaaactttgggtcataagtaatgaaccaagagttattttctgatgtttaaaaatagaaatttgcgtttttaggttgtagggttgaaatttttggtaaagattctttaataatcctttgataatcacggtctacatttgtttatttttccttagaaagttttttttttaattaataatttaagataatttaatgttgagtaaatttatatcaagcattaatgactttgaaacttgtgtagatcagctgaggcaattttttggtgtaacacaactaatatgcagtttaacatatggtttaaatttgatgtaagttttttttttccccccagaaaactttagaaactgttcctttggagaggaaaaaggtactctgccagcaggtcacctcatatttaagaatttaatttcctgcatacaaagaggaaaatgtaaataaaaattgaaatggtattttcctttgcagagagaaaaggaacagttccgtaagctctttattggtggcttaagctttgaaaccacagaagaaagtttgaggaactactacgaacaatggggaaagcttacagactgtgtggtatgtaaattactgaattgttactggatattagtcttttagctgtatgttaagtgaatcatggaggaaataactatcagcatagtaaaaaattctattatgacttcacttataagctataatgagattaaatgctaaagtttaccctttggtttgaaaggtaatgagggatcctgcaagcaaaagatcaagaggatttggttttgtaactttttcatccatggctgaggttgatgctgccatggctgcaagacctcattcaattgatgggagagtagttgagccaaaacgtgctgtagcaagagaggtaagcaaacaatgactgtcttgtgcattaacatgaagaacgctgccctgctgaaaatcagaaactatttctgaatttagttttaactcaagattttttctcttattaaaggtgtgttgggtttctggaccattttcttaagctagcttatttttcaaaagctaggtccctaaaagctattttatatctggtagttttaaggtggatacaagcgaagtatggtactacggttgggtgctttgaattatgcttgtgtttttttctgtttggatgacttttaccccaccactattttaggaatctggaaaaccaggggctcatgtaactgtgaagaagctgtttgttggcggaattaaagaagatactgaggaacatcaccttagagattactttgaggaatatggaaaaattgataccattgagataattactgataggcagtctggaaagaaaagaggctttggctttgttacttttgatgaccatgatcctgtggataaaatcgtatgtaagtgtctaaccacaaatgtactgtttttttccagtgtattcaattttgtgtatgttaacatctgtaactttattgaaaggtaaacttttgaagctgcttaatattgttgatttaatttaaaaggagtctgaatttttcattccagtgcagaaataccataccatcaatggtcataatgcagaagtaagaaaggctttgtctagacaagaaatgcaggaagttcagagttctaggagtggaagaggaggtaattttaattctgtttcttctttatttttgttcatatataagggcttgcttctaactggggcatttattgtaggcaactttggctttggggattcacgtggtggcggtggaaatttcggaccaggaccaggaagtaactttagaggaggatctggtgagtttcaagttctacgtgtttaaaggatgagtgtgcttttattttaaatatgattaggttttcattagtagaatcaagaaatccaacctaagtcaattttcctaagacttcaaatagattgtatcctggcaagctcttgtgatttggccagacaagaagttaatagagttgtattaataacagttgtatttatctggattaataatgtaacatgaagtgtcatccgaaaagctttgacccccatcaagtgtcattcttacgtataaataggatggaatctctaagattgagacttgttaagagtccaaaatttaggcggtagatttaattatatgctttcatgttttgtgggtaaactggtagcactggtgtgtccttttctgcggttcttaattattgtgctgaggtagtaagagaactgaaaatgaatattagcaataatgctgaacagtttatagtaaacgtaatctttttttggcccctaacagatggatatggcagtggacgtggatttggggatggctataatgggtatggaggaggacctggaggtcagttttcctctacgttttggtttgtttatgtgactaatacttaactatatcgtatatttacttcatttatattttgagtttttaaacattttatattagtgtctataaatggcttgggtgatagtggtccagttatttctaagtagttttgccatcttagctgttatagcctaaggaatagagtgccattttaaatgaaaatgtaaagataaccatcagagtatctcatcttttctcaagcaaaatgattggatctagatatatctttgtacgtgcttctctggaaaagtacagaatactggatttaacagagtaaaacctaagggggtggtatatgtaggaaaaaatatgaaatatgtctaaacccgtaactagatgggaagcatcccaggataactttcaaaaagcgtaacctacggaaatgttccaaaatgtttagtgtgctcctggctgcagataaggttgtgaa

SEQ ID NO: 43429 - DNA, 1030 bp, Homo sapiens
tttatttattttattttatttttttgagatggagtttttctcttgttacccaggctggagtgcaatggcacaatcttggctcaccgcaacctccgcctcccaggttcaagcgattctcctgcctcagcctcctgagtagctgggattacaggcatgcaccaccacgcccagctaattttgtatttttagtagagacagggtttctccatgttagtcaggctggtctcgaactcccgatctcaggtgatccgcccacctcggcctcccaaagtgctgggattacaggtgtgagccaccgcgcccagctggggggttctgcatttaaagcacagacataagaaggggacaggagtgctgaggtctttcctgagggcacccttcaggtctcctccataggtatacacaatctcctcttggggaaagagaagagctttacatctcagaaggctaaatgaactaaagatgcccaatagtgcccagctgggtgacctcagggaggccactggacctctctgagcctgttttctcactgataaaattgagcagaatgaatactgagtgttttacctgattaaaactttataaccagtgccatgttgtgtttggcttttataagtattgggattacggggaattataatgaatgaccagaaggaaatactggtttccaagggtttaagcagatgaggagagactgctttaacacaacacatttgtagtgcagataagatatagtctcacagcctaattcccatgcccactccgcatcctcatacatgattacattgcattcaacttggtgacttgtctattcgcagcttggctgcagaagctgctgtcagtggtgttgacattaaattccatggggcagaaggcagtgggccctttgggatggaaactgtcccaactgtaccatctttcctggcatgaccaaactggcaggcagggattgctttacctttcttgcccaatcaccagcattctctgggctttttcctcttaagcttaccattttcaaaatcgtgttgat

SEQ ID NO: 43430 - DNA, 1043 bp, Homo sapiens
gtattatctttatggaacttttcaatatctttgctttataaagattctaaacatgtatctgagctggtaatattttaaaatctccattatttgtgtaaaactgtttataagcagtgtttgagagggtctgctttaccattaccccctcaatatcatgatcatccaatctcaaatgtgaaaaaaaaaaagaaatttgattttagggattgtgagtaaacaagtttatatagagagacattgtgaagttaaagttttcagaagttacatttgtgcagttcttaccttttcctcatatagtgccattgaaatagactgaaattatcttggcaaaagttagacaaccaaagacgactttagtggactggttttcaaaacttgagcagctgaaaagcaaaagccgttgtttcccatgacaatgtagcctttgtggatttgggtttgtgctttgggttgaaaagaagtttttagtcctaggccagtagatggcagcagcttttcattgcagacaaaacctcttgaaacccttcccccatggcacaaactcgcccatgatggaaagcatctagatttctgcctccttttacagttaatccaggagagggagtcctttgccaactgatgaccaacagttccaagccagatagtctcgtgaacagtgacaatacagaaataaggtgttatttctgttcagatctccaccggcctttgttcttttaaaacttgaatataggtgggagacataagaaaggaaagaaaagacttaaaactggagtgacaggacaaataatcattactttcaattcatgactgctttatattcatttgatgaaatcatttgtatacaaaccagggagagttttctttacacccttgacaatatatcacatactcttcaagatcataataatatcattaatataaatttaaacaacatggcttgttagaaaatatgctaattgctatggtctcattatgtttgcttagcttttatttgtttttctgtgaacagttagagagctaatttttttcaaaggtgattgtaa

SEQ ID NO: 43431 - DNA, 1033 bp, Homo sapiens
ctttttcctgccttcttacccagtcactcttactgctcaataaatattaattggggactaaaatttcaactacaaaataaaacaaataaaatgactataatggtatgaaaattgaaaacatgggagttagatcacaagcattcactaccgccttactattattttctcggattactgggcaagtttggcttttttttgcttctttgattgccacactacattttgccttgaagccatccattttgcagatattgaatttcttttgagtactatttttatacaataagcatcactacacctctggatcttgatagcattactgcaggaggagaaagcagctttgtgttagtaattacctaacattgtcagaagctgactgcaggcctctttctagtgataacagaataaccgcataatgtagctttatagcacatgattaatagaaaataattacacgtcctacaaagggatgcaatatttcttataaattgactagaatggtttcctgtagattaaaggactcttcattattttatcagtcctcctgaagtacagtcacttgcctatgttagcatttcagctgatgttaagagctgaataggtgaaggataccagatggcagacctccttgtacctgaaaccttgtgttccataaagattacatgatgcttcctaacatttcaaagatttagacaacagcctggtatggattgtctattttttgtttgctaagaagataaagtttgagagttttcctttttgttttttaaatgatccacttgtgactttatagaacaatactataattagtttgtggactgcaaaacaacattgtatcagttgcattattttccactgtaagtaatatatcattcataatcacatttgtttgggggtggaaaagaggaaaggcatagacaggcagattttctttttcagaaggaaaccttgtacaatattgaatgttcaggccaaagtttagaatactgtactccaagaagcattttcattccaatttataggctgcaaatgg

SEQ ID NO: 43432 - DNA, 1050 bp, Homo sapiens
actagttttttttttccttcagaatgctaagtgctttctgatttctcttataacatttttttctttttcttttttttcttaaccactgcgaagatgaagggatagaaaggttctttggcttaagatcacagccagtggcacagctgttgtaagaaaccaggacttgcttctaattatctactgattgttctggtactgtaacttcataacaatatgaaatgatcgcagtcagctttcattaagtctaataaaacatcttcaatgtattttataactattcaaacccattttcttttttgttcttagaagctatagtgattttgttcttatttgtccacacattccttaataccttcttctgaccaataacaaatttgtgggttgtgggagtttgaaaagaggtggtgatatgatttgaatatttgcccctgcctacatcccatgttgataatcccagctattcagggggctgaggcatgagaatcacttacagttgggaggtggaggtggcagtgagccaagattgagccactgcactccagtctgggcgacagagcgagactcggttaaaaagaaaaagaaaaagaaatgtaatccccgctgttagaggtggggcctgatgggaggtgtttgggtcatgcgggcagatccctcatggcttggtgctgtccctgcaatagtatgcgacaatgagtgagtacttgtgagatctagttgtttataagtgtgtggcacctccccctccctcttgctcctgctctgccatatgaaacaccaggtcaccctttgcctttcaccatgagtaaaaaagcttcctggccaggtgtggtggctcacgcctgtaatcccaacgctttgggaggcagaggcaggtggatcacttgaggtcaggagttcaataccagcctggccactaacatggtgaaaccccatctccactaaaaatacaaaaattagccaggcgtgggtggtgcacgcctgtagtctcagctactcaggaggttaaggtaggagaattgcttgagcccaggaggcagaggttgcagtgag

SEQ ID NO: 43433 - DNA, 1050 bp, Homo sapiens
tgaaaaagcttgaaagtaaacagtggctacttaaaaaaattaggtaatatgatgcaaaatacacatttaaaaaacactggaatagtagaatattcagtgtaataactctataactgtaacacaaacaattgaatatctctgtgtgagtgatgcttaatgcattgtacgtcaacttaaagcagatcctgtttaaaacaaaattggttacatgaaggccacctgaatatgatatggtcttagttaatgatacatgttgggcctcaacttcctttaagtggcacttataaatcctactagaatagaaggtttttggacatcagatattattgtgaacttaactatgtaataaaaatgtttgagctaaaaatttttttaacctaaaaatctttaccttgaaatttttagatacgtaaattaagctttcttatgttcattatgtcagaatatattactataatggaaaaagaatgttttcctactttccaaattaaactttaataaatgaaaagtctatatactctaacagagtagaacaaatacattgtggtcttggattttgctagtgatacttaactaatggttcatactgtatttgaagtgtctgctgccattttgtggcattagctcacagagtattatactgtttctacatcaatggtagatgtgcttcttagtgcggagtcattttacattctgtttataattattccgaagagactatgttcagaaaattgtcagtctattttgtataccatagaactttgcgattaatttgtgtgtgtgtgtgtgcgcacgtgtgtatctgtgtatacatgtatatggtattaagcatataattaggggggagtgggatttaggatttggaaaaaattacaagaaatttacatgaatagaatttcagtttttcaacttacacacttgattagtgctagagttgcattttgtgctcatagtaacaaaaagtcagctttcttacctgatttttcttttgagctattataaaggggtataagattaatacattgtttggtgtttatatgctcctttatt

SEQ ID NO: 43434 - DNA, 1021 bp, Homo sapiens
gtagtgggagagattttattttttcaagagttaagtgacttactaagtttctcaaacagtactcttcataggtgcctgcttcccttatcattttataagactgtatctggatcatgaggttgttgcccagtaaatctaaatataacataggggcttaaatgatgctattgtttatattatacctcatatttttccaaaatggatttgaggtggctaaaattttgttccacttacagtgctgagaatcgtatcttgctaataaatgttgattacatttaattaactgcttctaaagttatcaaaatgaggttcttactaataagaagaaaaattcaaaaatccacttagaagtttattcatcctatgatctacgataagattaaaataagtagtatttagataatttgatcttattcaaaagcttggagctttctggtaggaaaaagtgataacacttagtatgttcatccagatgaataaattatttactggaaaggaccaacatctggatctttcacattcttcctctttggttgtatataactactgaagtttacctattgcaagtgataaggaacttggctagaatttcaaagaatgaggaatttgatggcataaactgaagcaaatactgtgtagcaagagtaacagtgaatttctgtgactcttctcttttgaacttttaggacattttctgtttattagtaaaatctctttaattggttctcaaacatgtgtccacttatgatcaacattgttttgtctgtgttgtgccaaacctctattaacctcaatagggaaggcaccaggttcaagaggctgaagaagagacccagagccagcaaacgagacatggggttttattaggaacttatatacgtacaggggagagaatccagtggtggctggctggacaagatatccaccttccttgcagtccagtggtggtgggctggacaagatatccaccttcctacagtccagtgctgcgggctgtacaagatatccaacttcctgtagt

SEQ ID NO: 43435 - DNA, 1086 bp, Homo sapiens
aaaatgtgacacagagatacaaagtgagcatgtgcaattgaaaaaatggtgctgatagacttgttccacaagggttgtcacaaacctgcaatttgtaaaaaatgcagtatctgtaaagtgcattaaagcaaagcacagtaatatgaggtatgtttgtataaatacagatgggtaattgaagaccaaatgacatatctgttacgtttactactttggctcatcagttgtcatacttaacagaggtgataatggatgaagctatcaccacagaaataaagaataaagattggatttggcaaataaaatacttacattaataattattattaattatctgacaaatgctaatgtatcagattaagcaggcagagataagagttgtaaggaatggatcaaatgacaaataaattttagtttgttatgggagggagctggaagtgtagaagaaaggaagggcttggtatacttctggggaactcaggcctgggaagaaccggagtgtaggatcaacttgatgggtgggacaaaggggagtaaatagccaggggtagaaccaatggtagacttcatgattatgcttaacgtgaatcttgatacttagattcttttctcagggaggtgatattatctataaagaaagtggaaaggcagataagaaagatcaagtttgttgagcttgaaggagtattgagaatccagtcaaagatatttaagagggagtctgagatatggaatagagatgtggcaaatcattgatttattcgcctaaacatgtttaatatcatgagaaagagaagactttccagagacagtagaatgagatagatgagaagatttagaatagagacattttctccaactttcctcacaggtaaaccaggagaattgctgcttttgtttctaaacctgtgattctattttacagaattttagaagccattaattactttcattccttagtatgattatagtcctggtgatacattttatcttggtcattttctttggcgttcatttgaatgttgatgtgatcttaggctttttttcctccctctttgttttatctaattatttttctccatgtaa

SEQ ID NO: 43436 - DNA, 1026 bp, Homo sapiens
tgccaactggtgtcagtggttagatgttttatggaagaagttggagtttgaactagaatttagtaagggtggatagaaatttaattagtagagaatggaaggaagaatactttctacataagttaagggaatgagggacaaggggaaacggagctggaaatgaccatagtttgatgaactgtggaaagactaacatgactgagaaaggttggagaatgggagatgaggattgacaagggtggcatgtgaaaagttttggctctggcttcaggtatttattttagagtgactaaggtatgggataggacataccttagtcactctaaaaatgaaacatagtagttaagaacatactgcctgggttcaaatacttcattgcctgtctctgtgacctccagcaaatttcttaacttttcagagtcttctcatctgtcaaattaaggataataatagtatctataacctatggttattcttaggattgagtaggataaggtatataaaaagtttagaatacttcctgacccatagtaaagacatattaaatgtgagttactattgttatccagtcaattttagggattatcttaaataaattttcctttttgtgttagacacaactgtttgtgagtgttgtctaacttctatactatatagctcatatgttttactggctaagatgaattttgtaggatttgcagttggaagttttagggattccatatacacaatcattttttcaacagggtattctgtgttgaaaactgttagtggttaaatttgctatagcaaatatatcatgcctttttcttgaacccttgtacttctttgtgccttggcttctttcttttgagtaatgagcatgtaagaataaagaaattttatacctggaaaaattttatacataggcatcatgagccttgggaaggagtcactgtgtttgatacatgagcttgatagctagtgactaaaaatttacaaacttttaagaacatttgaatgagtttggactgcattagaagatca

SEQ ID NO: 43437 - DNA, 1052 bp, Homo sapiens
gaactgttttcagtaaaagaaaaggaaacggatacactaaattgctattcagttttaagttttactttatcctttatttactttcaaccatggtatgtgtagcttcctatttccaaaagagaaacaatgctccagggctcatgatcactgacaataactctggataagcgatgctgtaatttttaatcgaggttctggaaaattaattgtgcctgttttgcagatgttggtaagattgttggcttaataatgaaatctaaaggagtccattatcaacaatggaattataatcatctactggtagatgcaatacattatctttttttttctagttaacaaagcatctaatattcctggaaaacttgaataactctgggactcaatatacatagttggattgcatgttaaccattttcttttgaatttgttataattttcttgagtggtcagagggactaagattctgagtgtgtgtgtgggtgaatatttgaaactcacatggaacttttctgtgctgagaactagaggttgaccatgcagtggttgaaaacaaaaagaaaacagatttaacttttgcaaactgctttctaaatgaaagagggttgaggaggttttcaactgctttttagattttcagggttatcctttacttggtatttctgaagcaggtaaataggccaagtaacaaaatatcaacaacaacaacagcacacaaagatcaggaaactctggcaggattttatggcttgtgcttccatccctcgtcgggagccaaatgacccccatacatcaaattacatagcagtttctaagacagaacctattatcgttaagttggaaggagagttcaaactgtggtcatggagatgaacgctggtttttcaggttcctggaggggttttttttccccctctaatccatcatgttttaacaggtagaatttgatagttgccccgaataacagcaccttagaaagtccaagacaggaggttctgggaaccttctgtaactgggggaaagaagtaaagaagtgggggtggcttgctgggaag

SEQ ID NO: 43438 - DNA, 1070 bp, Homo sapiens
cccacactcctgggaagggtgggaactccctggaaaggtgcaggaaactctattatgctccttgcagtagggaaagggatgcttataaggagtcagaggtcggatgtgcccctttcacttcttaaaatatagattatttctttctgtacgtgaaaaaaaaatcaaatcaggcatcccctacttgagtgggatttactaccccagaacgaaagggcccttctgccctccccagtgccggcctcggcagtaaccaagtgtttaactgaggccctttcaagtgctctaaaacaccccttggaaataaaatgtaagctttaattgctgttcaattacttgtcagcatttcatatgatttatgacctagttctggcgcatttttgacccagttaaagactcataaataatatagttttgctagaaagaatgagagagggaatagaggtttgttagaggcatctttttattgttgcttcagtgccagcaagctgaataaatatctaaggatggactctggttctacataaaagcatgcacagtgagaagccaagagccacatttatagagctcagattggtttttcctcccatgaaagtgctaaagtgagtccattacgtataatgctaaactattagatatcaaaaaaggctagtccccttctacctcgaaatgccagcttcaccctcacaggcaagtacatttcctcaataattttcctctctattctgtgattttggtgcctcttcttacccacgatattcctcaccttcctccccggctgcacagccttggaaccgccagaggccctctcagacgccttcaggaggacaccccttgaatggtagaaagacaccacgggcacctttgctgctccaagtattcttctagtgctgagaaaatcttttcttctagtccccctggatgagagatcgggagccacggggatttgggggaattggtggaaccaaggggtcctctcagtaaagaaaagctctgcggttttgggggagccgggtgaactgctgtgggatttgtctagaaagggcgcagcggcggcggctggtaatttctgg

SEQ ID NO: 43439 - DNA, 1063 bp, Homo sapiens
acttataattccatgtatcactcagttgtgcactgaggaaatgcttaagtgcaagtttagtcagggcactaggtttctctagattttgcaaaacccggacccaccactctatagccaagcacatctttcctagtgggctcccactgaacaaaaccaactggacttggaggagatgctttaaccttttgtcaggtaattatgtgcctttttggtgtttcttgcgtctgtagtgtatggtgtgggtgttagcaaactccatacaatggcaggctgtgaggaagtccgctgtccaggccagttatttctgggcctgccccttgccttttgatatactggcctgtgggccagaggagactggggtgcatgggtgtgcaggatccagcttgtccgtgggtgggaggctgtaaggaaagttaaatggattctaaaaatgtgaatagcattgctgtaacccttgtgtttggagggtgtgtaaagaaatataagtggagataagcttgtatgtcttatatggcattcatgggaggatggctccaagcatcctattgcttagacagaactcttaaactcaaaactgctggtcaaggttccccacctaccctcccccaaagctaaatattctgtttggaaacctagttccttcagtggttccctatttcaaataaaaggatttaagttgacgtatgaccacgtgagcacataatacagcgcattattgtggcatttggagcggagacccagacaggcttcgcctgtgattacgttttctagattctctacagagccagagctttcccccaacccccacgcacccacctcctccttctccttccccttctccggagagcgctctctgagccgattgcagttttcagcactcatggagcggttctgggcgagctagccgatggaagtcgaggctataccaggaggatggaatttattttaaggtatttccgccgattgttcatatctagagtgagttatggctgtgagagacaaaggtcaggcgaggagaccctggctcatggacaggaccctcagcctctctcttcctttgttt

SEQ ID NO: 43440 - DNA, 1038 bp, Homo sapiens
ctgcgtctttagttttaaataaagggaaaaagtgtctccacctcccattgcctgctttcccccatcttctcttttctttcactttttgcaaggttctcccattctgctccaaattttccttgtaaaatagaatcacgagtgatttcaagttaatctagttcctaggtgctaacgaagaggtcataggctgatttaacaaaaagtacagtcacaaacacacaaaaatatccatttcaccctctaatttcaaatggcagtggcagaagcagggcatcctgagatgctggggggccccttccccctgaaagaagaggctcggctttgtgtatctttgcggttagtgcgttacaactgcaggtcaaaaagttgagggtcaaaagtttacattgtgcagtgctcttagtcatctgcccagacagagtttgatgtcaatgttagagctgtgatcttgactatcagcacaaaagataaaatggctcagagtgacgcgtgtatcacggtatggactccaggtgaaccctagtggttgaatgacctcaattacggaggaaaggatagaaaattcctcttttcaagagtaatacatgctgtatctcatcttgaattatcgctcccattctgagggaatagcagcaggtaaataggcatagattactgaaacatcaacaccttaggtgttggagaaccaggagtctgtgggtttgtcacaaaataaaaatgctaaaaactcatctgtggagctttaaaaactaatgtcacaagtttccaatatttcattatgccttcaaaggcaacagaatggtgcaggaaacctcctttatttgaaaagagggattctgattggccggttttttgtctttttagtacacatgatgacccctaaagtgtgtaagaataaatgcaaacacagacacttcttgcaaaatataatctttgcagttttcaaacacagaatatgctttttctgaaactacagtccgctgaatgcaaagcgttctgagatctgagaaggggaaggaaggaagtggaaaccctcct

SEQ ID NO: 43441 - DNA, 1090 bp, Homo sapiens
cgccttccaggagtgcctcttgggctcttcggaggtcgaccttaggccagtcctttcccaattttttccctttgtgggaggagagttcaggaaaaaaattgaaaagcaaggaagagactaagtcattactagattcctactggaacactgccaattgccacctccccactaagtcctgaaccgggtgagcctgcattggccagggttttacagatcttgtaaacagtctccagaaatccatccaaatcacgtaaatagtctttcttcaacctccacagaattgaggattttaaagctaattcaaggggttttacaagcccaacaaacacagttgtaaaaatgccattgggctgctatcacattttacaaaacgagattgatccatgtgttgtaaaagtcaactatctcgaaggcacacctctcaggcaagagtgagcagctcaggacaggcttttaatgtcctgtctggggaccgccaggcctgggacagcagtgaaagcaattcaggatttctggagccggtgagactattcccggttccggagcgactgaggggcggcagccctccctgcggtcccaggaagggcagtaaagagggcggccccaggacagtgccggttgtcgggcgccccggaaaccgagcccatcaattatcccgcggccttgggccctgcagagctgccctctgtgcccagcttggccagggcctctgcgtcttctgtgcctctggaatgtggacagagagattccacatctggatttttatctgcctcagctctgagcggttctcgcagtggatgctgagtccccaggcgctaggcaggggagcaggtccctcggctgtcttaggagcccagtctcacggccactgctctgtcggtcctttcttgttgaaaccagtggtttctggcctttcaattccctgggttcaaaggtgggatggggacgcccagctggaaggagtgctttgacaccaggcaggcgcgggccattgagccccttgggactcaaacaggatgtgtatgtgggaggagggaatgggtgggaagaacctacgtttggctgagtcctggtcagctcgaggtgatcc

SEQ ID NO: 43442 - DNA, 1028 bp, Homo sapiens
ccctgaggctgccctgagaatgtgctgaggtccaggatcagggtattggcatctatttaaatcgaaaaataatatatttattccaaaaagcatcctaagtgcttgcaccctagaatcaatccctccttctctggcttggcacccacagctcaggcccatcaacccccacttctggaggggaatgttcctgagctggctgcagatctgtgggttagcttctgcttagcaggactgtggagatgcttccagcttcgctgtcctttcctctggctcctgtatcttactgttcagctgtgttaaatatgtacgccctgatgtttcctataatagcagatactgtatatttgaacaagatttttttttatcatttctatagtcttggagttcatttgtaaggcagtgtcttgacttggaaaggatgtgttaatggggtgactttgtagcatggtatgttgtcttgagttaactgtagtgggtggggaggtccaatgccctccgcaatgcccttcatctcctgtgttgtcctgtaccctgctcagctccatcctggggttcagggaaggcacacttcccagcccagctgtgttttatgtaaccgaaaataaagatgcgtggtgacaaagaaaaatgtggactgccttatccagaggggactgggaaaggggaggtgagtatggctggagggcagggggcagtggggaagcaaaagtggggtggctgtccttgtgatggtccaagtgttgggtacccatgtattggtgtcatgtatctttttaatgtatttttatgtgtgtatttgtatgagtatgtgcttatttttctgtgtatgtatttctgtgtgtgtgtttttacctaattccacaattgtatatattttggtgtccataattgggtgcatgtgtttttgtgtgtccataattgcatgtcattctgtgcccacaatagagtgtatgcccttccctgtgtgcataattgtatatgtgcctttatccgtgtagagacgtttgtctggtttttgcgtgtgcact

SEQ ID NO: 43443 - DNA, 1066 bp, Homo sapiens
agcctccaccatccccgcacaaagcggctctaaacctcaggccacatcttttccaaggcaaaccctgttcaggctggctcgtaggcctgccgctttgatggaggaggtattgtaagctttccattttctataagaaaaaggaaaagttgaggggggggcattagtgctgatagctgtgtgtgttagcttgtatatatatttttaaaaatctacctgttcctgacttaaaacaaaaggaaagaaactacctttttataatgcacaactgttgatggtaggctgtatagtttttagtctgtgtagttaatttaatttgcagtttgtgcggcagattgctctgccaagatacttgaacactgtgttttattgtggtaattatgttttgtgattcaaacttctgtgtactgggtgatgcacccattgtgattgtggaagatagaattcaatttgaactcaggttgtttatgaggggaaaaaaacagttgcatagagtatagctctgtagtggaatatgtcttctgtataactaggctgttaacctatgattgtaaagtagctgtaagaatttcccagtgaaataaaaaaaaattttaagtgttctcggggatgcatagattcatcattttctccaccttaaaaatgcgggcatttaagtctgtccattatctatatagtcctgtcttgtctattgtatatataatctatatgattaaagaaaatatgcataatcagacaagcttgaatattgtttttgcaccagacgaacagtgaggaaattcggagctatacatatgtgcagaaggttactacctagggtttatgcttaattttaattggaggaaatgaatgctgattgtaacggagttaattttattgataataaattatacactatgaaaccgccattgggctactgtagatttgtatccttgatgaatctggggtttccatcagactgaacttacactgtatattttgcaatagttacctcaaggcctactgaccaaattgttgtgttgagatgatatttaactttttgccaaataaaatatattgattcttttct

SEQ ID NO: 43444 - DNA, 1574 bp, Homo sapiens
ctctgaggctggagcacagggctgggtcgccagccgcctgcgcctgggaatcctgattgccagctgatgagaaaggcgggctgggcgcgcgtgtgcgtggggtcgagggccggggaccgagcgcgccgcacaaccaaccaggccctcaaaaccttcgccctggtggcggctggccgctccctcctggccagctcctccgtggggtcctcgtagcaaaggcgaatttaagggttgcccgggcgcccctcgctccaggcgggtagctgtggggacctacacccgcggtactccctgagcggccggtccctgcctggagtgccctggtagggccggcggcggctccgtttgggacggatcctgcgttgaatttgacttttcgagggcggccgcgggtaaactcgcctctcccggggaccgcagggattatttacagggagctcgccaaccaaacacaacagtctaacctttccaagtcctcgtaaatttttacagctgggagccacggcgaggcaaacgaatctgttggtcgtttccgacttcccgccagcctgtgtggcttctgaaacaataactccttatgaaatatcataaatatagatttaaatacagtagagcgacaatgcgatttggctgcttttttatggcttcaattattgtctaattttatgtgaggggctccgctggccgcactcgcacgcgggacccgcgccttcttgatggcgtgattaattgtgatataaaatagtccgcttaagaagtgtgtgtatggggggggagacgggagagtacagagacaaggctagatttgatcttttaatcgtcgttggccacaattaaaacaaaccccatcgtagagcggcacgatccctttacataaaaacatatggcttttgctataaaaattatgactgcaaaacatcggaccattaatagcgtgcggagtgatttacgcgttattgttctgctggacgggcacgtgacgcgcacggccaatgggggcgcgggcgccggcaacttattaggtgactgtacttcccccccggtgccaccaagttgttacatgaaatctgcagtttcataatttccgtgggtcgggccgggcgggccaggcgctgggcacggtgatggccaccactggggccctgggcaactactacgtggactcgttcctgctgggcgccgacgccgcggatgagctgagcgttggccgctatgcgccggggaccctgggccagcctccccggcaggcggcgacgctggccgagcaccccgacttcagcccgtgcagcttccagtccaaggcgacggtgtttggcgcctcgtggaacccagtgcacgcggcgggcgccaacgctgtacccgctgcggtgtaccaccaccatcaccaccacccctacgtgcacccccaggcgcccgtggcggcggcggcgccggacggcaggtacatgcgctcctggctggagcccacgcccggtgcgctctccttcgcgggcttgccctccagccggccttatggcattaaacctgaaccgctgtcggccagaaggggtgactgtcccacgcttgacactcac

SEQ ID NO: 43445 - DNA, 1080 bp, Homo sapiens
caaacctttgggctgaaggaagacaatatttggttttctgatttttctccgctttctaggcaccagtaacatctgcttaacactcaacgcctgctaattgttcagtaactctcttattttggggctaaggctgtttaaaggaacagcttttttacttaaaaaatactgaaataatcagtgtcttctcaggcataaaacgtggaaaaggcatccagacatgcccagcccatttgcagacacttaaaattgggagccagggtttcctccagggttaattttttaaatgaaaatctcagaggcctggcggactgcggggtatttaggacacggtggactgtggtgggggtgggcatgacctagaggaatttatggggcaaggaaaatattagggggagggagatgaggcggacaggacggggccatttcggagttcattgtgtcggccacttccctcttccaggcgcgggtgcaggaaggggcacccagtcggtatccgcgcggcttggcagcctcgctggtatttgggagtcccagccggaagtgtgtcagggtgtttgagggggggattactggaactgctggtgaggatgaaggcaaaagagagagagagagatggaagcgcccgaggccgccagcctcgccgccagggaagtgggctaatgaaaaacacactgttgcaggcacagtatccacacgtgaatttgattacccctgttctaggagtcgctgctttctgttaggaattgggggcagggggagtttccttccaattaacggagtggcggcgaccttttaatttacccccaacgggtgagaaataaacttccccaacgtggccaggcccaggaatgggactggagtcgatgcccttttacccctccccgttctaatttccagccctggccttgagctgtggctgcctctctttgggccttgtacctctccgccgagtctccgggccccgtaggtaaccaaggcgaggcccggagtagcagctggaaagggaggaaggagccctgaaaggctcacgcggccccgggacaggccacatcggtgcgggcctcccaggttccggagctg

SEQ ID NO: 43446 - DNA, 1030 bp, Homo sapiens
gcgcccgcttccatcctgagcctcccactggaggcctgcgcctgcccagggacctcctgccattctcttgtaaggctggaacacacacacacacacacacacacacacacacacacacaccagtcccgggtgtgagctcaggaaagaacctccttccagtggagactcaggctggactaggaaggatagggcaggctgggatcctggccttgtcacttacccttctctctgtaagctcggccgctgctaggagtcgcctctcttttcttccttcttttccctgtcttcccttcctcttttatctcttctttctttttttcttctttcctttgctccttcctgctttcttttcttccgttggtctttttttcatcttccgtctctgccagattctatctcacctccttatctccttcccaaagcatccttggggaggggcccagagctggcttcaggagagcctagggggtctcactttcctctgcggctcaagtagaggttgggaagtctgccgaggaagggcccgcgtggggcggctgccgagggcggtgggtttgggcctggtgtgttactctgcagacaaggcctcggttatgatcacgaccggatggcggcagccttgcgtttcttcgcctgtcgctaacggctgactaggagatctgattaggggacattcgctgcagctttgtgtgcccatatcgagggcagggaggccttcgccagcctcactggggactggagctgaggcccaaccagcctcgctggagcctggccattcgctgggaagctcttagctggctcttcccggcctgccggtcacagcttggggtttgaccgcattgagggagactggctagggcaaagcttgactgcttgcttactagtggcttccattaggtacaaaatatgttccatacagcacctttgtgcagctgggtgctggagaaggggacccttccaagagccagtatgttttaaatgggcaaaaagaatcccaaattccagagccattgatataaacttgagtcat

SEQ ID NO: 43447 - DNA, 1045 bp, Homo sapiens
tttctgcccttgcagagcataagttctggtgtctcatgtgtttgtgacagacaagaaatatgtatttttcagataagaagaactaaaaagaaaaagcaggataacggggatggatagggagtgccaggggtattttcttagggtgataaggaaagttctccccaataaggtgtcaattgagcagaggtaagggagtaagcaatgcaggtatctgaggaacaaacattccaggcaaaggggacagaaagtaccaaggccctgaggtaggacagtactgaatatgaggaataacagggaggctataagtgaagtggcacagaatgagggtggccagatcatatggggccttgcagggtatgttaggacactggcttttattctgagcaaaatgggcaatgtatcagttagcttttgctggataacaaatcaccccaaaatttagtggcttaaaacaacaaacatgtattgtttttcaagattctgtgggttggccatattattattctggcctagaccagctcatctgcagctagagtgtctagtttggctttactcagctgggacagctggaatggttggggcttctctccatgttttcatgcattctccaggaggctggtatgaatttgttcacatagtggtggaagcatcccagcagcagcataggacaagccctgactttctaagcctctgcttgcttcatgtttgtactttccccttggccacagcaaatgtcatagccaagcccagaatcagcatatgtggggtctgcataagagtgtggacacaaagaggggcattatggtggcctttttgcaaacagcctatcacaagcagcctgtgaaactttttcaccagattgatgtgatctgacctacttttttaaagggatcactctggatgctgtgtggagaagagtctgtaggagcaaggctggaaacaaggagaccaattcggaggcaatagtaataacccagttgagaggtggtagctgggaccagaatgttaaaatgatggaggaggcaagaagtggttagattctgaa

SEQ ID NO: 43448 - DNA, 1025 bp, Homo sapiens
agcacaaagagcccaatccttcttggcagtctggcccatcagatctacaggatgatgtgtgcaaagggctactcaaagaaagacttctcatccgtgttccagttcctacgagaggaggagaccttctgagtgtgccctttggccacggacactgttgggaaccaaactctgtcttggagcctccttttagctcactccacaagtaaatggatttaatcaaaggtcacctatctgcttttgattgtctaggtcacagtaatccctaggatttttcaccgcttattctttttgtctttttaacaaacatattatccgaattttttttctgcaagccactgatagtctctgctaactagcttaattgacctttttacaaagtttgatccccaagcatcctcaactaaatcattgaatacttcaatcaggatattatctgctttactttacaaataaaaccaaatcttttgtcaacaggatgaaacccatcttaaaggaaagaaaaggaattggtgtgaagagagaagttagagaagggaaatgcagtgaattactatctgtgtccatcaggaagtttgtcctgttaaccaaatggttactgcactaccagggttactggtttattttccagggagctgataaagcaggagaactgttgctgcatgttttctatttggactccgtcacaatatggtaggatatccctcaccaactcccgacactcagcagacttgtttttatatttttttctttcttgttcattcttactacgtattttttgacttaagaatgacatctttagatgcatttcagagccaatgatgatatttgctttagataattattatattattataaatatagccatattattttgaattcaaataaatttctatactggtaatactttcttggtgtttttgtttcttccccatcatttggtgaactaatgttctgacaaactgatgttcacactaatggggaaaggatgggaataaagagaaaggaggggaggtcaaaaggaacaa

SEQ ID NO: 43449 - DNA, 1060 bp, Homo sapiens
agttagatatgtcgtgaacgcataaaatatatgtagatagatactagtttataaatatgcacaaatctgttataaagagttaaaatttatcaaagtttacaaatatttatagaccatacatggcaccatttacagttgagagaaatgtaaagaaatgtaaagatgcattaaatcataatggcataaaattaactctagtaatactgtactactgtaataattttgtggccacctgttgctattgcagtgaactcaagtgttacaagtattgagcataaaatgtcatgtgacactaatcatctttgtgtgagtggttcatctctttagtaaattgtgtatcatagtaaaaattgatctcttggaattctcttgtatttttttatcatgtttagtgcaataccataaaccttgaatgacaccatgggacccatacaaagtgccactagtgatgctggaagtgctcctaagaagctgagaaaagtcatgacattacaagaaaaagttgaattgcctgatacataccatggattgaggtctgcggctgcgtttgccctccatttcaagataaacaaatccaatgtaaggaccattgtaaacaaagaaaagaatagtcatgaacccatcactgcagctactccagcaggcttgcactttttgcagaacatctttttatctcacattgaaaatgcagcttttatgtagatgcaggattgctgtagaaaggcatacttacatctaatatgattcaagaaaaatatgacaacttaaagcaaaaagaaagtgaaggatctaaagctggagaatttaatgccagcaaaggatggtttgataattttaggaagaggtttgcttaaaaaatgtcaagaaataggcgaagtagcttctgccaaccaagagacagcagacagttcccaggcgccattaagaaaaaatcattgaagagaaagtatatctgcctgaatgagtttttaatgcagacagaagtgccctattacggagaaaaaaaaaaaaaaaaggatgctcgaaggacatttattaggaagagaagcaagcagcacca

SEQ ID NO: 43450 - DNA, 1085 bp, Homo sapiens
gtgaagtcagtgttaaagtttatttcttcttcttgctcatatcactaaaaataaattgcccaaaagatgtatagcaggaaggaaaagaaaaatcaaataatattgaaaagtacatatgagaataatcagtcaaaataagcaaagttttccttgccttaaaaaaagaatctaccatctgaaatgcctacttgtttaaggaacaaagagccaggtctccctctttgtagatctcacttatagatagtatttggagagtgggtgagtgagcaagaaccccgaatccaaacgtgggcagcagacctctctctggctgctcctttgctgatcagggcccaggtaaaactttttttttgtatactttctataacttagtaggtttcttaggagaataatagatgcatgggaataataacatttacattttaagttcccttatctgttaggccatgattgtgccaaaatgattaaggtgagttgagattgagagtacaactgaatctgtatgtctctcttggtttgtgattaatctgggtgatacttgattgctgaatatttctgtagagatttagagtatcttatacatgcctggcataaatacagattggaggcaggatgtttttagttggtttctctaattttattacctgcctaaacattttaagaaatatattcttttgcttctatccctttacccccaaatgattcaggtgtaggagctgcacgatctgggaacctcacgtttatggtgggaggagttgaagatgaatttgctgctgcccaagagttgctggggtgcatgggctccaacgtggtgtactgtggagctgttgggactgggcaggtaagatttttacattaatgaccttgacttgatgatgtaaaattgactaatgttcctttctctttcctgaccatatttttattcttctttcttcaacctatggattctttgctcagattttaaaacatttatttggaataaattagttttgcatcattcctggtgggcttaagcagacatcagccaatttacttatttaaaaaacttccattattggccagacgtgatggctcatgcctgtaat

SEQ ID NO: 43451 - DNA, 1030 bp, Homo sapiens
taacttaagccttgagcctgttttcattcttatatcaaataaaactgcccaaagattaggagacagattagcataaatgttagaatgaggtgatgtaagttttacttcttttataggtataaggctaagattagcctgaaaagggtataaagcaagaaccaagcttcaattcagtttatcttgggaaaaaaggtcactatttttgatgcaaaaatgtgaaaacattgttcattacttcatttactgttcctgcatgaagttccaaatgagaatttttaaaaaatatgttaactgagttcaaggaaaatatatgcttgctctcaaatagagtttcccaagacttgtaggatactcagatctatatttgagatttgttgtgagatactatggtttctttttttattcttaatactgattttgttttcctttgaaaattcgatttcattttttaattgacaaaaattgtatatatttagcatgtacaacatattttgaaagatgtaaatattgtggaatggctaaaccgaactaattaacatatgcattacctcacatactatttttgtgataaaagcacttaaaatctactctcagcaattttcaagaatacaatacattgttattaactataatcaccatgttgtacagtaggtctcttgaacttatttctccttatttctgattttctaaaagctctctattttttttgctctgataagcaaacccacattgattgtgaagagtggtggagtattatgtgcatttagataacaggcagaactcagcgtctaataaaaagcataccagattacttgctcagttcatgttaaactgctctgaactagattcacaaatggattcagaatacctgtattctcatcagtttttatatgcctacctacagttgacagcaagaatattactcttcaagaacaatatcttgttttttcaccccttctctgagaattcattattctttcaatgacgagggttgaaaaatgaaaggaaagggggaatcaggatttggtgg

SEQ ID NO: 43452 - DNA, 1032 bp, Homo sapiens
tgaaagatacgttatttgcaagacggagttttaaaaatcatattctccaggggcattaagttaactgtctttgtgctccagctatttagctttcaggagtttagtgttttattgtaaaccgacattgtgcaccatcttgatctgaggtgaatgccaaggaattgctttttaaagtgatttttagaataaaagaaaaccatttcatctctgatttgccctccctttaaaaaccccactctgcatttctgtcttacggcttctgtactgcatcagtcctcctcaagccagccagctccatgcggaacattctgttgctctttcagcataagcaggtctattgtgatatttatctgaattcaggcaaggctaattaaaagagctgctgacagttgttgtgatctgactttgactgcagcttgatggtcattatgggtaaataatgaaccaggtctgcaaatgtagcagctgccaacttgggatagaagaacggctattgcttccaatttaaggatctatcgaccgcttctcttctccctgcagatcttctgcagaaaactaatgttttctgctgctgtgtattgtggtttcagctgtttcagatatagcctataatttccttctttaatatttaacttaggacattattagctttcagagttaacaacttttctattttgaagaatctcagctttgtccttgtgtaggctttagctaatcagctatagtttatttatatgcatttaatttgtgtgttgtgcaggaaatggctagtctgtaagagcaaggtatagctttattaagatgtttcacaatcgtatataggtatctcttctaaaaaaagagatagatgcatgtcccttgcttttgttttcttaaacacctaccaaatctcagttttgaattttgttcactttgtcaatggcttatgaaatattttgatgcagagctctatttatcaattcagaggaactgctgcagtgactttcattaaaatgcaatactgaatatattgtcactccatcatgagctttt

SEQ ID NO: 43453 - DNA, 1025 bp, Homo sapiens
agagtccacattttcaagggattttcacatgaaagagataattcctggttagccaagtgtagcttattagcacagccttctcttaatctttagttttctgctgtccccagttttctactgtttgctgccgggttatcatcttgccttttgcttatttcttcttactctcttccctctctcctctgacagccattacttctgtatacctaccctcaaagttataacagaactcatgtgaataatcagttctctttaaaatagagggcacatgattattatgcctgtttttcttctcaagcaaactagacagggaatagggatgggaggatacccagaagggtgtggtattggtggtaattggattactgagaatttggttattggccttgttttactttgtgattgttaatgctgaatgaaaggatgcatgtgaaacttacaggaaaatagccaactccaatcacagaaatgttacaaaccacgtgttgcctaaagaaagtaaaatagaaggacataatgattacaagctatttggcttttttttcctcttatttggcttttaaaaatgacttttggctgggcgcggtggctcgcgcctgtaatctcagcactttgggaggctgaggcaagtggatcacctgaggtcaggagttcgagaccagcctggccaacatggtgaaaccctgtctctactaaaaatacaaaaattagccagctgtggtagtgggcgcctgtaatcccagctactcaggaggctgaggcaggagaatcacttgaacccgggaggtggaggttgcagtgagctgggatcgcaccactgtactccagcctaggcaaaaagagcgaaactccataaacacaaacaaacatacaaacccagctacttgggaggctgaggcaggagaatcgcttgaatgcaggaggcagaggttgtagtgagccaagatcacacccttgtactacagcctgggcgacaagagcaaaactccatctcaaataaatagtaaaaataaaaatgactttta

SEQ ID NO: 43454 - DNA, 1025 bp, Homo sapiens
tagctgggaccgcaggtggattgcttgagcttaggagtttgagaccaactggcaaatggcaagacgccatctctacaaaaaaatacaaaaaagtagctgggtgtggtcatgcctgtctgtggtcccagctatttgggaggctgaggtgggaggattgctcgagcctgggagttggaggttgcagtgagtcgagattgtaccaccacactccagccagggtgaccgagcgagaccctgtccccccaaaaaatggaaaataagcagatcctctaaaactcaataaactagaataaaacaaatataaatctatttaaataagaagagaaatgtgacaaatgtggtaattggaattaattaggaaattagttaacaacaagaaaaatagagtcattgaataaaaccaagaactggtctttcagaagacaaatctttaagaagtttcaccaagaaaaatagaaaccataagcatcaagaataagataagagattgcacacagatatggatgaaataaggaattataagtttgtgggcagaaaaatggaaagtccagaagaaataggtgattttctagaaaaaaatgttaccaaaattgattcaagaagaggtaaacacatgagtaaacttccaacgaccagagatattcagacagccattactaagaaggaacaaagtaaagatggttttaaaagacaaatcttatgtagtcttcaagtaatacttagttcttgtatattgtgctacggtttgaatgtgtcctctccaaaattcaggtgttaatacttactggccaatgtaaagatattaagaggtggggtctttaagaggtgattaggtcatgagggttcctcctttcctgaatgggattaggcccccttataagaagcttaatggagggattttgttctgcttgcccttctgtcttctgccatgtgaagacacaatgttcctcccctctggaggggatacagcaacaagctgccatcttggaaacagagagcagccctcaccagacaactgaacctgt

SEQ ID NO: 43455 - DNA, 1039 bp, Homo sapiens
ggtggacacatgtagaacctcatatccagcaattgaagaaatgtatttctcaagacacatcaaaaaattattaataattgaccacacaataggccatgaagcaagtctccagcatcaatgaatctgtatcttatagactgcattctttgactacattgttgactacaatgcaatgtaattagtagtaaaaatacaattaaaacctatacatttaaaatttagaatcacatttctaaagaatttattttttttagtcaaataagtcatataagaaaaaatgttagaactcaacagtaatgaaaatcctgtatattaaactgggatgcagctgcagcaggacttttaagaaactgagaatgcaagttttgagtggaatttgaaaatataaggggcaaggtgagtattagaaaacttaaattttttccaatataaagtacacagtgaaaactaaaatgaactcaacaagaagtgaataacccagtttaaaaatggacaaaggatttgaacagacatttccccaaagaagatacacagatgactaataagcacatgaaaatatgctctacatcactaaccattagggaagggcaaatcaaaaccacaaagagattacactgaacactcatgagaatggctactattaaaacaacaaatagaaaacaagtggtgttgaggatgtggagaaattagaacccttttgcactgttggtaggaatgtaaaatagtgcaaccactgtggaaaatgatattggtggttctgcaaaaaattaaacatgtaattaccatatgatccagcaattttacttctgggtatatgcccaaagaattgaaagcacatatgttcatagcagcagtactcatagtaaccaaaaggtggaaacaacccaaatgtccatcagtggataaatggacaaacaaaatgtggtatatgcacgtaatggaatgttattgagacagtattctcaaggttaaagaacaaaatgcagctctttgctctttttaagaaatacctgaaacaaaattatattaaaggctaaca

SEQ ID NO: 43456 - DNA, 1030 bp, Homo sapiens
caagtaaatgcttataaacagtaaatgagtttcctaaggtcatagaacacaaggtcaacatacagaaattcatcatatttctctatactagcaatcaacattggtgttttaagatatagagtttattattaagcaggtatagtgaggccaacagatcaggacaccactaccattgagaagatagtttattacttacagttcccaagaggaggggccgtgtcacaccacacaaggccatatggggatgcatcagggtcgatcaggaggcagaaggaacagaaggaaaacgtgggcaagagcctttgttgtggtttccacatgaaagaatggatgaggcagggtaagcaggcttaggcttggctagtttgaataatttcagcagttttggggtgtaggggctatctctaagtgtctggtacttggccctggggtgattagagcagagaaatagtggcttggagcataagagctctataatgcaggtagttggggatgtgagctttagattggttggtttgcatatgaaaggcacgcttaaaggttagtcttttactctctctaggaattgattagccctgggaggggtagtctctccaggatcagcaagggcccagatttcaaaacatcagaaataaattaaaaggcataattaatgcaattggtaactgacatttaaaacattattatttacatttgtttcaaaaactaaattacttgctataaatctaaatgtgcagaacatgtgaaaactacaaaagttgatgaaagaagttaaagaagacctaaataaatgaagtgtactgtgttcatggattgatggatttgaagactctgtgtagtaaagatgtcaatttcccccaatttagcactattactttttattgcatctatagagaaattgacattaattttatatggaaaaacaaaataactaaaataaccaaagcaattttgaatgtgattaataaagttggagaagtcacattactcaattttcatacttacttcaaagctatactaataaaatgtg

SEQ ID NO: 43457 - DNA, 1051 bp, Homo sapiens
cctaggtcagtcacacacgtgtgcacgcacgcacacacacaccctatacaaagatgcaatagataaaatggaatatcaaagaaatattcaaatactgtaatgcagaagaaggtgggaaaggagaaagagaggaactaaaaacatagtggacaagcagaaaataaactagtagacttaaatccaaacctatcaatactaacattaaatgtaaatgacctaaatacaccaactaaaaggcacgatattatcagattggatttaaaaaagagaccaaaatgtgtttacaagcaatccactttaaatataatgatgtaggtagattaaaagtatagaaaaagatataccatgtaaatactagtcaaaacaaagagcaaggaaaattaccaaaggtatagaaggacattacataatgataagagtcaattcaccaagaagacactaacagtcctaaatttgtaggtacctaataatagagcttcaaaatacatgaaataaaaactagcagaatgaaaaggagaaatgaacaaatccacaattattattggagacttcaacacttctctctcagtaatggatatgacaagtagacagaaaaatcaacaacaatataaaagaattgagcaacatcgtcaatcaaatgaacctaattgacatgtatagaacactctatgcagcaacagcagaaaacacatgctacttcagtgcacatttaccaagatggatggtatcctggatcaaaaccacccttaacaatttgaaaagaactagaattaaacaaaatgtattctttaatcataaagatttaaactagaaaccagtaacatatatatggagatttactcctcaaatatttggaaattgaataacacattcctaagtaatctatgggtcaaagaggaaatgtcaagggatattagaaaatattttgaactgaacaaaaatataaatacaacatatttgtaggatgctcctaaagcagtgcttggaaggaaatttataaaattaaatgcttgtattagaaaaggagtctcatatcagtaatttaagttct

SEQ ID NO: 43458 - DNA, 1022 bp, Homo sapiens
cctctcttctgaacctgcagttttgtggtggcagcagcagccaaccagacacttaaaaatccaagggaagtgaatcctctctgatcagaggaactatggtccaaacagtgtagaatgattcctattgcttttttctttttttaattctcttgctgtttggccccagagacagatctagttgcaggaagtacaagactttctagtcagaggaccgggtggcagtgggggatggaggtggggtagtagagtgtcagagagtggggcccttcacagataagagggagctcataaagggaccgcatgatgttatgtatgaacttctgggcccacccttgagccatacaacatagatctgaccctaaacagcataccaagtagctgtgggatagatagcccacccagatatcaggctggctcctggctgatgcacatctaggacagattcaaatacatcctgttcttcatagaattggagcaagacccagagtctcatagcatcttatatcccaaatgttcatgatatgatacaaaattacttgacacaaaaagaaccaggaaagtctgattaagtctcaagggaagagacaagataccaaccctgagattacccagatgttttatattaggcagtgattttaaaacagctgttataaccatgctttaagaaataataatctcagttaagaaaaagaagctataaaaaagaaccaaatggaaattttataactggaaaatacaataattagaaatttgaagaaaatcactggatatgttcaaaagcagagtgcttgtgacaaagaaaagagtcagtggatttggagacagaaattacatgaatggaaattatctaatcagactaaaagaagaagactgtaagaaaatggacagagccttgggatcccctgagataataccaagaaatatctaacatttgtgccagtggagtttcatacagagatgagtgtggtacaaaaaaaaaaatttggaaaaaaaaaaaggtggctgaaagcttcccaagttta

SEQ ID NO: 43459 - DNA, 1049 bp, Homo sapiens
tccacctcactgttctgagatttcagtctgcccaagatatacttctgataaattgttcagaaactttctctggttcctgatgctcacccagtccagcccagtcttccttctcagcctgccattcaaggctctccacactctggatccaacttacttttccattcttattttctgctacttctttccacatgccttaaattctaaccaaactggactattcactaattcttaaatatttaccttatttactcaagtcccaatgtagatgccacctcctgtgatctctccttaggtaaaagtcaccctccctgtgaagcaccatgacaggttagggtctcacctacattgtaattactgtatacctatgttctcagctacactgtaagtccagagattcttgacaaataaatcaagagtgctaaaatttccaattaaaaaacctatttggcagagtatctggctttctaattttattctgggaaaagtaaaataattttataatgctaaggtttgtaatattagggaaggtcatgggatatcctagaactctcatctacaaaagataagataagcctttgtccaataagttgagctctgtctgaacacataagaatagtagtcagcttgcccttctcgattacctgctttataatatcactgggaatacaaacagttctctattaaatctcctaaatgagaggaaaatgtattttataatttaaaatggtatgttcattttgtatgtacatagctctattttgaagaaattgagttttgttaaaacagtcttttgcttataacagctccagattgcttgtgttttggtaaaaataagagatgtggaagatacatggattttgaacttgaactatattttgggggctcttttcaagtattagttccagtggctgagtacagtatgtaaatttcattattattagagggggaggtgtgcataaccactttttttctctattagagcagcaataataaagttttgcatgtctgaacctatctatgtacttagttatgacagaagctaacttgca

SEQ ID NO: 43460 - DNA, 1020 bp, Homo sapiens
gaatttggctgggcgcggtggctcacatctgtaatcctggcacttcaggaggccgagacaggcggattgcctgagttccggagtttgagactagcctaggcaacatggtgaaaccctgtctctactaaaatacaaaaaaaatcagccaggtgtggtggtgggcgcctgtaatctcagctatcaggagtctgaggcatgagaattgcttgaacctgggaggcggaggttgcagtgagctgagatcgtgccactgcactccagcttgcgcaacaaagcgaaactgtctcaaaaaaaaaaaaaatctaaacattgaactttagaaccaaaatgaaatcttactgtaaccctaatgtacaatactaagaaaacaaatattttcattgacatattgaacttataaaataatgtatcttcaaaaaaaagattctcttagttttaacaaatattcatgcttaagtaatgtcttcagctccacattttcagaaccctattaactctcacttagcaaaattagcatactgaactctctaaactatttaatgatttgatttatatatgttcattctaatgaacaatggatgctaataacagtattctgtgaggagtaaggttttttttgaggtcagcagtgtttagattaatcaggttgacatttcttgctggtgggtcatgaactgttgataatagcattaaatggtgattcagttgttgcagaaggtacaactcattatccagctactatattaaatcattacagaaacaattggcactccacacccatgtgttctgcagcaatggtacatcagggaagtatatttgtttcttttatttacatctcaaatttttttggaggcttacctacattcttaaaggatgctacagcattgccactactttagggaacgaggatgattatcttgactgatttggggggatgaagggatatataatccttttaataacacacccaaagtcttctctttatattgcgagcctttctgaaaccttgttttcataatg

SEQ ID NO: 43461 - DNA, 1052 bp, Homo sapiens
gattgaagcgaacagagtccctcactgaaaggctggaaatataatttcacttaaccgtacctggtagtatcttcttaaatggtataagaaagtgcttttctaattcaaatgattcaaataatatttgctaatattatgaccaaactttgaagaaagtgatagttgtattttataggattaagtgagatccttatctgggactatgacgggattaacagataccttcagaatgctttacagctgaggtgtatgtagatagatgtagagctctaaagggattaggtgggtggtggttaagcaatagcagatgtcccttttaaaatcttcaaactagaggtctgttaagtacagtgcttattttttgctgacttggttccatgagaaaccttgatgttttttagtgcttctgaaagtatcaagaagaaactattcagatggtttggaaatttggggcctactctttttgctttgtaaaatggacagttttggataagcaggaaattctgactgatgggcagcagaacaattaattgcagtatagaagtgcattaggtatagtgaaaagagcacttacatgagaaatctgaactcagatctgagttcttttatttcctctatctgttgtgtgactttgggcaaattaacttttctgagtctcaacttttctgggtgtaaataaaagtgatgggactgttggtgctgagtctaaatgcattgcttattttgagacttaaatgaaatgatgtaccattgaatctcttggagtgggcatattcctttctctaatgccatttttagggcctgactttttgtgaaaatcaaatgagattttggtgttttctttttttctcaccaaaatcctaacctcagggctgactttatcagaatgttctaatgtaatcattgtggaaagatacacattagtacttacttgagaatgttgtaacccaaatcagaactcttactctggttcacaaaacaggacttctagaactttgagaagaggcagtttggtgtgatgggacgatcacgggatttggattcaggactcc

SEQ ID NO: 43462 - DNA, 1045 bp, Homo sapiens
taaatttttattttccaacattacccagttaaatgcacttttataactttttaaatacccaaaattgacctttacaaaatatcaatgagaatttcagtattcaacattaatcactgataagcttttttttagcacgtttatagtataggtatttaacgttaatacatgattaacagtgtatcaagcttattgcacaatcataataaaatacactattcagtgctaattaggcattgcaattatcatttggtgttgtactgaaagaattatattggtaactgatgcttttcatcttgttagtatttttaatccctctcaatatatataatctttcagtagtttcatcaaaagaaatctgttccaacaactttaaacagaggaccttcaagagtgtgaggtgtgtgtaatagttttatcttgaagagaactcagtgaaagatactttctagattatgttaaaaagatccaatcaaccggcccatactcatcatgatttaacttttacagttttatacataggtttcattgaaggctgtaagaaaatctgatgtttataacattttcctttgccagtgtttgtctgaattttgcaaagatcaagtatccaaagtacgaaatgctagtgtatttttggaaaacaaaccaaaacccacttacccaatagattttacatattctaagaacgagaattcagtagtctggtaagtctggcttcataactcatagatttcttgcaccaaataagattgtcagcagtttggaaagaagagtaaagaagaggctcttcttcttacattggtgtgttcaaaagtaaaatataaaccagtatttttgttactatagcttagagcactaaagaagagccatctaccagtttccagattgttttagaagtagtgtctgaagaccttttcatttcaacttgttcttattctaaagattcctggctcgttatatactaaattgtttctagaaatgcttactagataggttgctgtgaaaggaaaggtttcgaaaaggatgagtagagaaaattacttttgaa

SEQ ID NO: 43463 - DNA, 1031 bp, Homo sapiens
tatccaggtgataggatatgttgtcagaataaataaagctcagtgtatattctattgatttttattcttttaaaaaatgtattcaccatgcagagtgatgtttaatgcttagctttgatcatttagcaaaaagcttagtgctactcattttatactcttgcctcttctgaggcttcttaatgtgcacaacctgttttaagaaatgtatatgttttcaaagtaaatgtttgacctcccaccttgatgttcccacttaaaagcaaaaccctcccctcccttatattttgaataacttgatgagaatgtgtgttgtactaaaactaaatatatgcacccttcagtattaccaaaagagaccttttggttttaaaaattaggaaatttcacttttgaaagtagtctagacaaaggtactcatgacatttgaccctgaaatttttacttttaaacttgatgcaacagtctgcttcttagctttgttgtatgctaatatttctacttatttaacatcaaaaagctgtagaggtttctctttatagattatgcctgtgttctggaattgcctcctgctgtccatgaattgcttcttggcttgttgtgttagaatttctcaccagggtcttttgtgagctatgtagccaacattaaaaaaaaaaaaatcaaatttgatagagtaaactggactagtaaaaattatacttactattcataattataattgaggtttcttggctcagcatatcaattttatgcagtaagagtaagcacatacaaatctcatgtaatgatatgcatacatatagttgcctacaatgactgtttttctagttatttctataatattaaaatgatttttttgctgaaattccagaaatctaaaaacattgaaaaataatgataatgagaaaaacaattcttacttgttagggtatatgttatttagtaatgaagcatttagattttggattctctcatttcagttggaaatagtattggtgtaagtgagtgttgccatgggaacctccacatag

SEQ ID NO: 43464 - DNA, 1055 bp, Homo sapiens
aggaccactaggtttgattgcttgttgcatgataacagaccagtatgcagacacaatgggagttgcagtagagaaagagtttaataattgtagggcagtcaaatgagacagaggaaccttcaaatcctcctccctccagggtttggggatggagcttgtaaagggtctgaacaggtagggctaaaatgtggggattgctgattggtcaagaagcaagggggaattcctgggacagggagatgaagaaaccgcattcctgtgcagagttggttggttccttggttgaggtcttgagactggttggcttcagccattctgctggaattcaggacctgaaaaacaccataagcaattcttgggtaaaaaggtccagtgtcagagattctgtgtataggaacaatgggggagcaggtggtcagcatgccgcatgacccttggttagttaccagctacagggaagtgggttgaagtaccccagtgcaccctggtcaatgcctgactataattctgcctaaagcctggcttgtagttctccatcaactctgtgagggtggtttcaaaagggatgtggggaaagcatggcttagatacccagaatgggcccacagttttatagaagtccagtgttcatcagtcttgaaacatggaatctttgagatcatttgaacaaaacttgaagaatttctccccatccctttctcccaagtcttcatctatttcctattccagactttaaaaaatgcatcatggatttatatataggtacgtacaaatagagtagtattctaaaagtgtaaatgggaacatactatacttctattatcctatggttagtattttaaagagaagtttttttaaaaaactcagatgaatttaaaatagtaatgatttttgagaagcaattggtttcttcagtcaagcgtttccccctacttcctggtaagtattattctggggagtaaagtaagaattattacttaatcatttttctagcctatggaataacagatggaaagttttcctcaggtttcattttgatacttattagacccact

SEQ ID NO: 43465 - DNA, 1051 bp, Homo sapiens
gtgatatgtagacatatttctaaatgaaagaatgaagatacaaattaaaaccaaactaggaggtaaagtgatttgacagcattcctgtttaagagtctgctctgcactgccccttctgacccacctttattttgcagaagatactggtttttctttttaacttaatccttagcatcaaggacatgtgacttgtgcttcattttcattgtctaggattttccttggagatgctgctgatctatgccaaaagtctgggatgtatgcaccacttctgtgtgagtttattctgattgaactaggcttaattagattctcttttcttttgttttctctttaaaaacttggaaaccattttgttgttcctgagttgtaaggctgaacatgtttgcttaagtaaatctcttgggatctaatctggcatccactcaggtcttgttaaatgagagctttaaaagcctcttgctgagtgggctccatcattgttgaccaaatgtttcaagatgtaggcacaaagcgcttttgtcagtttttcaagtgtagtttaattttgaagtaattgtgcttttctacttttaaagtatttaaaaagtacttttaaagagtactgttaaagattaaaaaacacaggagtggcaagtttaacaagatcacattcttcttgtttctttataaatttctgttacccatctggtttacttggaagcaatgctgaacttaacttatgtgactgttttatctagaagaggcagcaagatttttctcttcatgtaaagcaactaggtaacatttgtcttcttccaatggatatgtaaaaagggggtgtagtcccttcagattactcttggctcttcacccccctcctcatgctgcaaagcagattttttgttattaaacagatttttaatttattttagcagatttttaatttattcagtcctctgctctttatattacacacccaccattgatgcatactggcatacagataaatcaaagtctaattcagagaaattggctgcaagaattcttaaagactatattgtggtttaca

SEQ ID NO: 43466 - DNA, 1064 bp, Homo sapiens
catcgtagaaacatagtcagaacagccgggtgaggtggcttatgcctgtaatcccaacagtttgggaggccgaggcaggtggatcacttgaggtcaggagttcaagaccagcctggccaacatggtgaaaccctgtctttactaaaaatgcaaaaaaaattagccaagtgtggtggtgtgcacctgtaataccagctactcaggaggctgaggtgggagaattgcttgaacccaggaggtggaggttgcagtgagccgagattgccaccactgcactccagcctgggcgacagagtaagactctgtctcaaaaaaaaaaaaaaaaaaaaaaaaaaatcaaaaccatgagacacacccactagaatctagattaaaaagttagataacaatgtgtttgtgaggttgtagaaaagttggagccctcatacactgctagtggaaatgtaaaatggtacagccactttgggaaagagtttgggagttcctcaaataattaaaagtttagaattatgccatgacccagcaatttcacacctagctatatacccaagagaaataaaaaatttgtatccacacggaaacatgtatttagcaacattattcatcatcacgaaaaagtggaaacaacgcaaaaatctatcagcggatagaatgtccaaacaaaatgtgttatatccatacaatgatgattattcagtaataaaaagaaatgaagtactaatatttgctgcaacattgataaaccttgaaagcatgctgcgtgaaggaagccagtcacaaaaaaccacatactatagacttttcctgaaagtccagaataaggaagtctatatagagacacaaagtagatcagtggttgcttagcgctggggaagagggaaagttgggcatagaggaatgatagctaatgcgtataagatttctgattttttttttttttttaaatggagtctcactctgtcaccaggctggagtgcagtggtgcgatcttggcctactgcaacctccacctcctgggttcgagtgattcttctgcctcagcctcccgagtagctgtgactaca

SEQ ID NO: 43467 - DNA, 1092 bp, Homo sapiens
caacctggatgtgaatcatccctttgtccagcgtctccatgctgcagacactccctggcccattagtcacttactagccgcctcagtgatcgggtgttgtgatatcgcgtgcttattttcaggtaacccttattttatttcataatggtccaaagcgcaagagtagtgttgctcgcatattgttataattgttctattttattgttgttgttaatttcttactgtgactaatttataaattaaactttatcataggagtgtatatataaagaaaaactggctgggcgcagtgtcttgtgcctataatcccagcattttgggaggccaaggcaggcggatcacctgaggccaggagttcaagaccagcctggccaatgtggcgaaaccccggctctactaaaaatacaaaaattagccaggcgcggtggcgtgtgtctgtggtttcagctacttgggaggctgagacatgagaatcgcttgagtccaggaggcggaggttgcaataagccgagattgcaccactgcagtccagcctggatgacagagggagactctgtctcaaaaaaaaaaaaaaaaaaaaaaaatgctgggcgtggttgtgtgtgcctgtagtcccagctacttgggaggctgaggtgggaggattacttgagcctaggaggttgaggctgcagtgagctgtgtgctccagcctgggtgatggagtgagaccttgccttaaaaagaaaaaaaaacaaaccagaaaacatagtctatatgtttatataacatagtctgtataggatttggtactgtctgtggtttcaggcatccactgggagtcttggaatgtatacctctcagaggaggggttaccactgtgtagtgaatgaatagcaagagccaatgtctaaacaaaggtctttgacttcggagttttggttctttttgaaattaatgtgaaagacatttttgagtgtgtgtatgtgacatctgtgttgatgattctgaaatgtagctacctgttaacctatttataaactagattgctggaaaataaggtgcctagatcagtcaagccactgatcattggtctcccttgccttctcttgt

SEQ ID NO: 43468 - DNA, 1024 bp, Homo sapiens
ctaatattaaatgaatgtttacaataaaaaatgttatttgcccctattgaaaataatgtattgaaatcagtgtgttctaggtcagtggcttcaaagactccagttggattcattggactgggcaacatggggaatccaatggcaaaaaatctcatgaaacatggctatccacttattatttatgatgtgttccctgatgcctgcaaagagtttcaagatgcaggtgaacaggtaagaccttttctttagatttgttttagattttgagaatgaaaaatgaatatacattcaaataagtgacagcttcttagaagtatacccaatggagttgtaaacctaattcagtgttaattttatatatatgtaatcattcatccaacatccagatttgcagtaaaggagagttctcgttagacattcaggggtatctattctttggcaggtgacttggaacattttgcacatttggtcagagggccttgttttagctctgtatcagttttctgagatagtaactttactgattgtgctgttaaagtagttagtttggtggaaataacctcctgtgttattaaaagcacatatgtctttaaaacaagagtaggcttagagatataaagcttagtttgagttgaagctcagatacatgctttcttactgggggcaagttacatcacttctgctgatttcctcattcttaaaatgtgaacgatgacaacctatgccattaggttgtgaagctcaaatgagagaatgtatgtgaacatactttgaaaacatcatatggcagcactttgtgaataattattagttattggccataaaccaggagacagcctaaaaacactatgtcctataatgaagagttgagttatagtggatctctagtgtttttaggctatcattcatgtttaaagaattttggtaccagagtttatcatgttggatgataacatctgctggttaagtcttgagttgtttggatttgttaaactttatcaataactcaaattacaggagacca

SEQ ID NO: 43469 - DNA, 1028 bp, Homo sapiens
ctttaaattataatcttcctagttgctgaagtttttagattgctaaattacaccttttcaaccttaacacagtaatgccacattttctttctggctattattgctagtttgtttatgagcattagttagagttctctgatgaagtgtactcattctgtttaatatcaaaataaaatttcagtttggtgtcacttttctgtcattgaattccttgcaggccagaaagacaaactataccagtgtactattataccagtgtactattataccagtgtattaaacttagcgcctgttaaatgatgttgcacagaaatgacacccacatttaatggaagtgttagagtcagtcattaagttaaaggaattaaatatgcttccaacccaagaagacctctagttcttaagcattagggcttcaaataatttgcttttaacaaatctcattccattcagattcagttcagggaagagcagattaagttcagttgaggggacctgaaacttaaaagagggactgtgattagttgttgcactacaaattttaaagctggagttcttgaaagaaaaaagaaaaagaatgctgggaaatggaagagcaaggagagttacttctctcttttccctcactagactgtgagcttttaaaggacagggaccatacgttgcttgtgtctgtctctgagctctgtcatagtacttcatgcagtgaatatttattgagtggagttctaaatctagaaagtgaaaaattgcatctaacgctatttccatagtactgtaaagcctccccactctgtaacgcattactttgattcatatgcccacggagtaatttcaaaaagtcttatatgaaaaataaaagaataaataaaacctgtgtagtttttaaggcttttttttttttttttttaatggcagcctggtcaacatggtgaaactctgtctctattaaaaggacaaaaattagccaggcatggtggtgcgtgtctgtgatcccagctacaccggaggctaaggcatgagaattg

SEQ ID NO: 43470 - DNA, 1048 bp, Homo sapiens
gtctctggttgatttaacctcctctgtgattcttgttctaacaaacatactgttacataatgctcatcacctggtcctttgactccctcccttttcctccaagtacatagacatgctttcttgtttcctcatttcataaggtctctctctaggtttgtctgtacccattctcaaacttatttataattaggaatttcactgatgcctaatactgtttttttcagcctcttgttgtatttctggataaatccattgttgtggtctgtttgtgcctttccccagctgtcacttagcttggtgatatggagagtcacagaagtttgctgattagatacaatgctttcattaatctcttgtttattccccattacattttcagattttccacagcatttccagaactttaacttagggctggcagctcctgaaccagtcatttggcagaaggatgccattaccatgtattagtttagacagtttgaaacttgacctcggatctacgggaaagaatattggagagtcaacctgcaatgtgtaatggttgctgtgacactgtttacctttacacagtccacttttatcagcagcattactttgtaattgctttagaactggcttttattcccatatgcccatttgatgaaacttacctagtttattattcattcacatagcatatattaaatttcactgtgccacttcatttatttcattttattataaaagtagttacaaaagttacatgctcatggtaaaaaatgggaaaggttataaaattaaaagtaaaattttcttcaactccgacccagtagtccaactctccaggtgtaagtactgtttcgtgtgtatccatacagaaaatcagaaaaattaatgcatatgtatcattttttcttctcttatactgtatcctatagataatgctcagcattttttttccacttaataacttatcctggagattttttcctataattttagataaatgtcacctttttttaaacatttgcacatttcattgtgttgatttactgtgaattatcaagtg

SEQ ID NO: 43471 - DNA, 1053 bp, Homo sapiens
gatgttcaagatgctagattaatgaaaaactttcacaaataaatttgacaacaatgaaattacagatcttgaaaaatgtgtcctctttctttaatgttagtgacagttctatacagcacagacataactgaagaaacacattactttgatttgggtttatgtattgtacttttaatcacttactgagaatatttcaaatttatattctcatcaggaaaatgtaaaaaagatactgatatatattctatgatttttatgccacaaacacccctgttatgagatcatttaataggaaaacaattatactgacatctcttgttccattttcccattagatatatacatacaacttcaagatagtttaaaaataatcattcaggttattctaaaattttgccataaaattagcaaagtatgccttctgttaattgctaaaaccaatatttcacatataaaagcatgtgatctcattctacatgcagctccatttctgaaaattaaaaacctatcatttcatgggctaaattatagaactttctatattcgaagaactacttcataagactgttatgacaaatgctttttattacataatatttagtagtcatgctcaatcaacaaggtcaacagaaacttgtgaatattctgctaaataatctagcacactaatacatacacgtttttcagtgcagtaacattgaaataatccttgtatcctttattcagacagttctgcaaactagggaataaataaagatacgaacacacaagaacttttttttaaagcaggtaagattaacagagattaaaatttattgataagccaaagactgaccctgatcctagtaacaccaaactcaaagtagctcctggtcagaaagtgcagtaaagggtgcatgaaagcatccgctctatggtctcctcagtggtctattttaggtgtggtttttttttttttttttactgctaaactatattaactcataataaaaagtaactagtcaaaatttagaacattctgatcaaaatgggtctgcacatgcctttcaaaca

SEQ ID NO: 43472 - DNA, 1094 bp, Homo sapiens
tgggtataaagacaagtgccagaatttaaggagctaatagcttagagcaaaaggaggccaaatcaaaaaacaggcattttggctgccatgacatgtacacattcctacaatctgcccatttgttcattaaaaaataatagggcctcaaaaccgtggcacttcaatcagagcatcagcagaaacaattaaccatcccaataaaagggattgctgggctgactctccaccctactgtcgcactcacccagtgtcacagccggtggatcctttgtgtccttaaaccttgtgtccttttgaaaggtagatctctgagcgcattctcctctgatagagaatggtttcatcaaagttacaaatctaatccaactgatttttgtttttaagtacagaggaagatgaattcagtaaggttgcaggatacgttatcaatatacaaaaatcagtagcatgtccatacacaaataacaacctagctgaaaaagaaatcaagacaacaatcccatttatgatcacatcaaaaaaaggaataaatttaatgaggaggtgaaagatttgtacactgacaactaaaacattgatgaaggaaattgaagaagacacaaataaatgaaaaatatcccttgctcatggatcagaagaatgaatgttcttaaaatgtccacactacccaaagtgacatatggaatcagtgcaatccctatcagaatcctaatggcatccttcacggaaacagtaaaaacaatccttaaactgatgtagaaccacaaagaccctaaataaccaaagtgatcctaagaaagaaaaagtaaagttggaggcatcacagttcctgctttaaaattatattataggctgggcacggtggctcatgctgtaatcccaggactttgggaggctgagacgggcggatcacctgaggtcaggagttcgagaccaccctggccaacatagcaaaaccctgtctccacaaaaaatacaaaaattagctgggcatggtggctggtgcctgtaatcccagctactcaagaggttgaggcaggagagtcactcgaacctacgaggcggaggttgcagtgaactgagattacaccact

SEQ ID NO: 43473 - DNA, 1072 bp, Homo sapiens
agctgcattttctgaagtgagccccgctgaacggagcacatgccacagatagtaccaccactttctcccagccttccatccttgacatgtgtgtctccccaccttccatccttgacagttctcgtgtgacagtcggctgaggcagaaaaagttctgcccacttgaaccatatacccttcacacgcttctaattctagaacccaccccaaaagattgggatcatcatataattaacattcgaagcatgtttttctaaaccttcactttttagaaaaatatagacatagaaaacatttctcttggatgcacaaacttgaaaattttgcccctgaagcagtttgaaatggccatttacaaatgcatactgtgcaggcttcttggacattgatgacactacccattgcagaggttgtctgtgtctcccccgaaggtttgctgagtatctgttcattaatccttatttagctaactggaaagtactttccttattgtctgtgacacatggattatcccattaggacatctgtggatgacatatcgttggtttgttctgagatgaaaagtggtattctccttatagagcaaaacaaagcaagggaagaaacagttaatagacttgagctgacaaatgggaggttggctaaagattgtgatcatctccttacagatgtcacaaccccgttggcacacagcactgaccttgctttcccaaggttgacctgtatgtctctagatcaagattgatttgaaaaatgagccatttgtatttagtgctggtctcaaatcaaactccaaaccagttgaggaggaacagcgaagttattcagtggtttgagaacttagaattggaaaatctctcctttttatttccctcaggacccaacttgtaacttctcgttacaatgacggtttaagagacacatttaaacctggtattcttcctctattcatgaaactgcatctacatatacgtactgtggctgggggtacatgaacccagtcaaaatcatccaggaagcattgctaactactctggagttttcaaaagcactccctattcgaacctcatgtt

SEQ ID NO: 43474 - DNA, 1044 bp, Homo sapiens
aattatcttgttacacgagaaaatccagtttcaaaactgcataagcaatatgatctcaattttttttttttttttgagagaaagtctcactctatcactcaggctggagtgcagtggtgtgatctcagctcactgcaacctccacctttcaggttcaagagattctctgacctctgcctcccaagtagctgggaatacaggtgcgcatcaacaccacccagctaatttttgtatttttagtagaggtgggtttttgccatattggccaggctggtcttgaactcctgacctctagtgatcctcctgcctcagcctcccaaggtgctgggattacaggcgtgagccaccgcacctggcccatgatctcaattttatcttttatttaagagaagttaaccatggttaactaccttaatatgataggaagatgaatattattttcttctttttcttttcccatattttctaaaatgagtttgtctttctttttataattaaaacaacttaggacatatgattggaagatatagaattactggccctaaaaagagttgaatggatctctttccatcaaattaattgacctttgacgtgggatcatcctatagcaaaggcctttttgcttttgcatccatcattagagagcaggttgtcttggttattattgcctacagcttagttaagaaagtaatttctcccccctccccccatatttccccattgaacctctgaaaacagtgattttcgatcaggatgaacgttgaaatcacctggaaaaaattttaatctacctctgcctgggctccacccacagccactctgattcagctggtgggtggggcttgggcattgggagtttttaaaagctcttttgggtgggtagttctacaaccagagttaagaaaccactgttttaaaacatggcccatctcattgtagtatctatgtgccttctagcttgaattttgaacatattccacgttgtctggagaaagattactgtaatccgtttccttgacctccgggatgaatccagtgggactg

SEQ ID NO: 43475 - DNA, 1045 bp, Homo sapiens
agagagtgtagtgtaattccgcaatcctcttttctgggtattgctatgatacttattcacatataatatgaattatgggaacagtttcccattggctgtgttttatacctgaagtaatatggactgactcatgtccaaccccagataactgtgactgccccaattagtgacgggtgcctaggaccccatgaaaataaagacagtttaaaagtgagagtttattatttttcatgtaagaatgtttggaagaaatggaatcatttcccttccttcagacataaagaaatctttctgacaccttgcctattttagcaatttcccattgagagaattaatttatgttgtggtaaagatgtatcattttcagtctgtcaagattattggtaagttatttgctgctgtaagaacattccatgtaaacatcaaaaattagcaggggaaatggtttcttaaacccctaccacgtacaattttgattgtgtacatttttcaatgtttggaatgttattttacctgtagttagagagatcagcttattttgcctgactaatgtggtttcagtcactttcattgccaggttataaaattccacatttctaccccttaaattcactcttgcaagttctatattcatggtgcattcccacttcagaagtaatagtcatcttgtaggaacttcatttataaaatgttctttaaggtatactttcttgacaatactgaattagagctcagctttatcctaaagtttcgagtatttcttaggtatagttggaatcaatgtttgttttgcaattttttttcttttctgtttgaaacagggtcttactgtatcactctatcacctaggctggagtgcagtgatgctatcatagctcactgcagcctcaaactcctgggctcagcctcctgtgtagctcacgtcagcctcctgtgtagctgggactacaggcacatgccacaatgcccacttaattttttgactttttttgtagagatgaggtcttgctatgttgcccaggctggtcttgaactcttggcctca

SEQ ID NO: 43476 - DNA, 1017 bp, Homo sapiens
tgttaacaattataataaaattatgacttgatgaagttttaatgatgtaagtaattttgctccccaagaggcatcagttgccaaatgaagctgaagttttaaggaacgctaaggactcactgtactaaaacatcaccatagtgcctttaatattggatgtaccttacaataatgtggattagttttgggtcagggccaggagcttttggttcctcaaacaccaaaggcacttcccttaaggcattcactcctgtaagagagtccctttagcttggattctaagggtagcaatgaaggaggattccaaggtgcaagcagtaatacaacttgcacacagagtaaactccacaagttgttgattgtaaagttgtttggaaaccaggattgaatttgcctctacatacattgtcattagtgatatttagatttagagccagttcccagctagtactttttgaaatgattacgtattaattatttaataaatggtgtgggtagaattggactgctggtccaatcttccttggcgttccagagcactcctgtagtcaaatagcacaaaactgagcttgctccttccttttgtaaccataagtcacccctcttttgtatgacttcacccaagcaaatttggcactattgtattgattataaatatgttatttcctgttgctaccttatcatcgtaaaatgcatcctcatgcttgttctgtgttatccagctctgatagttacatttttgacaagataagcagctactgagctttaaggcattgtagacatgcttgcattttccgtttacctttgaaaaattaaatgacttttctttaactctcatcacaggttttagcatgaatgacttatgatctttattccttattggtttatttctccaaattttcccattttagtttctattcacaatggggggccaggttcaaaatatttttctctcctaagagctcaaaaatcataattcttcaaaatatcattttacatttcatgctaatgagatag

SEQ ID NO: 43477 - DNA, 1194 bp, Homo sapiens
cctgagctcaggagttcgagaccagcctgggcaacaccgtgaaaccccgtctctactaaaatacaaaaaattagccagacatggtggtgtgagcctgtagtccagtccagctactcaggaggctgaggcaggagaattgcttgaacctgggatgcagaggttgcagtgagctgagatcgtgccactgcactccagcctgggcgactgagtgagactccgtctccaacaaaaaaagaatactttataaccaacataaaatgtggttcgaaaagtaccatctaaatgaaaatcagaccttatttatttgttctgtttgtcttcaatgcacttcctcatttttatctttatgtatttctttctgtaatgatttatatccatttcatccaaaaagtttaaaacacaatataaaatgccctgtaaaaatttatactaagttccctaaaacacttaagaaattcactgaatttttctaggcatacacttcattcattcgaatgaaaacttggctgaggaaatcatagagttcgtataactgacttctaatttcttcttccttatacctaggcttctaaagcccaggtgtgatataaattctttttttaaaaaaatacttttctatttttgtagagacaggatctcactacatggctgatcttgaactcctggtctcgagcagtcctaccacctcggactcccaaagcactgggattgcaggcttgagccaccatgcctggccagaaattgcatttttaagtgaacagttcagagccctgtatttttcatggattattttaagaattacgatgatgatgaagatgatataatccctaacactgcaacccattatgaagttaccaggggccctccaaaattttgctatcaaggcaacatcccttaaacaagttaacagagatgctctttttcagtgagtcttctggaagaatcgatgccagtctgcccttatgacaaacatatttcttaatgagatctgatttacgaagttttgacaattatgcttttcccctctcttactgccactttaagaaaaatcatgctggtaagctacactacaaaacttctggcctgcagagggctctataataccatattttcctagacaacacttgtaaaaaggaaaaaaaaaaaaaaagatacttgctggaagggggaaggggaagcccagaggctttataa

SEQ ID NO: 43478 - DNA, 1146 bp, Homo sapiens
aaataagttaatgtttgtaaaacagttagaacagtgcctggcacatagtaagcaataaaactgccagcttttattgtcctggtttctcatagaagttcaaacagtaagtcctcaaatgctgtgtttccattttgatgaagaggtttgattgactccatttgcttctgcactgcctgctctcacatgctccctctataacaccccagggttttctttggcctgtcatgcttctcttggactcctcattcttagctgtgtttgttgtctgttctgcccaccttcagcatctcccctctgctgcttcccttgccattccttccttgtctgcgtaccttcctgcacttttctcccagcagcctccaccaggttatgagttggagcctcacggacctgagcctgctgggtggcttgggaaaccaggctttgttcctccaggtttcaccctcctgtggctttactttttgccagatttctccaattctcattctgctgatgtgccaacccctcaattgtcagggcaaccacagcaacctcagccctctctgctgtccaaaatatgtcagcagccaggctgaacttccacctcatgccacagcttaactcctacagaataccctgttgtgcactgaagaatataccagcaagactgtcagacattgttagagccagtcaatccttgttacatttttacacaatgccttctcttctaagtctgcctgctgggttcatttggcatgggttaccccaaagtgagtgtaacctaaagaaattgtgcacacaagataaacgtagtgcccttggcaagaaagatatgcaggttaaaaattagcatttagaggttttttccccaaaggagtaaattctcactactggattccctgggtcctttcagtcttgtgatttaaaggagacacatgaattgattaaaattttccagtgaaaatgccattcaattaaataagcacaacaagtctaactgggaagatttcatgttctgaagtttgcgtttttctcttaggaggtgctcacagatgtataccttttccagagagaagaattgagggatttaaatgcatttttatgctgagtaaagtaggtggcaaggtagcagtatttcactctaacctcattttagacccccagtac

SEQ ID NO: 43479 - DNA, 1059 bp, Homo sapiens
tacattttaaaaagagaagaactgcccttcagaatatgaatccaaatgcagaaaagtgttccgtgaacaagaacaatactcagtaggttttcaaattgatggagctttccaatggaaactaatttgttccagcattgaagtgagcataattaacagagactttctttcttaggccgatgaaccaccaaaaaccatgccaacattgtaactgtaagcagtgaaaaccaatatttataagggggattgtgcaagagtttgtgtgacagatggacattttatcactgttgatgtttggaattcccttgaaaagtaatgcaatatcttgttatttatgaatgaatgaacaaatgattgtgcttcgccgactcagttttctttaaaaagtggtgtactaaattaatctttttctctgcttagcctctgttactttgtgttaggtagcctcatatattctgatgcaaaatctaaaaaaaatcgtaattgtgtttttattacagatacagatccacgggttttagaaaaacaagaattacagcagccaacctatgttgccctgagttacataaataggtaagccattttcagaatttattataacaaccttatatctgctgcttattgactttttaaacacatcttttttaacagagtggaaaaatgttttcagtcttaaaatatttgcatgaaactatttaaaagcaacctgtatatggaatgctcttgtttctttgttagggagaagttgaattgtaatgctctgtgcatatgctgcaaacatgactgatttataagctcattttggaagtactttatatgcagagttagaatatgctcttttgacttcatagggcagtttgggagattaatggatttatgttcgagtgaaccttttaaatcctgaggtgaagaagtactttatgaattcaaaacattgttgtaatatcagaatataataaattgaaataatttaatatcagaaagttatttagaagcagctcatcttttagtaaaaacattctcaacaactgaccccagctgtagagtaacttgagtttttac

SEQ ID NO: 43480 - DNA, 1034 bp, Homo sapiens
tttaatgacaactgtgcctttgttggtatgaataatgacacaaggatgaaaatgatgaatgtatttatctgaatatatcataagaaggtttatctttatcatgggggcagttaggtagagcttgacaaccttcttagtaaatgtttatgaaatacttttgggcaagaccaaaatagaaatcaaaactttcatttttctctctccctaaaccaaaagagagagagacattaaagtttaagttttaaaccaacacaaagataaataaaaactattttaaagtcaagatggtaactgacgacctgtacttcacattataaatagtataattgttcatagtaactcatgtacttttttttagtggtacaagtctcaatctgacaaatagataaagcaaaatttacaagatctttgcaactgtcttccaaaaggaatgaagccaggccttgaaaggacgaacagcccttacttatgcagagttatccataacaagtcacatttaccatggaggtttacctggtcaaggcatcgttgcttttctcaagaaggtagtgctgtatcctgtgtggtttcataaagcgctataattggaatagccagaccaaaattttccaagtctcctcttttggcagtaaacgtgggctgcagaaacattttagttgtacaagacatttaaaactgtttatctcttactcctgtccgcattgatttgtttgtattccatgcctgccttccacaagcctataaaacttccctaaactacagtcagaactgaggctgtgttctgtatctgtatatttaaactgaacactccttttcaattctttagaaacattctccatcctgcgccagcccctacagggctcttgctgcttctggtttgctcaggtctgcatctagaggggcaccgcctgcagagtccttgtctttattttctgaatctcatcagctcacctgctctgacactctgatataatgatgccaagttgtattattaactcttgttatttttcagattttgaaagtaaggatgcttt

SEQ ID NO: 43481 - DNA, 1031 bp, Homo sapiens
aaaaagaggctctgagaagtgaagggacccgttcaaagccgcacagctagttactgatctggggaataagaactcagatctcatgactcacctcttccacttttatctcactatgtcccctctttttccctgagtcattttcagaatgttttacatgagtcataaaactcgaccaaggttaaaatggggcctgctaaactcttataatactacacagatgaatcatgtcagcattgcttgagaattttattaagacaggtttaattggtcctgcctggaaaactgaaacataaaacaaagtcactgatttctctgactgtgcagatctcttggatgtgctctttaaattcctctgcttctgtatctcattgctgaggacatttgcaagaaaacataatatttattgtgtttgagtacatctagtcttgctgctttttcttttcctacatcataattgtctcttttcaggcagaggtggacagttaagcaagttctgcacgtacccaaataaactctgaacagattgattccctctgcaccccagtaagggtgtgctccactgtgttcccttgtccccaggcccagattcttcctaaagtaaactgggccactgaactgtgcccattagtgagccaaaagattggcatctgctgtacctagagggagtttgttctgtagatgccaatgggctgccgtgagggttgctggttattcactttctctggtcttgctatgtgcattctttgcagatgtttctccccatccctgaccatactttcctaccttctccaggagcacagcctcacccccaacatcccatacccctgagtgcccaggcagggttaggaacctctaggtgtctaataaagggaggtaaaagccactaacccacgttaagaaggtagctttccctcctttcctctgtttggcacaaggcatcatggcatttggggcaggccccagaataatctgtgtgccatgaggaagcccaaatgtcctccagagatgaccctacctcctccagtgcgagc

SEQ ID NO: 43482 - DNA, 1047 bp, Homo sapiens
ctgctacacacctaggctatatgctatagcctattgcttctaggctacaaacccatatagtatgttactgtactgaatactgtaggtgattataacacaatggtatttgtgtatctaaacatagaaaaggtacagtaaaaatacagcattacaaccttatgggaccaccatcacgtaagtgttccatcattgaccaaaatgttgttctgcagtacatgtctatatgttatagtgcataggagacaaccaagacaacaatgttttaaaaacaatccctcctgccaagcagttggttaaaggacagttgttactttggtttttaacataaattaatttgctttctgctttggctttagtcttcacacctccccagccttaacccatccattcttcagctgctgccatttccagtggtctttctaaaacttgatcatgtcaggaacccaactccccccagctccccctcagactcagaattcttctgtgcttctccatttccttcagggcaattgtcccactctagcaggaactctaaggtctttctgaatggagctggcagtagtctccccttccctccccacaccctgcacggtaatcagatggggctacttgttccacacatcacactccaccttgcctctttctgtcacagttggctccatctctttgaaatattgtcaccatctctcagccctcttaacgaactcctattgatccttcaaaacctatcctgtgtgctttcagcacattcttcctcttggttgtcactgtttacttctgtgcttccccaagagggctgcctcttttaggcacccagggctttattttccttgggtgaccccaccatctgtgactgtacagagaatgtgtttgagggcagcacttcatagggtgatctagatccttggtgcccagttcggcttgatctcctcctacaggagtagaaaggagccattctttgaaagtcaaacagttgtggaaatgactccctgccagtttcttagagaacttagtcatgagtagcatttgtgggtatgagaaatactg

SEQ ID NO: 43483 - DNA, 1057 bp, Homo sapiens
gctggtgactgccttgccatacactagttgaatatccatgtatcagttgttataaaggacaactgggattggttaaatttaaaagggtagattctttttaagttgtatctcttcaacttctataactactatggggtcagttttatgctagagcaaataagagagccatcctattaatagataaatggtattgattgagcaagaatgatgactgaaagtagtgctttgtatatttaagtagatataggattatatgctctgtggaaaatagaatttgaaggttttgttctacttcactaattggtttgaggcacatttacttttcagaatgaagatgggaagtttatacttggggaggtatatatgcaaagtgagaaatagacaaggattcctaccctaattgaagaaattgaattttaatcctggaaggagcataaagactaatggctttccttttttccttttctttttgctttattcaacagttttttaaaaagattgatgcagagctgctcggggtgtgaggtggggtgggaaaggtgaggatggaagggtcctgtgaggccctctagcatcttctcagtatgagtggattcagcctgtgtcttcttagccccctccagttctttccgtacctttccactcctttgctcaaaagccaagtgccagtgttatgaaatttaagaaaagctatttcatttcaaactcttattggttgaaatctgtcattgggatcacaacatattttggttctttgggatactttttgccattaataggaggtatgaaaatactgttttatctattgttttcttttgctatatagtagaatcaatttcttcaattatttcctgaatacactcctgtaaaagatttcttcctcctatctgtgtaattgtcatagaattggcaaggatgcagaaaaattggaaagcttatgcattgtttatgggaattaaaaacagtacagccattatggaaaacagttccacaaaacattatagaaaacatgttcctcaaaaaactgaaaatagaattactgtgtgattcaccaaac

SEQ ID NO: 43484 - DNA, 1056 bp, Homo sapiens
attcatttatttagcaaattgtttactaaggcgtgggttaaaggtaagattcagcctagcccctatcaggtaaaccctctttaatgtgcagtaatttctgaacttcagtgatgagggtcacagcatgatggatagctaggaacttgctttaatcttactttctattatggagaaattcagaaaaatagccaaaattgtgtcattgttcaggtgttccagaatgaatgtatagaattaacattttagcatgctctagaatagcagctcaaaatcttatcccctaaagacacaaaacattctgatatatatgtattcataaaggagagtacaggcagccctcagtttaagagatgcgtgggttctggaatatcgttgtaccttacttagttcttaagtcatggaggtgaggagctacagacttgggaaagggtttcaggagcaggggacaggagtgtgtgcatcaggaattgttaggatgaagaagacaaagagaagggtggtatgcagccacactggagattgtagaagcagcctgagccccagctgagcataaagccagatagctctcctgatttcatgagctgtgtttgcttttagtttaatccactagtttagcacttgtgacatggtggatgtgattcttaaggaggaaaaggtttataatgatttcttctgtgaaatttcatgctcacactcagataatacattcagtccagcctcaagaatttctttcttattgtgtgtgtgtgtgtgtgtgtgtgtgtgtgtgtgtgtgtgtagttgttgaaatagttcaaggaatgaagctgccacgtgatgttgccctttgagtcttgtagttaatttttatatggtaaagacttgcgctcccaggagtcccatctgacatgaggctgttctctcctgtcatgtacatgtggtatgaactgcctccttttactaattaacttgcttccttttattaattagtgctcatttatgctttagtttattgcgtgctccaggtttttttttttagagatactccctaaatcatattcccccacccctttatta

SEQ ID NO: 43485 - DNA, 1023 bp, Homo sapiens
gtattttactacctagataacaagatgctaggcaggatgtaaaacatttttggtaatttttcgaaatagttgcaaaatttgtaggccatcctgtgctgacttaacaacacatgttgggataggatcgtgacatttatggtctgcttgttggcaggagaaggtctgtgaaacattgtgcaataaacaaagtgtgtttcttccattccctcacctcactgtctgattgttctcctgaggcgcctccccgcttctctcacccactcctctactctacccaggttttcactgtgtttcttccattccctcacctcgctgtctgattgttctcttgaggcgcctccccgcttctctcacccactcctctactctacccaggttttcactctgcttacatttgtcaagaaccccagactatgtctcctggacccaagtctggctcccttctgtcctctcctatttaaaacctaccacccccaaatcttactcccaaaagattccttatcagcgcttagggagaaagtcagctgactgattctttggtcattttcaccaacaccacaattaatatgtaggttattgtctgccaggatctgggactatggagttaaagaagatccagtcatttccctaaaagcacttaacctaaatgtgatttggatatgctgcttgagtgagtttggactcaggatctacaaatgcccttcacacttagattctcagatctaaagtttagattcttagatctaaagttatataatgaataaccctatagaatgaatctctaatggtagaatttaagatatcctgttaagctggtcaagaaatgttaaaggctaagtgatctagtgcctctgaaattgtaccctgtttattccacctgccagtaaggtcattagcagagcagtttttagaggaaaacaaaaaacaaaaaaacttctttggttctcaagttcctaatctgtgaaagaagactgagttagatgataataagatctctttatgctttatcccacattcctgata

SEQ ID NO: 43486 - DNA, 1055 bp, Homo sapiens
gttgggcatggagagcagctcttctgccctttgaacctggtacagacccaggaaacctgggcctctccctcggtacctctcattacaggtgcatggctcaggctcatggaacaaatcagctgacttttcctttgtttcttaatgctagggagcaggcagggagctaaaggctgaaggaagttgaggcagttgtccttaagactatctttagtgaagtgaaaggtgcagaatctgccatttgtcatgtcaccttagaacaaggcaaaatccccagggtacagacatccaattgatgtaccatacttgatctccaggttaaaatataatacagctatgatgcatgagtctcattgtgaaaacagctgattggtgaggaaggtcagttctcactaaattggagagatgaggccgtgagatcaagaggaagcagcgctgagctgggagtccagatagctggctctgctctctgctctgccaccagctgtggtgctggttaagttactgggctcttccatcccctctctgccttgtcagtaggcagattggatgatgtgtaagttcctcctgtgctgaagatccttgaactgaggacctgatttccagagcccagggaacatcttagaaatggagtaaattacatgagattttcccaggggaggccttgatcacattttgtacaacattcagtcatgtatggttgctatgataccaggcagcattttgaaaccatacacagggatgagtctttcagtcagtggcctaaaccatctccctttgctgcagagccagcttttctgcaattccaggggaaagtatgggcaattgttaataccccaaagattttatatgattttaaaacaaagtggccaacagtgtcaacattgtttaccagtgactcgtgtcttttttttcctttgtcctcctccttttttaaaaaataacatttccttggcctgttaatttctctgttctatgttgcttgtatggaaaagtatctcaaaacctataatgtaaacctctcaatttgctttacttttcctgctcttgagattttc

SEQ ID NO: 43487 - DNA, 1058 bp, Homo sapiens
caagaatttgtatgtctggagatacttatctcaaaagtgaagcaatgccaatttacattacaagacctgactttgggaattgttatatgctatttaagcatagagttgcatatagccatatccataagtaaatatggtaacaattatttgaagtgaactttattcttcagcctgaacagattatattctatagtaggcttatgccgttttgttaattgcattaattatttattacatgctgccatttcgcacagttcagtgggttgtgggaagttgattatagaagtttgtttcaagtcagttttacaccctggttgacaaaatcatcacactttctcactgaaatgaaagagctggaataatgcttggggcaattataacagatgcaaggttaaggtgcaaactgtgtgtgaagcccagccaccatatttttaatgagatccaatttatgcaagcaatatatacagtgtttcctttattcgtcttctcagaagttcttcattttgatggattttagaacagaagacgtgtttgattcagacacgtctcccagacttcatactacgatgttaaacttacaacatcatgaatttcttctttaacattttctgccttctgacaagaaaacaaaagttaaaatgagctcttttgtattgttagtagttccattacatatttttggaataagaaatgccgagaacttgttaaacatggaatcgcttgaaacagcaggatctctcctgaacccgagcagtaataatgcaaatcgaaagcagcttcctcctctgcaaatttgcactttttctgatcacagatgtgtccttccatgttgcctgtctttgtaaaccaagcatatttttgtcatcacctccaaaccctttaatcagctgtaagtgccgtcactggatagaaggtccgtccttgggtctgtatgtgggtggcaaatggtaagtgaaaggtttcactgaaatcttggcagattaggagctggttaaaaatacttttatgggacatactaacttttgtgtattaatatatttattgaaaaaccaaaatct

SEQ ID NO: 43488 - DNA, 1050 bp, Homo sapiens
tggtgagattccaaagtgtagaagttttaacttttctaagctggaatttattagctgtaaaaaaaaaaagaaaaaaaaaagctttttagtcttgctggaagttgtgaacagacaatgaaaatttcatagaattttttttagtcagactgaatacatatttaagaaataagtatcaaatgctaaagaacattggaatttggggatggagatgtggccgactgtcatcataagagacaagatactggacatttgaacaaagtacactatcctctttgaaatgaagaggaaggtttccattccatactacaaataatccccacattattctaagtcacattggctaacatgccagcaataatagaaagtcccaagaaagtggtgctggcatccctcagtcctagtgctaactttgccctgatgcttattaggaaaaggtagagtagcccatggatgcctatcatggcccgagagagagaacatttaattcagaacattttgctttgttttatgaataatcccagactaggagttgggcatgactagcggacctccctttatggactttcttgttgcactggaggatggtcatagttctgtcctcagagtgttttcctgatggtcagatgaaatgttgtgcatgatatgcttagcacagtgccaaacatgttgtcagtacacagtcagtgttagcggttaccattaccatcgtaattactaatcatttcttaccatcaaatgcttagttgtgagtctagcattcatttctcctcagtgggacacattgtgaggcatcccagagttcaaaggagctagaatctagttgcactttagataaaggagactctgaaataaaaagtgaataatgttccattctgaaccagaatttacattttactggggagattatgattgagtgctatttgtttagtaatgcctcttggtggtcgctgtatacctcctatgtgccaggcacttggctaagtgctaaaggcataaagatgaagaagacgtacttggtccttgcactcaggaagtgtcttaggttgagct

SEQ ID NO: 43489 - DNA, 1028 bp, Homo sapiens
cagacttggtccagctattctttggattcttcttttccagacacacctttgcttctcagaatttcagcacatttttaaagcagtgcatatggatggtggtcttgtgattctgttttcttttcctttcttatacttctttaagtttgagtctagagtgatcagaatgtgaaggcacttctgtgatgggttaagttaaactgagccattttgtaggacactaatcatgttgctcatagagccttaacttacaggactgtaaattaaacttgcagaatcacgcttagcattgagaagttgtctgagatataattccatccatctgaaagtacctcttcctgctggtaaatggagacctcctcatttaatagggattatatcttgttattattatatatatatgtatatatatatgctctacctgaacaatcagtagtttgaaaaataaaacttttttgatttggatttgcagtgatttactttatacaagttttaggcgagctcagagagatgctaatctaaaacccagagttcatgtaaggattgtggtttatagaaatgctcttatgtattggtttagtaatcctggtttatagtttattttgaacttgatttatgaacagaagtattactctcatttattaaggctgatgggtttctctccccaccctctcttcagaactttctgctttgtcctttctaataaatttgggagtgtggaacacactgtccatgattcttccttccaacattagattttagactaattaacagaagaaagcaagcatctttcaaaaacttgactttaagtacttgggtatatataatcaggaccattaaaaagaacacgatgtttagtgcatctctcttctcttagtgagcacagaaacttctcttggctgtttccagtgttgaggcaggccaagtatagctccaagcactgaaatcttggagactaaaaggccatatctttttgtaggaaagtgaggaccccttcttgttcatcagttctgtttttgtcactggttagc

SEQ ID NO: 43490 - DNA, 1044 bp, Homo sapiens
agttcactttctctctgccatgagagtcctctggctgtgcttgacctttgagtgctgttttatgtcatcgtgttcttttgcattggaggtggtattgtgtttgtactagttctgatattttagcagcagtatcttatgattttgtttttcagtatgtatgaaaattttgatttctcatatttttatataactatggagtgtatgctcactatagaaaaattagaaaaacagagaagcaaaaggaaagacaaagctgttgattgtagttaaaccactcagaacctaccatgtttacaaatcagtatatgtcctttcagactttttttcaaccacatatgcagacattttttttcaaaaaatgaatttgtgctaaatattatataccccttttcaccaactatgtataataagtatacattgttgtatttttttctcagatagtgcctggatatttatgatatggtttgcaaggtcatggtgataagaaataacctagggactgccaatgagaacaagcccagaaatcagagagtgatacttatgggaatcgtttctattcacagagccttaagcatgctctgggcgctatcgccaggcattttattcacaatatgtcttttaattctcacaatagtcctgtgaggtgtagctgttactgtttccacttttgtagcaaatgccctaagagataaagacatttgcttgtggttaccttgcagcaaatgttggagcagggatggatttggtccatctcttatctctttctgtgtttcagatttgagcccaggctaagctgtccctccagctgcctgcctctgcattgtcccttgggggtgctgggcaatcagggtggtggcacaggctgggaggggttgttggtgccctgcctcccactcagggtggtaccactccccagttctgccactgagacatgtctgatgaggcaccatttattcctctgtggttcataagacaacgtgtagaaaattagcattttatccctctagctgtattctgttaaaaatatatctaaaagcatcccat

SEQ ID NO: 43491 - DNA, 1049 bp, Homo sapiens
gaataggcactgtttgcactcttcggtgatgacgtttaatcttttaatctccccttattcttccccatgggaagacaaaaatgggaagattcagataattatttgtagggttggacattgagtgggtctgcgaacctaatacgttccagaatcctaatgttgtaggaattctcagttaccaaccttggtactgaaataaataaagtaggagggaggtggagaatcacaggtcaagcatgaataaggccacatctggcagaactgggacatatcttcaatacaacagtgataatagtaacactatccacatgtttatctaagtgacaaattattaagtagttacatttacattccttattttgtgggcttcttatgtaactcagacatgtaagggcaggttgttaaatcctatttgtttattcagtaaacatttattgagtgcctagtatttgccaggccctgtcctaggtacaaaggatacaattgggaacaaaacaataaagaaatcctgtttttgtggaatttatgtgttagctgtagggagacagaccacaaataaatgaagtgagtgaaacaaaagttatgttgggaaatgaaactgccatggagaaaagtaagataaggaaagtggagagggggagtgtggggttgtcacagtactacctagggtggctggggagtcgccccagggagaagacatttgagtaatgacctgcaggaagtgggaaggtggccagctgggagaacagcattccaagtagagggaacagctcggactggggccctgaggtgggagcctgcccggtgtgctggaggaactgcagggaggccagtggggctggagtgagtgagaaagagggcagggggagataaggtcgtggtgggcacccacgtaggccagtttgcgcttttgaggcatttactctctgggagatggggagccagtggcccttgagaagaggaggacaggatggatgaatgggtgctttcatagtgtgactctggctgcagtgtctcgagtagactggaggggacaagggtggaagcag

SEQ ID NO: 43492 - DNA, 1027 bp, Homo sapiens
ttgttctgctttcatattctcctgagcttgacctggttcagtttctccctggagaggctcactattttttctggggttgagatcctcgtcattcttttgacaagagatacagaatcatcatttttaagaggaagtttatcagcaggctgtttttaaaagtgagttttgtgcttgatacaaatttttatgatgtttgctttctcttaagcactcgaggtctgtacggtcagccttctttgcctcatttgctccccttcctcccctgcctcccatcttatttgactgctaacctgggcgggcccaccattcattcttgtttgagacagatgaacacagtactttgtatgccttatgaccagataattcaagctgacagtaatcaagtttggggctaattatcattaaaaggtaatttcattgctgcccataattgatcttatcttaaaccaattgtagcatttcttttgtcacatgatttaaaaatttaaaaaaaaatgcttttggcaataaacttttgaaaacagattttctacactcagttctttttaaaaccaactttacaaactttaagtgtgctcttattaatgtgatttgtctgctttgtaatattgcatattcaaaataaaaagaaaatggagacagttcatcactgaaatggatgttacaaaatcagcatctggtttgaataatgagtcttctggtccaagttttgcttcagtgaatgaaactaatgaaactggcctccattgttatgtcagtgacttcacctccactaacttttggtttctttccgttgccaatttggaggccactaaggtttcttcagaaagttctttcctagtggtatttgttctaagtaactctgggacagccaagtatctgtcaccagcaggggagaggcgaagacacctcatgatcataaaatcataggtttgggacgtttcaagtatcctttgccaccagtcaagctctggaaacaaaagcaaagtgaaaaaacagctctagagttggaacgattaaaaattag

SEQ ID NO: 43493 - DNA, 1063 bp, Homo sapiens
tttttgtgctcctcttggcagcacatatgcaaaaataggaaagatacagagaagattagcatggcccttatgcaaggatgacacacacatttatgaagcattttatatttttatccttatgaaacactcaaagaaacgtcatttaccacttttccagctgcggtggaccagacattttccgatttgcctgttttccctgtcctatttttgttgtaatttttttttaataccgcacgtactggtgttcatataaaataaacttgagtaaaccagaattctgtgagttttgccagactttaattgtgttgtattgcttgctttttaaacaaattaatagtgaaaaataatttagcgacctcccagttgtaaacttctaaatggcagtttgtgtctgtatatctcttcaagtcaagcatctgctcaaaagatattgttgatgatgtgataaatgcagtttcatgaaacttggcagttcccataaataattgaataacataggttgtatttacctctgtagtgtctagactagaggattagaaccatgagtttataaaaatctaggttgctgtctacacacaaatagaatagtatttaaaattgtgttttccatgggataatgatgaaatttttattgggccaagtgggtagctatctggagaaaggtgaggttggtttcatatctcataccattcagataaactccaacctgatcaattaattttatatgatgaccagtgtcatattcaacagagttatgacaaagaaagaaaggaaggagaaatcagaaaggcaattcagcaaatgtctagtctacctcagttggaaaaaagtgaaaaatgatatttttaagaaggatttcaatatacaaatatatttgtatctgcataaaatgctgagaaactggaagacattcctttataaccttgaagtaagaaggactttttaaccgtgaatcagaatccagcagccattaaaaaaaatgataaatttgactaaattcaaataaagtatttttacctgattaaaaaaatgccataagcaaattcaaatgacaatcagagaa

SEQ ID NO: 43494 - DNA, 1696 bp, Homo sapiens
tgcttgaaccaatttcagctcaagccaggagacacccaaaagagctccagccctgtggtctgggtcagcagttactgttaggctgacctgggtcatggtggctgggttctggaaaacaaggttcagatgttcacataagctgagctacagagcatgttccagacatggtaggagcctggattgggtggaagttgcccgtcctatttgcaggggaggaaggggaggaaaaactgaaacatgagtttgggagcgcattagagaagactccctggcagctgtatcactgatggcaggacttgtatgtatttggttttggctcagacatgaattcttacttctttcccccaagaaactaaaatcagatagaagatttaaaattggagcttagaatggtatgtttctcctgcttttaacaattcatttaaacagaaataaacaaggcctcttgctggctgctgctaggtagaaagtctctatacttcaaagattttcataaatgcaaggaatattctttgatcttgaaaacttttctttttatgtgaacattggcaccaaactatcctctaggtgtgatggcagcttgggagagaacttttgtcagcttccaagattatgggattcggctaaaccaaaagactgggacattgaaggatgattataaactgcgggtgcagatttattgtgaataatgggaaagctgtgtaaaacaacacctgaagggtgtctaacttggtcaacatggacttcagaatctatgcccaattaagtgctatcactttttctaggccccacagagaaatgtacaaacatatgagacattcttatctacattggtcacgtgtatgcaactacgcctctgttaaatttgactttcattattaggggatccaggaaacagtattgagcaccagttgtcatttcagtgagcacaggggtgggatgaaaataggatcacacatttcccccttgagtgtcatacgaatagtggagaggaaatcacatggatacagaaatggagctcatgttaaaaatcttatagcaggatataccatgctacatctcacagctttatagatgattcctggactctaccagcctgtttcaaattgaacgtctcatatgattattcttactttgcgcttgtagatccttttaattgtagtcccattctacctctagctgagggtaacagctatctcccttagagagctctctagcttccagcaggggcagctcactggccagaggggagggtaaagcattgatatggcacaataagggaacctccggatttttttttccttttctttttctttttttttcgagacagtctccttctgttgtgcggtagtgcgatctcggctcactgcaatttctgcctcccagattcaaagggttcttcagcctcagcctcctgagtagctgagattacaggcatgtgccaccatgcttggctaatatttgtatttttagtggagatggggtttagccatgttgtccaggctggtcttgaactcctgacatcaagtgatccacccgccttggcctcccaaagtactgggattacaggtgtgagccaccatgcccagtggaacccctggatttcaaggcgtgggggtaatatctgggcctagggtttagttctggtaagtatctgggcttagggtttagtttattagcattgtctaggtcccaa

SEQ ID NO: 43495 - DNA, 1036 bp, Homo sapiens
attttaattccttgatttaaaaaaaaatcagtagttcctgtttaggcattctttcactttatatcttaaagaattgaggagtggtggaaagataccgatagtgttattagatgtaaaaaacacataacacagtaactgcatatactctgatcccactattaaaaaaaaatgtatttggaaacagccagcacgttatctgggaaaatgtaatgtaccaacttatctctggatgatgtgattgtgggtattttatactttctcccttttgtttttctttcttttcttttttaaattttttataatgaacatgtataacttttattaaaataaaaaattacttattaaaaacttactttaatgagagacatacagactttttctcaactgctttagtaaacacccaagggaaaaggaacttgtagttcttttggtatagcattgctttgtttccctaagttaaaaagccctctctcattatgccatattaataccccttgaaaactggaaaagttaccatgtagataagttaaacacaaatccctgtatgaaaatcacctgggcagattcttgggccccagttcacaccaaatgaatcaacaatgttcgggccccagaaatctccattcttattaggcatcacaagtgattctgatgtgcagttacatttgagattcatccttctgcttgtagatttgtccatgtgtagctgtcttataatgttaaagtattttctaggctcttttttcatcttcagactttttaagtaaccatacacctgcataatatccattttgttgtcaggaacactaagagattatatgattctctctaaaatatgagaggtagagggagtttggggggtattcacagagggtcttcttgtatgactaagaaagaccctctgtccaatgctagggagctcctgctgtttaggatggagacctgacagctggccatgaagggtcaaggaaaagagtcttgcataaaaacagagaacccagtgattctcagagctactctcagaaggctaccccaa

SEQ ID NO: 43496 - DNA, 1083 bp, Homo sapiens
aatacaggaagaggaccagagatgaattggttgataatctccatccacctagttacatagatacaaacagaattttatgtttataccacctacttagccagaataccaccagcttgtttataagtattttgttcttggtgttgctgtaaatgtcactgcacctcaccctgaaatgagtttttaagaggtattttatagttcatgctcttcactattgatcagacttaaaaagtaattgcctcttttgaagctttcttttgcccttgaaaacttcttctccgtgttctttcaaaacagtgtttcaaaatgccgtccccagatgtccatgtgtggggggcggttatcagataagattttggcagaaagtcctaagtaaagttattttgctgtaaatccagtccagttcttattaaaatagccaaagaacatgtggctgtgagcatgtggcaaggtgctgtttgttcttataagcaattaactgacataagaacaattgtaaaactagtaacatgtagcaacccttacatattaaacaatatatttagtgctacgtggtgaaagctctgtctcatatctgccttttagttaatgtttgtggtagcaacacagcctgcttgttaggtatcaagccagttgaggagagagggctccttagttttgcggaacacagactttgggaatagaactgtccatgtttacatgttcacatttaagtttcactcaaacctgtgtctgtgtgtatgcaatgtaacctgtgcatgtttgtatttcaaatagtctatatttctcaattgtcatttaggctgctactatataaggaaaatatagcttccctacaatcacccagttatcacttagggaaattgctactgcaaacaggataggtcatagtttgagtcattttaagtaatagtgcaagtataatttgtgcattcatttggggtctgttgagcacgtgtatatataaagcacaattctaggcattcgggaggtagcaggaatcagatgtggattccactcctcaaggagcttatagtccaagcgagagaatatgtgtatacataaagccttaatacaaaatag

SEQ ID NO: 43497 - DNA, 1063 bp, Homo sapiens
tctgggccaggtgcactggctcatgcctataatcccagcactttgggaggccgaggtgtgaggtcaggagtttgaaccagcctgacaaacatggtgaaaccccgtctctactaaaaatgcaacaaattagccaagtgtagtggcgggcgcctgtaatcccagctacctagtaggctgaggcagaagaattgtttgaacccaggaggcagaggttgcagtgagctgagatcacgccattgcactctagcctgggtgacagaacgagactctctcaaaaaaaaaaaacaaaaaaaaaccaccaaaacgaaacaaaaaaagcaaaaaaccagaattccaaagtgctcaggtttcaagcattttagacaaaggaaactcaacctatagtagattaaaagcaagaacagcaacagtatgactagtgatagttaacattataggaagaagatcagaacttctatttttaaatggcaatactctgggaccatttggaatagggagacaattgtctgccatccctgaggacaactctatttaagggcttatcatgcagtcagactgttgataatgatcactctgcctcatcaagtaaacacttgattatattcagtagactctgtttaagaaggcatagaattagcaccttttaatacttaattagtacttacagtacttaataagataaatttcagttatctgaagattcactcctgtgttacaccagaacaccctgaatcttcaagtgccatgggatagctcatgtcaccctcacagtgggacaagttacagatcatctggtatatcactgttccctaaatggaaatacttactgatcaatcgatcaatggggaaacggttttccttaatttaatgttgttctaatcttttacagtcaagaggtttcttcaagatggtggcctgtcatctgctggcttctgctccttagtatggctaggcatttccaactctttgtttaaattcttgttggcttgcctagcttgaccctcctgacaggtgctatttttgttcctggccaagtggccacagctgtgttgacatttctgcc

SEQ ID NO: 43498 - DNA, 1030 bp, Homo sapiens
tctctaaccttaagaaggaacttggtaaatgtgtttcaaataaatgaatagatggatggataaatgaatgaatgaatgcaacagtttcttaggcctcactctgatgataacaagtcaagtcaagaaatactcagatacgccttctcagtagattaaaagtccaaagactaaaccgtatgcttaaagatattccctggagtctatttacaatagcaaataattggaaatatcctaagtgagtaatgatgagagaggattggttcaataatgggtacattcacttgctctgctatgcggcctctaaaaaattatggtgtgtagcaatctaaagaaacacgtgggccaggcgcggtggctcacgcctataatcccagcactttgggaggccgaggtggatggatcacctgaggtcaggagatggagaccagcctggccaacatggtgaaactccgtctctactaaaaatacaaaaattaactgggtgtagtggtgcgtgcctgtaatcccagctactcgggaagctgaggctggagaattgtttgaactcaggaggcagaggttgcagtgagctgagatcgtgccactgcactccagcctgggcaacagggtgagactctgtctgaaaaaaaaaaaagtaagaaacatgtgataaagtgacataccacattatatatataatgcacaaagatctgggaaacccagttgcatggggataaaggaaagaaagaaatttaccaaaatgtaaagagtggttgtgctatgttaagagtgatttctttttcttttcttttccttttttttgagacagggtctcactttgtcactcaggctggggtgtagtggtgcaatcagtgctcactgcagcctcaatctccccatgttcaggtgatccttccacctcagcctccctgtcccccctccccccagcccactcccaggtagctgacactacaggtatgtgtcaacacacctggctaatttttttttgtgtgtatatatatatgtatatatacttttttttttttggtag

SEQ ID NO: 43499 - DNA, 1075 bp, Homo sapiens
gcaaccaaatttagtaaaccgcaagccaattttatttttagttttagtgagcaagggcagatagcaattgcaaatatcttactgtatctacttctaagcttttacttttctttttttttaatgttttgcctttttctctccctagtatgttttgtctattttgaatataattgtttttaggagaaaaggccattttttccttctatcattgagagccccctttttttttcaatattgtaggcatcatcttagtaggaaatagaatatatttataatcaatgatgttacagaaattttgaaactgagaaattaagtaccataattaataaaaggtaggaatagggaatcataaataattatttagtattaattgtcagcagcagcctaaggttgctcagtgatagattaataagatcaagcagaaaaataaaggatcccattggccagagaatgtgagtggaattcctttttcacctgtatggcacaatggttggcattcaagagacattcagtaaatgtggtttggttagttagttggttgattgttgaataaatgtttgagtcctgcactcactccagaacatcagactattggatatgaggttaagtttgaccagaggatcttgaagaggctgtataatgatcatatcttaagtactagaagagtcattagtggtctcaaacccatctgctctacccattggagacttctgtagggaccctgacagtggccctctgccatgcttgaacattgtgatcactaagggcttatttcacatcagcttatttcaggtctattctgttgctggacagcttagattatgggatcaacttgtgggattgtagcaaaagctcatctgcgctttgcagattctttcttaaatagtcatataagccagttaccctcatgggttgggatgggagggggtcagtcaaggaggacagcagtccccaaaacttcggggaggctttgttaggggccatcttcatgtgtacctcttcatcccattatgaaagtacccagggactgagaattcttggcatttcccagtgttctccctggatttttcatagt

SEQ ID NO: 43500 - DNA, 1095 bp, Homo sapiens
aaaatagacaaatcatattttggctccacatttattctagcagacagtggcagactctgccaaagccacgaagtgactccccatgcaattggccaggtgaccaccaccaccacacagagcaatctcagtccttgactggttcctctgtgtgaaaaggggcctctacagccttgacccagtgactttcagattctgaggaaaacagacgcttgatgcctgtccaaagtaaacagagccaagagaacctttcacaagcctggttaaggatcgatggttccacccaaatgatttagatgatttggtgtttaagtatgttgttgcataactcttggcagccagagataccagtgtgctggagtgagtggcaatttggattgaatgaataaggtatctatcaagggtgtatgtatatgtacataccagctactgtgatttggacattacctacattagcttatgtaacctcatagacaccttatcaggtaggtacccttatacccttaagataattttccagatcaaaaagcagaggcattgtgaggttaatttgcacaagatcatcttcccaggaagaagcagggttagaatttggacccaggtatttggttcctatacttcccatgtgcgcgtgcacacacacacagacacacacatacattctgtgctgtcacagcctagatgtggttgtttctcttggtctcttctgcatgggtcatttcttgtatgataattctgaatttaggtggaggttgtagttgctgaatgggcatgggtggccaggccctccatactgtgttcagtacctttgatgattaactctgaaagggaagaaaggattacttagtgcaggccagagagctgtaaaaggttcctaaattactcatttcccctctgaatttctcctcttgcctcgaaaactaaaacacactttataggggaagaatgaagaccgtataactctgtggcagcacagtttggtaattaatggacttgtgcctctatcagaagagtgatgtattattccagagccctgtagaatgagttaaactgagagtgaattatttggtttgactgatgtgtacagtaactgaagat

SEQ ID NO: 43501 - DNA, 1086 bp, Homo sapiens
gtaaaggctttgagttagtttcatgctttacctttcatcagacgttttatacacccaaggaagcccctggtgtctttatatcagaagagttgcaaaaagcatggagactaattttcatggtgtgtctgcaagacttaaagggtatttaaagaatatatccttctaatattcttctaacacctgtccttttacttgtctgtcaggttgtgaccatgatcttaccatttagcttgttgacaggtattgtaaatgtttcagcttaagtcactgatcccaaggagcggtcactctaggacaaaaagttcagctgttgtaacaaataggcccaaccttacatgaactaaaggctcaagaagtttgtctctctttcacataaggtagaagctggattctctggggcctgaggatgaaactttgtgttcctgtagagggaaaggaaaagagtatggaggagtacacatacaatatgtatggcctaggctattagtgataacttcttatttccacttttattgcattagtgagaacttaattgcatggctacatggaactgcaaaggcactggggcatgtatcctcagcatggcctagctataattctattactgtagaggaaaggaaggcctgatttgggtagacagttagcaagttcctgccttggaccaaataagtgagcctgctgttaagaactttgcctttcctttgaataggtaacatatagcctaatggtttaatggagagagtagatggttataatgacaattaatagcaattacaatttattgtgctgcaactaagtactagggactacaaaacacaattgaatgcattttctcatttgaccctctcggaaaggctgcaaaggaggtactatatattatttggattttgtaggcgaagacactgagccttaaggagagtaagtaatcccctcaagatcacacagtcaggcctgcttgactccaaagccttcaccatactgccatgcgaatggtgagattcttggggaataaaggataatcatatactgcttctaagtctggtttttatagctagttagcagcaaaggctgtcagggaaagcagtg

SEQ ID NO: 43502 - DNA, 1210 bp, Homo sapiens
aattaatacacatactgggttcttttcctggattctgattttaggatgttttggtattgcggcttgtaaaattttgtgatttgttgtgatttcttaatctcaatagataatcacttttgtaaacattttataacattcaattttttttcataagaaaagtctgaatctgcaggcccacaaaacttgggtctattccttgagctcccaattcgggaatcattactatatgtgccacagacagtgctaaataatttttgtatagtatttcattggccctcacagcaagcctgtgaagtagacattacccccatcctgtaagtactgccttccgctttggagttaaatatgctaccatattagttaaataacacacttagtgaaatatgaactagagtgtttgtttatattggtataaaacagaaatatttttcttcaggacagaaagcctcttttacctcaataaatatcattattttaatgggtcttcccctctctgtcctgtagcccctgcccacagctgcaccagcgggggtgtgctctgaactgtgtggtcacctcctgtgcactgtttcctcccccagaaactcagggtcttgtcatcatcctatcctcgtccccaagacgtgttttcagaaatggtatgaaaataaaaattgagaagtactttgggctgtgaaaaaaataaattacaaaggtaactttggacagtgaaaaacatctttgaaattaatttctgtaggtttgcatcaatgagggctgtatatttatatgtttatgtgtttatggcattcacacaaatatccattatgcaattagtccagtatggtttatattaagggaatctgaaagagactctttttaaagctgatttaaaaaggaaattgattttccttgttaaattgccaggggtatttggtacacaggaggcagaggcctgggtggtgagaagcatggactgtgaagctatacagaattggattttgaatcctcctgatctcactaacttgagcttttcaaacttgggcagctcttacagtcttatttatatgagatagtaatactattatttattatttggggggatcccgagattgattttcctttcacagtacctactggctagttgctttaatatgcattatgcagtgttagtcccatgcgacgcaggaggaagccaggacacagagcaaagaacagccaggaaaatgcc

SEQ ID NO: 43503 - DNA, 1017 bp, Homo sapiens
gggcccacccagcactttccagggccctggaggagccctagcagtatacgtagctgggccttcatgggatcataactggtaaaattggaagaagattttaagcaatcctttaatgtttttctttctcattctgacttccctgctgtcacatttctgtttgggtttgatgacattggacttgaaagtgcttttgagatatagctagggggaagtcgaattgggtccacattttgtttgggtttagtgggatgtatttatgcagttcacagtcatctctgtgtcaagttatccctagccatcctagtgtagaagttgcttcataggatcgccacccaccgtgccagcttacctggggtccttacacaaaggggagggtcagagagagaattgcagtgttaacgggtaccatgacatctgctgtgggatggtttatggtgcgtggagccaggtctgtggagaattctttcacttgttagatgtgtaaaattctacgtggaggattcagttcttatctaagtgtagtcagtatgaaaattctcttcttttaggaatatactcaataatacaaatatactattagaaatgcaccatttttaatgggaattctgtgtttaagattcttgttcatttgacatgaatatgcctgataccaaaaatactgacaacaaactggttaatgagtatcattgataaaaagaatatttaaagttagtcattgcacgagaaaacttgaaatgtcctggatttttatggctcatatgtgaaagaaaattaagagatgtgattacaggtttgacaacaatcctaaaaatgtatatgtcattgccaataaagaactataaggctaaaagtaacttttctgaattgtcaataattaggaataaattttgatcacccatgcttgaggggagattgattcatctttctgccctgtggaaaatgatatgaatataagtcattgtgatatgaggattcatcagagtatacagcccaaaagaagtatttatagcagtgtgt

SEQ ID NO: 43504 - DNA, 1343 bp, Homo sapiens
tttaaatagattggtcagggtgggccttgctgagaggctgatatgggagacaaaacctcgaaggaggtgtgagagttagtcatgaggacattctgggcgcaggcagtacacaggccccaaggcaggcctgcagcacttgaatagaaacacaggaatctgacccaattcagttattcatgtgatcgtaccagactagcaggtcatttagaactttcctcagatgttaggatcctcagctttgctattgaaacatttccctgcaagggcccagttaaggggcagagtctcattgaccaagaatggcttgcattagctatgacttggttcctgaccccgaatatcaacaggtttcttgttgtgagtctctacttgttagtttcctcatctccaaaacccaggtaataaacctacagtgcttcatttcatagtatagatttataaaccgtctaattaataaaggtcaaagtttctgtaaaaaaaaatcagggcacttactatcaaaactgtagaatttagctcctaagatgatttagtaaatatttgcattatcttctcaaaggagcatcacagtgtactaaatagataagctgtgcaatatgtcataggtccttattactcccacttttaggtgagcaaactaaggtacagtttataattgcctgagctttcgtggctgatgtgtatgatttgagatttgaattccagacaggtatgcaaagctaagcctatgccagttgccaattaggtgaagaacgtgacagtcccctcctcacctcccctcacacgattgactctgtttcctcctttagaaagtaactgaactcgagatgaaggtcatctgagcagtggcatagcgaatccagcctgcttggagttgaacacacatgtctgccacttgtcccccttatgaccaggggcaaattaaccgtactatgcctcctctgtaaaatgaggatagtagcagcatccatctcacggagtggttagtgaggattaagtgagataatatatgtgaagtgtttatctacaataataagttgtctacatcatctagtttcttgccatttgtgtatctgctaaataaatatgtaatcctactgtcagagtctaccttcgagattaacatgggttgtatccacctattagtggtgctgttttgggcattttataactatgacatcatcaggctcttcctgggaaggactgagaatggaaaataggagactcctcaacagtctagtgctggtgttgcagcctctggccacgttctcttttgtgtggccagaggcactttacaccctggcagaggcatttgccacagtggactgggaaagtggtgtcaa

SEQ ID NO: 43505 - DNA, 1021 bp, Homo sapiens
gggtaaactgaagagagagggcactgatttgtagtatttgccaatttccatagtgtaaatactctcacgcagccaatttcaagctaccaacttcacaccactaaacatggagttgggcagcaatgtgcacagttggttctcctgatccagtgagggagtgcccacacactgctgctagaactatcttgcattgctgtctgcaggaagtaaatctttagcaggttagccggctcttgtttccatggtacacagaagatgatgagtcaggatctaagtccttgcagcactcctggcgagagcatttactgctataacctctgccccttcctcccccactcttattctctcttccaaaagaaaactacaaatgtagatcataaagctagatattgagtaagtataaataatgaactggattgtgctttttatcctcttgtggatatcaagtataaaaactggacagggaaggagagaatgaggatgggaaatcttgattactttttaattgcatcaaatcctgtgtggtaaagtgggttcctaaaaggggaaaaagacagaacagttttttgccattctgctacgacaagtaaggtcttgctttcctggcatttctgtgtaggaagaagagggtgtttggcattgcatgtggtgaaaggggagagagggtggagggaaagaatgggatggatcatggcattggcagggataaaactcactgtagacacagttaagttgagtgcagtgacagaggtttgctttcacattcaagctgcttcattaatttcattggggccttttccaaggaaagggaggattcataaaagggaaatcaaagaagcctggaaaagaaacatttccccttctgaagactgtattataatccttttttctgaaaaagtacagtaatgaatgttatatttattagtgctgtaatttctcctcttcacttcttaaagggaaaaaaatactctgtttgtcataaaaactctgataatagtagtagagtgaccactggttgagt

SEQ ID NO: 43506 - DNA, 1014 bp, Homo sapiens
caaggagtgtcatgattgttcaccagttgtacacaccaaagtgtcttggaggaaacagagtagacatgctgagataatgaacagttcaaaacaattcccttcaaactaaagactacactgtttatgtcagctaaagactatttcctttctgtgttgcatgggagaaaaaatgagaaatattctgggacacaaatttataaaaggagttgtagaaatttcattacctcagtgctgactagagcatcctctcctttaaaaataattgaattcctggtttttgtttttttcccttctcttaaaaaccacacagcttgcttcctgaagacaaaggaaataataaacaatagcaactcccaatttgactctgattatttgccaaaagtcttcttagttcatgtggttctatttcattagagaggaccgattagcataagaagaatgcttctaaattaagctacccaaatatgcacttagttagtactctgggagctaatttattgtattatttaaaatataaattggctagcaaatctatttattgaggtgtaacagctaggcaacaatgcgtaactttctcttggctgttgagtggtttttaatcatctattgaaatttaacagagagccatttcattaaatggaaagcggataaatactgagaagtctgtattttagagtattatccacacatggagaatgatatttgaggaacaaagagggaattgggatttgctttttaaacagtaactttttgttgttttaatttgaagtgtaaccaaagactcacaaaatcacttgtggggatgttaaagcaagaaataaacaaataaggcggaagatggagtagggtagagaaatagagggatggaaaaaattgtgttaagatagtgctacgttgtcaattagactaatgcagtatttttgccttgtacagttttggggttggcagtaaaaactatgtaccttgttttattttaacaaatggcatcatgaaaatatcatgctatttggcatg

SEQ ID NO: 43507 - DNA, 1044 bp, Homo sapiens
cctgtaatcccagctactcgggagtcagaggcatgagaatcgcttgaacttgggaggcagaggttgcggtgagctgagatcgcgccactgcactccagattgggcaacagagtgagaccctgtctcaaaaaaaaaaaaaaaaaagattaaaaattttaatcggaataataaccatactgagaaattgctttaagatttttttttttagaataaatgtcattaagctgaatgtcctggagaaagaaaacacttctgtttttttcatcgttattttattgaaaatatctttattgacacaaattatttttcatataaatattgaaaaaatgttgagtcattgagcagttttcatttttaccgaatcttactgggtgtagcttctataatcatgagttttgcatgatctccaacaggctgattttcctgattgcaatttgagcccttactatttttattttatgttttcactgtcaatatcaattccattttcttccaaaactacaagatggattatctcggctaggttgtatttaatggctggaatgaattttaggtctcattttccagggaagggaaactgaaacccagaggttaagtgacttccctgaagtatcctacccatttcatgtctgagctgaggttagagtcttggcttacagcccagagattctctacttcacaagcatatccactactggaataatggaatcacagcagtatgctggtacagttaaaattggagcctatatgcatgcctaccataattaaagcagggccgagaaataatgtatttcacatctagtgttagctctgaatccacacccaaggtgaccacctcctatagacagagagaagattggggttttttgtttcattttgttttgttttttgagagggagtcctgctgtgttgcccaggctggaatgcagtggcatgatcttggcttactgcaacctccacctcccaggtgcaagtgattctcctgtctcagcctcccaagtagctgggattacagacacacaccatcatgcccagctaatttta

SEQ ID NO: 43508 - DNA, 1026 bp, Homo sapiens
tggtgcgatcgcagctcactgcaagctccgcctcccaggttcactccattctcctgcctcagcctcccaagtagctgggactacaggcgcccaccaccatgcccggctaattttttttttttgtatttattttagtagagacggggtttcaccgtgttagccaggatggtctccatctcctgaccttgtgatccgcccacctcggcctcccaaagtgctgggattataggtgtgagccaccacgcctggccacttttcttatacccattgtgcagatgaagaaactgagctctagatgggctaactcaattaagataatactgccagttagtggcaggggtcagattcaaacccagccatagagtttatgcacataactataaacatatatccttaatgtcaaagagtcacactttaggtttgccacttgcttgtggaattacaaatatagaataaagcacctgttcaatgtgttcttatggaggttagtgaccttagacagtagtgaggcaatgtggaagagcacttagaagcacacagtttgggctcaggtcgatctgaacttgaatttcagtcacctgttgggggatcatggtacactgacttacctccttacacctctgcctccttgtgcctaaaatgggataaataacacctgccttctgagaatgctgtaaaatgcttagcacagttcctggaacataataagaaaaacaacaagagagtcttattattactcaaaaacttccttttaaaagccatagtctttaccacacttttctagcatttaagtgtgggggaattccatgtgattttgaattccaggcttcagaattagaagttcctttaaaagagtaatacatgaatttatggctctaactttcaagaaaagactgagatgcagtggccaatgcatgcaaaattagtagtcaagggtgtgttattatttcgagagcttgaatatatatagagttcaggtttatcctggctggatttcttcctacagtcggcctttttctgaaagag

SEQ ID NO: 43509 - DNA, 1033 bp, Homo sapiens
tcaacgcattatccatggacagataacaagtctgcccccagtcagggacatttcttaaatgttatactcctcagctgaattaaagttttcttctgcagctgagcttttgggaaacccatgggaattattgtttgttgagctggataatagtgaaattaattcttttctgcttagggggaaggcactggtgggacatgctaattgcttcagtccaaaagaactcctggccacattagagtttgtaatagaagaatgataagtaaagcagccagaagaggaagtttggagggctgatttgcaggagtttcattgatttagcatctgtagggaaaattcccttaaaaaagaattttttttttggattagtgaacaggagaacattcaaaactaagacagatagaggccaactgggaatgctgtgcagcctggaatagcttaggctgctgttcaatcatttccccaaacaggaaaccacagaatgttagagattaaggtcactagatcattgggaaaaaagcataactttgtctgcaaagtattatgatatattgtaaatggaccagaatataagcataaatctttcgtctaaaaatgcaacaacaaaaatccatccttctcacaaaagcacaatttgctttcctgttgtgctgagataccaaagcctccttctctggtatttctgtaattttcctaataagtaagagctgtaagcagggaataaagagaaaagttttgtgttctctgtcagtaacatgtgtgctttttttttttaaccacaacaaaaaatggttaaagtttagaacagtaagtggacctcacatgatttattttcagtcttagcctttcatgctagcaacaatgaaaataaactaaaatgcacacttatatacatttctgtctctaatctctcaggctgtattaaaagcacagagttcttttttcacctctgattatcatcatggcactgcctgacttaaattttaagtgaaaatctgtgcttatagagtgtggaatctttctaggtgtctgtaaa

SEQ ID NO: 43510 - DNA, 1102 bp, Homo sapiens
tttttctgtctctattttataaaaatttttttccccataggttattggggtacagttagtatttggttacatgagtaagttctttagtggtgatttgtgagattttggtgcacccatcacccaagcagtacacaacacaccctgtttgtagtattttatcccttaccaccctcccatcttcccccaaagtccactgtatcattcttatgcctttgcgtcctcatagcttagttcccacacatcagtgagaacatatgatgtctgattttccgttcctgagttacttcgcttgatagtctccaatctcatccaggtcactgcaaatgccgttaattcattcctttttatggttgagtagtattcatatatatatattcatatatatatttggaatatatatatgtggaatatatatatatatttatatttatatataccacagtttctttatccactcgttggttgatgggcatttgggttggttttggttccacggattttgcagttgcgagttgtgctgctataaacctgtgtgcaagtatctttttcatataatgacttcttttcctctggacagatacccagtagtgggattgctgatcaaatggtagttctacttttagttctttaggaaaccacactgttttccatagtggctatactagtttacattcccaccaacagtgtagaagtgttccctgatcactgcatccacgctaacatctactgttttttgattttttgattatggccatccttgcaggagtgaggtggtatcgcatggtggttttaatttgcatttccataatcattagtgatgttgagcgttttttcatatatttgttggccatttgtatatcttcttttgagaattgtctattcatgtccttagcccactttttgatgggattgtttgttttttacttactgatttgtttgttgtagattctggatattagtcctttgtcagatgtatagattgtgaagattttctcccactctgtgggttgtctgtttactctgcagactgttccttttgccgtgcaaaagctcttttgtttaattaagtcccagctattaatctttgtttttattgcatttg

SEQ ID NO: 43511 - DNA, 1043 bp, Homo sapiens
actcttaattttctcacactcttaggaaagctgaatagtgctgctgagtttgtagagccatcttcaaaaaataaatgcacaaattcagaaatggttttctgcttttcaatgtaaatgcaccagacctaaatatcttcacatttgtgtgctatgaatgagaggagcctgatgctcaaggggtctggagcagctgttcagaaccttgatttggtgtgaagcagtctggaaataataatagtacctactgcatagggttgttttgagcatttaattagataaccctcctcagatattagcatagtgactggctgtggtgagtacccaacacatgatgactattattaccattcatgctgaaaagctgggctaatatattatgactcccaagcatacagcctaatgcctggagacaagagctgaagtgttaatagaagctccgctaactcattgctgggatatggcatttccccctctactctgtgtctattattttgaaatcatttttaaaagcaatagttactttgtctaaaaaaaaatggagcttagcagttgacattagaagttgtgcttgttttttatatggacagcagcaaaatgtgtcaggacccaccccaggctccctgcctcaccgtgtggacgatggtgtggccacaccagagaaagtggcgtgggcctgccctcagtgcaaaggaaaggggagaagctgctttgtcttcttcctcctcctcttcatttctgcccagaacaccaactggaattaattttctctaaaaagagacaaatgtgtctgtaaatcaccctcctcaaggcatgaaaaaaacatacttcaaaaagagaaataagctgtgtttaattcccataattaactttctttataagtgttatcctttctgagccagtagctattagtgagattgcccttgttcttgaggcacggacacatttagcatcctctcaattgtacatgagcccaggtagaagttaaagcaaaacagccctcacgggaaggcaggtaggtgacaggatcagggggaccgcccatt

SEQ ID NO: 43512 - DNA, 1047 bp, Homo sapiens
ttgaacaactgactctcaatatttctgaaaatttaaccatcagctctcttgcgctggcttgagcacatcaggtgggacccagagaagttactgtcttaccaaggtcctcggatgagtcatggcaggacctgggttattacagagttgtttctaaaaaccagactactctagacagatttacttatcaacgtttctttttattcatttgtttatttatttactccatcctttaacaatccataaaagggatttaagactattacaggctgttattatctattgagacagtaagagtcagaatatttgaatatatctggaataaaggtgggagagtaggccgggggcggtggctcacgcctgtaatcccagcactttgggaggccgaggcgggtggatcacctgagatcaggaacctgaggtcagcctggccaacgtggtgaaaccccgcctctactaaaaatacaaaaattagctaggtgtagtggtgggtgcctgtaatcccagctacatggggggctgaggcaagagaatcgcttgaaccgaggaggcggaggttgtagtgagctgagatcgcaccactgcactccagtctgggtgacagagcgagactctgtctcaaaaaaaaaaaaaaaaaaaaaagacgggagagtggaaagcagatgagatttagagccataagtaaattctggctttgagtcttggccttgtcatcttgatcaagtcagttactccttggtaaaagttttctaatctgaagatgaaggaactggaccacatgaacatttaatatcttgtaggtctaaaatatggttccttatttagattcatcaattcaataatatttgcttagtaccaactatatgcactctcattatgaactgtactccaggcagaatgaaattcagatatgataataaatattattataatagcatctcacatttatgcagagccttctgatttgccgaagagaaaatttactttgagtctctgggattctgtggctttaggagatcaggacatatcttaacagaatgttagagaaag

SEQ ID NO: 43513 - DNA, 1044 bp, Homo sapiens
gaagtagattggccacaatttggaaccgggtggcccccagaagggtcactgaaccccacaactgtccaggctctgtggcgggtcgttgctgaaactcctgacaccctaatcagtttccctacattgatcaatggctagagttggtccggagccctcctccatggctccgctcatgtgccattcatgatcccacctccaaggtcctttgagccagaccgcacttctgcccaaaccctcagctccctcggctcctcctgtaatgcctccttctgaagaagaggacagctgtaggtccactgtcctacaaccctcctgcttccccagaatcttcccttgtctcctcgactacatcccctgtggcctctccgcctatagccacccgattgcagcctcggccggaggcagtggcccccctcctcctgttgagagatgcccaaatccctctggagagtgagcgcactgctccatttttagtttatgtccccttctctacttctgacctgtataattggaaggctcataatccccccttctctgaaaagccccaggtcttgacttcactgatggagtccgtgctctggactcactggcccaccaggaatgactgtcagcaactccttttaacgcttttcacctctgaagagagggaccgtatccgaagagaggccagaaagtattttctcacatcagccggtagaccagaggaggaagcccaggacctccttgaggaggcttttccctctacccggcctgattgggatccaaattcctcaggtgggaagacagctttggatgattttcaccagtatctccttgcgggtatcaagggagccactggaaaacccatgaatctgtccaagacaactgaagttgtccaggggcctgatgagtcaccaggagcgtttctagaatgcctcccagaggcccatcggacttacaccccttttgaccccgcggctcccgagaatagctgtgctattgatttggcatttatgactcaggcagcccctgatattaaaagaaaattacaaaagctggaaggat

SEQ ID NO: 43514 - DNA, 1031 bp, Homo sapiens
atattatttgtctcaaattatgactcacctctggataaagatggaagcgttttactgtattaattacaagaggatattcagtaagcctgtcattcataatcatccacagtccttccaaaaatgaagatgcttcaatattgttcttgaagtaggaataataaagtcccttttttttttaaaggcacatattgtcaatgtaattaaaactttaaaatatttatttttatcaattctttagtacattttttttctgaaaaaaaaaaggtcaataataagacttcctaattactccttgctattttgcattcttggactttaaaaagcacgtattttcaggtgatcaccgtactattctttcaaattgtctataggttttcaaactaaagagttggaggtatggtccaacaatttaaagagtttatctaatattgtcttaaagtgtgtagacagtacatgtttaattttatcaaatctgggttttatcccccacatttgagatgcttgaaggttgacctctgattaattctgtcataaacagggatgccttcatgcctctgtacaactttgcatatagaaaattactttttttcccatgctcttaggaaataaaatataatgaccataagcatcatgggcaaggaatccaatgcttctagcttacttcatagctccatctaatcctctgtacaaagtgaaagctcaatgtcgattgactattgttgcttacaaatgctatgtactaaaaagcagattattttagtgtcttacacttcagcatataaaataaagtcttcattaggatagtagaaatgctgttgagttaaaattcatggattaatctcaaggatctagaactagaaataccatttgacccagccatcccattactgggtatatacccaaaggattataaatcatgctgctataaagacacatgtacacgtatgtttattgcgtcactagtcacagtagcaaagacttggaaccaacccatatgtccatcaatgatagactggattgagaaaatgtgg

SEQ ID NO: 43515 - DNA, 1068 bp, Homo sapiens
taatagcaattccacttttaggtatatatcctagacaaaatattgcacatatacagaagaaaaccatacgaaagtgtacattttagattacattgcttgtaattgaaaaattggaaataatgtattaaggtggggaaatatataaactttagaattcataaaatggttaaaattaaagaaatatatatatacagaaagttcaaaaatacaattttgaagaaaaaattctacagtgatacatacagtatgagatcatttatgtggacttaaagcacataataaaacaatctgaaaacagagattggatggatacacacaccaaattttaataaaggtataagttggactagaagcagaacaaaggtgattttaactgtatttctaatattttaattattttaaaatagctgatgcaaaaatgacaaagattagcatttatttattctagatggttgatcacacatatttgaatattattttctaagtctgtagttttaagcatttcaaaatctaaagaataatttttaaaagctataaaaatatgaataaaggactagaaatcagtaacttttaattaatatgctggattctgggacaactttaaactcaacagtagtatttaccatggtgtcaaatttagcatttatcttgagttcacaaacttgagttcactaattttgtctctgtttttcaaatttctagcgtttacagactactataacaaccatactcttttaggctaagtgttggaagatagtaatagatttctggctgaaaaagaagtcttactttactaacgtaactccaagatcactattcaagcccatcattctcaccgtcccttcacgtggtcatcgtgcccacctacaagttctcgaaagccaaaagcccatccctatttagaaccgttttggctcccatgactctcttttccatttggcttgtctattaccctggccattatttacacactaaggttcattctttgagttcatgcgagaacagtttctggggtctttaaattttaagagaagaacttatgatattctgctcacctataaggataca

SEQ ID NO: 43516 - DNA, 1026 bp, Homo sapiens
atccattgactactgagtatgtagcacaaggaaatttgcatagtttcattcattcaacaaatatgatattgaatcagctccatattccaggaagtaggcacctgggatacagctaggaaatacataatgggcacgggaaaacagtagaaaacaaggtcattcgctgagagtgaaagcgggagaggaggtttgggataactggagagagaagatatgaaacaggagtcaaggggttagcaaaagtaaggctcaagaactaaatcaggatctgtggcctatttttgtaccagtaatgtgaaaaggacagtgttttcccccaacttttccccagcagtttaagctaagagagtttaagacttataggggagataaggaagagcggggtgggtgggtttcatgcctttctctaagtggctgctgttctcccaggctttaccatggaggatgctttctgagcactcttgctaatcttttgtcagcaccttatgagctctgtgtaaaaatgtctgtaagcaattgcaaattcccttgctaacccacactaggcatttaccgactgactggtgaacaatttgagctgagttctttaccattgtgtctagtggcatgacccgtataattaaatgcttgtttctgttctccttgcacatggtttttctttttaatttattttgggttatttgattgtcctgtgacctcagctccctgaccacttcaggaaaagttgtcaatttgaagactgtctggcttttgttgttgttgctgctgacattgctggaaggccatgagcaatgttctttttggctttctacatccaagggaaagctgacccaacatgattaaatccaactctccattttctccgtgtttatacttgggaatctgattatagctggagaaacacaattctgttggctggttttgttctcagttcaagaccatcaacctcaaatgaagcccttggtgctgcccaagaaactcacattatatccctagtctattcattctcctagacaagaggtcagt

SEQ ID NO: 43517 - DNA, 1032 bp, Homo sapiens
cagtcgtttatgctagtgatctaggagcagagtgagaagaagattgagagtcttaatactcaaagtgatactttcatttaatctccgtatttagtatcaatacaggacctctgccttcagctattcctgttgtctgcaagtctagaaacttttccctctcctaataacaaacttgtagtagagtgccagggttggggttgcttagctgctgcaagtcagggaggacaactaggagatctcacagcttcttacgcagactggcgatgaatctttctcttttaggcctgccttcacccctgcttccagggatatcttgtgcttgccaattcttgtgcctgctgtaaatcagtttgcttctctgctttcctagttctgcagtgaaaattattactcattaattttctttccagagtctaaaggtactgctttttatttcatcttcttgatttttttataggcgtattccctttaaaaattacatttttatcattttagtaggatgtttggacggagcggaaactaatgaatgtgtacaactagttatctttacttggaagttttctttttttaattgcagaagaaataagaattcactcctataaaaatttagatgatgcagctgggcgtggtggctcacgcctgtaatcccagcactttggaaggctgaggcgggtggatcacctcagctcgggagtttgagaccagccggactaacatggtgaaaccctgtctctacaaaaattagccgggcgtagtgatgcatgcctgtaatttccagcgactcgggaggctgaggcaggagaattgcttgaacccaggaggcataggttgcagtgagctgaaatcacaccatggcactccagcctgggcaacaagagcgaaactatgtctcaaaaaaaaaaaaaaaaattcagatgatgcaaaaaaagtgaaagtcactttcagtcctctggtatgaacatgttcaaccagtcctctaaggaatctaatggttttcaagctttttttttcttttttttttttttttttgag

SEQ ID NO: 43518 - DNA, 1022 bp, Homo sapiens
attgccagaaacaaagatgtgcttttcttcaaggcatttgatctttattgccaaattgctcattagaaatggaaacagcttctagcaaggtataatctttaggactatgtaaaattttttaaccaataaaagcttgtgaggtttttgatatttataagtgcagattggtagatatatttcgagtaatatcacctgtcagagtcattatttcattcagggctcttttttttagcaacaaaaagatttagtgtgtcagaaaattataggtatattcagtcatttgaatttcataagttctgaccatgtggaatatcctaatttttgcttgaattgtgattagtgtgtaatagttctttaatttacctatttatatatgagctgaggaaaaaaaaagaacaaagaagccatatatacataatgggttatttattatgtgtaatatgtttcagagagccagtgctcagttgaacaataaatttttctatttttgttggtttttaatttttttctactgttgcctctattctgttctttctcattttgtaaagttaattttgttctttctcctagcttttagttcttttattttttatttatcattttttaatgataaaagcgtttaaggctgtgtttacttctcgttacatgtagtcacttcccatagctttggatacttaccattttcattgtcattgagtacacattttttatcttttaaaagtcagttctatcgaggagtaatcatgttaactgcattttgatattttcttttacttgaaagttattttaaagtgtggctttattgtggttatccttactactaccctatcgttacttctagtgttaatttagaaatattgcaccgtggctcggcactgtggctcacgcccgtaatcccagcactttgcgaggccgaggtgggtggatcatctgaggtcaggagttcgaggccagcctggccaacatggtgaaaccccatctctactaaaaatacaaaaatcagccaggcatggtggcaggtg

SEQ ID NO: 43519 - DNA, 1035 bp, Homo sapiens
tactgaaaagttaaatatgtctggattgtagggtgcatagaggaatgatgagaacccgaagctagaaaaatagaaagtggagccagttgaaggattttatagtgctgtaggtttgttttatccaatgaagtttgaaagcagggggagtatcatgattaggccattgggcacaattaacattcgtagtttacatggatggcaaccttctctagtggtgcagacttcaggctgtatgcagcaaccctgatcaggattcagttcttaaggaggagagtgtgatagcaggaggataagttaggattcttttagaatataactgatagaagatgcctacgttgaaaagatggcattggtgagggagaagaaaagttagatttgattgagatttctaaggtagaactgatagaattgagaacctgggtacatagtgatgtctttaccagtattaaagatgaaaagaacaagttttaggaaatgataatgagttccttttaggcctgttaaatttgagtggctatcggatttccatctgcatagaagtatcctttaagtggctggaaacatgagtctctaattcgggatattacaaaaaactgagaaatcaatttgcaggatataaatgattccagaaagtggataagattactaagggatgaatatagattgatgaaggacaaggatggaatccagaggagcaagtattttaagagacagggagaggaagaggccagcagttagaattcaaccagagggaaaggaagttttttaaaacctttttttttaattataaaaataatacctgttcactagagaaaaactaacatacagaaaagcagtggctcacgcctgtaatcccagcactttgggaggccaaggcgggtggatcatgaggtcaggagatctagaccatcctggctaacacggtgaaaccccatctctactaaaaatacaaaaaagtggccaggcgtggtgatgggcgcctgtagtcccagctactccagaggctgaggcaggagaatggcatgaacctgggag

SEQ ID NO: 43520 - DNA, 1050 bp, Homo sapiens
caccggccggtgggctggagccccggcgggccgctcctggtgatcggctccttaccagctcacctctcaccgcgcatgtttggaggtacggacccctctccacgcgcccgcgctcggtcctcccgcggctgcacgtgggccgtggccgccggctatttttacccttctccttttctccttcggccggggcgccgggggctgcttcccggcccagcccgcgccggtctccatcctgggaagaaacccggcacgtaacacctgcggtgtcgctgccgcgtagacacgtggttttgtttttaaacatcgtgagcacccacacctcagcgggtactcagtagagatagtctattttccagtgagttgactggagcaaatgttgttttacagcaaacccacgaaatagcccttgtggttgtggcttttagtaccaggaagtcaggaggagacggttgctaaatgtagttctatctggtactcgagtggggcacaatttttaaaagccaaaagtcaaagggtctcaaatgaactctgagttaccatctttggactgacttttaatataaagctgtaatccttaaatctgtgtcagtagtcccacctactatgtcactttaattggatgaatgcgttaatgaaaagtttgttttcaaacctcactaaactgctacttaagatcacagttaatgtgagtcctgcttaatttggaaagcatttaaaaaatggaaaagtttcttagggaagcaaaaattttgcaactctgcctacaaggtacagtaattggctaggttcttttgaagagcagtgttgactagagttaaggaaaagtcagttgtgaaaaatggacatttttaatagcaaaatgatgtgctttactgtagaaacaggaggaagggtgcattttcctggggaaaatgaattcttcttcagttatattttatgctgctctactttattgcaaaacgctaatattaaatgaatcaagaccacctccccttcccgctttatgaaaataaatagaagtatagaagataagcattcccatttcatcgc

SEQ ID NO: 43521 - DNA, 1118 bp, Homo sapiens
tcttgaactcctgagctcaagcaatcctgccactcccaaagtgctaggattataggcatgaaccactgcacctggccaccccatatggttttttaagcaaacatgtgagaagtgtgttctgggatacagtgcagttaatcagtttgcttattgttctgcagacttaacatgtttacacatgttggcatgcttcataactcggccttgcccagtctttggttactctagtaacaatcctgtggtatgaaatgactgaagtatggttctggtttccttcctgcaggcttggtttagaaagaggggaaacagctaaagaagccttagatgtcattgtctccttgttggaagaacatggacaaggtgggaattactttgaagatgcaaactcctgccacagcttccaaagtgcatatctgattgtggatcgtgatgaagcctgggtgctcgagaccatagggaagtactgggctgccgagaaagtcacaggtgagtgggtgtggatgatggagagttctgaggacagggaaggccacagagatggggtggcctgcacgtacagtgtcagacctggaagaaagacgtgccgttgcaggtcctctctgtgtgggactgtcatgctttggcatgcctctcatttctgggaacctccaagaagagaacctggagtctcctgaacctggagtgaagcagtctcttaacatttcgtattttctgtttgctttctgggaagaacctgcttttgactaccaggaattccatgacttaaaccattactctattaattggccaagagaatggtgactcttcttgtgtaataggtcaacaagtcccttcactggacagtagctccttgtcacccccaaccctgtagatctttgtgcttggcatgttcctctaaaataggagtttagatctgtgtgaggaccggtatacgccactctgggatttctttgtgagtgaagttcatttatctcacagtgagacagtgtttctagaagagcagaggactagatgatccacccagaagaatttagtgcccataaatttgctgctctgtggcccgtgcagcatcttgcttctaacacagccctggggaagtaagtgttaggggtgggagt

SEQ ID NO: 43522 - DNA, 1001 bp, Homo sapiens
tttcttcgattaacagcagcatgccatatatacttttctctactttgcattttttttcatttttatttttttattttcttcaatcagctttctcaggttgaatctctactttgtatttttcaactcaaaacatattctggagatcactccctacggtacatgcaggtcataattcctcatttagagctgcatggtgtttcattctatggatgtatcatagttaaccagccccatattactgctggacatttggattgttttcagtctattgctattacaaacagcactgaagtggataacagccttatgcatctgtcatagtgtctggtctcagtttatatatttttatcataataaaacattatccattaattcttatttcaaatcttttaaaaatactatttttgtcagtatttctttgggatagatgcctagaaatgaaattgctgggtcacaaggtaaataaaaatgtaattttattaaatattatcaaatttccttccataggtggtgtaccgttttgcattcccatcagcactgtatgacaatgcccatttcttcatattcccagaatgtgttgtcaaactttcacgatggctattttatgttaattatactttctgccattttactaaattcttttattggttgtgtcagcttttatcattgcttttcttggggttttcaggtatatttttatatcacttgcacatagagattgtttagttgttgttctgtctttaattgttttcttgtttgattgctttggcttatagctcgggttttatgttaagtagtagtggagatagtgggtgtccttggctctgcacctgacctgagtggggctgtctctagtgcttccctattaagtaagctgctggttttgggattgagatttatatagttttatgtgccactgcacctggcttatgataaaaagtatacatcagtcaggtacagtgacacatgcctgtagtcccagctaccctggaggctgaggt

SEQ ID NO: 43523 - DNA, 1028 bp, Homo sapiens
agtgaaggtgtcaaaaattcatttaggaaatagaggaattggccagacaagtacacaaaggattcccagatagtaatgagggccactctcatggtgttttcagagtcaggatatgagattcgcaccaagagaagtgtaattggcatctacagctatgattacctttaacttatgtaatctaagtcagcctggtgagttttgtagctgcttcctaaagtttgttttcttcagtcttccggaagtgtcccacctcctctttgctaattcagtttatatggatgatagcacattttgtccttagaataagaggacttcacaaacaagaacttctgagatcactggaagccttaatatgaaaatcttcatttctgggtttctttgggactctgtgtcactgtcccgtccaatggagtttctactagctacatgtggctatttaaatgaaaattaatttacgttttgaataaaatggaaaactgtgctccttcatcagtctaactacacttcaatagctgcctgaggctagtggtcaccatattgaatggtggacatacaacatttccatcattgtagaaaattcttttggaattttctacagaaaattttcttttcagaaaagtcatctctgaagctagtcagtgcacacatggtgattcaggaaaaattaatggactgttagcctgggctagtttgctcctaggtctgatgcacactttgctggttcatctagctttttaattcttaaaacagactttgaaattctgctccctgctggcattcccagtcattcacaaaatttagtggaaaagccagcctcccttggcccacatacccctgggcttctgttgcctatatcctcatcatgatcatgcgacccagattatttgctgactaagcaggtgccttggccaaacaataggtgcttgcccaaaaccccatgggttttatttatattctatagataaatctcataaatgcaaaattggtggatttctaccatttttaaggatcaaataaagtaaggttct

SEQ ID NO: 43524 - DNA, 1071 bp, Homo sapiens
acggatcacgatgtcaggagtttgaaaccagcctggccaacatggtgaaaccccatctctactaaaaatacaaaaattagctgggcacggtggtatgcgcctgtaatcccagctactcaggaggctgaggtaggagaattgcttgaacccaggaggtggaggttgcagtaagccaagatcgcgccactgtactccagcctgggcgacagagcaagtctccatctcaaaaaaaaaaaaaaaagaaagaaagaaagaatcgtgtaaacaaatattttaaaatgcatgttttatgtaatatataaatgatgtaacttgtcagttttttttcattttagtgtgaatgtctggtatgttacccaatattttgacagataataggaagagaattgagttcctttgaatcactttccgaagggtttcgtctcaggttcatgagagctctggcttccagactggccagtttttcttttcccatgtggacaactgtaggaggccaactcactatttgtgtgaaacatagtaatgaaacattgtgtgctctctgagcaactctgaattgggcaggtgtaaaaaaggtaaaagaaagtatcagagaacaatgccaaataaaaaaattcatcctagctataactcatataagaatttgccacttttgaaatttcagatgtattaggatatagatgcagaactaaaatttttctttaaaattaaattcctaaattgctattctctcctgggtttactttaaaaatcatttctgggattatatcagtaaaaatacttataggaaagttggaaattagaggaaaagatgaaaaaacaaagaatatttcattgctgggctcccactgttaatattttgaatacatttcctgggcaagtatttgggcatagtctttttctatctatattttaaataagataatttatcttgcccctcaaatcatttcttcatgcaattaaaaactcttcacaaacatatatttaatgggtttatagtattctacccgatagatgtagcagacattttcagccagttctctgatgctggacaagtaagtttcagttttt

SEQ ID NO: 43525 - DNA, 1065 bp, Homo sapiens
gggaattagtgtgagtcaaggctcatccgggtatggagtagagagtgattcttggagctggctagattttagggtgctgcagggtcctgggagttgttaagtgggaagtttggagagctgtaattatttttcctaacttatcaaaagatgatacaaaacctagttaaaactctacggttttgtatgattttctccaggctcaactaaagttgactctgtggctgctgatgtctttttgatgcacaacctggaggtcgtttgatacctacaagctcttaaaagagatgtgtgcacattgtaaacatcatccaagagcagtgcacataacaaataccaggttcttagatcaagtttcattggaagaactgatttagcgacacgaggaagcacccaggcatgaggaaatgggaaattcttgaaaggtgactcattttagaattttttttttttaaacagcctttctttcccttttcacttccgtgctgccagccatcttgtcttttgggaaggagatacatgaggaggcaaatgcttcagggataatggaatagaggaggatgagctaaggtcggggggcagaggtggaggcagtcttaaggagcctgctgtcaaccccctttttacagcaggaaggctgaggccagcggggcgaatggacgccaagatcatatatctggctgtcaactggcagtgagaacccaaatccaggtctcataactcccccgggttccacatgctaccttttagagcctgggggagaacagcaagtctgtcattattaggaaggcaaacacttcgagcaatgggaagccaaactgtaatatgaattacaaagtctataggtgtttaaagtcaatgacaacaccttaatttcctaattcaagacttttaacttcttaagctgtatctacctcatgttcacattttccagtggtgaaactgtttctatagttaagaaccaaaaacattattttagtaaagtctttgaggcaagaagtacattttttgattaaaaattgagttgcttgtgtttgtggagaaccattaggccagtttattttgaaa

SEQ ID NO: 43526 - DNA, 1029 bp, Homo sapiens
tggaatattatttagcagtttgctactaagttctaatacctgatgaggggactgttatcatgcagcctccatgtaaatggtcagaagctgctaactgtaaacttcatgaagaaataccatcaaattggctgggcgtggtggctcacgcctgtaatcccagcactttgggaggccgaggcaggcagatcgcgaggtcaggagtttgagaccatcctggccaacatggtgaaaccccgtctctactaaaaatacaaaagttatctgggcgtggtgggcacctgtaatcccagctactcaggaggctgaggcaggagaatcgcttgaacccaggaggcggaggctgcagtgagccaagattgcgccgctgcactccagcctgggcaacagagcgagactccgctctgaagaaaaagaaataccatcaaatgatcagtttgtaagcacgtttgccatctctagaaccatagcctatgggataaattgcttagccctaagaagaactgtgctaaaattgtagtcagtgatgagtagtagaatgtttcctgcttcttttttcatttctagccttcccaaattttctacagttggcattttgttactttgatcattgggcaaaattacaggaaaaaatggcattacccagatttagtaaccatggtactcatgaagcgtagtacagtgacttctttttctcacctacaagatatccttgaatagaatattttccttattgcactgaaagggagctaggtagggatcaggcattactcagcccttaagcctccctgtatgtagttcggcaggttggttttcctaggctagactctcttcaactcatgagccaggacattctatttccctcgtccccagttgatagggttccgctatggccccacccaattctcatcttaaattgtagctaccataatccccacatgttgtggaagggacctggtgggaggtaatcgaatcatgagggcaggtttttcccatgctgttctccttgtgatagtaaataagtctcacgag

SEQ ID NO: 43527 - DNA, 1017 bp, Homo sapiens
cggaggagtttccggttggctctgcgccccgcccctctcccaaaatccacgctggttgaatgctgaaatccaccgggctctaggaccacaagggatgatccgccgcttggcagctgcccggctctaccgggctgtaaattccatcgttgcagcgtcattggcttgagagctgcctgaaggacagcaccaatagccaatgggaggctgctattcccaggcggccgcgttataagagccagtcaggccggcatttgggcttaactctttaaaggtaggttcgtgacccttgagaaaagagttggtggtaaatgtgccacgtcttctaagaagggggagtcctgaacttgtctgaagcccttgtccgtaagccttgaactacgttcttaaatctatgaagtcgagggacctttcgctgcttttgtagggacttctttccttgcttcagcaacatgaggcttttcttgtggaacgcggtcttgactctgttcgtcacttctttgattggggctttgatccctgaaccagaagtgaaaattgaagttctccagaagccattcatctgccatcgcaagaccaaaggaggggatttgatgttggtccactatgaaggctacttagaaaaggacggctccttatttcactccacgtaagtaattatgccccgcaggtaaaatagtaattaagaatccactcacttatgccagctctccagcaggaaaggtggcctgtacctggttttgcctcttttacaaaaccgaaatatcttatttccttctttgggaaaggaaattgtttaaagccagttttatatagcgagcgaggcctttgaaggtcttgttggaaacatgtggtctggaaaaggctgttaattttttttattatacaaattagaactagaatctttgaaatattgcagaaatatatctgggtgtataattggccaataagtagaaaaagcccaaaagaattctcatatctcaaactccatttcttaaagaaaatgacttgattccattt

SEQ ID NO: 43528 - DNA, 1083 bp, Homo sapiens
cctctttgagacctccctgtttgatgctgtttctgcctctctcctcaccctgctgctgtgccctgccaccccctccctccagtgagcaggtatacccagcagctgcgacaccatctgggccgtgactccaagttcgtgctgtgctatgcccagaaggaggagctgctgctggaggagatctacatggacaccatcatggagctggttggcttcagcaatgagagcctgggcagcctgaacagcctggcctgcctcctggaccacaccaccggcatcctcaatgagcagggtgagaccatcttcatcctgggtgatgctggggtgggcaagtccatgctgctacagcggctgcagagcctctgggccacgggccggctagacgcaggggtcaaattcttcttccactttcgctgccgcatgttcagctgcttcaaggaaagtgacaggctgtgtctgcaggacctgctcttcaagcactactgctacccagagcgggaccccgaggaggtgtttgccttcctgctgcgcttcccccacgtggccctcttcaccttcgatggcctggacgagctgcactcggacttggacctgagccgcgtgcctgacagctcctgcccctgggagcctgcccaccccctggtcttgctggccaacctgctcagtgggaagctgctcaagggggctagcaagctgctcacagcccgcacaggcatcgaggtcccgcgccagttcctgcggaagaaggtgcttctccggggcttctcccccagccacctgcgcgcctatgccaggaggatgttccccgagcgggccctgcaggaccgcctgctgagccagctggaggccaaccccaacctctgcagcctgtgctctgtgcccctcttctgctggatcatcttccggtgcttccagcacttccgtgctgcctttgaaggctcaccacagctgcccgactgcacgatgaccctgacagatgtcttcctcctggtcactgaggtccatctgaacaggatgcagcccagcagcctggtgcagcggaacacacgcagcccagtggagaccctccacgccggccgggacact

SEQ ID NO: 43529 - DNA, 1498 bp, Homo sapiens
tttggaattttttagtatgaaacctagagaaattagcctggtatagattatgaaagtaccgctaaacacagttgccatttattcccccatgtccaattcagagcaagggtaacctctggcgttgtaaccgaaactgctctctgtaaactttaaattttttttgaagaatggtattttttttcttaaaaggtcatataaattttatatagatatgtttgtcttaatattaaaatatttaaaatcatatattgagaaagttgatattccatgaggatgcttcatttggctttgaaaactccatacacattcatgctcagtgtgagaggaatgatggtattctattttatataattgtttattctagagttatctgaaagctaatacttcatactttgagaaggcaaataaagctgtggtatggtacgttaaattatattcctaactgaaagggtttttttgtctgtttgttttaaccatttccagattatttgcatgggtgcaaaagaaaatggtttgccgctggagtatcaagagaagttaaaagcaatagaaccaaatgactatacaggaaaggtctcagaagaaattgaagacatcatcaaaaagggggaaacacaaactctttagaacataacagaatatatctaagggtattctatgtgctaatataaaatatttttaacacttgagaacagggatctgggggatctccacgtttgatccattttcagcagtgctctgaaggagtatcttacttgggtgattccttgtttttagactataaaaagaaactgggataggagttagacaatttaaaaggggtgtatgagggcctgaaatatgtgacaaatgaatgtgagtaccccttctgtgaacactgaaagctattctcttgaattgatcttaagtgtctccttgctctggtaaaagatagatttgtagctcacttgatgatggtgctggtgaattgctctgctctgtctgagatttttaaaaatcagcttaatgagagtaatctgcagacaattgataataacattttgaaaattggaaagatggtatactgtttttagaggaataaacgtatttgtggtttaacctgttgtctctactaaagtacttcatttcattatgttgttaaatcatcacacatgctgggtctgctcttggccatgcagcatctgtagtggagtggtattgtacagactctggagccaaatagccaaggatcaattgtctgtgccaccatttctcactgtgagactttgggttcgtttattctctgtgtctcagtttcctcacatataaagtgaggataatcaaaacatctacatcttaggattattttgaggattaaatgagtatatgtgtgtgtgtgtgtgtgtgtgtgtgtgtgtgtgtgtataaaataagcttaggatagccgggcgcggtggctcacgcctgtaatcccagcactttgggaggccgaggcgggcggatcacgaggtcaggagat

SEQ ID NO: 43530 - DNA, 1065 bp, Homo sapiens
agctgagttactttggtcaagctcttggacttctgagcctgtttcctaatttcagaagtggtgatatgatgtgttaggccctggtgggttgcaaggaagaggcatacacacaccacctttggtggtgaaggctgaatgttaactttgatggaaagtcatccaagcagccatattgtctctggccctagtactttcaaaaccccacagaacattaatttagcagtatttaggataggatttgagctctgaagacctatagtgtggttatttgttcatatggctgttttccatactagaccatgagctcatgagggcagggtctacagtctcatctttctatccctaggcattcagttcagtgcctgatacatagtaatagaggcacaaatgtttcaaaagttgaggaattttcaactcttcctgaaagaacaggaagatataaaggcttctcagagaaggtattatttaaggttttttttttttttttttttaagatgacatctcgctctgtcacccagtctggagtgcaggggcatgatctcagctcactgcaacctctgcagttcaagcaattctcctgcctcagcctcccgggtggctgagattacaggcatctgccaccatgcccaactattttttgtatttttagtagagatggggtttcaccatgttgggcaggctagtcttgaactctgacctcaggtgatccacctgctttggcctcccaaagtgctgggattacaggcatgagccacaatgccaggcctatttaagctgattctttaaagatgagtagaaatgttttccaggtgaataaaaccttgagacattattccaagcagagaccagcaggtgcaaagacacagggatatagagatgttgaagtttaccaaacactgctagatttagaaaacaaaaaggaaacaatcaaaatcaaaaattaaaattaaaaatcaccaaaaaaaaaaaaaactatgaatgggcttggtgagaggtcacgtcacaattgagtcaactatgaccgtagacactcagtaatttatggaagttttagggaaaaaccat

SEQ ID NO: 43531 - DNA, 1048 bp, Homo sapiens
cagcctcccaaagtgctgggattacaggtgtgagccactgcacctggcctaatattttaaattggaaatgacccagatgtttaatgagtacctattatttaacttaatataattttagattctaaattatataacaagtttaatcacaagcatttattccattacatttacctaattaatttttttaatagtttactcagattacttttgaaaactgagagttatcattgaaagttatttcccagttaatcatttttatagactgcgaatttcaggttttcctaagtaagaaacttaaggttagataaatggtttctttttttttttttttgccaataacttaggatttagctgttttcattaactaaacaatattaaatgccttatttatgaaattttacatagagataattttcctttgggctgcattcattgttttataaccctcatgccaaattttggcatctagcagagataaatatgaaaccactgttccaataaatttaaacaatagtgtatgttgacaattctgaagccattctaattctaattttatttcatgactactttcaaaaccagcttatttattaaagatatacttaagtcacatgaacttgaaaagacatttggcttaaaatctctattttctctgatacagtatttgatttaaagcccctttttttctttaagccaattaattagagcacttttacatgtttctagtagtgaaacatcatatacatgacacataaatacatagatgtattatacatgcagatagaagtagagcttatcatttcacaagacctctttttttcctccagttctagacttctaatttcttgatcttattaccctaggcagttgtcagctaagataaccctaaatttgcatattaaaggaactcttagatgaaaaaaatcagatagtgaaatttacatctcaaggtacagagagaaagagtctggtgctagtgtttccagaatttattccttctggtgggttcttggtctctctgacttcaagaaagaagcctcggaccttgcag

SEQ ID NO: 43532 - DNA, 1024 bp, Homo sapiens
gctgtttttatgtcaaccaaacaggattagtaagggatgccacccaaaaactagccgattggtaccataagatatgacaacagctgtctgagtcatggggcgcctagtcaaaatgctaatttggggctcacatctccttcctctggccagtccactattaattattatacttgccttggcttttggatcatgtttgttaaatcttttaaccagatttatttcttcttgcctagagaccattatgataatgcagcagggccaccagtcagtttcagataatgatgtcaaccccggccaccaagaagtaaccttgtctccactagacagagcagggtgagagttctgtaatccccagtaggtagggactgtgccccaagtcagcatgaagtagttatggaagaaagaccatgggtccctctgcctcccagaaagatttatggggatcacatctctcaggggaaaatgaggcaggagaatagggtctggagacagggaacctaaagctgatttgtgctgagtttctaggattgaatgaaaaggaaaaccccacctctccacacccaagtaacaaaaggatcagaggctactccctttgcactgcattgcagataaaaaatggaaagtacctcagattggtcccctcccacaaccaatcagactggccatgggctactccttcgtttacatagggtgtaaccaagtaaccaatgggaaacctctagcgggtatgtaaaccccagaaaattctgtaaccagtgctcttgagctgcttgctggagcctactcccactttgtgaagtgtactttcatttcaataaatttgtgctttcattgcttcattccttcgttgctttgtgtgttttgtccaattctttgttcaaaacaccaagaacctggatgactcatagtcaagatcctctaccagtaacacttgaactttctggtttgtcctgaacatccctctttcttaaacaaccagtcgttttattctaggccaaaattttaccatacaagaatatttctc

SEQ ID NO: 43533 - DNA, 1034 bp, Homo sapiens
accactctctactgttacctgaaggccaaggagtgaacctgggatagctctcctgcccagaaggcggaaggactcttttgtatctttttgagttatagtccctgatccctacctgtgatgcaattggcagcagaagctcgtccagggtgaactcacacacatttcaggcgacttaaaccctctttcttaagctaaattctcccataaagttggcctgtaaggacaaaagataatatctcttagatattttgacctcccttctcctactgaatctattgactggctgaggacctttgggacccacaagctttagaacacattctacatcttggacctccacttaagggagcttggtggtcattgctttggcatcagtttgcttgccctgaaccccgtagaaattctatatatcttttatatacccaatataaacccaatcttttatataacctctgcaccatttcttcatggggaatatcccactagccttggtaccgttaactctgcagtgttcgggaacctccttagtcttgcaaggaatgcaggaagatatggcctatctaaattggtaggaagctagaagctgagaccttcatccagggacaagagaaaagctcatattaggccattgcctctggagggaaaacatacaaagcaacactggtgcccacctaaggtcagagatgtctgacacttttagactggacctcaaagggggatgcctaggggatccaactccagacctcagcctctccaaaggggatgccctaggcaaaggttctcaggtctagtactaaggcctccttagaattgtctctctcttgcagaccactacaggaaacactccatttattccacctgacttcccacttggctgcatcctcaaccattgaaatgaatttgaccctgataatctaaggaggaaacatttgatattcttttgcaataatacttggccccagtattgtttggaatctggagtttgctgttgaatgggaaagcaggatgacgttgcatgtatccaggctttggtg

SEQ ID NO: 43534 - DNA, 1032 bp, Homo sapiens
ttttgtgtcaaatgttggtctttgtcatggtacaggtatgaaatgagtgcccaataaatgtttaggggaggattgaggttgtggtattttgaatctctagaattttcttctggaattatggcctgggaaatacttttaacttttactgtgtcctggatggattttctaattttcttatttttttctatttctccttctgtgtgtgtgtgtgtgtgtgtgtggttttttttctgtactctatggaagactttctcaacctgtatttcaatgttttgactgaatttttaattgcttttatcatattcttaatttctaagacttcttttttattcccttctctcaatgaaggtaaatgtgatagtttctgttgtttttgttgttgtggacaacatatagttaggtcttgctttttttttttttttttgtcttgcttttttatccatgctgacagtctctgttttcaaattagcatatttaagtcactcacttttaaggtgattactgagatagttggattaatgtctaccatatttgtaactcttttctataagtctcccttctgtgtttcatttttatcttccatcttttttgtcttctctggttttaatttagcattttacaaaattttattttattttttatcttagtatattaattatacttaaaaaaatttctttttgattgccctagaatttgcaatatacatatacaacagatccaaatccacttttaagtaacactctactgcttcatgattataatagagaattcccaatcatccctcctgtcccttataagattgctgttactgatttcactttttcataagctatgatccttaaatgtatgattactattattacttttaacaaacttttatttgataattaagaaaaaagattttatctcgtcttcatttatttcttctttaatattcttcctttccttatgtagatctgagtttgacttgcataattttctttctttctgaagaaattattttaacatttctggcaaggtaggtctactggt

SEQ ID NO: 43535 - DNA, 1057 bp, Homo sapiens
aatcaatcatctaggctttaagccccacatgcattagctatctgtcctatctgtctccttccccttgtccccaaccccctgacaggctctggtgtgtgatgttcccctccctgtgtccatgtgttctcattgttcaactcccacttatgagtaagaacatgtggtgtttggttttctgttcctgtgttagtttgctgaggatgatggcttccagtttcatccatatccctgcaaaggacatgaactcattcttttttatggctgcataatattccatggtgaccagtgtgatcatcccattcttctatatattttttttatgcctcattggctatttcttctccatatcctttactggctcttcattttctagttgacatctccattttagaggatcttagggcttcatcctgggcctcttctctacccatattttaagtgatttaatctgtcccaggtctttgtcttttgtctcaattcaagatactagaatgaagatatgtgtggctttcttgaatgaattctttttggggttttctaaacttcctgaatctgtacatttttgtctttcaccaaatttgggaagtttggggcatcttttttattattttcctctggccaatttttaaatcttcttctgggactccaactaccttatgatagaccttttgaaattttccacagatctctgaggatctttaagtttttttcaacatttttcccctctgttcttcccattagatgatttctatgatatctattttcaaattcaccaaatctttccatagtcatattctttttgtggttaagtccatcaggaaattttaaatttcaggtatagtattcttcaattctaaaattcctattatgtttctttttatatttataagatataaatatattttatatttaccagctgaaatttcctgtcttttcattcattgtgagcatgttttcctttatttccataagcacggttgtaatagctgctttcaactttttatctggtaattatgatatttgggttaagattgacttgttgaggatggatcacatt

SEQ ID NO: 43536 - DNA, 1031 bp, Homo sapiens
cagcttgactttatgtgtatacttatgtaaccacctaaataagatgaaatagttgattttaattaacatctgcttagccttgaaatctgtcgcagcttccaagtggataaaacatcttttggtccccaagaaaaactgatgtttattttcaaaacattttggtttgtgatattgatataaaggtagttgcactttcccaacccttccagcttccttggtggaaggtacttcccatgcttgcccctggaaaggcagccacatcatcacacacatgtcctcagcacagaccgctcctcacaggctcttctcttttttcctgtgtttgccaagaggggttttccccctcctcacactctttcccttagtccctgtagcctcatcaagagaaacagactcccaggggcagagcaggaggagctggtttctgtatttctcagattccttctggctttagcaaccctgcaggctgtattcttcttcagttctcctctctcatcactcttttccccttcctagagcttcactccccctgacctgctcctcccctgcatctcaggccatgccacccctggccccatccccaaggccggaggacagaaaatctgctctcatcttcactgcctcatcctcacttcagcagctcaaatgacacttcctcaaggaagctttctctcactgtcccagcgaaaagattgccatgatggcactttactggacttctcaacacactcatctttcttttttttttttttgagatagggtcttgctttgtcacccaggcttcagtgcagtggcaccatcatagctcactgcagccttgatctcctgggctcaagcaatcttcccacctcagagtagctgggactacaggcgcttgccaccatgtccagctaatttatttttagtagagaaggggtctcgctatatcacccaagctggtctcaaactcctgggctcaagcagtcctcgtgcctcagcatccctaagtgttgggattataggtgtgagccactgcacccagccccatcact

SEQ ID NO: 43537 - DNA, 1068 bp, Homo sapiens
tagtattctctgatggtagtttgtatctctgtggggtcagtggtgatatcccctttatcattttttactgtgtctatttgattcttctctcccttcttctttgttactctagctagtggtctatctattttgttagttttaaaaaaaaatcagctcctggattcattgattttttttttgaagggtttttcatgtctccatctccttcagttctgctctgatcttagttacttcttgtcttctgccagcttttggatttgttttctcttgcttctctagttcttttaattgtgatgttagggtgtcaatttgagagctttctagctttctgatgtgggtatttagtgctataaatttccctcttaatactgctttagctgtgtcccagagattctggtacattgtctctttgttttcattggtttcaaagaacttcttgatttctgccttaatttcattatttacccaggagtcattcaggagcaggctgttcagtttccatgtagttgtgtggttttgaatgaatttattaatccctgagttctaatttaattgcactgtggtctgagagacttttatgatttcagttcttttgcatttgctgaggacaacttgtaagttttaaattgcttggcgttctgagtagtgtgatgaaatctcaggttgtccttctctgtcccactcaggacattccatctctttgtccagtgcatccttgagatctacactgttgacctggttggtagtcatcaatttggtttcctcctgacacacaaccatcaacatcattatggctcaatgatccaggatcacctgaagcagatggtccttcttttgacatatcatcagaaggtcaatagtagcctgacgctagtcacaatgcctgtgtcattcacctaatcatgtaggcattttatcatctcacatcatcacaggaagggtgaatgcagtacaaataagatattttgagggagagatcatattggcatcacttttattatagcatattgttataattgttcttttttttttttgagacagtctcactctgtagctcaggctggagtg

SEQ ID NO: 43538 - DNA, 1024 bp, Homo sapiens
tgatgaagccatagaacaatttcctatttccattaatgccagaagcatggtaaatatgcctactgcctctctcattacttaacattgttgcagaaatgtcagctaatacaattgactgaaaaataattcaaaggaaaatgtaaaaatatcattgtttgtagttgatatcattttgaatacttgagaaatccaaataaactactagaaacaatgaaatcatattcattgatgcatatttaatataatttttctatatgcaaacagaaaatatgaagattcttgatacaacagcagcaaaaataatatgctttagaataaactcaagaaaatatgcaggatctatataaagaaaaccgtacttgctaatgcatgtaaaagaagatttaaagaaatggaaggaacatgtattgctttgggatctaaagattcaatcttgaacagatataactgtaaataacatacgttattgaataaagcaattttaataaaaattttagtttttgaaacaagctgattctgaaattcacattgaaattgatatatatggatcaaaaataaaacttctagaagaaaatatggattattttatttttagtgcctttttaaatgacagataaatccaaagacctaaaggaaatgaaagatacatttgctaacataaatatttagaaaataaccataatacaaaaaataccacaaaggtcaaaaatgaactgagaaaaatatttacaatatgtttacttgataaggagctatgttctttatatatgtgtgtgtttgtgtgtgtgtgtatatatatatatatatatatatatacacacacacacatatactttaagttctggggtacatgtgcagcaagtggaggtttgttacataggtatacatgtgccatggtggtttgctgcacccatcaacctgtcatctacattaggtatttctcctaatgctatccctcccctagccccccacccccaacaggccccagtgtgtgatgttcccctccctgtgtccatgtgttctc

SEQ ID NO: 43539 - DNA, 1034 bp, Homo sapiens
tatgttgtcgggtacattgatatatgtaaattatggaagatcatttatatacacatggtaataatttttttattgttcttttccatttagtttgcccttaaactcctgattaatatttgatttgttcatggttgaaactagttgtaacaatttcataactaaaacaaatgttgttcaaacattgtgatataatcaacagaccttgttttgatagaccactcacaaaaatttaatttgggtcatattatctgattgaagttgttcccaacttatgcattatcagtaaaagaaataatttatgaaacggaaacatgggactgatatattatccaggagctgtctgttaaaatgaagtagaagggcctaacatggtggcttatgcctgtaatcccaacacttttgagaggccaaggtggagttcacttgaggccagaagtttgaaaccagcctgggcaacagagccagatctcatctctactaaaataaaataaaattatcctagcacggtgacgcatgcctgtagtactagctatttaggaagctgatgtgggaggatcgcattagcccgggaggttgagactgcactgagctatgatcatgccactgcactccagcctgggcaacatagcaagaccatgtctctacaaaaaagaaaaaaagttcatttactgagtgtcaactatccaggcatgtggaatacaccagcattcatattactacattctaacagagtgggggaaggagggaagacagaagataaataataaacatagtaaatgggtaaattttgtagggtgttagaaggtgataaggattttaggccaggcatggtggcctggggaggctgagacaagaggacatttgagcccaggagtttaagaccagcctgggtgagacccccatctctataaaaaattacaaaaagagattttagaagaaagaaaaggtaagggtaaggcagatcaggagcaccaagatcagggggtaggagatggaaaaatcaaatgaggtggtcagggcaggtcttcttgaaa

SEQ ID NO: 43540 - DNA, 1047 bp, Homo sapiens
aatctctttatggacacttagggttgcttccgtatcttggctattgtgaataatgctgaaatgaacatgggagtgcagacatctctgatgtactgatttcagttcctttgtatatatactctgaagtgggattgcgagttctatttatagtgtttttgaggaaacttacatggctttctagaatgactgtatgaatttacgttcccaccaacagtgtgcaagagttcccttttctccacatcctctccaacacttatcatttgtctgttttgataatagccattctaacaggtgtacattgatatctcattgtggttttaatttgaatttcccctatgatttgagaagctgagcattttttttttcatacatctgttggccatttgtatctttccttttgagaaatgacttcagattctttgcccattttaaaaattgagttgttttgttgctattgagttatttgagtaccttatatattttgaatattggggccttatcagaggtatggtttgcagatattttctcccaatcctcgggttgactctatactgttaattatttcctttgttgtgcagaagcattttagtttgacacaatcctatttggctatttttgctttccttgcctgtgcttttgcagtcttatccaagaaatcattgcccagatcaatattgtggatctttttgcagagagaggattacaagtttcctgattctcccattaatctctccaaacacgaaactcttagttaagggagtagcatttcaaagaagacatcactataatttatcgtttataaatgaaaggtgcagagaccttttcttaccaatttgtggacctcttcgtttttctttcattctttcttcctttctttccagtgttggtaaggttttggcctgctgtactccaggtactttttgatgcttgagatgtataagtaaaacaaagactcctatccttgtggacaatcatgtgaatgtgggattatcttctgccttaaagcaggagaataactggcttatttgggcagtagcaaggaggagc

SEQ ID NO: 43541 - DNA, 1067 bp, Homo sapiens
agtaacacagagagcttggtttcaaggtctgccacccaatgataagtcagtggtggttcaaggtctgtataagtccatgcccaagtttttcaaaccaagacttgggatgactaaagaggaaatgatgattttcattgaagcatcttcagaaaatccttgtagtctttactcttctgtctgttacagcccccaagcagaaaaagtttacaagttatgtagcccaccagctgatttgcataaggttgggaccgttgtaactcctgataatgatatctacatagcagggggtcaagttcctctgaaaaacacaaaaacaaatcacagtaaaacaagcaaacttcagactgccttcagaactgtgaattgcttttattggtttgatgcacagcaaaatacctggtttccaaagaccccaatgctttttgtccgcataaagccatctttggtttgctgtgaaggctatatctatgcaattggaggagatagcgtaggtggagaacttaatcggaggaccgtagaaagatacgacactgagaaagatgagtggacgatggtaagccctttaccttgtgcttggcaatggagtgcagcagttgtggttcatgactgcatttatgtgatgacactgaacctcatgtactgttattttccaaggtctgactcatgggtagaaatggccatgagacagactagtaggtcctttgcttcagctgcagcttttggtgataaaattttctatattggagggttgcatattgctaccaattccggcataagactcccctctggcactgtagatgggtcttcagtaactgtggaaatttatgatgtgaataaaaatgagtggaaaatggcagccaacatccctgctaagaggtactctgacccctgtgttagagctgttgtgatctcaaattctctatgtgtgtttatgcgagaaacccacttaaatgagcgagctaaatacgtcacctaccaatatgacctggaacttgaccggtggtctctgcggcagcatatatctgaacgtgtactgtgggacttggggagagattttcgatgcactg

SEQ ID NO: 43542 - DNA, 1022 bp, Homo sapiens
catattgagcaattaaggagaagtatttaaacaaaacaagtgatggttgatatatttatgtatgacaaactgttttactctttatttccccatcatgttccctttttaaattttaagaggaatataagagtttttttcttcatttcatctcctgttttggaataacactgtatttcactaagtttcttcagagggagaacctttagatcaaaggttaaatttggagagcactgttcgtgatatttgttaagtacttaataaatatgcactgaatgagtatgcatgacactggttgaatgccaacacctgggtataattctggaaaccagaactcagttcatgctttatgtagtctccttcctttttaatcttccataggttgagtaccctttatccaaaatgattgggaccagaaatccagttcagccagtttcagattttttcagattttaggatatttgcattatatgttagatttacatcatccctaatctaaaaatctagactctgaagtgctcccgtgagtatttcaagtgtcatgtcagcactcaaaacatttcagtttttggagcattttggattttgaatttttgaattagggatactcaactttttgtgtgacagggtcttgctctgttgtccaggctgcagcacagtggtgagatcacagctcactgcagcctcgatctgggctcaagtcatcccccagccttagcctcctgagtagctgggtctgtagacatgcatcaccacacttggctaattatttgatttttttgtagagacaagatcttatgttgcccaggctagtctcaaactcttgagctcaggcactcctctcacctaggcctcccaaagtgctaggattacaggtgcgagttacaacacctggccaacctttactccttattacactaactttatcgttagtgttctactctacccacaactctggggaaactgaggctggggtagcttgctggtgcactagtaattccaaacttgaacgggagaaatgctta

SEQ ID NO: 43543 - DNA, 1028 bp, Homo sapiens
acaaatggtcttttccagacattctcaactgtcgtggttgttttgataacttgaaagcaaactgtttctagcacccatctcttgtccttcctaaggagaaaactatctcattgaaataaagaaaggcttgttttatgactggtgcctttctggactctcatttagttttttacactgacatcagcctcctcaagattggtcgtcttttaagcactagtttgtttcattatttgtaccatcaaaatatgtgagaaaaggaaaaaaaaaggaaaaattatcttaatattttagaacactgaattcagatttcaagtgtcaaatgtttgcaaaaaagtcccaatattctctgaaaacattggatttctcttatgtaaaataccatttagacagaatgaaaaaagagaactgtatttggagtgctgagaccttgaaattggaatcttcggacctggtgaaggtgtggaatccaggagttgggaaagtgctgcaaaagcttcaccagtgggtgggttaataaaaataatttcgaatatctgtgtagtgctgtgtgtcaggtactgaaccaagtatgaaatgtaatcctagaacaattcattgagaagagagttgtacttttaactacattttatagatgagcaaactgaggcatagagaataaataacttaaaaagggccacacagctattaagttgcagaactggggctttaacccaagtagtttgggtttgtactcaattatttttcaacggttgacctccatggagaacgccttggatcttttccaacaaaaatttttaatcttctctattgacatttgtagcattgggagatgcagcactccctaagttagtaatgtacaatttgaatgtgcttcctacaggtgaatgatttatagccgcactgcccctcctggagggagacctatcattccttcattcctactatataatttattttatttttagttggcaaataattgtatgtatttgtgggctacaatgtgatgtttcaatctatgtacacattga

SEQ ID NO: 43544 - DNA, 1050 bp, Homo sapiens
tgcaatggcgcgatctcagctcactgcaacctctgcctcctgggttcaagcaattctcctgtctcagcctcctgagtagctgggctaccggtgtgcaccaccgcacccagctaatttttgtattttttgtagaaagagggttttgccatgttgcccaggctggtctcaaactcctgggctcaagcaatccacccacctcagcctcccaaagtgctgggattacaggcatgagtcaccatgcccggcccctagaattttcattttatgttttttaatttgctaggatatcacattctaagttaaaagtttcctttagattttgaaggcattgcttcattttcttgattttctagaatagctattgggaagtccaaagtaattccaatttttgatcttttcataaggccttttatcattgctttgttttttatttttcttctgtggaagtttatagcatcttctcattcctggtgttctaaaatttcacggtggtgagccctttcaatctggaatgcaggtctctcaattttaagaattttaaaaattcttttctcacctctgtgtctgcagttctattcttcagataggcactatcctagcttacaccagtttagccctattcagggtagcagggactacacaaaagtgttctttttagggatcagcgattattaattagggtcattttagagagtggctgccacagtattcttgttttttagtgaaagatgaaaagttgattggtagccctgagtgcctgagtagggcttgttgatcccccactgcagggtgattttctaggtagttggttggggaacatctgagttcagttatctattgatttttcttctttgggtggcttgtattttcccagagaaggctcccacgtggaagggaaagccatgctgtgagtgttctgggagctgagtggagggagtctgggaaatctgtcattggttttccattcattcgtatgatcctctatgtctgttgcggcaacttccttaagacccacctgatgtctccgtggccagagaacctctgttatac

SEQ ID NO: 43545 - DNA, 1045 bp, Homo sapiens
catctcctggcttcaagcgattctcctgcctcagcctcccgagtagctgggactacaggtgtgcaccaccatacccagctaatttttgtatttttagtagagatggggtttccccatgttggccaggctgatcttgaactcctgacctcaagtcatccacccacctcagcctcccaaagtgctgggattacaggtgtgagccaccatgcctggctgaatattattttaaactttggaaatatcttaacatgctacataaactaatgaattgtttagccccagggaaaaaagcatcagcgcccccccccccttaaactggtgggaactcttgtaaaatggactatttaggaaatgccattgcaaataataatagaattcagaatgtgcagttctatcacattccttttccatctaggcaatatagttacatatttttcaggaatttggaacttagtttggccatatgttgtttgttcagctcctgtggcaaaaataattatttgttggattattggatattttcatagactttaccacctcccttccaaactctcttaggcctctgtgcataaggcataatattttttaatttttatttaattgtttatttgttattttttgagacagagtctcgctctgttgcccaggctggagtgcagtggtgcaatcttggctcactgcaagctctgcctcccgggttcacaccattctcctgcttcagcctcctgagtagctggaactacaggcgtctgccactgtgtccggctaatttttttggatttttagtagagacgtgttttcaccgtgttagccaggatggtctcgatctcctgacctcgtgatccgcccgtctcggcctcccaaagtgctgggattacagacataaaccaccgcacccagccttttttaattttttattttgtagagatgaggtcttgctatgttgccgaggctgatggcaaactcctagcctcaagtgatcctcttgcctcagcttctcaaagtgttgggatgacaggcgtgagcggccaaggcatagtattaa

SEQ ID NO: 43546 - DNA, 1028 bp, Homo sapiens
aatttggggtcctctcgagtcatgtgggccaatgtgtgcaaatacttataagatgaaactcagcaggtattgcacataaaaccagctggtgtctccgagggagggtgcctccttggggagtcctcagacccggatgatttgttacccataatttagagacctgaatcattcatgactctgagcagtgttttgggcctaaatgtgccgcttgtgagtgtatcacttcggtgtgtcaccagtaagtcaggtctcctctcttatgtgtctcagaaacgctgaatcccctgaaggtcacagaggactcacaaatgcaagatgaccagcctttatgcacactcactggcagggtgagagggtacagatgttctcacagaggaaaccctgtaaggccactgaatgttatggacaaagtcctggcacctcgccaagtctctgattatttagagttccctaatgggccagagggagtgagtgcctttaatcttcggagggaagtattcattctcataaattaggaaaagggactccaagagaggttggtccagggtgaaacaagcacagtttccataatgaaaggtcacaatgcaacaagaccttggccccaaaccaaagtaaattggcgacttaagacccatgtgttggcagataaaaatcctgatcccctgaccttaggaaagtcagagataggagttcatgttggtaccaagtgccgctttcagagagaaacactgggcagtggtggagggagggacctattctgccaactatgccagatatgttgacccaaaggaaaaaactgaagctaaattaatataagtatagagtttattttgggccaagtttgaggactgcaacccaggagtgtatattccgggcaacttaaatagatactcccagcttgcagtcctcaaatttggctcaaatgaactctactgacattaattttgccttcgtttttctttttggggggttgacatagtgtgatgttcactcagtcaacagtttgtttctgtcacaggcactttttg

SEQ ID NO: 43547 - DNA, 1050 bp, Homo sapiens
gtctcactctgtcacccaggctggagtgcagtggtgccatcttggctcactgcaacctccacctcctgggttcaggcgattctccttcctcagcctcccgagtatctgggactacaggtgcgtgccaccaaacctggctaatttttatattttagtgaggcggggttgcaccatattggccagtctggtctcgaactcctgaccttgagtgatctgtcctccttggcctcccaaagtgctgggattacaggtgtgagcccctgcgcccggcctttgttttaccatttaaaatagtatctaaaaaatcatttacttctccgagcccttcttagctatggtgaatgtgatggacttaagtgctttgagatctctagtatcaaagatgtatttacaaatatgatgaaataatagtgacatcaattaagagctccaaaatatgaaaatccaacaaatagaatttttaaagcctgttcaaaagatttatatttttcatagggggtgctcaaaggatttaaaggagaactaattcatgtatttaacaaacatgatggtgccttgaggaatacagaatatttcaatcaactaaaagacaatagtaacataattcttctgggagactcccaaggagacttaagaatggcagatggagtggccaatgttgagcacattctgaaaattggatatctaaatgatagagtaagtatacaaatctgtaatttttttcgaagaaaatattaggatgaaacttgataggcaattgttgccatagtcacctgagaaagtagttattttagagacttttttttttgagacaagcctctgttaccgaggctagagtgtagtgatgcaatcacatctcactgcagcctcgaccttcccggctcaagcaatgctcccacctcagcccctcaggtagctggaactacaggcgcacaccactacacctggctgatttttaaattttttttagagatgaattctccctgtgttgcccaagctggtctcaaactcctgggctcaagtgattctccaggcctctcaaagtgcttg

SEQ ID NO: 43548 - DNA, 1002 bp, Homo sapiens
tgcacaggagccaccaatgcctttagctactggttctctttcatccattgtgatttaaagtaaaccagtattggctgggcatggtggcttacacctgtaatcccagcactttgggaggctgaagcggggagatcacttgagcccaggagtttgagaccagcctgggaaacacagcaagaccttatctctataaaaataaaataaaccaatcttacatttgttagtgtagcagaaaccagccttcttcgaagtggtcttggtgtgattctcctatccgttatcaaaaacttgaagctgtgatttgcctgaggtaagacatcttgggtacactgaaatcaaatatttaatttttttggtgaaaaaatagtctatgatatatatcctgtgttgctttcaccataatggattggttattgaatcaaacatatgctgattgctgtgcatctgccagttaaggctgaggtaagaacagaaattagttgtcaagagataaacttactagctgaggtatttgtaagggagttacagaagtgatattccaaaacagcagtggtccctaaaactcagcagaaaagcagagtaaatactactcatcatcatatccctagcatttagcaagagtgtgtggcacaaagtagacacatggtaaatattggttaggcgagtgaatgggttaatgtatgaaaaaaaaaaataggaaccagtgcctatctgcctttccatctattgaaaaatcactataaaatacatagataacctttaagccattgaaactcatccagttgagttaaaaggattactacatcaaggttagttgcattgcaggtcatcctacttaaatatggctttttaaaattaaatatattgtaggtggtagatctttcatccatggagaaaattttaatgttagcatttgtcttttctctacactttcttttttttttcaagctctgcctcccgggtttacgccattctcctgcctcagcctcccaactagctggg

SEQ ID NO: 43549 - DNA, 1089 bp, Homo sapiens
ttgtcacatgttcctaattttggtaagataggaaactctagtgttccataatttttattctgtaattctttgtgtgtggcttatttagtaatgatatacagtatctttttcctttaacaagttatagaatctatggcttgaacagaagacaatcttgtaagggaatggggtggtctttgaaagtttagtagttggtaagtccttggttcaaatctcagctctgccacattttaatggtttatccttggacaagatactaaacttttctaagcttcaatttccagttatctagaatggggatgattcacctaaatactcttatgccttgtttacttcagggtattatattaagaatgtattttgactttgtcaggcaatgttgctataaggcctaataataataattaataaagaatatgttcttagtgtttgtattttatttcacttgatgttttaaagtaattatattttggagaattctaacagtatactattctaagtgccttcctggattaagattgaaaaagagatgatatacataaagttgtaaacagtgcttaccacgtagtagttattcaatacatattgtcctatcttctcccttctgttaataaagctaattttgttcaacttacttttagacatgatactctcttaaagtagatttaattatgtaatgcattaaaaaattatctctaaacaatattccatttgagccctcagatttggagatagcagaatgtttggtgatgtcatacatctttcttaaagtttaaaaagatgggatatggggagatatccagcattatgccaaattttgagcaacaatttgtaacctgagcacttagcactgtagaaaacagggcctgatcccctgaatgcctgccataatcattggagatgattaaagtgacccgggggtcttggaggcattgcatatataattatttaattttgagctactgaaatttaatttggctaaaactatgcaagaaacataagttactatagataataaagctttcatatatgttttacccacttttgaatcccctctagtacacttatagcaagcatagatcgatcatg

SEQ ID NO: 43550 - DNA, 1030 bp, Homo sapiens
gtgcatgccaccatgcctggcttatttttgtattttttgtagagatggggttttgccatgttgcccacctggtctcaaactcctggcttaagcgatcctcctacctctacctcccaaagtgctgggattacagacatgtgccaccatgcccagcccattaaactcaacattatcaaaggctatattcaagatgatcttgaattcccaaatttgtaaacgtggaaatgtttgtaccaggcatgtatgactttgtcctttcaaatcatgtttgtcaggtttcctgtagattatccatatgccacaagttaaccacattttcaactttaatgcaaagttgttctcttatctagtgagctacttgtatattagctagaaacagctccttcctgaaacagttttagctttacaattttttttctctttccttttgttgtgaattcatttacctaacagatggagtcccctttgaactggatacttaattttaaatttattcacaaatttttttctgactaaaagccattacttctttctttctttctttcagtcatttatttatttattttaagaaatgggatcacagtctgtgagccaggctggagtgcagtggtacaatcatagctcattgcaacctcgacctcctgggctcaaaccgtcttcccccctcagcctcccaagtagctgggattacagacatgtgccaccatgcctgactaattttatttttagagacagggtcttgtggctgggcacggtggctcacgcctgtaatcccagcactttgggaggccaaggtgggcagatcttgaggtcaggagttctggagcagcctggccaacatggtgaaaccctgtctctactaaaaatacaaaaattagccaggcgtggtggcacaaacctgtaatcccagctactcaggaggctgtggcaggagaattacttgaacccgggaggcagaggttgccgtgagccaaaattacaccattgcactccagctctgggcaacagagcaagactctgtctcgaaaaa

SEQ ID NO: 43551 - DNA, 1195 bp, Homo sapiens
tgggatcccgcgcttccgagactcgcagtctacgcgagctgcctgtttttttcctgcttggacgcgcatgagggccccgtccatggaccgcgcggccgtggcgagggtgggcgcggtagcgagcgccagcgtgtgcgccctggtggcgggggtggtgctggctcagtacatattcaccttgaagaggaagacggggcggaagaccaagatcatcgagatggtgagtgtggaggctcggcgcgcccagagcacgcgaggggccggctgggccgtccgctggcctcggcagcctgtgctgggccgctgttcggtcgcgacggggagctgccggcgtcgcctgtcaggctgggatctcgctagctcgggacgcgcagcttgggggacccggccgccccgcgtgcggccactccgcgggcttggtgaccagggttgggtccccggctgcggcccttggctgcccgtggtctttgttaggtttccgtttgaaggaacaaggcagaaaatagatgaatcggacacaggctactttgtgctgcaaaacccgtttctctagagataagctgcatgtcctgggcaggtggctccttctctccctgccttgctcccgccctccccccggatccgcgtcaaaccgttgccgctaatctagttgcaattcccgcagaggactagttttatgttggggctgccgtgagttagattatgaaaatgtgcaatatctaaaattttacaagaatggcaatccaggagaaattcaggatagtttattttgtatttgaatgtattccttcttgtctcaaaactcccacgaaatatctttgttttcatcttaactcccaaagctcttgtatacattttcgaatttaattttttattgaagagggtgtctcaagaattccctttgagatacattataagtaattgtttcaaaaatgaggatatttagtttcgttttgtattttaattagaacccactcaggaagacaattcttgcacaaacttgcacgcttatgtatttcctgaaatgcataatcctgggtatacgcctgaccgtgtgctatacatgtgaacatctagggtcagatgatttatgatagaaaaaaatttaaaatctacactaaataatatcattttagggtgtaatacttggaatttctgagcacctgcaatatgttccaactgacgaaagacacga

SEQ ID NO: 43552 - DNA, 1048 bp, Homo sapiens
aagctccttttccttgtcggcctcacccggctcagcccctcggtccatcctctgctggtttcttgagctcagcagctcagagagcagtaaactctgaggagatctgacagctatccagtcccgctccctggtacaggcatccctcctgcagctccctggccaaggtgccagggtgtgtgtgcacgagggagacttagagtggcaggccacggccaagaaaacttgctgtttcataactctcagcgaagaaatattctttaaaaacatgagtctattgtaaatttaatattcatagaaacttgaaaaaaatccaaaagtttgaaaacacattaattgtaaatgcagttattgagtggtaaaaatgtacatcagagatatagcatgtgtgtgactgtaaaacatgacagggccttcagggtataataaactattctagcataacaggccatttctattattccaggaagcctggtttactttaattctatattttgaggtagtgaaactttttttttttaatctcagaatcttatttggagctccccagtcattgctatataaggacagatttttctgcttcaccagtaacttttctctaagaacagctacattgtttttggtatagttcttctggtacatttgtttcctgttttttcaatcaggtgtaacttgtctttttttctagttttgaggggtaactaagatgatgttggcaccggaagcccaggaaaaagccaggcaagggtggctccaaggggagcaggagagaatcccagcgctcttgccatgctgtttatacctgttcccttttttaggaagatgagactaagccagaagattgcataccagatgtaccaggcaatgaacacgccagggaatttctggctcatgcaccaactaaaggactttggatgccactggggaaagaagtcaaagttatgcagtgtgagtgtgggagagtttccctaatccatgcaacttacatgcctcaatttacaaagagtgtttacttcttttatttaacttgttctcatcacagccctcttac

SEQ ID NO: 43553 - DNA, 2481 bp, Homo sapiens
gaaggattccaaacctcacttcaccactgtattccagaacagtgtttacaaagtcctagaagttgtaaaagaatgactgctacatgacctgctgcctacggagaactacatctgtaatggttttaatgttttgctaagtcatgtgttgttcatatcccaaaaacttttataggtaactgttttcaaatagaaaacgttttatttggtcaatttgaatgtcattctaattataaaaatgacttacacctttatcaattggttactatttcaatgcaccctttaaaatttgctatgcaaatgagtatatgcttgtacttgactttaatatttgtgctaaagtgagcaaagctacctgtataaagaaaacacagtgggttgtgacaaggatgacatgaaaatacaggacaattctgacaatgtaggggctgattttatagtgtaagaactattaatgccccttgcttcttttttctgcctcttgctcttgtcttttggacatttcagtgattgtaagttcttcggtcatgtcagcccctgtcatcaacttgagttacagtagatggggcagacatggagtgtttgctatatagaactatctgtttgttttacttccttgtgcgctttttgttctctgttctcttgttaatgaagcttttcctgcccattattaatccaaactcttggaccttgtggttaggaaattcccttaacttccagccatatggcattatcgtgtctctttctctctctctcttgctctctctcttctcctcttccccatattttctgtcaaataagtactgtttactcatttagttgcttatcaagtacttattcttggttttaaaaaaaattaatggtaactgtatttttctcatttttagcattattcaaatgtttatattttaatacctttaaaccactttaaagttttttcatgtttaattatagttttaagaaaaactattttgaacaaccccaaatatagtgcatctagaaactaatgtatatttgattagacatcatttatagtggaacagtagactgtagtacatggtaatttttcttttactattaagatacaataaaacatgactaattttgctgtcaaaaatgtaaagaataatgataaatggagtttttatattttacttttaagattgcctgtctttaataagacaaagccttaagccttatgttataattttggttctaaaaaccatcatttcagtataaggaataagtatatttcgtcctcctctttagtttttttcttcctatttatttttattttgaaaaatttctacaccttctttgaattccttgtatgaatttttgtttcttagaagttaatttgtgtgaaatgagattcttcaaaacgatgaaacctcatagctctgagaaaaggttttagggttttaaattctaagcaaagcgtgactatggctgacagactacacatttaattatacagcttctctttcttaaccacaggcagattaacctcattgtggattgtccttcagaccttagtcctcaggcatggtttctggtgcccactcctggaagccgctgttccctttctaccttcttaccagagcccaagggcaggcctggtcccggggaagcagcagcttgctgacataagtcagctgcaaaggctgaggagtgtgccctcagagaagcaccgccccccagtcttgtgccagcgcctagagccgcagctcccagggatgctccttccctggaggcagcccaggagagggactctggcagcgttcttcagatttgtggccactgtttctcatttgctggttgactgtttttatttcttaggcttttgctagttttagaaaatagggaagcagcccttgatttgtggattaaaagcaacatttgagcgatgatgcacaacagtccaggaaaatgggcggtggacacttgaggctgaggatgggagttgacatgagcagggagagggaggtgcgcgctgcttatctgtgattgttgctcacctgagtgtggctgattgtgtacatccagcagttacaatttttaaaaattatacttttacatttattttatatttttctcacccccagtaatttccttccaaagaagttcacatgtaataagtagaaattctgtataggaaaaaagcattaaaaatactattataactgcttcatttgctgggaaccattaaaagtaatataaattagctttttccagaaggatccttttgtagcagtgtttatgaatgtaacccccagcaaaatatggctatatattaggggagccagtttggagcagaggcctgaaggtccctgctatgcagccgtggccacagctcgcagcccaagcactgtggagcatccacacctttgatggcaatgcagattggtagcaggttccataggcgtacaaaacagtattaaagctcagtgttttgcatattgttagcatttacaaatatttttg

SEQ ID NO: 43554 - DNA, 1023 bp, Homo sapiens
tttaccagcctcagctgcttctgcctgtggccagagtccgggagacatatctgattcttcacgtcagtgcagaagtgacacccagtgccattgactactcctccccctcacccctggtcatatgcagacacttatgcatgagggctgagcacacactttctgaggcagggtcagtgttcccttttccttacttcatcccctctctggcgatgaggtcgctttttgaagagaacttaaatgatctttttcacgaactctacatttaatgggggctgcccagagttcctgtggcccctctgatctgttcctgatctcctccccctcttttgaatttttaccgttgtctctacccagttcttcattgtttctgagcttttgtgagaagagcctggacgtccttttgtagacataagtagtcagcagaaaatgccttttcttccacataaggaaccagctagtcagaggacaataccttcatcttccaattttctgttctctgttatcttctttggtcattggaggttcagagtggtttctctgatatctgagagatttttttaagctgctttatttctagatatgttccagaagccctgagggcctggatgattagtctgtatgtcaaagccctttttaattttgcttgatgtccccctttacatctggagtgaatagtcatcattaacacagttaatcttcctaccttctcttcccgtgatccaaccaagttgcctatgaagtattcttaggctctgtagcagaatggaatagtgttttgtattagttttccactcttccactgccctctacctgttttaaggaaaagttgaatttcttaaattttatgccagttttgcttccattattttgcatgatattttcttattctttattttaaaaaaatcaagcatttgctgcttatacaggctggatttttggccaaaaaacacatcttaaataggctgtgaatctaccatctcaaagttttccagctacttttttttttttttttttttttttgag

SEQ ID NO: 43555 - DNA, 1064 bp, Homo sapiens
aataatttggattgttgagaaagtatctttatgtgttaagatttttgtttaattgagtgcattctataatttatcttatatggttgtagttaatagtaatgtaaccgtttaactcagcgaagtgccaggcatgatactaggtagtgtaaagatgaattatacacagactcagccttgaggccattgcattctagcagaggaaactggtatgtgtgtaactagctatttaggtgctgtaatcgtggtattatagctaggatagctggataagcaatacaaaatgccacatttgaagtcttttgattttgaaggacaaattacagatttttaaggcaggaagaaaggcacagaatcattaaagcacttggggttttaggggattgttgcccagtgcatctagaatgaagggtgtgtggtgggattgactggaaataggccagtgtgggctacatgttgtgtgtaatgggaagtcatggggcttttcaagcaaggggatgtgatgcttagaggtgtatgtttcgaaattgacttcaccccctaggatggattgtacttgtggggcagggaaaccaatactgatgacttcagcttccggaaagaaactttaaaactcaaaacgaacccttgtaacagtgagaaatggctagtaatgttaggaagggattggaaatagaacttgtcaagcttgatttgaaaactttatccagatagatttaaggagtgtccttaacttctttttatgtcattttgtcacttgagggttagtaatgccaaaagtctttagcgtgctttaggtacagatgaacctcaatttaggagtaggttgaatttttaagttttcacttactcaacatgataatgtgtatcattttggacttagaatacatttcttcggccgggtgcggtggctcatgcctgttatcccggcactttgggaggctgaggcggggggatcacaaggccaggagatcgataccatcctggttagcacggtgaaaccccgtctctactaaaaaatacaaaaaattagccgggtgtggtggcaggtgcctgcagtcccagct

SEQ ID NO: 43556 - DNA, 1069 bp, Homo sapiens
accatattaattatgacattaagtgtaaatggacttgtggtaggtaggctgaataatgagccccccatgatggccatgtcctaattcccagaaattgtgaattacgttactcacatggaaaaaggaaatttacaaatgtgattaaattaatgctcatgagatgtggatattatccttattatccaggtaggacaaatgtaatcacaaagtctttataaggaggaggcaaaagagtaagagatcaaaaaggcgatgtgatggtagaagcagaagttggagtgatataaggccacaagccaaggaaggaggccagcttctagggctggaaaaggcaaggaagtggattttcttctagagcctcctgaaggattggagccctgccaataccgtgattttagacttatgagctccagaatttgaaagagaataaatatatgttgctttaagcaactgtttgtggtaatttgttatagcagcaataggaaacgaatatagctctaaacaccacaaatgaaaaccaagaattgtcagattgcatagcaaagcaagaccctactataggctactttcaagaaatttacttaaatataaagaaacgaagaggttaaaagttaacagataggaaaaggacatgtgatgctactactagtcagtgaaagctggggtggctgtaataacatcaaagtacatttgaatgctaagaatattatcaaggttaaacaaggaattttaaatgaagaagggatctatatttcaagaggatgtagcaactctgaacatttatgcacttagataagagagcttcaaaaatatgaaacacaactgatagaactttaggaaaaaatagacaaatctacagtatagttagaaattttaatagccatgtctaaataatttgtagaacaaataaaaagaaatttggcaagaatgtggaagacttgaatgacgccatcaaccaatatgacctaattgacatttatagtacacaccaccctagaacagcaaaatagacattcaagcacacgcagactatttatcaaaaaagaccattttctaggccacaaagcaa

SEQ ID NO: 43557 - DNA, 1035 bp, Homo sapiens
aaaaaattattttggttattctagtagttgtcagggtaatcatttttaaaagtggatttttggcctattgttagaggcaaatgtttaaattatttaaaagttttaggtcttctgtctaggagccagggcttggagtcagacaccttagaagtgtacctgatgctctctctgttctactgtggtgaactggcatggaaaccactgtggtgactgagcatcccatatgcttgaaattctaagcaacatccaatgcataagtgatagtttgtcaggattttgtaagaattcccactacggtcaaatcacctattgtaccatattttggtgaccatccccatttctcaagattctgtgaaggtgcttttcctacctcttctgataccgtggatgtccattgtctaagtgttctacttgatacactaaatttcaattcatttatttgtcagagcttctttagatgaaattaagcattgaaagatgtgttttcactacattcagtctctgtcagaatatattctctgaaaactgtgtgaattatgagaagaaaactgtatatcctaagctgctctctgctacccagtacaactttagactatcttatacagtaatgagcagtatatgcaaaattaaattgctgtaagttttattacattcaaaatataagtaggaatgtggaaactgccatccccaaaatagttgatgctgttttgagtcatgtatatcagtgttccatccagtgagtattgagatttcaatttgctagtaagatttttttagtctattctattatcatttattttaaaatcttttaaactattgtttaaatttaaagggctcggacaaaaatagtttattctacatatagtcgaaaatctgccaaagaagtaggagagaaattgttggagttacatgtgaattattatgttttagaagaggcatggtgtgttgtgagaactaagtgagtattaaccctatgctatctgatatggtacatttttgagcaacaaatgtttcactttattacagtagtcctga

SEQ ID NO: 43558 - DNA, 1029 bp, Homo sapiens
gtcctgtttggcttgaagaatctataagaaattctggggttctatcagtgttatctaacatacaaaagaactagataaattgctagaatattgggcctaaggtacttctacaaacacctcacttagtttttattatgagtgtatagccttaaaatatcataatgcctgttttcctgagaagaatctatatatatcatgctaatagggcttccctgtctactaaccatgtccacaaaaggcagccaaggatgaaaggatttagttctaagatgtttcacagttgtgatttgtttattttaatccttagtagtaaattagtactagaaggatcaggtatatcttccttaattcttcccaggggagagaaagtcccattttcacctgggccctgtaatgccaatatatccgttgctttagaaacaatcggagatgataattctgtatacatgtgtgctgatatcaaagggtaattcacgttggtttgagtaacaaggtgagaatttattgttgaccctatagtactcttcatataagaactagaaataaatggtttctttcgtttcagctctttggctggctttttcgcagagttcgttttgataatgttatctttggcattctaacagtgatgtcaatacaaggttatgcaaacctccgtaatcaatggagcataataggagaatttaataatttgcctcaggaagaacttttacagtggatcaaatacaataccacatcaggtgtgtaggtatttggttatatgctagttttatacaaacatacagacacatttgtgtatactatatataattattgtcatttctgatatatgtatgtatgacagatttacagataggcattcatactctcacagactttgagcagactattgcaatgtcaatcaattaaacccttccaaaaggcaattttgcaccccctttaagcccctcccagataattatcaaagaatttaaatcagcaccaggaaattaatgatttttcacaagttatgtcctttaactctcagac

SEQ ID NO: 43559 - DNA, 1062 bp, Homo sapiens
ccttgaacacagtgaggtaaagctttcattttaatctctggtagacttgtgtattaaattctagtttgagggtaattgacaaaggtataaccttgctgctgatgcaccatcagtagtgagttgttcagcatttgtgataaatttctgccgatccttctcactctttcatctgctgttacttttgaatagtaataaggatttaaaagctagaaggctgatttatgactatagtacagaattaaattaaattgcattcatttaacaataacaagcatttggtttctagcctgctgagctaatcagctacagtccattagggcaggcacccttcgccctgtgactggtggccatctgccaccatgtagatttgctggtcagtaagtgacaagctcagaagtgttgaaggatacaaaagatactaaagtcatgttcctgcccttcagtatgtgtaattttacaaaggagacaaataagacaacattttatatggtgtaaaattattttgtggcatacaaaggaaaagatcagtgtgggctggaaatatttcctatttgatagaactttaagtgggtcttgaggtaaaggtcaaatttacaggagtgggtaactgaatttgaacttaatagagatagtttatgacacatgttgagtatcccttatccaaaatgcttaggactagaggcgtttcagatttcagattttattgaattttggaatatttacaatgtagttactagttgagcatccctaacctgaaaatccaaaatccaaaatgcttcaatgagcatttgttttagcataacctttgaacatcatattggtactcaaaagtttcagattttggagcattgtagatttcagatttttggatcagggatgcattagtaactttgtcactttacagtgaggcccactgtgttggtcctccacctcctcacaccacctcctgctctccctagctcctctgcctgctccattttcttgccaactgcacttattgccttacagtagactatgtaatggatttatttatttgttatttctatgtattgtctttcatta

SEQ ID NO: 43560 - DNA, 1032 bp, Homo sapiens
tatcttccaagatattgaaacaagttcttttgcatgtgaaaataaccacctaattctttcctacgttcatgtaaaattttgttaatatgacttatgcttcagacttaaaggacatcagcttgaatgtatgttatagttgttgttttattagcggttgctcagctcacttgactttcttcttaatgacctcaaaagatggtcactctctaatattgtagtaaattaagcctttgagtaaataacatcagctgtttaggctgctggggttcaacattatcaggtgtttgtatataaagattaaaatatatggcagctggtaaattaattagggtccgtgttatgccagattatcctccccattaacttttgctttgaatatattcaccagtacctctcagtgaatgataaaatgttttcatttcaacaagcctaactcatgggattcaataagtctgttcaagggatatttaaaaataggttacacttttaaacaagtgataatggactcactagagcttaacatttctctttgatgtcagatatagttttataatagaactgcaagtaatattctagtcaatttctccaccgactttagcattcagtcactgagaaaaatcctgtttggaccacattattctgaattaggattatacagacaggcagaataaattggaaaaaatataatctaagaggataaaatatttttacctgttttagatatacttttaaaggcacttatatttaccatcttctatgtgccagacactattttagggaattcaaatgcattttctcatttaatccttatagtaatacttcttattgttattctctgttttatttttattttccatagcactattatcaacatctaacatactacatgtttttcttattctctcccccacttttcaccccaactcccagtcttccctttaccctcatcactcattagacagggaattttttttttttttttttttttttgctatctctgcaattccttgttcatagtagtgactcaatact

SEQ ID NO: 43561 - DNA, 1023 bp, Homo sapiens
ggctggagtgcagtggcataatcccagctcactgcaacctccgcctcctgggttgaagtgagtctcctgccatgggctcctgagtagctgggattacaggtgtacaccacgatgcccagggaatttttgtatttataatagagacggggtttcaccatgttggccaggctggtctcgaactcctgatctcaggtaatccacctgcctcagcctcccaaagtgctgggattacaggcgtgagccaccgcgcccggccagcatcagttttctttgtgcatcttttccacaatcctctcactgcagatgttttcagtctttccctctgcttggtatacttttctctacttatagcttcttagtaaccgctgcctgttatgatccttcatcctcccatttctgcctcatgtcttggttctatgcatttttccagtttcagccctgttgttgactgctggattcctatctgtgtttccaagttaaaattctcaaaagaaggaacctgactgtctcaacacaaagtttcttgctagacaatatcatgtgtcaaaagtcagcatattgacgggttgcctgggcttagtgtcaacgcagttccatcacctgctgcctgagagtgaggtgggatcagttgccaggctcatttggtcctgccccttcagcagaggctttagcatcagttgtctttagaagaggctgtgggtaccaaggctggccttctgcttcgtggcttggtggggaggaacagagcaagagtagttagagatccctgaataggatcaggagtgcccagtactaataaagccaatatttgtacaacactctaacatttgctaagcactataaagtcatgatctcattttgtgcatacctgggaaacacttattctactatagtgtgattgcctctttccttgggtctctcttacaagcagaccacagggaccctgaaggcaggaactatgtcctgttattgtgatatccttagcaccaactctacagataatattctagaaatatttattaa

SEQ ID NO: 43562 - DNA, 1016 bp, Homo sapiens
tatgatggggcctgagaatctgcatttctgacaagctcccagatgatgctaatgcttctgatgtttggactacactttgaatagcaaggatctacgtaactaatttttttttactcagtctcactatagatctactcaatttagtgtttaggggaatgtggttgagtgaaggtatacttgaaagagtacagagcccagcaatctgtttttaaaagtttttaaacgttccacaagtgtttctaatcaacttggtaacaactgtgctagagtaaaaccatgatgtattacagggatatgctaatcttgctgcatgttgtccagaatctttgttgtattgagagttttataaagcagttttcttaagaagcttgccatagtcaccctatatttagcaattacagcaggccccttgggttaggcacttccagaggaaatgcagccacaggtaaagcagcttagagagtaggatcttggagaacatggtttggaccagggttgtgtgtgaaagcagactgttttactggggtattattgtttgttatttttgaggtaaaggaagcttgagtaacagatagtgataatttctgtgttgcgtatcaagccatggggctgcagtgtgtggcactggtctggatccatgatgatggagctagaaatgagaatatggctaggacctcagaattgtaatgtaggtggtgtaaccaaggagtagctattgactgctgtgctcaacaggacggcataaacactcaggtactttttacttagaactttaaacttaattcagttattaatacagaaaaacaaagctgaatatatagcaaatagaagagaactaatttgtctcagatttcttaaatgtgaagccttttctttcaaaataaatgtttagatgaggctggttgtagactttcataaagtacctgtgaaactatttttgttttcagaaagtgattactattaatataaaccaagatttacttgtaaaaagcagtgttctcagggtttatattatg

SEQ ID NO: 43563 - DNA, 1058 bp, Homo sapiens
ggagttctgcagataattctccagaggacatcagctgaatgtcctttaattcagtgtacttctgacactatctacctggggatagattccacaggttgagggctcaatcccacaagactgccccccttcatatgtggtcccaagcacaggttgtggtctgtgtttttgaccaactggttataaattggggttcccgtgaccccctcctggggttcaattaatttgttagtgcagctcacagaactcaaggaaacatgttacttacatttgctcacttacaaaggatattattacaaaggatacaaatggaagagagatgcataggacgagttcttggagaaagggctcagagcttccatgccctttctgggcccatccactcttgaggaacttcgactcattctactgtgctggagctctcagaactcagtccttttgggttttatggaagcttcgttaggtaggcgtgattgattaaatcattggtcattggtttgtcaactcaaccttaagccactctccctctctggaggttgggggtgggggtgggactgaaagttgcaaccttctaatcactttgttggttcccctgttaaattgtagggtcccccagccaccagttgtcttattagcacactaaagatactcatctttctgaagattccaaggattttaggagctgttcggcaggaaacagcatgaaaaccaaatacattttatacattttacgataccacagtgctcctctctctctctctctctctctctctctctctctctctctctctctctctctctctctctatatatatatatatatatatatataggttgtaagacttatgattttaaaacctgtgcactgtatttgattgtttatatataggagtttgtacatgtgcatttgaggaatggcacactccaaaatgcttccaggagaaactggaatatgtgtaatggttaagtatcttggaaggatagctatacctttggtgtgtaaggatgcctgaaccacagatcttagtatgataatttctattatggctaattttaatata

SEQ ID NO: 43564 - DNA, 1053 bp, Homo sapiens
atcccaccttggtctctcaaggtgctgggattacaggcatgagccactgtattaaagagccctggggcctcttttataaaggcactaatcacagtcatgaagggtctaccctaatgacctaatcactttccaaaggccctacctcctaataccctcaccttgggggttaggatttcaaaataagaatgtgggtggggcataaatattcagattatagcaatgcagaaaattaaaacctgcatttcccatgatgtattacaatcaggagtctacctttggctataggacttcaagtaagggaaccacatatcccggaatgcaatgtatcacatctcttttttcttcttacccattctttttctttggagttatatattatattgggagatgtatttttcttattaacataagtgatgatataatggagaagagagaggtttgacatgaaatttattgcctctaaaagtgttacccatgtgcaggtgtgtgaatgcctgattcttcaagtggtgtaaacattgattctctgaactctagggggagcggataaactaccttttttctcccttttaaaataaaataactttttacttctgatcatagcactaacatattacatattgtgaggaattttaaaacttctgaaaaaatacaaataataaacatcagtgtaacccatcaatcatctgattcccagacatgaacttcagcctttcagtatattcctccaagcttccctgtgccttttaaagctactgtttcctttttccaaaattgggattagactcaaaatatctggcctgcagttaagaagttgtataaggaagcagaaatcattgtaacaaaatattcactgatgaagtgattgactcattgccattcaacgtgatttctttcttcaagcttgaacttatttcaccaattcagctactgtcgctatctctatgctgtaggatattataatgcagatggggggaggttacttcttaggatcagtgaaggatgctgcagatcactgataagtctgtctgtgttggaccagttgaaaaactg

SEQ ID NO: 43565 - DNA, 1033 bp, Homo sapiens
atatgaataatggtgctattctattttgtgtggcattgtaagtgacattcaggtgaggagagaacaattactcattttgcttttatttcctctttgctctagattccaggtctctgaaaatcaatttgttttgatgcctataagatatgcaaaggtttatttaaaatattctcttcttcaactgtatgcttctggtgaagaaaaatcttttaaaaatttaaaaatatattctcattctataaagtgggaaagattcagaaatgattgatttgtgaatagagataataacaatttagtaaaaatatgggtttttttgttcaatgtttttaaaaaggcaaaaatgtatttggttgcttgtttcacatcagttttagcaagaagtgttatcctacctgacagtgtgtcttgtggaactcaagagtagattccgttatactattttctaacaaggtaatggaggagttggccaagtacattttaagatgtacacaaagggaaggtccaaagtcagattcatgcggactaggaggctgagacctggacaatagggataggtgtgtgtacattaagatgttctggttctaggaattttaaaactgatttatgaaaatttgtaatgttacattgctttctacttatgtcgctattcttagagttggaaggaagcaaagaatatatttgatatctgtgggcaaatctgggctggatttttagggaagtggctctctgttccatgagttaacctcaagaatgcaaaatataccaactgttttcctgctaacaatcatccctacctaaaaatctattatagaaaaatattagttgaatttttaagatttaaaaacaatttcatgtatttctttgttaaatgcaaatactccagagaagggatatcaatgcctacctggcaaatgggaaaaggtaattagatagtgaatagaaaggccaggagattccaaagtagaaggcacttaaccatttgtttttccagttagaaaagtagtttatattcagtataaaaacttagaaaagt

SEQ ID NO: 43566 - DNA, 1094 bp, Homo sapiens
atttcttaacctaaatagcaagaaagattttttcacagatcagagatggaaactcccccatcagattatatgtccttggaagaagatatgaacttgatgactcattgaaaggctttgttgatttgcctttgaaaacttgattaacatgtacattctcaggttcttaccttaacaaagtcttttcaacaaaacaggttgaatatctgcttttccccttgtaggtggtgaaagaatagtctgcggtatttaggcatttataaatatcttatcctcatagcagttaccctcttattttcccactcacccttttatacatccagaatactcccagccctgataacacagaaattcagccgagaatacaagaggggtataaggtgtggggtgggtgtgtggaggcaaggagggtcagataagttacaggtgacaacttaattctttgcctggctgtgtcattcattgaaggcacagtcagtgtctgagatgtatttattttctaggttctgcataggtagaatataatattttgaaatattttggtttgtttctttttattacaattctataatattttgaaatattttggtctgtttctttttattgcaatctggtcctagtctgcagttcacgttacagaaaactggattgttggcaaaagtacttttgctcctttctgtctctcccctgctctccacactgctgtcagtgtcttcctacgatgcaaatttgatcatctcacctcttcaaaaaaaacttcagggctcctcataatttaggataaagttcaaaatctttgtcatggcctgcaaggccttataccaaggtcaactgtattctcccacagcatcccacgtaaatatcggtcacagcatttatccactgttaccatccttcagtttcttgtttgtctttatccacagaccaacctccttgagagaagtgtgtttttctttgtttttcttatttcagctattcccagaattgagcgcagttcctggcactgaataaacaagtttcccagtgcctgtccatcccaggaaccctgcagtcttgtcaaatcaagctctatttcactttctttagtttctatatgc

SEQ ID NO: 43567 - DNA, 1042 bp, Homo sapiens
aggatctgagatcgaaaaggcaactttaattggcattagaatttttaaaaatgtgatttgatgtagatgctactttcatcttaaaacacaattaaaatgtcaaaagttacttaaaagtaccatacctcctaaatatggagcaaggtttctcaacctccgcaccattaactttgttgttgttgttgtttttgagacggagtctcgctctgtcgcccagggtggagtgcagtggcgctgtctctgctcactgcaatctccacctcccaggttcaagcgattctcctgcctcagcctccgagtagctgggattacagacgcatgctaccacgcccgccggatttttgtatttttaatagagacagggtttcaccatgttggccaggctggtctggaactcctgacctcaggtgatcctcacacctccgcctcccaaagtgctgggattataggcatgaaccactgtgcccagcctagcactgttaactttggacaagatagttcttccttgtgggatgctgttctctgccccgcccccataattgtgacaactaaaaatcacaattgggcaggggtgaggggtagggcaacatctccttctccatgagaatcaatgccttgaagaaaaatatagattctgtcacagtgcacattatttcattgagaaatcacatagattaaaattattttcccaaaccataacaatcattgtagagatacaaataaattaatattagtattagaaagtagatactatgatcaattagtcatgcagagtgatctcttgatatgtcaacatgttgagttagaagtttgagaagagatactttagaaagtagtagacccactcctcttgtctcatttcccttcctataatttagtggcagtacatttatgaatccaaccctgtatgtttgcaaaccctgaggtagacaatttggcagtgaatttctatagtacaataaagttcaaatagccatttgagaccatgcaagcctctaatttacaattcctttaaaaataactgggtcatttttcagactac

SEQ ID NO: 43568 - DNA, 1070 bp, Homo sapiens
tgctggtttctttgctcttctgtcttgtataacttagtccagtgattcctgacttggctgtgtatcagattcactttggggagcttctgtgaaatgcaaattcctgcaggggaatccagaaatcagcaagcttaatagactctgcagttgattcctaggcagcccgatggccccctcccaagtttggacctacccttccctgggaattcagatcatggctaagtggatattactctggggtggcaagagccactcacagtgcctaagagagattaagcattagaagacctggattctagttctggctccactaccaagcagctctagacaagtgtctcctgtatggtcctcatgttcctaggcggggaaatgctgggattgtccaggtggcccccagctctaaagctactgtggtactccttgttatgtaaccaatatgctgactgtaaccactacattagttatacttgaactttgttgtcacctgttcttgagtgacatatgtataacctgaactgactattccattttgtacaagagaattatggaaatgcccacaggccttgttataaagggctcctggggaataggcaacctcaaagcacggaccaaaggacttacctctcccatgcaggtgtgacgactctcagcttttggacagagaattaagcaaaatgggcttttctgtttgtttgtttgtttgtttgtttgtttgagacagggtcacccgggctggagtgcagtaacgcagtcacagctcactgcaacctctgcttcccaggttcaagtgatcctcccatatcagcctcccaagtagctggaaccacagacacatgccactacacacaatttttacacagacacactactctacactataccaatttttttttggtagagacagggtttcaccatgttacccaggctggtctggaactcctggactcgagcaagctgactgctctggcctcccaaagtgctgggattacagacatgagccaccgtacctggctgtgaaatatgcttttctcattctgcatgtttttctcctttgaaatatcaaccatcag

SEQ ID NO: 43569 - DNA, 1034 bp, Homo sapiens
aagtggtgactatttgtcacagtgcccttcctacctctgaattcagtgtgatgtgacctcgggagaggaggtgtgagcacgacgtccagactcggacatgtctgtttcacgtctgccgggaagtaatttttatgctgggagctggcttcatggcgtgggattctaattctggggatggcattttgtatgtgtaggaagactgtcaaaacctttccaatgggaagggacaagaaccaatttgagaatcacatggttacataagaactggccctgtgcgggcatctctgcatacttcctgcacttgttcattctgaagacgagagaaagaggagcaggaagaatcttccatgaactctgcaaacctacaaactttccaatgagaagtggtgcacactcccgagatggtgcttgggacaacatggttaaaagggtaaggggtatttattaaccctttgctttcttgttattcctgtccctcctctttaaatgtttacattaccaaactggctagactgctgagaatctatcatttttaggttgcctgctagggtttctactggtcttatcccagtaaatagctgcagaaaatagctgcagtggccacacccagcagcagtagtgtctaggggactctttgggacctgagccagaaagttcccatatgcagtatctcattctgtctccacaagacacaagacacaaggattattatgtctattttagagacgaataaaaagaggcttacagcttcagaagatttgaaacctgcccacaatagctgcagtgtttcagcagcacaaggagacatatgcagacttaatttttgttttcaagttgtttagtcgcaggttcagacactcatgggagcaaggcagtgaaatagatgaaagtagcagatcttagtgaagctttatttctagcctcccatgccaaggacaccccccactcccttggagtccttgagaaagccaccaaatgcttgtctcactgtggcctttccacactcaggatggtattcccactaatgaagacca

SEQ ID NO: 43570 - DNA, 1034 bp, Homo sapiens
tgcagagagggaagtagagttgccttttggagtgagggaaaggttatagaagaattttaaattcaaagggctttgcaatatacagtcagtcctcattattcatggattccgtatttgcaaatttgcctttttgctaaaatttatttgtaatgcccaaatcaatattcaacatgcttttttagatcattcttggaaaatgcacagtggcaaaaaatctgagttgcccaactcagatgttccagctgaagtcgaacaagacaccaagccaccaccctgccttcctgtttcagctctcatgcttcaaacaggtgtccctttcccagtctgtctaggccacgtttttctcatttttgtgcttcctgctttctgatggtaatttcagtttcaaatggcccttaaatgtagtgctgaagtgctgtttttatgttccgaagtgtaagaaggctgtgacatgccacgcagaaaaaatacgaaaatatatgggtttgttaagctttgttgtggcagtagttacagcactgttggctgagcattcattgttaacaaatcaacaacatatactaaatagggtgtctttaaacagaaacacacataaaagaaggttatatattcactggttggcaaaagcgttatggtcagaggctcgcagaaacaatttaatattgttcctaggagcaatggttcagtagttgttaacttatttgcagcaactttctaggacataactactgcaaataagaagagtctactatacttggaagtccccagggagcttttgggcagcagtaaactatggagaggagaatcccagagggtcccgtctgtgataagtggggaagagaaagtctgctcttaaatggtaatgagaggtgaagccggctgggcttctgggttgggtggggacttggagaattgtgtgtctagctaaaggattgtaaacgcaccaatcagtactctgtgtctagctaaaggtttgtaaatgcaccaatcagctgtctgtgtctagctaatcaggtaggggacttggagaactt

SEQ ID NO: 43571 - DNA, 1102 bp, Homo sapiens
agtttgggaacctctgctttaagacagcagctcttgatagacagtcctcctccttacctgtgaggttagtgtagtgttctctgcctttggagatggcctttgctatgtgtgtgttttaatatatatatttttaaattatctgcttattttggaataattttagatttacagaaaattacaaagattgtatatgcttacatttataccctatttccagtttccccttatgttaatatcttaatcttggtacattagtcaaaactaagaaattgacattggtacatcacattaacataactaccaactttatttggatttcaccggattttccactaatgtccttattctgttcgaggatccaatccagggatacgaattgtcacgtttcctcagtctccttccgttttggacaatttctcagtctttccttgtttttcatggcctgatagctttgacaagtaattttatgttgatacaattttaaacacacaaaaattgccaggatagtacaaagaactctgtacctactttttctgaaccatttgatggagccctggaagcaccatcccccttcacccctgaacactcagtgtgtatgtccctaagattgtagccattctcttacataataatcacagtacatttataaaaccagaaataaattgaatactggtataatgctatcgtcaaattcacagttcgtaatccatattcaaattccatcagttgtcccaataagatcctctatagctattttctctctggtgtaatatcctgtccaggatcatgtactatgtttattgtcaggtctctttgatctccattgatctttagaaatttctcagtctttatcttttgtgaccttgacatttttgtagagtacaggacagctattttaggaaaagtcttcagtttggggttctctcacatatcctgctgatcagattcgagttttgtatttttggcagaaatgtagagaaatgatgtgtcctttttggctcatcatatcaagaggtacatggtgttgcattgcctaattcttgataattattctggttttacagatgacaagtgtaaacagttggttaaattataggcctcc

SEQ ID NO: 43572 - DNA, 1057 bp, Homo sapiens
cccgcctcagtctcaaagtgttgggattacaggcgtgagccaccgcacctggcctcagatgtctttactcaggtgctgccttctcggtgaacctttctctgagtttcctgtttaaaattgtattcctgcccctcccacactggtagaggcacaggcttcagtttccttcgctgcttgatttttcttcatatcctttgttgctatatcccagatttgctgctgtatatcctcagcatggggaatagacctggcactgagcagaggctcaataattatttgttgaatgagtgactaaaccactgctttgtagatttgctcttgctagttaccactgattagcttctcagcaggcttccctaatcatctttggccaaaggagtagcggttttgttttggttcatttcctttacttgtcagctgcgctgaagttagttatttatataactgctggtgttgttgaggcttccattattaactctgctatctctattgtctcagtaatgtccagctactgctgagatctgggatagtaactcacaaggcctactctggtctggtaaaggaccaaatgcacatgtttaagatcttcgttacagatatcaatttctcaaaaaagacaagagaacccaatagaaaagggacaaatgtttggactgttcacaaaaagggagcgtgtgtcttttcctctttatgttcagcctcactcacaataagagaaatataattttaaaatacattaagattttatttttcaacctgtcaggtttgcaaaaattcattctgttggtgaggctgggtgtaaatagacaacctcatacaagtccaatggagagaaatttggaaatggctatcaatattaactgcacctatgttttgacccagcagtttcagttctgtgaatctattgtaaggatgtacttgcatatgtgcaaaatcagttatatataagtttatggatcacagtttggtttatgatagctaaacttaagaaatcacccaaatggcccacagcaggggactggttcatcaaataggacacatccacacaatgaactac

SEQ ID NO: 43573 - DNA, 1071 bp, Homo sapiens
agttcttttttttttttttgagacggagtcttgctctttcgcccaggccggactgcagtggctctatctcggctcactgcaagctccgcctcccgggttcacgccactctcctgcctcagtctcccgagtggctgggactacaggcgcccaccaccgcgcccggctaattttttgtatttttagtagagacggggtttcaccttgttagccaggatggtcttgatctcctgacctcgtgatccgcccacctcggcctcccaaagtgctgggattacaggcgtgagccactgcgcctggcctgacaaataaacaaactggaaacttctaatttttcttcaatctaattattttgctcattcctgtttataaatgttgtgccttttctaatggtttgcactttttattgcatctataacacctcattaatcttgtttgagtccaggtaattacatgtgcatagtatcatcttaatcgtgtcatttgttttcagtctgtgttactaaaagaggtaataatctgtattatcaaaataggtatgactaaaatagaattcaatagactctctaagcaacatattctataccataagtaaaatatagaagccatcaaaacctgtatgtttcggccgggcacagtggctcacgcctgtaatcccagcattctgggaggccgaggtgggtggatcacgaggtcaggagatcgagaccatcctggctaacacggtgaaaccccgtctctactaaaaatacaaaaaattagccgggcgcggtggcgggcgcttgtagtcccagctactcaggaggctgaggcaggagaatggcatgaaccggggatgcggagcttgcagtgagccgagatcgcgccactgcactccagcctgggcaacagagccaaactccatctcaaacaacaacaacaacaacaacaaaaagccctgtatatttcaaactttacctaaaacgtgtatccttttaaatgttgcctaaaataatctatgattagactcttttcccgtaacatagttacgacattaaaaggaaatgtgctagaaatattatacccaataatag

SEQ ID NO: 43574 - DNA, 1064 bp, Homo sapiens
cccttagtctgcagcacccggaatggatgtggaatcactgaaggaggtgggttggaaagaagacaagttggatcctgacagtttaaacccaggtgttttgcaaatccttccaaaatatcacttggcttttcctctccatacctcctcccttgcccagttggaaaaaataacaacaacaacaacaacaacaacaacaacaacaacctgcagtacgtgtgcccacatcctcctctggatgaaatagagttgcacagagaaaaggaaagttgatttcctagttattctcccacacatggagttctgggtggcaccatcccacactatttgcatcactgagctacacactctgccaagactgcctcttaaatttaaacacattttgatgaaaatagagaaaggctgaggaagaaaggttaacacttccccataagaggtgcgtaagcactatacatcgtatgtttttcttctggctcttggattaggacagaatgttaattaaaaagtaaaaagctgatcttctgagcagcaattaatttcaggattgctcttctttcatctgttgggtctttgcatttctgaagacgtggtggaaaatatttcctaggggtctttctaatacacattttcatttgattgttttgatctttaggctacatgttgacttaaaaaggaaccaatattacaaaaagaaatgtcattccaaggttctggattctgattatcgctctggtgacacagatgagattggctccaggcatatacacattggttagctggttctgcccaatccctgtctggagttgaatgttccatttagtcaagactgccaagcagcaacataactggattcattagcttgagttctgaaagctcctcttaaaagttgtttttgtattcatactactttaatatttagggacaggctgcaccattttctaggttgcaaaagtgatcactcagttttttttttattaggtgctattttagattcaaaaatattttattttttatgaactgttttgtgcctttgacctagttctcttttcactgggatatgtatccta

SEQ ID NO: 43575 - DNA, 1030 bp, Homo sapiens
gccttctgccaacctgagcctgggcctgcttaggagaaggcagtttgaggtgtaacagcaggcaccttacatatcattcaaagatgacatagccagccatagaaaaatgcttattgtaccataaatgtgtcttccttaagcaatctctttaacaaactatttgcaatccccattgaagctgtccacggcggctgctccaaaaactagtatgtgcttatctcctcatctctgagagagaacaatacatggtatttacgtttgcattaaaagataagtccccttttcctatccacttctcccctatgcgttgcggataaatcactaattaaaactttaaatactgatctgtattattattggatatactgacacaaacttaaaggccaaattaaccaaaaattcattaactttgggatctctgtagaagactttaatttttgaagaaagtgatggagctagttctaacagacgttgccatggcaacagtgctgcctgcagttgagttgctctgggacccggctgctgagggttcatgataggactgcaggcaataccaggagagcagattgaaaaagatgattgagctgaaggttgtgagggggacaccactaaattcctttattagaaaaaaagcgcataaatgtgtcaaatgaaatttgcggtatcaagtgccagctttgaaaggaacgctactagggaccgggggtaccatgagagagcttgcccctacagtcacactgaaggaaaattatgacctgaattgttttaaatatagttcacgtgaagagatttaccagtcaccagcctgtgccatagtccaatcatcttctatttggggccataatgaggatctggataccctacctacctcttgggcttttccttaaaatggattctgaagaaaatgctgtattttcattaaaatgccaaggaacttcagacaagtcaagagctcaagttggatctagaattagagatgggcaagaaaaggcaatggtgccctgcagccagaattcccgctgtatttatt

SEQ ID NO: 43576 - DNA, 1050 bp, Homo sapiens
ttaaatttataatgtaatttaattaagtttcctattggatggttaaataagagaattatataattttccattaaaaaaagctaatgtgtgtcaaccttacccttatttaggagatttgggttttccccccaagtttcccaaatatcagataggtaaggaaataagattgatttatcttttctaaccccaaaatgtatgcatcaaaatgagtgatattcttcaaaatagtcatttctaccatggtaagctatccttgtaattgacttaaaaattacataagaaaatgagtcacattatttactttgcttcttgtttttgaacaaaaataagattacccagtgcactcttccatcttattctaagacttaaaagttattgattcatagatgctttcaaaaatcaaattcatcttcagagaatcaagatttgctacttggaagatattaaaggaatgccccaggctagaaggcaagtccataaggaagagctttataagagtttgcatatagttacgtaggccactgcttcaagggatagcctcctttgaaggtaacacatttttgctaaaagtaatgagccttgtcaccttataggcacatggtgttcaccatacctaattgaagggtttccactctactctgcctaggctaactcattgcatactttgagtgactgggtgtgtatctccatgctttctgctagtatactagttgtaagtggtaggtgcagggaaaatgaaagcaattagaaatagccaaagaggttaactgccccaacccacctctcaccagtcctgaagggtgtgtagaagaatagcatagagtgacaggttgtagttgactcataaagtctgtcagagaaatggtgggagctgttggaagaagcactaaccgagactgagaagcagggatgagattggatgaggtgagcaaagaacccgtggtgcaaattagagggaggaagttgctaaccctgcactcacatgaccctgagagtaaggggccttcttaaattttgtgccctgtctcacctgcctcaccctactcctgg

SEQ ID NO: 43577 - DNA, 1094 bp, Homo sapiens
gctcaaaaaaaaaaaaaactcatagttaccttgatttttcctgttgtttttctaatctttatttcacttatttccactctaatctttatctttcctttcttttgccaatttggggtttcatttgttcttttcttagttccttgagatgtagagttaggttgtttatttgagatctttccttttaatgtatgcgtttatcactaaaactttccacttagtacagctttttctgctacttgttttagttttcatttgtgctgagatactttttaatatccattttgatatctttttggacccattggtcgttcaaaattgtgttgtttaatttccacacatttgtgagtttttcagttttctttctgctattgatttctagtttattttattgtggttggaaaagatacctggtataatttcagtcttcttaaatttgttaagacttgttttgtgacccttcatactttctatactgaaaaatcttccatgtgcaacttaagaaatatgtgtattctgctgttgttggattgaatattctgtatatgtctgttaggtccatttgatagttgctcaggtctactgtttctttgttgatattgtgtctataattgaaattgtaattgaaattgtggttctatctataattgaaagaggggtattaaggttttgtattattattatattgccgtctgtttctttcttcagtttgtcattttgctttacatatatagatgctttatatttataattgctgtatcttcctgagggactgacctttttatcattacatgtccttccatttctcttgtgacagttttggaatttagatttattttgtctgataaggacagccatccctaatcttttctggttaccatttgcatggaatatctttttgcatctctttattttcagccaagtgtgttctataatctaaagtaaatctcttgtagacaataaatagttggatctttttttatttaaattcatttagccactctatgtcttttgactgggaatttaattaacttacatttaaagtaattattagtaggaaaggatttactgttaccattttgttcattgttttctgt

SEQ ID NO: 43578 - DNA, 1052 bp, Homo sapiens
atccattgacattaagagcaggaaacccctacaagagagtcaaaggttaaggtcaacattttgggaaatgggaatgggagtgtggaggagggacgtcatcctcatctaatccaacagtctggctcgtagcagttgctgtgttccaagagtgtactatggtcctatctgctgcaagcaaggattcttgcaaatcataataaatattaagaaatgtatacctatggttcactttacataaaccttatgagggggattccaagaaataatacattatgaatgtagaataagtctttaaattggcaattttgaaacttgattctgtctagtagtgttaaccttgctaggagatccaaatgttaggttatttgaatactactcacttgtatttcctgatgttttccagtgtttgaacatttgctgtaagctatagttgtttataaatactttaacagaagaaatgcgaagaaaagaagctatgaatattgttttggaatgcttcattgggaaattagaaatggataaaaaatctgaattagcaaagcaatataaattataaatttcaataacaaaaccaaaatcagggcaagtaaacaaaatattttcattgcaatgaaaaaaatcctttcgttggattaaaaaagattaaacttaaatgaagcagcaactgccctaatatccaacttcaagatgctgtttggtgcagtcttaattaaccaatgtcaatgtgaaatgaaagaaattttttctacatttggaatgtttgtcatgaaaaaaaaaactgaggctattaagtaggacaattggtgtttggtatatttaacatttccattttaagaattaataacttttaaatattaaatatggtatttaaaaatttttttttggtggggatacggagtcttactctgttgctcaggttggagtgcagtggcatgatctcggctcactgcaatctccacctcccaggttcaagcgattctcctgcctcagcctcctgagtagctgggattacaggtgtgtgccaccatgcctggctaatttttgtatttttt

SEQ ID NO: 43579 - DNA, 1547 bp, Homo sapiens
gggaggtgtttagagctaaaaatagcaatgttagccaggtattgcttttctcattttaatgggtcacggcttatcttttgttccttttagtatttgcataagcttttcaagagagaccaccataaggggcagcgttaccatgaaaaacagatcagtctttatgctgaatatgatcgaccaaacttacttccctttctccgagacagtacccattgcccacttgaaaaggtaaggcacagactccccgacttgtacactttggatgaagaggttgtcattgatggtaagttgtttgtctttcttctctttctatctctgttcatctgtccctttccagggggaagactgttgctctcaaagaagtaggtttttggctgggacattctgtcaagaaaaggagatctcattggattagactttggtgaagagctgaagcatttctgtgacaggtttaattggaagaacagcttaatccagggtctaggacttaatcaaccatcaggcaaaaatgatatattagaagtctcagtccatctcccaggatcagagtgacacctcagagtcaagagcctgggagggagacacagactgtcctaagccagaagcagttgctccagtcaggaatcaggtttgataaactgaggtcatagcttaggtcctgcatcctatcttctttaagtgtctaccctatgtttttctttgtttctcctacatcctacattccactataattatctgcttactagtctctgtctcctggaaattcttcaaagacaaggaatttgtcttactcattttggtaaatctagtacccaccacacattagacatttactaaatgtgtgttgcatcatgagtgagagaatgaatgaataaattatatacatgcaagatcctagttcgggctaaataaggactagtaagttttatgagactgctgtttcaaaataaactgaagtacttaactatatatgtgctaacaactgggcagcctaaaagccaacagtattatgtcctacagttctcaataccatctaccactaacatctacaaatgtctgactaaatttggatggccagatacttttgaaagtcagctgtgtggaccaacaaaataaaaaacatatttgacccattagagatatgtgcaaagaagctggatgataacacagtttatgtacacttacaacttccgtgtatgcttccttagcccatgattattaaatgcattggagtactgtgaaccaatttagctcaatggatttttaaagtccacaattattgaaaaaaatcttgcctgcctgttaacttataaaacgacattagcattttatatttggggccctaagacattttctgaggacttaatttggaaattcattatcttactctaaaagtaaaaacagatactaccctcttctctcaacataggactttataacctggcaatagagtgagaatcttattctttgaacagtgctccttcatttgtttctcacttttcaagagaacattgtatatttcagagaggatgtggcagtctcctgaa

SEQ ID NO: 43580 - DNA, 1031 bp, Homo sapiens
ctttagaacactctgaccctcgctagatgttgttattctagttgtttggcattcaggaatccttttcataatgtagttattctgtgaaagcaattcaaagttgatagagaacttttaaagttgtgtgtgtgcgcatataaagtaatttcttgctaaaacaattcatataatttatagaaacaaaccacgtatatactttgactcatttatccctcctaacctgttttccagaattttaaaattaagtgaacttccatcttgaccgacttattactattttatttcttggtgttcacgtatccagcatgtggggtttcccctggtttgaggtgatgctcatgtccaggacatgtggaatgttattttattgtgtgacaaatttgaataacctaataataaatttacgccccctaatgagtggacccagccacagctcacattggtgcttgcaaagtgatgcaagctgtgtgtgtgtgtgtgtgtgtgtgtgtgtgtgtgtgtaaaagaaatctaattacaagtgctcatgacagaaataatgaggtttataaaacagtgttcttattcaaaaaattgaaattttagataaacctaaaagtagaaccctaaaggctccaaaaggattaatgcatttttcaattatattgtactgtatttagagatattgtgtgctatattaatctccaccaacttaaacttaatttagataggagctagagctacgtctttttctcaaagatgctttagccctttttaaaatactgagtcaagtctttagggactacagatttacgaagaattacgtagctccaaggaagttcaggtagagaggctctgcttgtctggcagaggatgagatgcttatgtaaaaattaattacattttcctcatatctagtctcccctcatgcacccccttccattgttctccagagctcgttttgcatatgttcctgtggaaaaaagatgaatgagctgaaactaattgctattctagaatgtgatccagatgtaaggaatcagagtcttctg

SEQ ID NO: 43581 - DNA, 1081 bp, Homo sapiens
aattatgagtgttctgtgaaaatgatggagaagagtacaaacttcctttacaaatgctgaagtatgttataattttcctatttttaaagtaatgtaatttaagcatttaaaaaaatttattgtttttatgattctgttacagttattgcacatgattgaactcttattttttcatgaaacttttaaaaatcctttatcgtcaaagttaccctgttgatttcatatctggaacactttttattgagatggaaagaagcatgacttaaccttagagattgtagatgttttctcctgaatgttttaggatgtatgtctggtcagtactgttaaggaggttgtaaataatttgtttttattttcataagctcttataaatagttcatgttttaccttcccttattctcagcttaattatttaattttgaattaaattgtcacattatcagtcaaatagctgtgttccctaacaacacttttgatcacatattatgtggagagacattttgtgttgctaaacagagcactgaaggtcagattacaaaaaacaaactgtacttctctggaatattgacttgtcaatttttttctccctaaaaagacatgaagtaatattggaggtaaagatgcttcatgacttctttgtatggggtttctagtcatatgcctgtagctttgcctattaatttacgacccagcagagttaaacagttaagctttgtttaatattaacgacaaacatataagcatgttaaaaattggatgatttctgtggcatttcatttcatgagtactttctagacttttacttattatgataggtactgaggttttctataactttgctcattcaatcataacaggtcccttgttcctgtgtcctctaattagtaataatggccacagatagattttataaatatttcttgggtagcacatttattcaagggtacacaaagccagttgaacagagagaagcctaacatgaaatatgatagatgtttatttcagtttatggtggggtcatcatgcttttatcatacaagatgactggttattttgtctttattttgtgttcgaagtt

SEQ ID NO: 43582 - DNA, 1048 bp, Homo sapiens
ttaatattgcagtggaaacaaagataatagtactcagctcttttttaggacgtgattattatctcagatggaaagaaaaatcaaacttttagagacagtttcaaaatataagcctcgtgtaaaaaaaaatatataagattatatatttattacatatacaatgtgttcacttatctctttccaattctctctgtgtttagatgaagttttcatgctctttttaatgacttttgaaaataggtgtaatctcatccagtaggttataaagcataagactttttttagatttactgaataatattgtatttttcaagtaatattttacctgctgaaagacagatggaaaaaattgaccacctagctctaatgaataattttgatgtttctttttttaaatctttcaacttagtgcacaacatcctaatcaatcaataaagtattcctatatttgttttaaacatttaaaaatttttcagtatttgtggaccttttgaatgctctcttcaagttataaatatgctttaaaaattcccagttactcatcttgtcaaccgtgtgactcctcctgtctgccctgtaaatgttacacttctcattgggtttattggatggtttctggaggattttatccagtcgtgcctccctgtttactttaatggctgtgtaacttggaccttttttttgaatatcatgtgatggccgtttctccttgtatatactgctgatgatgataattcaagttaatataaatccattccttcccaaattcagtccttttccattgagtctgtgtttgtgatacacaatatacccattccccagagtgtattagctcaaagccactgttcttgattagaacatgttacacccctcctcattctgtttaatctccacttcttgtcatttttttcatgtcaataccaatcggggctcttctcttcccctgtggtaccattgccttaacttttgcctgagccatagcaaatgccttctgatagatctgtgggcagccctagcccagagttatctgcataaaaaataagtctgg

SEQ ID NO: 43583 - DNA, 1027 bp, Homo sapiens
aacaagtcttttaaaagtgtgataatagtttgtgatttagaataatttatttaaaaaagccattataatttattttacttatgttaaaggctttagaaacatgtaactgtgtccgcaatttaatgacttgtaacatacaaactttgatttatttggatccattaaattttatcatgtaaatatgtatttactaagtactaaaaagtaccattttcttgataaactataatgatctgtttgcatatggttaaatggagattttcaaaatgtgtatcagcttggtgtggtttgcagaaatctccagagaatttcctttttctacatgttgtgtggtatgtacttgtaaagattatttatgcttcatgtttttgacattagcgtgttttgtttgttttgaaatagatttatttagttgaggtattttaggatgtatttttctaatttcattaagaaatatatctgatgttaaaaactaaaggcatttagaaggttacattaagaaaggaggacttgtgaaatgatcactttcattttgaaagtgttcgcaaatttttaggaggagctgctctttttgtaactgagttatagaggtttatatctttgaaaaatgagataactacattggctcagtagctacttcaatcctttcagctgcaattttaaactagcagcagaaactaggcagaacaattttgaaaagcccaacatttagcaaatggttataaccttgcaataatcatgttatagatatcaagatccctcctctgttgagaacaggtggcagatcacatagggggaaaagagaataaagacatatgtcagataactgagaggttatgactttctgcctttaagaaataatttaatcttcaaaaaattggagcaaagactagccaaatgaaggtgtaatgtggaataaagacattcttaacccttaagaacagtgatctctagactgacagccaaataaatcgttggaattatatgccaccttctacaaacaatgggttaaagtggcacagagact

SEQ ID NO: 43584 - DNA, 1046 bp, Homo sapiens
agctacttttctaaaataacagtttgagagagtgcattaagaatcattatagatctttacatattccttactgagtaaagcagatttcctaatctaattttgtatttattatgtgccctaaagtcagtgggccattaagatgggtaaattaaaaacagtatacccggtgtaaaagagatatacccatttaatctgttaacaaaaagcaacatgaagtctcttgacatacaagaatgcattttatatatctaagcctaatgttgcccaaagagtcttttgaaacagtaattggaacactagtgcttttcaaaaagcactgtcaaattttacagtactttcagaaattctgagattgtcatgattatcagagagagatgaaggaggagttggtttgtgcagaaatggagaagaattatccacaccgctgaaacattttttgtgttcatgtatttgtaaagaaagataatcttcattttgttttcttaaaggtgagaaattccttttgggctgtaatcagtttaaccgaactaatttgttgaaagatagtactcatttttattaaaaattggaaacgaatttttactaaatacttcatctaggaattttcagagctttaaatgttgaagaattgttatttaatgcaccaaagtggaatatgttagctactccatctggtggataagatgaacctcagattatctcatggtacccttcttgtcaaacacctttggtttcctattttggtaaaatttatagctgcctattttagtgtggaaccatgatatatttttggaaataatcttcccgtatttttattaacattggtagaattgaaagtaaatcttttagtacacataattacatgtaagctacccccttaccatgggttagtcagtattgtgaaaattgagaagctagtatagaatgatctggtaaagtggttggtgatgataaaaatataaagacattacacaaacacattccagatatctaaatctaatgcatctttaaataggttttgtgggtattttttcctttcttcagtg

SEQ ID NO: 43585 - DNA, 1094 bp, Homo sapiens
ttcttttctttaaagtggtactttgtaatccattggtgacctcttttatatggccttgttcaagctgaaacaagtaatatgcttccgtattaaatatattttcaaacaaaagcaaatgatcaaattaatttctggaattttattttttaagtcctacaagttactgcttgttagaggcaggtctgggccccctttggagcaaagatgtaatggaacaagtatcgtgtgagaagtctaccctgataatgatgatcattacaaaaatgaacagttatttagtatagaaaacagtgctgggcactttggtatgctctttaggtatcttaatctgccctgtgacttggccatgatgatcacttccagtttacagataaaaacacagacttcaagttttcggtaactttgcaaggctacccagttggtaaatgcatttggatcccgtagtttgactccgaggctccaacctctagttatactgcctttaacttccttttgactctctgtttttaggccaaactcttcttctatgtacctttatagaatttgacaggattaaaaaaaaaaatctttggaattttctctatgtataataatgagatttttgggtaatattacagatttcgatttgttcaacttgtaggaaaatataccagtttcagaattgctttctattccagagaatagagaatagttaatttatatataatattaattgtttaataaagttcctgttatacctcaaaatatataatgctgtttatttacaaaacaattataaaaatatttatgaaataatgttagctgtgagacctccttaaaaatactcatttctgtatttagaaatttagctataagagcattcatttgctttgtataatacaaaaatttggaaacaggctaaatatccagaaatgaattgattaataaaggtttagtcatataacccatataatggattgttattctgccactaacttgattaatggcattaatttttaagtaaagaaaatattcatatgtcctttttcatgttatctttataatttaaaaagctttttataaaaatgccattaagaacaggagtcgacaggcgt

SEQ ID NO: 43586 - DNA, 1001 bp, Homo sapiens
gggccaagtgtgtggtttcctcttatttccgggtctgtcaggtgactctcccgtggcgccatggcggaagcagaggagcaggtaaagggtgcaggtggtagttgagggcacagggatatagagactagggtgggctgtttggggagggtggagtggagtgggtggaggtgcggagctgctggaatagcgcaaggcaggtccgcggcagggcggggtgggatggcgaaagttggtttcggggagcagagaggatgccagccccgggagggcacctagggaaagcgctctgacacacccccgcgttcgggctgcctttcctcgggccccatccctgtggcctttgcccagggaaattttggcatgaaggcaggcccggctacctcagggactgactgcctgtgggaggaggaagagaggccgggtgactgaaatttaagttgctttccacttgaagtaggacaataagaactaggagagagtagacgatgagttttgttttgtatctattggagttaggtacagagctggagcactgttgcggtgcagcagggattaaatgcatccgttctggagcaaaaatgcctggggtccaagtgctggttccttttcttacccaatgtgctactttgagctacttatttaactttccagtgtgagatgggggtaataataaggccgtcctcagagggtggtttaagatggagagaggagtttatacacaaagttagagtacttagaactgttgggcttagtaaaaattaaatgggattatttgttgctggtagtatccagtcaacaactggcaacgtggcactgaagtttagggtagaaattggtgatgggaatatgaattattttcatatagcagtagtggtaatcacacattttatgaaatgacgaagtaaaataaaaaagacaaaaaagagaagcagaccaaaaaagaggctagaacttgggggagataacttaagtttccatttccagtgttatttcagttggat

SEQ ID NO: 43587 - DNA, 1013 bp, Homo sapiens
taaacactgtacacacatatataatataaatataaaatatataaatagaatacaaaatattgcaagatatatacatagatacatttatcttttttttaggtcttctttaccatctcagcaatattttgtagtttttagtgaagtacatctttttaggttgtatttcttagtatttgtttttgacagtaatgtaagcagtgtttactgagtttcattttctaaatctttgtctaatctatatatatacaattaatttttgtatgttgatcttttatttagttttgttactaaataagtttattgtttgtaggttctttttgattttctatgaatacaatcatgtcatctacacataaacacagctttatttcttcctttccaattacttcttctaatttttttttagaaacaggatctcactctgtcacccaggctgcggtgatgcaatgatagttcactgcagcctctgtcgaattcctgggctcaagcaatcatcacacctcggcctcccaaagtgctgagattatgggtgtaagccactgtgctcagcctacaatctttatatatatatatttttttattctccttaccttatggcccaaactttagtaaaatattgacaagaaacagtgatagtaaacatccttatcttgttctggacttaagggagagagtgttcagtatttcctcttcaggtatgttaactataggttttttatagataccttttatcagatcatctatgttccttgcatttctagtctgctgagagtttttatcacaagtgggcgtttaattttacagtttctgaatttgagattatcacatgatttttctcccttattcagtgaaagtggtaaattacattgatttatgaatgtttacccaaccttgcattcctgaaataaatcccatgtgatcctgatatatcatcctttagaaaaaaaaaaatttcaccgggcacggtggctcacacctgtaatcccagcactttgggaggccaaggcggggag

SEQ ID NO: 43588 - DNA, 1069 bp, Homo sapiens
aatcctcctacctcactctccagagtagctgggaccacagtcctgcaccatcatgcctgactaggttttagttggtggtggtttttaggtttttgctttttttttttttttcatagagacagggtttccctatgttgtccaggctggtgtcaaactcctgaactcaatcgatccatccgcctcagcaaaagtcactttttaagttgggaccaggatttattaagtaacttacctaaatattctcataatgtgtagatataaaggaattctcattgttgactgacattctacatattagggctagttttgtaattcaacagtgtctattgagaatggatgaccatgatgctttttttctgaaacataattaacatcactacatgagcccatggaatatgtgagcagactccatattatattatgaatcctgaatttaaaccaataacagattacatctcagacattggcattatgctgtaattttaaattcgtaaccagaaaatgagttggacaacaaattcaagactgtagggaaacaaagtaaaaacagtttgtatattgctagaattgtctatcaagagtcaagttttcatgtcttttttttttttttttttttgagacagagtctcactcttgtcacccaggctggagtgcagtggtgcgatctaggctcactgcaacctctgcctccagggttcaagtgattctcctgtcttagcctcccgagtagctgggattacaggcacccgccaccacagccggcttatttttgtacttttagtagagacggggtttctctatgttggccaggctggtctcgaactcttgacctcaagtgatccgcccacattggcctcccaaagtgctgggattacaggcatgagccaccacaacctgctgttttcatgccttttaatcttccctgaaaattttctgtatactgccatgagtaaagtgtttgtcactttcagctatatggcattaattcaaaacaaaaacaactttagggtctcagtgtatgacttgagttcataaagttaagtaactaattgaacaaggcaaattaaaa

SEQ ID NO: 43589 - DNA, 1051 bp, Homo sapiens
gagcagaacaaggtcatggcaaagtctgggtgagagggaggctcccaggtgcagggcattgagaagggaacccacaaggggaggggccgagggtggggagccgcggctggggcacactgagggtgaggagagcatcccatccatgtgaaaatacccaggagcttggggattttgagctcctatgagtgggcgtctcatacccagagttcattgctgatgccttgactgatttcttaaaacagaaaagatttacttgtaggtgaaaggaaggagaaagacagaaaagaaatgtaatagagtgtcccagacaggactcagtgccatcagggataggggtcaggcacctcttgcccagagatgcttaaggagctatggttctttgatgctctaccattctaggagtagttcaggcagcaagagaaacatcttcctgccgctaagaattgctcagacttcagctgttgtgggcacttacattacttaagttcagtttttgtcactcaaggaaagtcttgttgacagaggtgacagaggctcagagttaggacccatgtagcagagatcagctttactgggaaaaactgctttgaggctctgtagggagcggaatgagaaacggcagtcacacactgccccctggtgttcaagagcatttactgtaccttggctgcttccaaagagacaggcggagctcaggcttagtcaccttacaaatgtccttcctaggtgttttgggtcttacacatgttcttttcacctgtcagtaacgaggaccagctttagtgtttaccaatctatttgcgcactttttggccatacaaccccgtgcaggaaaaataatcacagggaaagagaagtgggctctcctccctgcacccttccctgctcccacagcagcccacctgggagctggcatatgtgatggttgaaaagcatactgctttttacgtgtcattcctcaataaagtgattttcaaaaacacacaaaaaaagcgtggactttgcagacagatcatattcaaatcctggtgccctgtgacccagagggtgg

SEQ ID NO: 43590 - DNA, 1034 bp, Homo sapiens
ttctttctttctttctttctttctttccttctttctttctttctttctttctttctttctttctttctttctttcttctttctttctttctttctttctttcttctttctttctttctttcttggtatagcacaagctaagtgattgaagttttacctctctcaactgcttttactgacaccttggttgaggttctacaaaagcaagaaaatgtggaaggagggaggagaggttacaaagagcttggctaaccagccctgaacagcctagaggggctcttgttggaggaggtaatgtgtgctgatggcgcatatcttacatttatgtttcagctgagcaaaatgaacctcaagactaaaaccacccgggatcataataattgctaacatcctgtgaaccaattgctattatccaggtctttttatacttgtgtgctctctgggcttcacacttaattcctcacaacaatccctgaaataaatggtccctgttttatagataaggaaactgaggtttagagtggctaagtaatgtgcccaaagaataaagtggtggagatgggattggaaccgaggaagtatgtctgcagagttggcgattggggcaggattccatggctgataccatgccagtcacactgcagctagcattctctgctttccattgcctcctgttgcccatcagcctggtggtccatccgtcattctggccaaaagtggccagcttccattcaccagaacatagtttttcttctcattcaaccaactgatgatcttgaagatctcgatatgcatgagctctcattattggctccctttccttgaccctccctggtgacatttctttcctttccacttgaccccaacagacatctcagccaagccctggtggtcagtcttcatgcagcagccaacagtcccccatcagcaactattccaacagtgggctcgagcttcctctgaccgatggaggtagtataggagacctcagtgccatcgatgaaaccccaatcatggactcaaccatttccactg

SEQ ID NO: 43591 - DNA, 1109 bp, Homo sapiens
gttttgtacaaaattttagggagtctagaatagatagatacatagagatagaaagtagatcagtggttgccaaaagcagaggggagagggaatagtgatgactgctaatggatacaaggtttttttgttggggtggtgaagatattctggaattaggtaatggtgatgattacacaatgtctagaatgtactaatgccactgaattgtgcaatttaaagggattatttttatggcatgtgaattatatttcaatttaaaattttaaggggttttgacttaacagaatgtatttcatatatttcatagatttaagtgtaattttgactagaaatttagggggcattcattcctatagatgttaggccaatgctgtctcctattatcatggagaagtttggacagagggtatgttaggatcagaatgcacacatataaagacaattaccaagcttttttgtctttttatggacctaaaatatttgtacatgtctgtttgctttaattgtggtgtagttgagcttgtgttcttctccaaggtaaaaagtgcaatgttgtgtgagagttgagtgtttgttataagattaaaagataaggatatcttgggtagtaatgtcattgaccacacttgagcaatttacttaaattactaacttttatcataaatacataattaaaattctacccacagacatatttacaaacaaattatacttctctcttctatatgcaagactttggccctgtgtgtgactgatggacattttcagacgcatcaaaactaagtttgtccaggaaatccagatttgtgcaatttcacaatcctagatgaatcaagtgatttgccttcatttatttcctctcttatttgcaacttcatttattcattgaacaaatacttaaagctatttatgtgccaagccctttgctgttctaagtgtggccaagaaaataatggactgtaatgggaagggagtaattgctggcacttctctgttcctctggctgtcctgctcatttagggctgctagactgaccgtagctctgacaggacttcttactccagatcagacagctcatttttcccccaaagataccgctaaacaagttt

SEQ ID NO: 43592 - DNA, 1032 bp, Homo sapiens
attatcgaatcctgttcagtgtattaattaactcaagctgcatttatgagctcacctggtagactaacataaaaagattttgaaactatcaaacatttccagtttgacattctgagaagagaatgtttcagttttattttctgccttttaaaaatataatcaccgcaacaaatggtggcatcttaatggttcaagagagagaaatgtagcaaaggcatgaattggaaatacaactgggggtggagcaagtgtgctcagccttccaccagtgactcaccagtgaacccagtgaactaccagccagaaaggctgttccattttcttagatgtttatatatggaacacactgctttctaagcccttattctattttctatgaaggccataacaccacctgtgtgtgcacatgggtgtttgtgtgtatgtgagagagatcatatgtatttgaaaactatgaacatatattttgcttttacatgtagcttgtgttgtgatgaacttggcgtcgtaccttgtagaaatcttttaaattgataaagcagttctgtgggatttgagaaacattagatactgacagaaagactggcgtgaaaagtacatgcgcaggggagctgtctggaaactggtgagggttgagcctgaagcttcgcgtttcccccctccactgtttttagcaatgcttaaaggtaatatttttattacaacagtggaattcaccttcttgatgttaagaaactggctgatgtaaagagtggacagacttttgaggcagccaggtgtgtatctatggattagtgattccctcgggcagggtttgaatggggatgtgcagatcttgcacacacacatttgagccttgtggtagcattctgaagaagtcacttagaagggaggacacttatcgatccagagaactgtgtttctgagtgggaattggtggagaggagactgaaggaaagcagaagtgtacttcccagcctcatgagctgcgtgaacggcggctttatttggagagctgcgagccatggactg

SEQ ID NO: 43593 - DNA, 1034 bp, Homo sapiens
gcattccctccctcgtcatgacaaccaaaactgtttccagacattgtcagatgtccctgggagacagtattgcccccagttctgccctaaatatttcctcttgtcgcgtagtgtggagaaagaaaaacacacgtaagaaaaacaaaaaaaaattgtgattaaagaaaaagtttctcctgtttaaatgttctttagaatgttcagattagaaataagagatgatctcattaaaatgtctctagtaagaagctacttaaatatacctatgtgtgggggggtgggtgtgtgtgtgtgcgtgtgtaaactggcagagcttaatttaaaaaccacatttgctaaggttaggcacacagtagttctcagtaaggcccataaccagccaagcccgttttcttggtggagaaactccatcactattttttttttcaggcctagggaagtcacacagactccaacttctgagatcatagcaagcagagttggagatcaggctcctgctttgacataaaacagagctccgggaacagaaagcagttttctaatgcgaggactttttttttaagatttggggatatttaggcttctctgggattagccaaatactaccatggaggcatttttattttttctagaacaattaatgttgcaagagaagagaactgtaaatgggatatcctcaggagacaatgtgtaagccaaggccttaaacttaaaccaactccacccgaccccacccagttaccagtaaaaccagcattaatcagtgagtgggggatgggaagaacaccagataatgtgttggagatctgtctttcattcctacatctgccagaaactgtttctgaatttaagtaagtcaccctgcagtaaatcctccgtgtctcatctgtaaagtggagataataatatccattctaggttcttcactgggttttttaatttgttttttgtttatgaggatagaatgagatcctataatggaagtactttgtaaactcaaaagctttattcaaacataaggaaaaatccatagc

SEQ ID NO: 43594 - DNA, 1065 bp, Homo sapiens
gatatggccaaagtatgtgaagagctttcagaacccctacccctgctccccgaggacaaggaggatcgtagacctaggaaactgcggtgggaatgctgagtcttatcttttgtaaggatatctcctacatctttttatttctttatttttatttattattattattattattattattatttatttttgagacggagtcttgctctgtcacccaggctggagtgcagtggcgcgatcttggctcaccgcaacctccgcctctccagttcaagtgattctcctgcctcagactctcgagcagctgggattacaggtgcatgccatcacgcctggctaatttttgtatttttagtagaaacgaggtttcgccatgttggtcaggcttgtctcgaactcctgacctcaggtgacccacccgcctcaacctcccaaagtgctgggattacaggcgtgagccaccgcgcccggcctcctacatcttttttaaaatgcacttcccttatccgtctgtgaatgcttttgagttgcttttgtataaaatcaagggcatgttttctgaatggtctctatttttaattaagtactgattttttaagcccccaaatgtcgtgtctcccagaattagaagtataaatgaccttcagggaccctctttcaactctgccagatagtctaggctcctagaaccctggaaaggtgtttggagatacatgcaaagtcggtgtgccatggtaattatatgtgaagtgggttattttggtttttgtttatttaatgaatagaataacgtagttacacttagtaatactcattcacccaaaggaaggggggctgttaaatcattgtgttttttgatgaatggcttgtacactgaaaaataaattggacaaactggcatagagctcagtgaacatgaaatcagctattagaagaaagcttgtgaacaaattctgaggcagatatgcatcttttgattaatgccctatcaatcatccacacagctaccttagctaagtcttgccataatcattcatgcttgcttttggaaacactggcagtaactat

SEQ ID NO: 43595 - DNA, 1050 bp, Homo sapiens
acaaaaaaacaaaaaaaaaaaaaacaaatcaacaatagtaataatttctatttgtaggaaattgtggaatgaatacatgaactatttaggaaggttcttattcagggcccctaaaaatagaatttaccttctgtttttaattctgatatctttaatcagcaaagtctgtcctgtgccattgaagtgctgcagaaagaaatggatgtagacactagcttcgtttgtgtaatactgctttacagacatgttgtcaaattgtagttttcagaggaaaacatagttttctttgaggtgactcttttgagtgtggtaggcaggataacggccccaaagatgtccacatcctaatccccaggacctgtgaataggttaccttccatgccagaacgacttttgcaggtgtgattaagctaaggatcttgagatgagaagatgatcctcgattatccgggtggcagtgatgtaatcacagggtcccctgtgagagggaagcaggagaggcaagttagggtcagaggaggaggaggaggaggcctgagtgatgtggacccctgagccaaggaatgtgggcagcctccaggtaatggaacaggcagggagcctagaccgtctggaataatgcagccccgccggcctattgcagacttctgacttccagaactgtaaggtaataaacagtgtctgtttttttaagccactcagtttgggctgtttgttgcagcagcaacagggaactaatagacactgaagaatggattcagtcactcattgactcagtactgcgtgtctgctctgccaggcacactgcccggcccagctggaccttgcctcctagacagagagacagaaagagttttagagagtactgcgtgctgccatgagaatagaattgtcacgcagtagaaaacgatggggcaaggaggtgcagaggggcctcgttttgatggggcatgagtctaagaaggcccctctgaggaggtgacatttaagctggaacgtgaatgtaaaaaaggaagtggccattgtgagctctggaagccaagggttcca

SEQ ID NO: 43596 - DNA, 1029 bp, Homo sapiens
agatcgagaccatcctggccaacacagtgaaacccccgtctctgctaaaaataaaaaaaaattatccgggcgtggtggtgtgtgtctgtagtcccagctactcgggaggctaaggcagaagaatcgcttgaactcgggagacagagttgcagtgagccgagatcgtgccactgcactccagcctggcaacagagcaagaccacatctcaaaaaaaaaaaaaaaaaaaggaaatcgttgggattgctattttgtgctaacatgctctaaatcaggctggtaatgaaactattctaaatgaaggaactcgttttagttgtgcctgaaagaaaaatttgagtaggtaccacatttatcattcaagttggtttttaagttttatacgtggatggcactaacttagtaaatttcagtttgtggattttttttcattatttctatagtattgacaatgaagtcattcatatttatctatcccatttaattaaatgatctctaagcatgttggattgttatcttgtatcaagaaccatctttattgaataaaatattcccaaagaattttctggagaccaagagcctggacatttttttttaaataaagaaagattacctgctacttcagttgttctgggtaccgcaaaattgccattttcctataaactggtatactcattctatgaggtgttagaaactcttcattttacttaaaactaatcatgttttgtttgcctcctacgtggtgagattatgttctcattcgttcattaaactttagtttgatgactctgtaatgtaaatatgaccttcaaaaaggcagaatggacctgtgggccacattcatctctgtgtcttgaagctcacatctctaatatctaccaaatttgaatgcaaattggcatttaattttgaactcttcaggaagaaaccattgtattaagttggcatgcatttaagtttgagttactcacctccggatttggactccaggttaagactccatcagtggaatcttcttgaaggttaaaaat

SEQ ID NO: 43597 - DNA, 1044 bp, Homo sapiens
accttaaagacgagactccccacacaggctgtggccttggggaggaggaagagcagatggaaagtaaccaccataaccatctgcacctctcagggtcacgtggtgtttctagggcagaggttatctgaaagcttaccttgcatagagggaaaaaaaagtataggattgtgcagatttatgacagtgtctactgttttactcttgaacattttagatatttgttttctttagtgtatggaaaggaagaaaaacatatatgtgtatatatatgtgtatatatacatatatgtgtatatatgtatatatacatatatatgtatacatatatgtgtgtgtatatatatatgtatacatatatgtgtatatgtatataggtatacatatatatatttgaggcaaggtctcactctcttgcccaggctggagtgcagtggtgcactcatggcccactgcagcctcaacctcccaggctcaagtgatcctcctgcctcagcctcccgagtagctgggactgggactgtaggagtgtgccaccatgccagtctaatttttttatttttatttttctagagatgaggtctccccatgttgctcagattgatcttgaactcctaggcttgagtgatccttctgcttcagcctcccaaagtgctgatattaaaggcaggagccactgcactgggacaaaagcaaattttttcttacaaattttgatttattaaaatggtatttattgaataattaattaattggttaaaaatgcattaaaaagaacaactaccctctgttctctatcagaccactgcttgaatatgaagaaggatgtctacttgttatatttaaaaaaacaaaaaataagcttatgtaaaaaaccaacatatttcagtcttccagtagttggagcagtcatgcagagatgcaggagatatgtgtacatttccagtatcccaagcaatgtgcgagcaaattgtaataatctggcatgtaaaccttgtttaatgctctcataatgggtaatgcaagtgattaaatactgtgatttta

SEQ ID NO: 43598 - DNA, 1048 bp, Homo sapiens
atagactgggtttgaattcagctcagatacttactgtcagattactgaatctgtctaagccagtttcaccattcaataccattttatatcaaggattcagcaaaggagcatatatatagcacttaacacagtgtctgtcacagcataggtatttgacgaatggcaggattgcctactacatatctatccccatatttaaatcatctattctaagtagtacatccctttttccatcttttaacatctctgaagttgggatgtattttacaatctatagtgttttacaattgcttattggtgaagtggcagtcatgaggaagttccaggtatcttttaataaaataattttgcttatatttcccttttttgtacatgtgctggaatgatacatgtttaaaaaatctatgtctgaataattctaaaagagctcttttaataagtaaagtaaaaaccaaaagtgatagggaaccattatctttttttagtggtatctaacacaattttgcacctttagatcagtaacatcttagagttgaggatatgtagtatgtcatatgtatttgtgtgtgtacgtatgtatttggtcaaaaaattgattcattgtcaagattttttcccctgagagcccagccacattttcctaaatgttacaataatggacctagttgcaagaatgtaaagttaaaaatgtaaagagaatgttttcaaaatgctatagctgcctaaaccttgcaaaatgaaaaacgagcacttcttcagcttggaacagtttataaaggaggcaagcatgtgttgtgtgatggttatgctggtgtatttgtgcagatgcatagcacaggctctgagagggtaagacttcatgattaatggtgtttattcttgacagaagcctcctttatttatctgcaatacagtttagcgattttatcaggcacctgaatgaaaaatattcagtcataccaatattgcagtgtaaattgaggagagtcactttttattatatctttctgccttatcatctgcacagtaattttctagcagaggtttg

SEQ ID NO: 43599 - DNA, 1031 bp, Homo sapiens
accacaccctgtctagtgaattggttttgacttgttcctgtattcagcaactacttactgaatcctgaggtgttaggactgaagcagcacagaacagaattcgtggttctaattgtcctgtctaaactttaagagtcagcatcgttgaagagctaagaacagctgagtatcaacccagcaatgatttgaagggcgggcagtgcaagggagatagtgaccttgagggaaatactgtgactccttcctgaaacttcctttaaaccccaagacccttcttgggcactggcctctcctcatctcctgcttgacttttgcgcccttcctctctgtttccttagtaggataatgcagaatgaaagtcaatttttggtatcttttttctgcattgaagaagggagttggactttagcactcagtcctgagtttatttggggagtgtggccctttcctgattttcacttcctgaggacctctggctttggataaagaaacagtgtttattctttggggacaaagatttttctgaaagctcccatacaggagtgttctctagctcttaagattccccattaatgtgtttgtttttccttttgtaaatttgttacattagcatttaattactcttcatgacagtattaaatttcatgagtgatttatagtgatttatagttataatagagacttgtatgatttattacagttggcatttgaggtttaccaaattcttaagagccataagcactgaaattgcttaatctgaccctgtccagaacaaccacagcatgtgtgaaaacccaaatttaagtataataggaacagctgcaccacccaccccatttttatttgatgttactgtctacgattgtggtaaccgtatatatgggggacagtggtggtgagtatatgtgtttcttatgtagaaaagagaagggaaccttttttttttttttttttgagacattgttttgctgttgttgcccaggctggagtgcaatagggcgatctcagctcactgcaaccgccgcctcccg

SEQ ID NO: 43600 - DNA, 1082 bp, Homo sapiens
acagtaagaagaagaccactgggatcccttcctgtctctgggacctgcaagtaggactgatacttgctttaaagacaaatatgagatatctgcctggatctgtataaagtaatgtttcaggggacttgatttgacctgagatatatctggtctgtgagataaagatacatgttgtggcaatgctctcctgctacatcaggaaaataagaaaaggcaacattgagacttttaagagtgactataatactctgagatatagctagctagaatagtctaaagatcatgaaaaattgctacaaggcttttagagaagtcagagggatgaatttttagatttttttactggttccccaacattaattgagctccacacacagtagaataaaagacatgaccttagcgttctagattttataatttggggagagaaaataagaaacaacacatgaaacaattaagttgcatatcaacaagtgtaaaatagcaagataaaaggcaggacctagatctggtgacggtgatttcagattccaagggggtttttacaatagagctttgactccatggcaaatttaaatacactatgaaattctcctaattaacatttcccttcttccttccaaatatcaaatttatggactctgagaaattcacataacacatatgccgatgctgcgttttctttctgcttgatccgttccagcttttattaagtttaatgcctgactttcattaatttatgaggagttgtgaactgcaatctgaaatgctcccctgaattttagagttttcttgcagggaaaatttcacgtgagctcatcctgacccttgctaatatttcagccaagcacatagtttattgtctaatgacctttcaaggcccttcagtgatgttggcacgtgctgtcatattctgagggtggtgcgcagctagtctttgtcagtgttgatttcattctgcctcatacctgatttatcaaacctgagagcccacagcatgcctaatttagcacatagttcctgtccccaaaatctaataaactcagaagtaataaattttctgggtttttgtgggtttgccc

SEQ ID NO: 43601 - DNA, 1054 bp, Homo sapiens
taacctcaagtgatctgcccgtctcggcctcccaaagtgctgggattacaggcgtgagccaccatgcccagccagcaggtcatattttttcttcaagacaacacaatttatttttacttgttctcaactgctgagctgctctgtaataggtaaccccaatcaccacaatatcttgatcacaaagtacaaataaaaaacataggaaataactgtggcttcgttcctaaagaattaacagtgttctgtatcaaggcacattttaatttccacttacagtgttcaaaatgaaaaaaaaaagcattgagttttattttattggaaaactcccaaatgctctcacatcagtcaagctagagaaattgtgcagcagggccaggctgaggttggagatagggcccagaaataaccaagtgaaattcagctgggaaatttagtagctaacaccaccaggggagcatgagaacaaagactggcattagtggatgagcctgcaatccagccaggactgaaagagtctcaggggagaggatgggaccccggaggagacttgtgccatgctccctagggagccgcaggcctaatcagtggacattgtgaggatcaaagggagcccactctaggaagcggggtgtttacgtcgtccactggggggacccagatctgcatcctgattgtgctcctgtcttgtgagtggagtaaaaggaggtgcctgtttcctaggtaatttagacaagagcagagaagtgcacgtgggggatgctgagaagcaaatgccagctcttcttctggtttgctttcgtggaataagcctgttttcaaatggggcaagatttcacatttcctttcccttcccctacccctgtgtctcctctttgtaagaaatttattccctcctcccccaggggtgaagggaaactaacatacaatggtagctttcctgtgacctcgctccctgctagagaatctgtgatccactccaacttggtgtctgtgatcccagcttggctcagtgaacctgaccaagtgggttgaccttttgatcaaatgtgcagtt

SEQ ID NO: 43602 - DNA, 1082 bp, Homo sapiens
caggacagctgaagagtacttcttttttggctgacagtagtgagcagataaccgttaactttctctctgtgccattcaacttgcagcttgttcttggttcgtttgttttaacggtttcccccattgaatcttcccgtcctctgaggggctgggagctctctacacctgggacccttgtcttccttcagcggtgcaagtgggacccatctcctggacctccaatgtcctattaactaatgatgggcacgggagagctcttagggggatctgaattcattcatcatcactctgttttgaggttacagcattcatagtggattattcgttacattctcccacaatattgtccaaatcagtgttaaaattatgtgataacttataaactgtataagttctctgtaaccaaatggcaaatacaattttgacctaccatcccaatgtactccctaaattggtcataaattacattattatatagataatatggatgggaagtcctaaagactgcacagattggctcaacacttgggaatttgggttcaaggtccagctttgtcacttgctagctgtgtgaccttgacaagtgtgctgatccctctaggaatcctttcctcactgtgggatagggtgataatatgactgcctgctccatggtgttcttgtggaaattgagacaatgcaaataaagtattaactaaaatctctggcacatgttaagtgcctcaaatgtattaaggtagttcttctctgctttctcttcctccttctcctcctctttttttccttctcttctacatcatcatcctcctcctcctcatcatcatcaatatgtgataagttgactctctaagtcatgtttgtgagggttgcacttgtatttgattcagtgtagactgttttttttttttttctttctttcttgccagacctggtcacctgcttgcctgagaccagtttcttctataacacagattaagaattgagcaaactgcaaacctgtaactgtggtgtcgttagagctgtgcactgtggccttctgaacataatcttttctcagtcaacctcagtagatcgactataac

SEQ ID NO: 43603 - DNA, 1100 bp, Homo sapiens
gactctactcaaatacagccaataaaactgttatgtgtgtgtcgaagggaacaattatagcatagtaaattcttgcttatcccaatggctaagaatggagtgtttggatcaattaaatatttctgctaaagtttttagtttttatagaatttgccagttttcaacgaaacactgaatatgaaaagaaaatgtatgtagctaaaccagtggtgattgaaattcaagacgctgcagagtcctgtaagtcacagggtcattgatgcgatcatttatgtactcagtaaacattcttacgtgaactaagtgctgggaaagtagaagccttgtcctcatggagcatacagcctggaaaggggaggtggatgttcagcacagacttttccagatgaaggagagtttatcattgtgatgggtgctaggataggtttgtgtagggtgttagaattcaggattctagagtgcagttcattcattagttcatcaggtcagcaaagacttcaatgagtatatactgcactgggtatacagcagtgagcaaaaataaacgtgtagaacagttgttcaaggctcacgcctgtactcccagcactttgggaggccgaggcgggtggatcacctgaggtcaggagttcgagaccagcctggccaacatgacaaaacctcatctctagtaaaaatacaaaaaattagctgggcatggtggtgggcgcctgtaatcccagctacttgggaggctgaggcaggagaatcgcttgaagctgggaggcagaggttgcagtgagctgagatcacgccattgcactccagcctgggcaacagagtgagactctgtctcaaaagaaacaaaaccgaaaaaacaaaaacaaacaaacaaaaaaacaagctttagtgaatctgacaattagtaacgcttgctaacattgaggttccgggtgccatcctccaaggcaaatgcattgcaggaatctgaatgcttagcaagcactgtagaaacactgatacaaatggttcttgtaccaagtgagaaacaatgatgccaattgtattggattattcttgtggcatactttaaagatgatatttaaatcaattttcaagga

SEQ ID NO: 43604 - DNA, 1044 bp, Homo sapiens
caaatgaaaaacccattggatagtctttatagcagatcagacactgcagaagaatcagtgaattttaagatgcagcaaaataagctgtcaatggaagcacagagagagagagggagggaaaaaagactgaacaaaacaaacaggaccccagggatctatgggacagcatcaagccatttaatacactgtaattcaaggaataagagaagagaggtaggggtaggaaaatattagaaaacatacccatggctgaaaaatttccaaatctgataaaaactataaacaaaaaaatttaagtagctcaatgaactccaagccagataaatacaaataaaaccaaggcactatactcaaattgctaaaaaccagtgagaaagaggaaaatctttaaaaaggcacatttataggtgaaccaaggtaagaatgatcacagacttcttgtcgtaaataatgcagggaagatgacaatggaatgacaaaaaaagcagtgtgccaagaatgtagggtgaggtagaaaaggactagaaggagatgaggtagaatagaagtcagggagaagagcacaggatgaggggaaaacaactcaaaaaattcagagtaaggcaatgatgggctaatatatactgtgaaatgcctcctcctccaggaagcactccctaacctcccaggcagagtaaaggagcacagtatatggataaaagcagaagctttggaatctcacactcctggactaaattctggctctgctatttgtaatacagcacaacctaaggttgatttttttttcttatatataaaattgtgttctaaaatttataaacagtgtaaataaagcatataagtaatatatataaagctggaagacttagcatagtgcctggcacatagtgaatgcttaatacattttgactattatactctagttcacacaacaactagtaagaactcctagtaaatcatcaacattgctgcaatcatttataggccaaatatcccttctcttaaatgtttgggaccagaagcatttgggatttcatattttga

SEQ ID NO: 43605 - DNA, 1025 bp, Homo sapiens
ctaagaaaggtgatattcctgtaagcatgacatatgttaacactccaatgctcctaaattagaaagaaaatgcaagaaaaatttagtaccatactcatttcttgaaactaatttgatcaatttttcattaataactcttaccacatatctgttgccatgcttataggatcataactaagaatttcaggagctagtatcagaaagagaagaaaacatttagttttgtggaaaaaaattcctaatttgctctaagagataaaaaactaagcattagaaactataaggcactatccaacgtttgggctaaaatgaaaggttaccataaattaatatgaattaatataaagcctaactagatgtttgtaattaacttgtttacttttcacacttctacccaccattgttgagtccctagtattttacaaaatatttaaatattttaaaaacaccaaacataaactgacaatctctgtgttattaagcattgtctctatcagatcatggcttttaaaactttctcactaccactgatatttctgcttctccattgccccaccctcacccgtggcactttctcctctcacctgggccttttcaactacttgtcccacccctctgatctatttttctgttgcagtcagagtgagctttttaaaacatctacccattaacaaaaagtcaacaaggttaaaaaaaaaaattgggcattctgacactacaggcatgggacaaaggcaactaagttgcatctatagaattgagaaaaataatatgctttgaggctgggtacccagcactttgcaaggccaaggcaggaggatcgcttgaaccaggagttcaagaccagcctgggcaacataatgagactctgtctctacaaaaaataaacaaaagctagccgagtgtcatggtgcatgcctgtagacccagctattggggaggctgaggtgggaggatcacttgagtctgggaggtcaaggctgcagtaagccgagatagtgccagtgcactccagcctgggtgat

SEQ ID NO: 43606 - DNA, 1043 bp, Homo sapiens
actgtacatactttaaaatagtggttaggtgctgtcattttcatgattttgacagttgagaaaccatgttagggagagagctttgtgtgacaccctaatcagaccgtgaagggacaggtctgagttgttcatagtgcagagcgaggcatggccacggtacacagcacacaggtgataggcaaatatttaatgcactgagccttttgtgtgtaaggataattagttactttaaggtattcggcatacacttttacatttccatattttaattggactttactggtcactgtggggcatagatacaactgaactgttcaatcctaatcaaataaaactattagtacattcttatacatctttttgggacaaagtacctcctacttacagagtatccaatgtaaattttttatggacaaagtaaatgtttataaatattttggcattttataacttttcctagcatagcttgagggctgataagaaactcagcagaaacaggctgtggttggcatgaagacactctctctctctctctctctctctgctctaggggattttactcactttgggacaaaagcaatatagtagcatcttttcactgaccaaggtaaccagagtgttgatcagatcacactgatacctacaagtggccaaaattaaatgacaagcatggggggaggtgccaggaagtggcaggggtatagagtgtgagagagaacagatgcatgtgagtgtggtgtgatgagggaagcagctcaagagctgacacctaaacccagaataatttcagaggtgaaaaattaccacctctcttactagtgacattgaagagaaaaaaaattagggtttttcactgatatgttactagtatttaggcaaaaacacaacagaaaccaaatcaagtcactataaagcagtaagaaaatatttaaaaaagacattatcaaactttagtgaatgttattctaagtctcgaaaatttagatgtctgtttagactaaaattttgccaaaaacaaatccaaagtgaaaaagtagcaattt

SEQ ID NO: 43607 - DNA, 2249 bp, Homo sapiens
tggctgggtgcagtggctcacaccggtaatcccagcactttgggaggctggggcgggtggattgcttgatgccaggagttcaagaccagcctgggcaacatggtgaaaccctgtctcaaaaaacaaatccaaaaaaccaaaatattgctactcattaacaatgcacctggttacccaagagctctgatggagatgtacaaggagatgaatactgttttcatgcctgctaacacagtatccattctgctgctgatagatcaagaagtacttttgactttcaaaacttgttatttaagaaatacattttgtggtttctctgatggttctgggcagtcagttcaaaaccttctggaaaggattcaccattctagatgccatcaagagcattcaattcacgggaggaggtcaaaatatcaacattaattggaatttggaagaaatagattccaatcctcatggaggacttggagggtttcaagacttcagaggaggaaggaactgtagatgggctgaaaatagcaagagaactagaagtggaggggcctagagatgtgaccgaattgctgtaacctcaggatcaaacttgtatggatgagaagttccttctcatggacgagcaaagaaggtgatttcttgaaatggaatctactcctggtgaagatgctatgaacattgttgaaatgacaaaagatttagaatattccataaacttagctgtggccagggtttgagaggattgactcctaattttgaagttctactgtgggtaaatgctgtcaaacagcattgcatgccacagaggaatctctcatgaaagagttaataaatgcagcaaacttcactgttgtcttactttaagaaactgccacagtcactgcaggcttcagcaacttatcttttcctaccctcctctcgcatttaaaagtacttttaaattaatgtatgtacattatttttaggcataacactgctgctcatttaaaaaaactacagtatgaaccatgttatatgcagtggaaaggcaaaaaattcatgtgacttacttgcttgtatttggtttattgcagtggtctggaactgaaagtgatgcgtatttctgagttatgcctgtatttaagaagctgagtgaaacccaaagaagtccatgataggacagacttctgaaaactaaagacagaaaaaagcttgaaagcatcaagaaagaagtgaaatcttagctagagggaaaagtaactcagatgacagtggatttctctctggaaaccatggaggccagaaggaagtgagacaagttcttttagtgccagaagaactatcaacttgtggctgggcacggtggctcacacctgtaatcccagcactttgggagaccaaggtgggcagatcacttgaagtcaggagtttgagaccagcctggccaacatggcaaaaccctgtctctactaaaaatacaaaaattagccaggcatggtggcacatgcctgtaatctcagctacttgggaggctgaggcacgagaattacttgaacccgggaggtggaggttgcagtgagccaagatcctgccactgcactccagcctgggcaacagagcaagactgcctcaaaacaaaactctgtcaactccaaattcctatttggtgaaatgatccttcaggattgatggggtaataaaaacattctcggttgatagaaaactaaaagaatttgttgaatgagtctaccctatagaccttgaaaagaccaaccctaaaggaagttcttgaaccagaaaggaaacatttaaaaaaaaaaagttttgggatgtcaggaataacgatggaaacagcaaaaatatgggtaaatacaatagactttcctccttgagttttctaaattggtagtggaagcaaaattgtctgacatagatctcaatgtacgtagcaggttatgtttaagacaattataaatggggtggggaggggacgggcaagagagttttctacatttcactctaactggtaaaatgtagatatcaacagatctttatatagcagtgaagcagttccatatctcaaatgtgttggtaggaagataaaatggcataaaatgatatacattgtgcaaatatcaatttcctgtagttacgtaaagatgtatctgtactgtcttttcaactccctgtaagtctgtaactattgcgaaatcaaaagctttaaaaagtataggatgaaagtattgaatatgctgctttaaaagggacagggtaca

SEQ ID NO: 43608 - DNA, 1049 bp, Homo sapiens
caaaggtggttcaatatcgggaaatcctggaattattttaacctaagacatggcttagatctaggacttaatattcaattggagagacacacaaaccattgattgcagaacatgtccttggtggtttgactgagtcaatatttataaaattatataaaagttatatttataagcatatattttataaattaagctactttctaggaccacattgttagaaaattcactattcaaaacaaagtagaagaaacaagaaagagtagacacacttctcgctattcctccactaagtgcagcctggacttccataaaacaaacatcagactactgtgaaagatgagaagaccaaatggctaggaacttcagtacccaaggaataacacagcatcgatttccctgggttttcttttgcctaatattgggcaaatatgaggcactggagaaaccagtaccccagaaacaccaataggagccaacggctaagcaaagcctggtgtctctagccaaaggatcaggacagggcaacttagaaagatggagaactctaagaagtaactgccctactctatgcaaacaccatggaaaaacccatggccccaatcccacagcctcatcagcaaaagccaagtggggagcctagaccttctttgcctgttgtaatgaggcctccccatcccctgctggagcagtgtcagagctagcccagcagagagcttgggacatctatccctgcaggatggtaatgaggcccacccccatagtgtcagtggaggccatgttgggagcttagacttttaccctgacccaggaggaacaactgcccccactcccatggtatcagtgggacccacgtgttctagcgggaagctgcacttagccacccctccccctgcctgtattcaaaggggctcagtagtgagcctgaaccatcaaccccaccacatgcccccgtcacccacttgggtggtgtcagagtagacctacgaaaacatgattcaaacaaggtccagcgtctcaaacccaaatgggcagaatagaacagaaagcca

SEQ ID NO: 43609 - DNA, 1032 bp, Homo sapiens
tgataagcagacatgatggagagcacaacatgcaagtggaaagcacaacatgaagaaaggccccagagcgggcagatgggagctgtgctccagaaatcagaagcccagtttggacagcgtgtagatgagcgcaggtaaagtaaaagagaggcctggaaaggtaggttggccacagtgtgtgaatgccactgttgacattttgcatacaatttgtggccatcaaagatttgggggtaagcacatgattctactgttaatgaaggtttcagagattgtgctgaatgtgtactgacaagacctgtatgactttcaagtaagtcacagattttactgtctttgttcaattttcctagaattagcctccacttgcctgcaaacattccctattcaccaacccaaggacatgataatacctgataaggttttattgctgagttttggtaaaatttgtatacaggaacagtgacactaaaattacatatacacaaaacagccagaacttaacaatagttccttctgtcctctggccaccagcaaggccagggaaatgctcaagaagcggcagttctgaagggttttcccaaagcaagcagctttggaagtggctttaggccacttgactctctggcgttttcagtttgtccatctgaaaaatatgaataaatatttaccaatcacttgccttacaggtgagacaatgtttatactgctcattgggatgcttgggcaaaagatgctgttttacacaggaggctcaatgatgggggcggtccagaaagaggtgggagggtgattgataggaaaacctccagtctccacccactagaagattctcacctccttagtaatgcgctcctggttcaggcatgttttttggcagagttcctgagttgaaagcactgtcaggaatgtgtacagaaaaactgcgcccatgttataatccagggcagaaaagtaggaaatgaaaatactaaaaacatgcctctaagacacgggttgggtgccgaagtgaaatctgactttgcaggagag

SEQ ID NO: 43610 - DNA, 1027 bp, Homo sapiens
ggatggtcagcagattcctgtgttcaagctcagtggggaaaacggtgatgaagtgaaaaaggagtagagacgacccagaagacccagcttgcttctagtccatccttccctcatctctaccatatggccactggggtggtggcccatctcagtgacagacactcctgcaacccagttttccagccaccagtgggatgatggtatgtgccagcacatggtaattttggtgtaattctaacttgggcacaacaaatgctatttgtcatttttaaactgaatccgaaagaaactcctattataaatttaagataatgtaatgtatttgaaagtgctttgtataaaaaagcacatgataaaaggaatcagaattaataaaatgtttgttgatctttgctagttctcatttctttcctttctcttcctcttcctttcccctggaattttcagtcctcattacaaagcctgaagcttagtagcactgaagggattttttctaaattattgacctgagaatgatgaggaagaccactggtttttcactctaccttgaattcatgttgttaagtagcttgtggacattctctatcactttggaatattttgtttgctttgcttttatttatttctatttcagacaccaaccatctgcccagttgaagatttgcaaaataattgtttttattccaaacattttgaaagcttagaaaatttatatgtgtacatatacatataaagttaacttaggaaagttagtttgaagctaacagcatctggctgggtgtggtggcccatgcctgtaatcccagcaatttgggaggccaaggcaggcggatcacctgaggtcaggagtttgagaccagcctggccaacatggtgaaacctcgtctctactgaaaatacaaaaaattagccaggcgtggtggcgggcgcctgtaatcccagctacctgggaggctgaggtgggagaattgcttgaatccaggaggcagaggctgcagtgagccaagatttcatcactgcactccag

SEQ ID NO: 43611 - DNA, 1057 bp, Homo sapiens
tgaggaaatgcctagtgaatgacagtatgtcctattgtgctctaactttatttcagccttatttcttttctgaatattatttttcatttatcttcatttccttacctattttcttttcttctaaagtatgtatctttgttagctccatcatcctttttggaatgagcaagtataaaaataagtaaataaataagacccatcctaagtattttaagaaaccacccttttgcggcacacttgctaccttggtcttagctctgggctttggtgtcctctggcagtcctgctgcattgccttctctcccccatctgcccacccctgtcccagagagatttttctgtagcccctcatctgcagagtccgacagctcagggtcgagggtctttcttagcagtaatcacccactatgctctcacccctccatttctggacatgcttcctgtggcttctctcctgcgctttacacttcagcagttcttgtttctgctcactctgcctttgtttgtcatttcctggatttgaagctgttctgctcttttcacctttctcttctcaaggtaaacttcctctgtgaaacctccgctgatgccctgcagcaaggttgaccacttcctgagtgttacttcctctcttggtgcatatgtctggttgcactaaccaggctgctgctagcccaaaggcacctttgtgcaaattagaaaaagacaaccatccccatcccttcttcaagatactttatagtacttccaactgttggcaaactgtcttaataaagatacaaatctttgatttctctaatgtgcatggtgccctacaagggttgtgcagtgcatagccgtgcagttgcatgtgatagatctatgttataattatttgtttaattgtctgtattcccctcaggaccaaggaaaattccttatatcttgatactgtttttatattcttactgtctgaccagatcagaccctcagtaaccgtttgctaaacaaaagaaggaatgaaggtacaaatatgtatccaccttgtctggaaaaatagcaggaaaggcatgcctgc

SEQ ID NO: 43612 - DNA, 1026 bp, Homo sapiens
attggactccctgcttccattcttgtcctttctagagaaatctttaacaaaaagcaagtcatactgtgtcatttcctgattgaaaccttcagcatcttctcttacactttgagtaaaatccagactccctaccatacctacaaaacctgcatgatgaagaccctgccctcttgcctggcctcctcttccacacctcattcacgagcctgccttctgcttcttgaagataccgagcctgtggctgcctcagggccttggcgtgtttggcgtgcccttcccctggttttcaaatgatccctccagtctcacatgtcaccttggcagaggtgccgttcttcactgccacattaaaattgcgcttccccctttcatattctagtatgtcatgatatttatttgtttgcttatttttgagagagtcttcacatggcatttcccacttgaatatttcaaggttttgatagtgaacactggcgagaggtaggagtgaaattagagtagattttagagggagaacaacccttactatgttatttggtcttaagaaagtacagtttagaaaacaattcgatttcattcattatttgggttttataattcattatgaatattagcatatgttttatcaggtgtttatgttatatcttagtttcgagaggtttgatttgttctcagatgacattttatcacatctttgagctaatttcttttcagtggtaaattttttttttttgagacagtctcgctgtgtcgcccaggctggagtgcagtggcgcaatctcggctcactgcaggctctgcctctcaagttcacgccattctcctgcctccgcctcccggtgcccgccaccatgctgggctaattttttgtatttttagtagagacgaggtttcactgtgttagccaggatggtctcgatctcctgaccccgtgatccacccgcctcggcctcccaaagtgctgggattacaagcgtgagccacagcgccgggccttcagcagtaacttttttaaaaaaaataaat

SEQ ID NO: 43613 - DNA, 1032 bp, Homo sapiens
atgttttgtgatctcataagacatcagatttagattgaaagctcaaatcttttcaggaaaatgtctgtttttttccccattttattgaagttgtagttcacagtagtaataacggtgttatagtggatgaaatttttttttccaccaaaagccattaacatgtaaaacacattaatgttttttgaaatgagcaattctcctatttttcatatatttcttttttattttgagacagagtttcaaaataattttgaaatgagcaattcacctatttgactacacagacttccagtatgcttgcataaaaggaaaagtcatgtgagaacatcggaatttagaagtacttgaaagtaaaagactgaagacataaaggaaatgtaagcaggatgataaatgtcagttgatttaaactgacaggagctctgttctgctttatagcatattcttgtagggagagctgatcctagctgatggctagctctggagcaggcttgttgaagctgttcataaatgtatttatgtttttagagacagtatctcacactgtcacccagactggagtatggtggcatgattatggttcactgaagccttgaacccctgggctcaagtgaccctcctactttaggctcccaaatagctggcattacagcagtgtgccacctgttcataaatttagaacaatatttagtgtcaagttagtgatttttctaagggtggaacagggattactacaaggtgaacatgcttctgtaatcgccacacaggtcaggaaataaaacgttatttatattctatatttctttatgtgatgtctagacactatcttcatattccccagaggtaactactgtcctgatttaaaacaccatagattttatgtgatttaaaaatatatggacacagtattatttagcctaaaaaaggaagggaatttggtcaccttgatactatgcgaagtgaaataagccataacaaaaagacaaataatggagccgggtgtggtgttgcatgcctgtaatcccagccact

SEQ ID NO: 43614 - DNA, 1015 bp, Homo sapiens
attcaagttatagtattgagtatacagggtccaaatattaatacaagacataagttctctgtccaatatttcagttagaaggtgctactctgtataaccctattgcaaatagtagagtgagtatagcagttcccacaagtgtggtatagtagataattttcatctaaaattttacttgccaagatatttggggatttatgaagttccttggttttatttcccaaacaaagaaacctcagggttatgggcaccctactcactttcattacctggcagaatttgcaggataattgcccagaaccagcatattgatccagatttttatgttatccatcccattttgtttcatccaagctgtaggagatcgccacttgattcacaggaataagcagggttagtctaaaatgtaggcaaaaagcttaaaaacaattagactaggatttaatgacaaatgtatgataagctttggagcacaatttctctctccagtcctcattttttgtaaaaacaaattatgataggaccgtgtgtgttgtttgtagaataaattttagtcttatacttggcctgattatttgcataaagtgcagcaagagtggttatttctacataggccttttggattggctttgatggaactctgttccacaggaatctcagataagacctttaaagctgagcccagccatccacatgggtttgtatcctcaaatacctgtgagttgggtgatctcctcttgaggtcccaagataaacttggagctgctggacctgttagaaagtgacattctttactgacgacaggttaagatctctgttcatggactgtgtagacaaggtatgaggccagtactccccaaggggcttttattggctctgcatgtcaagcttgattccttaaagggaaacacaccctttcagtcaaagccttggtaaaataaccagttttaccaattgtgtcctgtcgacaaagaaaaatggattcttattgcactgatggaaacaattatattgc

SEQ ID NO: 43615 - DNA, 1022 bp, Homo sapiens
tagtattccatggtgtatatgtgccacattttcttaatccagtctatcgttgttggacatttgggttggttccaagtctttgctattgcttgaaatagttttgacatgtttccttgagcagaggagaaagtgatggtgttacagtgagtgcacttatttattctatagcctgacagagtatttgtgattgtaaatgtcatctgtttgtgttggggaagaacaaaaaatgaagggctactcctgtgttcagggtttctaagaaaaacacaaagtgtaatatctgttgaaaacaaacttggatgatgacttttaacctttaaaattaccttcagccaagcacgtctatcaactttaccagctgttttgaaaatacctaatacctgtgccatggttcagctgtgaagaggacagagttggtttgaataagagtagttataggaagtttgtccttaaaagtcctgaagataagtcttgatgctgagtcatacatatttactccctctgtgactaactgaataaactcaattcatcaaggaaatcgtgtccttgactcaggtccatttgtcacaaatcacaccctccaactttaggattacatcagactaaaattatggacaaagcaagttgctatgttaattcttttctaacacaaggagtggtttatcatcacattgcccacagtaatatcattgcagttttatatgtttagggtgatttctccaactcttcctcaaaattatagagttttataaagccattttcatttttggagcaagaaagaagtaagctttgttgtgtattagatgcttaccacttgccaaacgttgtattatatggaacatgagacaagtaacacacagtttctacttgcaggcaaacaggacaatataacacatgaaacagaatgaaagtttactcagagttgaattttaagaatagttttgatttttatcaaagaccatcttagttatttatatgtgttgaaggtttataatctgtaaatctgaagtgttggagctatt

SEQ ID NO: 43616 - DNA, 1045 bp, Homo sapiens
tctgaaaatgcttacaagaaaaacatatagaaagcaaagaattcttaaggccaagaaagtggaacattaagcattttgatctgttaggcatcgtacaaaggatgaagagacccaccccaaggggacttaacagttggcaaggacaaccatagtatcataaataaattaagctagaaaaaatactaatgcatactgtacctctattattttaagagtgtagagctttcttacacaattcttagtgataaattctctttgctaccattgaccatatagtttaaaattttcagttatttttttcagccaactttggatgtgttctgaagtttttttttttaaattgacacatattaattgtacatatttatggggtacaatgtgatattttgatacatgtgtacaatgtgtaatgatcaagccatggtaattagcatatccatcatctaaaacacatcatttctttttgttgggaacattcagtatcctcttttttgctgtttgaaactatatattatgttacctataatcatcctactgtgctttagaacactagaacactagaatcttctgttctactttttacttatatgagatcaactttttttagcttctgcacatgagtgaagatgtggtggtgaactttctgtcctagcctattgcacttaatgtcttctagttccatctgtgttgctgtgaatgacaggatttcattctttttttgtggctgaatagtattctattgcgtatatataccacattttctttacccattattctgttgttggacactaggttgattccatatcttggctattgtgaatagtgctgcagtaaaccttatttctttttattgtttgtaagtttttcacccagtaggaaatctgtaaggcttaggtcttctatttaaaatgtcacctatttaatcatgtttaattaggttgatggaggggcaactttcctatttttaaaattttgaaaacaaagtggatactaatcgtactttcttaaaatggtatgctgctaacattttaaatttaatgtttta

SEQ ID NO: 43617 - DNA, 1030 bp, Homo sapiens
ctctctctctttctctttctttctttctttctttctttctttctttctttctttctttctttctttctttctttcttttctttctttctttttttgagtcaaggtcttgctttgtcacccaggctggaatgcagtggcatgattatcgctcactgcagccccaaactcctggcctcagggagcaatccttccactgcagcctccagagtagctggactatatataggcatgtactactgcgcctggccaattttcttttctttttgtttttttttttttttttttttttgtagtgatgaggtctcgctatattgcccaggctggtctttaactcctggcctcaagtgagtctcctgccttagcttcccaaagagctgagattacaggtgtgagccaccatccctggcctgatgatgaatttcttgattctcttgtagggccctccttcttgcactgtccattaattttccagttatagggaagaggatattccatatgtttgtagatctgagagacattagtctgtgttagaccaactaattcttacaggcagtgtatcaatgagtcttgcttttttccccctttattcattaggacaatctctgccttttagtcatagtgtttagacaatttacattatttttttttaatttatttttctatttcaataggtttttgggaacaggtgcctttgcatcctcataacttagctcccacatatgagtgagaacatacaatgtttggttttccgttcctgagttacttcacttagaataatagtcttcagttccatccaggttgctgcgaatgcaattatttcattcatttttatggctgagtagtattccatggtgtatatatgtatgtgtgtatatacatatatgtgtgtgtgtgtatatatgtgtgtgtgtgtatatatatgtgtgtctgtacatacatatatatgtatataccacattttctttatccactcgttgatcggcatttgggctggttccatagttttgcaattgcaaattgtgctgttata

SEQ ID NO: 43618 - DNA, 1029 bp, Homo sapiens
tgtgcttgatggtgtaaccttcaagccgtatctaattgttaaatgatttaatcagtgagaactgataatggacttttaaaacatattctagcttagcttagtgtcctttaaaactgggaaccaaagatcatgtgtaagtatggtatgctatttatgattcacatctcacagccactaacaatttatacaaatgattagcataataaggttgtcagagctagttggctggcgtcactgttggctcatggcagcctactgcatcaactctaaacctttactatggttatgtataggaggctttgcattgccttttgtcctatgagtctcaaaggtattatataaatattagtggatgacaagttttcaatatctgtgttgaattataacgaggaaaccttgaattacaacaaggaaaccatggcattgagaggtttgtcatttataccaatgagctggtcttatacctctgcatctgtaaattgtgtatcagttttcacatttgagatttaaaaaaggtagacttgcctgtaagaacaagttggttagcaagcagtgagttcctggaaaaaaaagcgttttaagttggttgtattgacaccactgaaattaattatcactgaaattaacctttctgatttacctactggctaaacgtttgtttttcatattgtctatgatgccataaatgtgttttgactttgcaaagtcagtttttctataggttatgctttaatgtttctggactttcatcctgtattaatctaattaataagtgatcttggtaatttttctactgatttgagctaacataggcgctttctggttttggtaaaatgtctgagaatgcagaagagattatccttctcttgctgtgattcggaaactcatgtccctaaatgaaagagctgctatctacctttatattagtcatccgtggcaactggtgattttagatgctcacatgagtcttggtgccttttgctgtggtgtgtctgcttcagattgcatttccatttcacagcccttgcg

SEQ ID NO: 43619 - DNA, 1078 bp, Homo sapiens
agacatatatatggccaacaaacatgaaaaaatgctcactatcactaattattagagaaatgcaaatgaaaactacaatgagatactatctcacaccagtcagagtggctattaacaactcaataacagatgctggcaaggttgcagagaaaagggaatgcatatacactgctggtgggagttaaatttgttcaaccattatggaaagcagttgtgactattcctcaactaaaaacagaactaccaatctcattactgaaccccaaaggaatgtaaattgttctaccaagaagacacatacatttgtacatttattgcagcactattcacaatagcaaagatatgggcacccaggtgcccatcagtggtggactggataaataaaatttggtacatacacaccatggaatactgtgtggccataaaaaagagcagaatcatgtcctttacagcaacatgaatgcagctggaggccattatcctaagcaaattaacacaggaatagaaaaccaaataccacacattctcacttataagtgagagctaaacagtgaatgcatgaagacacgaaggggaacaacagacactggggctgttgatggaggatttgaggatggagagtgggaggagggtgagggttgaaaaaactacctattgggtactatgcttactacctgggaaatgaaatcatttgttcaccaaaccccagtgacatgcagtatacccatgtaaaaaatctgcacatataccacagacctaaaaagttcaaaaagattttaaaaagtaaaaaagataattttgtgacaaggaggtatttcaactttgttatgaaaaagaatcttcaaaatatattgctgtaagttttaacaaaaactttttggttttgtttatagcttgcttgcttttgtaggagggaaagcaggtgagataggcaggatttaccagcataagcttattactactgttggcaaaatgctttgtttatggcatcattgctgtgagtcgagggaagtcttctgtgcttccagtaacagcctgagatgtacctacttctttacagagcacctagtagggaggt

SEQ ID NO: 43620 - DNA, 1028 bp, Homo sapiens
gaagctggaaaccctgcacagggttgccaagcaccacggtttgtcggtttgtcgctggccctgagtcgctcctagggatggggtgagtgaaattgatgtggagtggcccactcttgccgcggacctctgggagcctacctgtgggagaccccatgattctcatgaacatctgagctggcaggaagaacttcctggagagttgacagagatggaactctagcctgcatggagcccagagggtttgttgtgggaacagttgcagtggagcatggctgtggatatccataacaccatactcctctaggcagctctagcctttgttggctgccagacctggacaatagagggctggcttgcttgtggaatgggaccagtctgatctgaggacctcccccaactgcccgttgctggcctctgttagggtccctccctgcctggctgtacctgcttgcagcacagcctcagcttgccagcagccatcactatagctttttgccataagaccgtatctgtccattggagtgcttttgcaaatggacccagacccctgccaatgtgcacctgccggtagccttcccctgctggcacgtgcccacctgcagccttctcctgccagtgtgcatttgcccacagcttccccgtgccactctgcaggcatgcatgtgcgtgggagcctattgctgccccaccagagttcttttgctggcagctgccatcggagtgttgttgccagtggaccgggaacatctcagctccttcagagcagtaggtacttaacctcaaggagccagaaaataaagccacaggcctggtcccagcaccacaaggattagagcatgtagcccaggagtgctctgttgagccttggcctcctgaaagcatccacaatgaagccagttgactaaaccaaacaaatattagtcaaactttcaggagcatcaaagaatataaaaagcaagaagtcccatgcaaaaagtaacaacttcaaagattacaggatatcagcccacacaggtaagaaagaacca

SEQ ID NO: 43621 - DNA, 1030 bp, Homo sapiens
aggcatttatttgaagattatttaatgtatgcagaggttgagtgtagctattgtgttctgtattgtttggggcatgttggaaaaagtagttttataaaatcctattaacattgttttgtatttttttaattttgttggttaaaaggcagtagtagtaatatatatagtatatatataatatatatattttttgagatggagtttcgctcttggtacccaggctggagtgcaatggtgcgatctcggcttactgcaacctccgcctcctgggttcaagtgattctcctgccccagcctcctgagtagctgagattacaggtgactgccaccatgcccagctaatttttttgttttatagtagagacggggtttcaccatgctggctaggttggtctggaactcctgacctcaggtgatccaccgcctcggcctcctaaagtgctggggttataggcatgagccattgcgcccagccagtagtaaaagtatttttagaaactgagcattttgagaatctaaggaaagtgatatacaatagcttccagaaaaaaattgcatctctctgtttacatataatggccaagatttcattctttccccttggcttgattccagttagaactgtgtgtttcttgtttcagtgttttgtcttttcttttttaaaattgtgatagaatatacataacataaaattggccattttaactatttgtaaagatacagttcagtgccattaagtactttaacattgttgtgtaaccataaccaccatctatctccagaacacttttttctttttctttttttttttttgagatggagtttcgttcatgttgccctggctggagtgcagtggcgtgttctcagcttaccgcaacccccacctcccgggttcaagtgattctcctgcctcagcctcccgagtagctgggattacaggcatgcgccaccacacctagctaattttgtatttttagtacagacggggtttctccatgttggtcatgctggtcttgaactctcgacctca

SEQ ID NO: 43622 - DNA, 1042 bp, Homo sapiens
cctaaaagtaattagtacattagtacattcacaaagttgtacaaccatcatcataaaatatgctgtaatcttcttcaccttcattagttggtttaattttctatttcagacagactccaataagttattcttgtattcttttgttcatgtttaatatgctgcattcagtttgtgagagccatattggaacaattgaacattttcatcactccaaaaggaaaccctgtacttattcagcaggctcacctgacttccccatccccactccccattctaagccctaagcaactatgaattgactgactgtatatttgactattctggattattcatgtgagtgaaatcatacagcatgtggtctttttcaactggcttcttttacttaacattcatgttcatctgtgttgtatttaatagcatgtgtcagtacttttttttattgctggttaatcttttatgggtattaccacgatttattttccattagttagtggacgtttggattgtttccaccttttggccattatgtgtaatgctgctgtgaacattcacctacaagtttttgtgtggacatcatgttttcatttctcttgcgtatgtgcctaggagtgaaatggctgggtcatatggtagctctgtttaacattttaagaaatggtcagactgttttccaaagcatcagtgtgcatctttttaacattcgcaccagtagtgtattagggttttgatttctcactccttgccaacacttgtcattatctgtctttctgattctagccattccagtgggtgtgaagtgtgtgtcattgtgttttcattctttttcgttgacatgtaataattgtacatatttagggactacagagtgatattttgataaatgtatacaatgtgtagtgatcaaatcaggtaattagtatgtccaccacctgaaacgttcatcttttctttgtgttgcgaccattaaaaatctcctaactttttgaaaatattatggtttcaaatcgtatttccctgatggctaatgatgttgagcatcttt

SEQ ID NO: 43623 - DNA, 1031 bp, Homo sapiens
ggatgcctacagaagggacgagctgaggctgcagggggacccctggagaaaggcagcccaagtggagaaggagttctgccagctccagtgggccgtggacccccctgagaagcacagggctgagctgaggcggcggctgctagaacttcgaatgcagcagaacggccatgatccctcctcgggggtgcaggagttcatctcggggatcagcagcccctccttgagtgagaagcagtacttcctgaggtggatggagtggggcctggcacgggtggcccagccgcgactgagacagcctccggagacgcttctcaccctgagaccaaagcatgggggcaccacagacgtgggggagccgctctggcctgagcccctaggggtggaacacttcttgcgggagatgggacagttttatgaggctgagagctgtcttgtggaggcagggaggctgccggcaggccagaggcgttttgcccacttcccaggcttggcctcggagctgctgctgacagggctgcctctggagctaatcgatgggagcacgctgagcatgcccgtccgctgggtcacagggctcctgaaggagctgcacgtccgactggagagacggtcaaggctggtggttctgtcaaccgtcggggtgccaggcacgggcaagtccacactcctcaacaccatgtttgggctgcggtttgccacagggaagagctgcggtcctcgaggggccttcatgcagctcatcacagtggctgagggcttcagccaggacctgggctgtgaccacatcctggtgatagactccgggggcttgataggtggggccttgacgtcagctggggacagatttgagctggaggcttccttggccactctgctcatgggactgagcaatgtcaccgtgatcagtctagctgaaaccaaggacattccagcagctattctgcatgcatttctgaggttagaaaaaacggggcacatgcccaactaccagtttgtataccagaaccttcatgatgtatctgttcccggcc

SEQ ID NO: 43624 - DNA, 1041 bp, Homo sapiens
ctgtcgcccaggctggagtgcagtggcatgatctcagctcactgcaacccccgcctcctgggttcaagcaattattttgtctcagcctcccaagtaattccaagctggaattacaggcatgcgccaccacgcccagctaatttttgtatttttagtagagatggtttttcgccatgttggccaggctggctggtctcaaattcctgacctcaagtgattttcctgccttgggctcccaaagtgctgagattacaggcatgagccaccatgcctggcctaattttttaaaaaaagtctttgtagacacagggtcttgctttgttgcccaggctggtctcaaactcctggactcaagcactcctcttgttcagcctcctaaagtgctggggttacaggcatgagcacttgaaatttttgacagaaaggttctaacttgctgatgaaactaaatgtatttggtttcttttttcttctagatttggaatggagagaaatggaaggagatgattgcgagttccgttatggaggtagaaactacaggatttggcaacagattggactggggagagggggagtgggtaaagtgacagataaccgggattttatatttagaacaattgggagaagttgccatcttggtgagaaagaagggttctaggtttagcttcaattaatttgtgtcagccaagggtgcattatttgattgacacttcattttccattgctttttccatagatggtacaaatgaggctcaggacaatgattttccaacaggtaagcattttctctgccttttctctctgttctatgaaagggggttatcatctaggccagcagttcccacacctgactgtatcaaatcacctggggaggcagagcactcaggtttaggatgccctacttcattaaccctttatacattgttaaccatattgctaaaaaaaaaaaaaaaaaaaaaccctgggaagcttgctaaccacatagagtaaccaggccccccctccaccacccaacatactcactgcctttaataagttagc

SEQ ID NO: 43625 - DNA, 1071 bp, Homo sapiens
acagggtttcaccatgttggccaggccagtctcgaactcctgacctcaagtaatccgcccgcctcagccttccaaagtgctggaattgcaggcgtgagccaccacaccaggcctaaaatagtttattcttaattagactgcacttatcatagctatttaaaataattcaggatcaccccttccagaccacagtgttaacttcagatgaacatccttctagagttctgtatatatacctatagataaacatacacaattttattaaattgtaatcatactgtgcatacttttctgtagcctgactttcccccgactaattaatataacagctttccctaatatctcatccagcatctttttgtccacaaaagaaatccatagcgtattttttaatggctgcagaatttgaccataattccgttattgcactttgattttaaaaggcatcagtttttcgctattatatataaagctggcatcaacatctttgtaactaaatcttaattatttccttaggatagaagtggaattactgggcaaagggtatgtatatttttctgtctttctgaatgactgtatttgtgctctggccagcagttttggagagtgctggttttctagaccagtgtttctcaactgtgggtgcatatcagaatcattgagggcacttttaaaagcagtgatacccaggaccagctcccagagattctggtttcatggatctggggtgtgacccagggtttatagtttttaaaagctctccaagagattttatatgcggccagtttgataggtgaaagtggtattccatttttttaattataattttcttctgaaattgtttcaggcattcagatttgggagaagtagccccagaaataaaagcatcagagagacgaacagctgtggccattgcaggtaaagttggatgaattggatgtgggcccactctggagctgaagtacttctcctgtccccttgggattctgggttccagcccctcctggacttgggattgtgcatctcaaaaataaataagtttaaggcttttatttttccttttacaagaag

SEQ ID NO: 43626 - DNA, 1052 bp, Homo sapiens
ttataataaggcatatattataaatatatatttatataaaaatttttatataaatatatatatacactttttgagatggagcctcactctgttgcccaggctggagtgcagtggtgtagtcttggctcactgcaacctccgcctcccgggatcaagcgattgtcctgcctcagcctcccgagtagctgggattacaggcatgcgccaccacgcctggctaattttcgtacttttagtggaaacagtttcaccatgttggccaggctagtctcgaactcctgacttcaggtaatctgcctgccttggcctcccaagagctgggattacaggcatgagccaccacacccagccttttttttttttaactctttcctctctgaaaatccagaaatagatttcttttaaattaaaataaatttatttatttatttatttatttatttatttatttatttatttttgagacagggtcttcttgctctgtcacccaggctgctgtgtactgcagcctcaaactcctgggctcaagcgatccacctcagcctcctgaataactggacttaaggcacatgctcctggacccagttaatttttaaattttctgtagagtggggtttcactgtgttgctcaggctggtcttgaacttctggcttggaactcctgacctcaagtgatactctcaccttggcctcccaaagtcctgggattattggcatgagccactgtgcccagcccttttcagttcttcaagtcttaatcagattcagtattttaaaattcttctcaaataggtgttgcacatttgtaacatattatttttcttgttgctactacaaatcggagctctctccttccattgtttctaacctatttgtataataggaaggcagttactgattttaactttgtatgtccccggcttactgaattctctcattgtttatgatagttttcaggttgatctcttgggttttccaggtctacctgcaccatcatttctttgcattatggagaaaatgcaagttgattctgtctttgttgtgagtacact

SEQ ID NO: 43627 - DNA, 1052 bp, Homo sapiens; identical to SEQ ID NO: 43626

SEQ ID NO: 43628 - DNA, 1052 bp, Homo sapiens; identical to SEQ ID NO: 43626

SEQ ID NO: 43629 - DNA, 1052 bp, Homo sapiens; identical to SEQ ID NO: 43626

SEQ ID NO: 43630 - DNA, 1048 bp, Homo sapiens
ggaaccggggtgcgggtcctcgccgcggcccggggcaacccgcggaggcctggaaatgcttcgctccggcgcctggtatcgatgttcctgggttttaaacttgctcgcgttgggagtggacgcttgtttgccgcgtcgttgagacgtacccagaatgtcaggatccgggcagatgcagaccctttgctgacagccggagagccgctccgggatctccttggtcggggccattgcctaccggcctgccttggggtggctgcgcttattttgatattacctcttttcaacttttttgatttaaatgttattccttttaggaaatgatggcgacacatatagtttgtaatttttgagaaaaaattctcacttggcaaactaaaacctcagtaattcattatttttttgttttttgttttgataattttactagtactgaaatttgggaatgacagtccaacactttcattttacaaagaaagaaattaggctcaaggtcatcgctttagttgttaaaattcttctttgactgttacccatcattcagagggtcttggatctagtggctgtgatagccattcagaacagttcccaaagagctttacaggtgtgtgttcagtggtaggggtggggaggggacggtgctaaggggccgggatcatggatttcgtgcctcctccagatgaggcctgagccatgccctggggtgatttggctcagtacagtgggcctgaatgaagcaagctgaatttgaaccccgcctgctgtctttctaggctttggggcagtggtcatttccgggaccaggccttttcattgccagctgactacccagcactttgagctcatgaatagagtaagcagggaaccatccctgggaaggccaggctgattgacctaggggttcaaggtcctgcagcattcctttcccccttgtcaggaaagggtgggcagagcctcctggaggcaatgttgagggtggctgaacctgtgtggggctgccctgaacgaagctttaaaaaaaaaaaaaatagtggtgcatttggtgccc

SEQ ID NO: 43631 - DNA, 1048 bp, Homo sapiens; identical to SEQ ID NO: 43630

SEQ ID NO: 43632 - DNA, 1048 bp, Homo sapiens; identical to SEQ ID NO: 43630

SEQ ID NO: 43633 - DNA, 1048 bp, Homo sapiens; identical to SEQ ID NO: 43630

SEQ ID NO: 43634 - DNA, 1090 bp, Homo sapiens
ctacagacaccctcatgctacagtgcatgtggttgtgcctggcctagggggtcggaattttacaattctgggtctgttaattggtgtttaaacagagagctggcaatgaaggtctaacacactgctgacttctgagctgagccagcgaactgaccacagcagtgtttcccaccttgactgccctcagcctcaccttcggtatagccaagcagacatccccttgtcttaggctataaaccctagaatttaaatcagaatttttcttgttgtcagattcttctgagtctgttcttggctgaccactgattttgctggtcttgagggcagggcttggcaatgttttcatatacagtagcagcagctaatgagttatccaggaggggaactgcttttatctccttttccctccttagactcaaaggacatgttagtgagagagccaggagtccaagcccagggcacaccctctgtgcacatggctcagcatgggcaggaagatgtctgtgggaacctgcagcctagaagcaccagctcagagcacaggtactgcatggagctgcctggggcagccatggtgcaaaggcaacccaaagaggacacgtacttctctctgtcggccttgtaggtgtgtgctatctctggcaccagggggtcatcggggttggggtcgcagagcagcgagcagatggacaagagaactgggaagaaaagaaaaggttggtcagctgtagccacgaagctgctgggtcacccctgggtaaacttccctgaacttgcactctgtattttgaccaagcagttgtcttcccttcaacagcccaatctaaattgcttgatgcaccacttgccccgtcccatgtatcagccgaggtggtcctcactgtgtggcctgaggcatgctgtgctaggatacttccctcctgggtgcatcctggttctcattccccttctccactgaagcaccccatcttagtctccaactgccctcccatccttgtctgtaccctacatcatgaacctctggcatttagtcctaggagtcctgtttactgttaaggaaacaagaattcagagcattcaagtaacttgt

SEQ ID NO: 43635 - DNA, 1662 bp, Homo sapiens
ttcccagagagggatcctgagaatcccctgggagagaaaatgtcggagccccagtcctggcccccccttgaccggcttgggcctcagcctcctcatccatgaaaagaatggacaagaggggtctgggtgcggtggctcacgcctgtaatcccagcactttgggaggccgaggcaggtggatcacgaggtcaggagttcaagaccagcctggtcaacatggcaaaaccctgtctctactaaaaatacaaaaattagccgggtatggtggtgcacgcctgtagttccagctatttaggaggctgaggcagtaggatcactggaacctgagaggcagaagttgcagtgagctgagattgtgccacggcactccagcctgggcaatagagccagactccatcttaaaaaaaaaaaaaaaaggagggacaagaggcaccagaagctcctgtccaggtctgggcctcccttgggtcactcagttctcccccattcattcattcattcattcactcactcactcactcactcactcactcattcccacactctgcagccactgacttcagctagccatgctggatgctaagacatagagtcccggccatcaaggccagtccatctcagtggcatctagacatgcacagagatgaccagggagcccttgagggacagagaggcacaccctgcctcctgatcccatctgggggctgcatgaaggaggggcacaggtgtggccttgaaggctgggtaaggggctgggagggctttaggggcattccagggggcaggcacagagctggaggctctgccaggcacacccacaggagagcaatggctggagggtgacatggactgcagggtgtggccgcggcagcccagctcttaaggggacagcctgggaaaacagacttagggacaatgatcttgagccatgaaatgatgtccaatgccccttgtgccacctgacatcagcctgattaatgaacaaacagaagaggaagcaggggacctgtgtgtccctctctctgcttttctgtctttctccgtgccccctctcttatgtctctcacgctgtctcttgtccttgtttttaactctgacacgccgtgggaactcggctcacttcctagggggaagctgtctggactggcccagagatgggcaccaccatttcccaataaacacaagataaaatcagagagctggcgtcagttccacggctggactcagtggggaaaagggcaaaaagcagcagaaataagagcagggaaagaacgggctgggtgcgatgggtcccatctgtaatcccagcgctttgggaggcctaggtgggaggatcgcttgagcccagaagttcaagaccagcctgggcaacatacggagacccccatctcttaaaaagttttaaaaattagctgggcatggtagtgtgcatctgtggtcccagctactcaggaggccgaggtgtgaggatcgcttgagcccaggaggtcgaggctgcagtgagctatgattgcatcactgcactccagcccgggcacagagcaagaccctgagaccttgtcagaaagaaataaagagagaaagagagaggagagggagagggagaaagaaagggagagagagagagagagaaagatgaaagaaagaaaaagaaagcaaaga

SEQ ID NO: 43636 - DNA, 1050 bp, Homo sapiens
cttttcagaacagctttgagccccaaccctggggctgagtgacccaagacagatcactcacactctctgggcctcagtttccccttacataaaaagcaatggttaggccaggtgcagatggctcacacctctaatcctagtgctttgggaggccgaggtgggaggattgcttgagaccaagagttcaagtccagcctgggcaacatagcaacaccccatctctacaaaatataaatacaaaaattaaggctgggcatggtggttaaggccaggcgtggtggctcacacttggaatcccagcattttgggaggcagaagcaggaggatcacctgaggtcaggagtttgagaccaacctggccaacatggtgaaaccccgtctctacacaaaatacaaaaattagccagccatggtggtgcatgcctgtaatccctgctactgtggaggttgaggcaggagaatcacttgaacccaggtgaaggaggtttcagtgagcccagatcatgccactgcactccagcctgggtgacagggaacaagactgtctcaaaacaaaacaaaagaaaaattagccagacatggtagtgtgaacctgcagtcccagctactatggaggctgaggtgggaggatcgcttgagcccaggagttggaggctgcagtgagctatgatggcacccctggacgccagcctctgtgacagagcaagaccctgtctctaaaatgaaacatttttaaaagggaaggtgaactgggtgaactctaagaccctgcatttcacaaacccttgcccacaccctgtatgcgtcgggccctggcaggaaacagagggtacgctgtctcacagggcaattgagagcgtttacaaaggtgtgggcagcattaggggaatggaccagagagggtgacctgggacttggctgtaatggggccctaagcactcctggatctgattgctgatgggagggagggagtgatgtttcctggatcagcaggcagtagccatgggtgaggggccccgcaggagcaggggctgtaggtgaaaggatgaa

SEQ ID NO: 43637 - DNA, 1070 bp, Homo sapiens
aggccaaggtgagcagatcatatgaggtcaggactttgagaccagcctggccaacatggtgaaaactcatctctactaaaaaaacaaaaattatgtgggttggtggtgtgcgcctgtaatcccagctacttgggaggctgaggcaggagaatcacttaaacctgggaggcagaggctgcaacgagccgaaattgcaccactgcactccaggctgactccgtctcaaaaaaaaaaaaaaaaaaaaaggcatttcagttcaaatagggaaaggatacatctttctttcttttctctttctttctttctttctttctttctttctctttctttctttctttctttctttctttctttttctttcctcccttccttccttcctttctctctctctctctttctctcgttctctctttctttttgagatggagtttcactctcgctgcccaggctggagtacaatggcgtgatctcggcttattattattctccatgttggtcaggctggtcttgaactcccaacctcaggtgatccgcctgcgttggcctcccaaagtgctggtgtgagccactgcacccggcttaggatgcatttttcaatattttagtgtttgaataacgggctaacttgagaaaaaaataatttgaatcacacatcacaccaaaaataaattctaggtggattttaacactttcaaaaattattattattattagtttagagacagggtctcactccgtcgctcaggctggagtggagtggtatgatcatggttcactgcaaccttaaactcctggcctcatatgatcctccagcctcagcctctcaaaggactggaactacaaacatgcaccaccacgcccagcctaggtgggtttttaaaatccattcaagggcgggtgcagtggctcacacctgtaatcccagcattttgggaagccaaggtgggaggatcacttgagcccaggagttcgagaccggcctgggcaacatagtgagactacatctctacaaaaaatttaaaaatgagccaggcatggtggtgcacacctgtagtctctgctattcagga

SEQ ID NO: 43638 - DNA, 1146 bp, Homo sapiens
aggattcagtgggagaactaaacagataaacagatccagtccccaccctcagagagttacagtttaatgggaaaaagacattcaccaaagaaggacacagcccactagtgagttacactcgagagggatcatttacagaacaaagcagactataaaaatacagcgattggctgggcgcagtggctcacgcctgtaatcccagcactttgggaggcagaggcgggcagatgacttgaggtcaggagttctcaaccagcctggccaaaatggtgaaaccccatctctactaaaaacacaaaaattagccaggcgtggtggtgggcacctgtaatcccagctagttgggaggctgaggcaggagaatgaatcgtttgaacccaggaggtggaggttgcagtgagctgagaccgcaccattgcactctagcctgggcaacaagagcaaaactccgtctcaaaataaatacatacatacatacatgcatacatacatacatacatacggggattaaaatagtctagtagtgacacctgaacagagagattgatccaagaaatgaaacagaaattccggaagttgacctgaatacacacacacacacacacacacacacacacacacacacgaaggcgtgaaagactccatgaccctcaaggtataagatgcattttttttttttttttgagacagggtctcactctgtcacccagactgggtgcagtggtgtactatcccagctcagctctaccctccatccccccaacctcccccaaccaccctgagctcaagcaattctcatgcctcaaccctcagcctcatgagtaactgggactacaggcgtgcaccaccatgcgcagctaattttttgtatttttagtagagatgggtctaaccatattgcccaggctggtctcgaactcctgagctcaagcgatcctcttgcttcagcctcccaaagtgctggcattacagctgtgagccaccgcacctggccgcattcttctaaatcacagtacatctggctcccagtgcccaggctctcagggcagaaggtccagtgtgatcactttgcatggcctctctcccctcctgagcttgtgccagggccccagggctgacctggagaaggaaaatggcagagggtga

SEQ ID NO: 43639 - DNA, 1047 bp, Homo sapiens
ctcactctgtcacccaggctggagtgcagtggctcgaccttagcttactgcaacctccacctcctgggttcaaagagttctcttgcctcagcctcccgagtagctgggattacagatgcacaccaccacgcccagctaatttttctatttttggtagagacggggtttggccatgttggccaggctggtctcgaactgctgacctcaggtgatccgcctgcctcggcctcccaaagtgctgggattacaggcgtattccactgtgcccagcctgagtttctgtttagaaacaacagtctatgatagtataatcctctcttttttgtacacagagtaaagaggacaaataggtgaaagaataaatgaaaggctggaatcccacttcccccgctgtcccagggcattggatattgacggataggaggcagcaaaccactcacagagccaggaagaaatgaaggcgttggtattgccaggaggggaagccggctcggctgaaatacgctatgaccatagcaaggagatactgatggagagaaaggaacacagagagggagaggtcacatcttggaagaggaagattgtggagagggggaatgagggtctggggaggggctgcccatcagagaagggacctcagtgttggggtgactgtactcatttggaaattgcgggatggaggggtattcgaaggtcggatgcaaatccgagaagccagaggaagggttttgggtgatgctcccaggatggtgggctccgatgggatctttggagggggtgtgtctaggttggctggtgtcaggagggtcttttgtgtgccaggcagagaactgtcccgaagagctgagagtagaggggccaggagcttcagggctgcggccagactgtggcccagagctcagatcccaaaggacccataggagaggcaggggccactcattcactctgcaagagaccagcagaatcctgagggagatgctgacaaatcataaaaagaccaagaatagccgggagtggcggctcaagcctgtgatcccagtacttttt

SEQ ID NO: 43640 - DNA, 1115 bp, Homo sapiens
tagggagcttgtggctgcacactcatttcagagtctgggagagggagcagggactggttgtgaggattccccatgggaatcctcccaggaccctaagcaggagctgcaagtgctgttgagaacctgatgagaggtggggagcatgagggaagtttggcagaaacacaggaaagctaccaaatgcagacagccaggggacgcagggctgctagagcggtgccccagagccaggagagcaagcctggaaggagagccagaggcaggaggggcacaggcagcccagggtgtgggaagcagccaggaaagatctagagctggggtggcaggggaggggctgctgacatcaggaatgttggatggtgccttggaatctcctgggagacagggatcacaagaccctctgccaccttccagagggccacgatgaaaacagctaagatttactgacaactgattatgcaagaggccgtgggttaaatgcttcagtgatgcatcacctcatctaatttcctgtactaatgtaggaccacccattgctcaccaccacctgaagccctgtgctcaccaccacctgaaactctctcacctacgtgagacctcctggagtaggagggcaaaggcaggagggagggacgacgtgaagctgtgccaccaacagggagagtggtcccattagtatggcagggggtgacacagcacagtcccctgtggctcaagcctagtacctgtcgcgtactggaggaatggggataagcgacccgtacaaccacagcaccaaccctagagccaccggcccccaaaagcggccctgccgcccgggtgctggatgtgcctccacgccagcgctgacctcggcctagcacagggtccctccaggcatctgggctcgcgtgcgcattagtaagccagccattcctcccctagcagactggggagtggccagaccctaccgaatccccctgttcccacctgagatgccagccccccacacccccgccctgccctgggctcttaccttctgcggccgtccctggccgcttccctggcttgccccccgcctgggcttttcggacccgcggggtgggctcgggaggcggcggggcctccacgtcgtc

SEQ ID NO: 43641 - DNA, 1034 bp, Homo sapiens
aggcgggcagatcacaaggtcaagagattgagaccatcctggctaacacggtgaaaccctgtctctactaaaaatacaaaaaaaaaaaaattagctgggcgtggtggcacacgcctgtagtcccagctactcgggaggctgaggcaggagaatggcgtgaacccgggaggcggagcttgcagtgagctgagatcgcgccactgcactccagcctggatgacagcgagactccgcctcaaaacaaaaacaaaaacagaaacaacaataacagaaaaacacagacatttactctctggcagttctggaggccagaagttgaaatccagatgtcagcaggattggctccttctgaaggcccgaggggagggtccttcctggcctcctccctggtgttcctgggcttgtggccgcatcactccgctctgcccgtcttcacactccctcttgtctgtgtgtctgtctctctgttctcatgaggacacttggcatccagggcccaaccacacccagagtccctggtctcctgtggctgactcactttttactgtcaccgtgaagtccagggggtccttgtacttgatgttctctcctggcaaggccagggccctgtgattggcctctcatggagtgctgggcagggcctccatggcctctgtcgggcgggggggctacttcatctctgagtctgtacccctcgtgtcccaggcagtggagtgggagtgaagaagctgtgtgaactgcagcctgaggagaagtgctgtgtggtgggcactctgttcaaggccatgccgctgcagccctccatcctgcgggaggtcagcgaggaggtgaggcagggtgctacacagtggggccgccaggcagacctggcctcccactagaacacctccctggaggtggggttgtggggaagcaggttcagagacaatggactccagaggggtgggggctgcggtgccagctcactaacaccagagctttggtgggctctggccccaagattatacctcctgtctctgcattccagcacaacc

SEQ ID NO: 43642 - DNA, 1040 bp, Homo sapiens
tgtcgttctcctgcctagacccagtgggctgagtgggggcaagtgttggcttttatgtccagttttgatcttggtgccagcacattgcctgggtggaagcatgtcctactatcggttacagggatgtcattctgcccagtgctcaggggcatacacttggatcccagttgtgtgcccttggacacattgcttaacctctctgtgcatcagttgggtgataatatctactcctggcacattttcagcgttggctgagttacatgtacagtgcttaggccacctgggggagagtaagagtgggatacgtgaggatgtggagtctgttgcatttctgtctgctgctggcatccttcttgtcttgttttgagttgctcgcctctgtctgctccctagggcgtagatttgaggaatattcctggttcttcccaggcagcaggggctcaggctgtgctggagtcagctaggctaaggggctggtctggcatccgcgttgtcctgtcacctccttggtgttttctccaggcctggatctgtgctgtgtgggcacctgtattcctccctcctgccctcactgattctccatacctttcttctcgagagtgccaagcccctcccatgtgttcttgttcatacctaggatcccgggaaggggctggggaagacggtgcccaggtgccctgggtaaacaaagccacctgactccacgggaatggaatgggtggaggggatctgaggtctgcattttgagtatctctggtctcagaggatgaagcatttggtgggggttgggggtggggggtagggtggaagaatctaaagtcttaaaagaaaatggcagttatttgtgggacagggctgtgttgagacttggcatgcttctttttaagagtcagtgttgtaatttaggtataagtgaagcagtactttgtattagtttcctgtaggcgctgtaacaaagcaccacaaactggttgacttaaaacaacagacatggccgggcacggtggctcacgactgtaatcccagcactttgggaggcc

SEQ ID NO: 43643 - DNA, 1066 bp, Homo sapiens
cccaggcaggaggctccaggccaggagagaggtctggggcagcatttgtgccagagtggagggcagatgtcccatgccctggccgcccctccccgcagtacggtagggccccagtccgtcttcgtgggcaacaacaggacagactggctcaggccccaggcgcgcccctggaggtgcttggcacagttgcgcccggtccccatgtggccgacactctcagaccagggctctgcgtgtcccacctacggcaggcagtagggcttcctgaggtctggagcagggcctgcatctcaggagctgcatccttggccctcctggctgtcctccaccccacctccctcacgtggcccccagtgcttcctgctgagcagaccctccctcctctgctcccctctctgctctggccatcagctcccatcacattggcatcatcactctggggccagggaaggggctggctctctggggtggtgggagggatggggccagcagccaagccatttccaggacttccaaaacagcgccactacacccaacacggccctccagcccagctcccacctaggcctgggctccttacagagccccagagtgcctctgtggggaccccccacttccttctggccagtgccaccacccagcccatcatcagaagacatctttctccatggcagggaccagggggtccaaggggcacccatggtgctaggcaccagggcctgggcattcttcccatctggcagctggggatgggtgcccctgggacccgtgtgtgtctggggtgggtcatgctctctgcaggactcctaaacaaccttctgggctgtggtgaactctgagcctgcacctaaagacctgtagttctggtctagggcctccaagcagtgtccaggcagtgtccagaccagggggcggtcccccagggaccttgtaagatgtttcctctgaggagcagagcaggcctcctggggacctgggggatggtcttttgaagggcagcagccctggagcagggtgggagagtctggggccacctctgccctctaaggccacctgagaggtgagg

SEQ ID NO: 43644 - DNA, 1028 bp, Homo sapiens
ctctgtcctggagggtggtcagtgcatgtggacagagcccagcatggctgtcctgggtgaccagctaaggggacaaggcagaggcagggctgagaggaccacccatcctgctaggtcagcccagctcagccatatcacacggcagtgagcatggagctcagttctctgccaatggcagctgagtctagtaccatccagtcagagtctggtaccagcccatgtggcatagccccctcggcccgcagagagaccccgtctgtcgagtgtgcttcagtttggcctctgtggtctctcctgcattgatcaggtgtaagggcataggagacccagtgtccggccagctgcagggtggcagcagttgccccggcctggagacccgggaatgggcagtgccttcccaggatggagggcagagggtctctccttgtcccacagaggcctgcagaacccccaacccaggtgtctgagatgcctgtgactgctccgcctaccctgggctcctgcggcacctaacgcatgctttgaacttgagacacagaaaggaagttcccgtgcccttgaatgctagtgtagatgggcatcgacaggactctggccacggtgaatctggagttagtcccaggcagagatgtgaaatgagcagccccccaaaaaatggttggccgggagccatgcactcaggagggccgggcccatgcaccccacactgcgcccaaggcgtgcacaagcgattgttttaaaagcgggttcacaaggaaggatgtttgggaactgactgagacaacagggacgtctgctgcagggcttcccagagctctgatggcagcgtcggcctgagtccttcgaggagggctggtttgtacgtggcatttgctgcccactggactgtgaacttctgtctttttatttcccactgctgctgtggtacatctccagtagcatagtttggaaatgcaggttttgatagactcaaggatctaaatagaaccctcttagtaccaaggactgtccggggtctctgccagccc

SEQ ID NO: 43645 - DNA, 1038 bp, Homo sapiens
ggagttgttgctggactctcaggcgaagctgaagtcattgaagtgtgtgaagctctgtgcttgcatgagggcaagcaaggaatggctgtgcctgaggctgctctgggaaactccttgccccttgacctcttttgagagcattcacgtggtcttcttgctcatccccttataaatgtgctttgcctgcctcagcctcatggtcagagcagtggagactggagccctgtttgcacgttctagttgttcggagaaagcctaggttctgggctcaggtccagatgcagcggggattctgttctctgactgtggcgaccttgctttggttcttgttgaagtgaaccaagcccggccaccacgcatggcatgctgtgcttggctccccataagacgtcctctttgggtgcacggtgtcaaagtgtgggcaggagtggagagctggtgccctcaggaggagaccacagcatgtccatcagctcagcagagctcgacagccacaagtcctgagaagctttgaccttgaagggcttctgggagaggaggaatttctgcatggggcgtgaaggcacactgtcccaccacaactgaaccagaagagagtgaagactcccctcttcccatcctctgtgccaggtgccagactgtgctccttggaacttatggcccaatcttacctgttctccagggactggtcactgcctcaggacccccaagcctatgccctgagccatggctgctgactgactccagccaaggtgcaaagacgagattatgagacaggtcctcaggcctgtgttccaagtactcacaggggctctgggtgcccatcgccgggagtatggttcagctgccaccggcactgtccatttgcctgtctgtcaagctcagagcatggataagccacacagcagggcagtgcaccctggcaccatgcacggccagcaagaatcaaggcccgcagatgctaagagggcctattgtcaggggaaggtccccgctcctgcacactctctatggatacttgggttgtgggggctctct

SEQ ID NO: 43646 - DNA, 1046 bp, Homo sapiens
gatctcctgacctcgtgatccgcccgcctcggcctcccaaagtgctgggattacaggcgtgagccaccgcgcccggccggcctccttattttgatggcttgttgccaagcccactgcccaggaccaggaatggggaggtctgttcattccaggtaagccgaggcaacttccaggcagttctggacctcaaacccctacctggatcctcactgtcagttcgggacaggccaacctcaaggggtgaaagatggcagcactacacattgtatgtatgcaccatgcacatacatgcttgcacacatgcagcatcatagggtgcaactggcatcccccttcatgccctgctgccctgctctgagggcaattcagtggggtcatcctgttggtgtcctcttggcaagctgtttttttggcccctagggcactgcatagcccaggcgtggaacagaaagtccctgtgcctgcaaacagcttcttgtgacctagcatgggggagcccgtagactgggcagcgacccagttaggaaggattcaaagaaccttgaagatgctgtggtccagtggaaagagctctgtgtgttgaatctaaatctattctgctgtagacttgccatggggcagcatcctgacccttgagaggatgtgtgtccctccccagagtaaagtgccctgggagatcttcagcgacatgcaggagcccagggctggtggcgcgggggtaggtcccagagtgaccctctccctgagattgacctgctcctcaacagccagggagcctccagctctcaggtgacagctatagacagtaatgaactgacctctcagggctatggtcgttcactgtgtgtgtccaggcacctgcctggtgctgatgctaaagtctcaactccttcctgggcatgacagtgtctggggcagggtctgcagcatatggaggcttgcaacacgcagaggtttcatgtaaaatgtccttagtgactgtagcctttttttagaaaatcaaatgaggaaacacctagaaggtaggtgtgtgccctcatgtggcc

SEQ ID NO: 43647 - DNA, 1048 bp, Homo sapiens
ttttgaaacaacttgggcatgtgaatataccctttcaattgtaaatattatgaaatctgaacacagatgaagtatttctgatgaaaaagtgcagtgctcatcttaatttttgttgggttcaagtgtacttctgtgtccaaagtacacttgtggacacagaagatttggggatgttcccctccttcctgttgggcaggtggctcattgtcttcaggtccatctcccactgtgcccaggagccctccactctgggtgtgtgtttggacctggccagtgaaaccctgtgttggggtctgtggagtgccaaaaggcctgagagcaccagcaccgtcccctggatggtatgtaggccgaccccctgcccacatggtgctgatggtgggctgtcagccccagtgtagctctgctttgcctcttcatgctgggcaatctggaaaaggcccttacttccaagggtttgtcctcatttttaaatacaaaaaatggtatgtatggtaaatggtaatggtatgtgttttacaggacttgtgaacgctaataaaataagttacatggatcacagtaataactactggtgaagataaaaaattcgtaaaggatctcttctttccagagatttacagttctgtgagttcctctgaagtcttccctggaatagagaaaacaatgcatttccctcttggaaggttttcattgcatcagcttggtaaagacgaggtagagtttgtagtgttggggtctctgagggtgagtcaggtccccgtcacacaaactgtaaagtcaacgacaaaccagcttagcagagtatctggaaatggaagattcatcccaaatttaaattgcacactggcagagcagcgtcatttactgggtagagctggcgtgtaggggagccacccactccccctgttcaccactccccctatctgcattcggaatgtcagacaagatttctgggatgctggcttcagatcatgattgcaggtttttgtcttgctcttcccagttctggaaaatctccactgtgtgctctcccgcaccacatcgg

SEQ ID NO: 43648 - DNA, 1051 bp, Homo sapiens
gtgtggtctgcctgtgccatgaagcacagtgtggctgagcgtcaagagtccccacactcaaaggaggcagcagatacagggctgcacactgtgtgattccacacatgtgacattctggacacggacatgctggatggcaaaacgagcatcgggctgagaggactgctgagaaggggaacggggctgctgggatgtgggttgattgtagcagtagctcatggagatgtgacctcaaaagagtgatttttactatgtgcatactatacctccacaaacttgactttaaaaaaataaaatattcacagaaaaaaacaaaaacaaatgtaaaaccatcagactactttatcagaggtgttatttttagatagaggtctttgaactccatcctaggaacattgtacccatgtcctcccagaactgcatcttgcactgggtgtcggaagacagccctgcaagacctgtatgctctgtaccattcagtggtttttaaggttaactaccagaagtcatatctgaggcctcccagaagcattactctaaggaaagtagttaaatgtggacagtgacagcagaaacatttacacattaaaccagtttatagaacatgagaatgttcagagcataaagaagcttgtcagctcaatgacttacgaggcgtgggccattaaaaaaaaaggtctggagtttgggaaggagaaaggaatggggatctgcagctcagagtgagagatggaattctgtaaaggaacagtgtggagagggactccaggcaagtcaataacgatgttagaatgcccttgtttagaataattatcatgctaataatattgttcatattgtttttactaatatgctcatccttaaaaatagaagatattctaagggtactaaataaataaataattaaaattttgcaactgagaccttcctcttccagagcctttacaagaacctttatagacaacacctcaggtcctgtttgctgccccagcatggagggcagcccacttggttacagtgatgacagatggaaacttgactggagcaggtc

SEQ ID NO: 43649 - DNA, 1050 bp, Homo sapiens
ctgtgaggctgcatgagatgagaaggatgcaaagggatggcgtccagagctgcgctgctgccaccaccctcagctccttggttagatattctgaccttctgacctcctggcagcccagtgcagacatggccttcgcttcccagctgccttccacataacctgctcctccctgtgccgtggatcccacatcagccagccagggcaggcaggggtggctgctaaaaccgtatgacagttcttgcctccctccctccctcccacacttcagaatgttaaatgagacttcttgactcaggcaagctcctttcttggttacgaagatgtaaaatcagccgtggcaacggcaccagctcttttttccgatagctcgttcagtccccaaagctaggcagttggcatgcgcaccatcctcctttcttcctgcagtcgggggagctgacaggctgtcctccatgctgccgtgggtggctgctctgctgcgggggctcttggacatggctatgcttgagatggtcgttgtagctgtatgtgaggtgaatgccgttccatatacacttcttcatgtattgacgtggtgcgcacacaagtcatttaaaatcagtgaaattgctctggagtattctttgaggagttagaccttgaagctcaggctttaaaactcatcgtaatatatttgtttatgatttttgaaccctgtgagtgtttttgtgcaagctgtatccacctcctcccctcaatttagattatttctcaagagtggaattctagtgtaactgcagcctctgagctgttgctgtggttctccctggtggatgagttgtttctggagtgtcgccgatgacattagccctatatccccacatccccaccaacagtgggcttttcatcttcacttatctttgctaatttacccagatacttccagtgtcacttcttagaacaattgtgaggataaaatgaagatgggtggtttattgtctacttgtcctcattggcgagccactttcctgagtccccacaactttcctggctcattgaggccatcccatg

SEQ ID NO: 43650 - DNA, 1047 bp, Homo sapiens
gagctcactctggctacacagaggtggggccaacctgggcacagacaacatgctccttggtgctgccgtggcctcaactgctcactctcctagtgagtgtttcatcctaagcagggcctcctatttaggccctacgtgaggccctatgtgtgatgtgtagagtttccagcaatggggcttggactggcccatcccagttctgactctcctggccacccagggcctacctctgctgatggccagtggtagatggcagtggttctttttctaaatctcaccctgtgtgctcccctgcccatggcattcagcagccaaagaccagagaagtgctcttctcctgcctgcaaatactgtgaagatcaccccatcacccagcagttcagttcctcatcctttgaccccagacatataaagcctgtgcattatgacacagcctggagccttttcccaagctataggctcctgtgactactaccagttcctttcctttatgtcatacttgactttgcagatgccattacggcctctccctcacttgagcttcacgtggttgtggaggtatgagagcatgagtgatgcactagtagtactggggccggctagcttgccctctgaaggtgcagccctggccgcctgtattacactagtgagcccgtgatcctggggttgccatctccatggactgagaggtcgtgatagccctgccttaaaacactggccttgactctcctgccttccgttgggtgaactcagtgcagatcatggagcaggtcacgatgctctcaagttggttccctctgagcgaggagctcttggtgagcaaccccgtgtgtggtccggttgcactttttagatacttcatgcagaagcccaaagccttagtcactggtctctgagcccatagccaccgtatttggaatcttttgggattacaatcagggtaccaatgattccttttactttacactatttgcataaatatgtgattattaatacatagctcaactcttaagggttttgttgacggaagtaactctaacttcttcg

SEQ ID NO: 43651 - DNA, 1034 bp, Homo sapiens
tgtttttgttctgttccttcattattgacttggcttttttgacagtttgattatgacatctaggtgaggctggctcccttttagtttattttacttggaattcattgagcttcttgggtgtaatttttttcatgtcaaatttggaaagtttttagccattattctttcaaatattctttcttcttttctcttctgtatgttggtatgcttaatagtgtccctcaggttctgtgactctgtttatttttcttcactgttttttcctcctgtttcgcagtttgggtaatctcaattgacctgtcttcaagtttgcttgttctttcttctaaatgctaaaaagtggttttgagcccctttcatgaacgcttatcttttcccccttttacttttgaactccagaatttgtatttgattcttaaaaaaatggtaataataatttctatctcgttatcagtatcaatagtgatactgatatttattgatattctctacttaaaagacgttattcccatactttcctttagtaatttttgcatagttttcttagctctttgagcatatttaaaataggtgatttagagactgttttctgctaagttcttcatatgtgggcttcctcagggacagattttattgattgctttctttttcctatgtatgggccatactttgttgtttctttgtctaatttttttttttttgctgttattgagaaatggatttttaaataacacaatggggtgactcaggaaatcagatgctcctttcttcccatggttgctattggtacgtgatatagttgttcttgtttaatgacttttctgaactaattctgtaaagtttgtattctttattgtgtctgaccagtgaaatctgtacttggtgaacttagtggccaagtaattattagatggcgatttccttaaactcctgggatcagtaaacacctgtttttgtcgaggggcttcatctacctgttggagcataccttcattgcttggcctaacagttaaaaactgccttagcctttattt

SEQ ID NO: 43652 - DNA, 1056 bp, Homo sapiens
catgcccagctaatttttgtatttttagtagagacccctgtcttcaccatattggccagactggtctcgaactcctgacctcgtgatccacccaccttggcctcccaaagctctgggattacaggtgtgagccaccactcctggcccatctgtgtcttttaattggggcatttagcccatttatatttaaggttaatattgttatgtgcgaatttgattctgtcatcatgatgctagctggttattttgcacattagttgatgcagtttcttcatagtgttgttggtctttatattttggtatgtttttgcagtggctggtaccggtttttcctttccatatttagtgcctccttcaggagctcttgtaaggcaggcctggtggtgacagaatctcttagcatttgcttgtctgtaaaggattttatttcaccttcacttatgaagcttagtttggctggatatgaaattctgtgtttaaaattcttttctttaagaatattgaatattggccttcactgtcttctggcttgtagagtttctgcagagagatctgctgttagtctgtgggcttccctttgtagataacctgacctttctctctggctgcccttaacattttttccttcgtttcaaccttggagaatctgacgattatgtgtcttggggttgctcttctcaaggagtatcttcgtggtgttctctatatttcctgaatttgcatgttggcctgtcttgctaggttggggaagttctcctggataatatcatgaagtgtgttttccaacttggttccattctcctgtcactttcagggacactcagtcaatcgtaggtttggtcttttcacagagtcccatatttcttagaggctttgttcgttccttttcattcttttttctctaatcttgtcttcacaccttatttcagtaagttgatcttcaatctcagatattctttcttctgcttgattgatttggctgttgatacttgtgtatgcttcacgaagttctcatcctgtgtttttcagctccatcaggtcatttgtgttcttctc

SEQ ID NO: 43653 - DNA, 1043 bp, Homo sapiens
tcattgatttttttctaagagtttttcatgtctctatctccttcagttctgctctgatcttagttatttcttatcttctgctagcttttgaatttgtttgctcttgcttgtctagttcttttaattgcaatgttagggtgtcaattttagatctttcccactttctgatgtgggcatttagtgctataaatttccctgttaacaccgttttagctgtgtcccagagattctggtatgttgtctctttgttctcattggtttcagagaacttcgttatttctgccttaatttcattatttacccagtagtcattcaggagcaagttgttcagttttcatgtagttgtgcggttttgagtgagtttcttaatcctgagttctaatttgattgccctgtggtctgagagactgtttgttatgatttccgttcttttgcatttgctgaggagtgttttacttccaattgtgtggtcgattttagaataagtgctatgtggtgctgagaagaatgtatattctgtggattaggtcagcttggtccagagctgagttcaagtcctgaatatccttgttaattttctgtctcgttgatctaatattgacagtggggtgttaaagtctcccactattattgtttgggagtcttaagtctctttgtaggtctctaagaacttgttttatgaatctgggtgctcctgtattgggtgcatatatatttaggatagttagctcttctagtttcattgatccctttaccattatgtaatgcccttctttgtcttttttgatctttgttggtttaaagtctgttttatcagagattagaattgcaacccctgctttttttttttttttttgctttccatttgcttggtaaatattcctctatccctttattttgagcttatgtgtgtctttgcacatgagatgggtctcctgaatacagcacactgatggattttgactctttatgcaatttgccagtctgtgtgtggttttttttttttttttttagacggagtcttgctctgttgcccatgctgg

SEQ ID NO: 43654 - DNA, 1084 bp, Homo sapiens
tccctgtgcctctgttactgcttagcggcgtgatgggtaggtctgtagtttgtgcactgataccaaccattctcctttccccaggtttcttttatgcctcctcagggaacaggtgtcaggctgtgggcctttgttcccctcagcaacaaacacaaaatttatttttcttcagctacaaacacccggtcacccccctttaaactacatcaggtcatgggtgagacccattgaagccccatccagtcctgagaggcaaagcaaagaacccaggtcacagcgatgaagtggacggccaggcctgtgtgctgtggggctcttccatggagcagggagccatgtcctataagtaccgcatgctaaccgattgcgccactggagccacaccatgtcatgatgtacctgtaacattcgcaacttgagtttcaaacactaaagtttctgaaacctccatctaatgagtttaagtgagtagacgtttaatcttttttaattttttgatagagatgacctcattctgtcactcaggctggagtgcaatggcatgatcgcagctcactgtagccttgaactcctgggttcaagctattctcccaccttagcctcctgagtaactgggacttcaggtgcttgctatcatgcctggttaagtttaaaaaaaattttttgtagagatagggtcctgctgtttcccaggctggtcttgaactcctggcctcaaatgatcttcccacttcagccttctgagtagctgggattgcaggtgtgagccattgttcccagtggaagtttaatcttttagtgggagagagatgtctactcaaggaattgtgataagaataacattatcataggttgttgtaaatagataatttccactttaaaaaatctcaagtaacaatgcaaaatgggacattacataatttaaatccataatataaaaaaatttgatatatgccagaaactgtatccatgtttccttcttcatgagaacctgcaacctgtgaagtaagtaatttcattctattttgttgtaaatttctttttttaaatttttattttactttaagttctgggatacatgtgc

SEQ ID NO: 43655 - DNA, 1011 bp, Homo sapiens
tgatgacttttcaagttgagctgttctctgatcaccaaaggtgacccctggagatttcgttttatgaactcatggatttttcatatgctacgtgcttcagtccattgtggactttatttatttatttctgattgtcccgtctttggccagcagggagccttctgaaattggctcatgtgtcctttcagcatgaccctcctggtctttgacagttccccacttgtaaggaagacggctaggcttaccgtgtgtgttctggtcccaggttggggactagctacatctccaggaactctggctctcctcttggtgagttagcattgtctttaaagtaggcaggctactgtcattgcaagaccaaagtgtggtagatgctaaacagataacaatcaggtattgataaaattattgatactagatttttagaaaaatctaaaaaaagtgtagaattattaggcaataaagaagtgtagaattactaggcaaaagacataacttctctctccaaatgtctcagagggttcaagaatcatcccatagtcataaaagctgctcagtgagttctttccatagccaaagactttctaaagggaaagcagtgagtgagaaagcaatactgagtgtcacgagaccttgttttagtcattttaaatggtttgttcctcacagctaccttttgggagagatgctattagtgttcccattttataggtcaggagaccaaggcacagagaggctgagtgacctagtcaccgttacctggttgctgtgcggggaagctgggcttgacctcaggttggacaccacggacacacagagcattcagggaaactgcttgactgctaggggactggcttggagacattgatttgtaggacatacttgagaccagagcccgtggcctggggtggctgcttgctgcattggcatcaaaccttttgtgtgtctggctgaggtggcagggtatccacagttggcctgatattgcggggcgggggggtcacatccctg

SEQ ID NO: 43656 - DNA, 1046 bp, Homo sapiens
taccaagtgtggtgggtgcaggcggcggcctgacaggtgcattacagcctgaagaactggggtgaggccagaatttggctcagccacttagggtatgtgactatagaccattcctttagcctctgggagcctccatttcccagagatgacaatttccaagggtgtggtcaattctgtgtgcaatcctgtgtggccagacagaggtgccccttgctgatggcctgtccctttttcttattcccttctaattgatgtcatatgtctcttgtcttcatgtgaacttgatatcacctaagatccatggctttgaggaaggctaatgcaaggatggtgtttcagttcatttgggctgctgtaacagaatacttgagagcaggtgtttatacaaaattttattttcctacagttctggaggctggaaaatccaagatcaaggctctggcaggttcagttgtcaagtgagggctctctgcttctaagatgggcctgatgctgtgtcctttggaggggtggaatgctgtgtcctcacgtggtgacagggacagaaggggaagagagctggatgctgcgtgaagcctgtttaataaatgccttaatctagtcataggggaggagccctcataacctaatcacttcttaataccgtcacattggccattaagtttccacacctgaattttggaggagacacattcaaaccatagtagatgggaaacatacggaaactttctacagaagaccttcgttacagtgtttgttggcctggggcaggctactcaggctcgtcacttaaagaattatttttattgtcttcctctggagacttttggttttgtcaggtgaacgttgtggctgtcaaacttgcacggaccatcccatgctgagatgggacttcaataagtgcgttaacagataggtatcaggtcttcttctcctaccaggcctgcccctagggaatgaaatggcctcatggcgaagcatctcttggttaaggctcttctaaggcaagaactaattgcttttccttggcagcccaagtaaatgtt

SEQ ID NO: 43657 - DNA, 1034 bp, Homo sapiens
tcctatccttttcatcttaatttcattcatatcttcatattacgtttttgagatagctgtttatttttttgagggggaaatagtgacataaataggtttagaacctcaggtggcttaaaaccccagatgtagtcagtggtaaattttttttttcttggttagtctagttttggtgttggtaagtattatatatgctggtgggtttttaaaaagggcacgtggtagagtctggcatactatttggagtcttgtggtagctgcccacttcctgctaatgcagtagagcatgttcataatggccttatatgctttccttcctagggcaggccgtacttagtcataccaggtaagaaatatgttttaaaattttagttaaacagttatgatgatagcttatagtttactttgcatttctttatttatagaaagattacattttctacacagtgatttactgttgttatttcctactttgttaactcattaactccacttactcattgatgggagtctggatattatccttctgtagttttacaaatcctcacattttcttattcactgcttttcttctatcagttgattcactgaatttagtgtggggattttaccacatcgatactgccttcagtgattttctttatgttagattttagaaatttctctctgctttaatgttgtaggctaaatataccattccattgtctactaaagggctcaagactgttctttaatattgtttgatttctttaaaatgaattccactgtgacttgatcaagttttgtattataccacttggggactttaattgatattatgttaaaactccatattaacttgaagagtatgatcagttttgttctcgttaaattttcctgttaaaaggaagcatatcattctattgttggtggcttccttttttctgtcattaaattcagttacagaaagttgccctcaagaattatatacaaatctcatgtgtcctcagatccattagtagccatacagttaatgtttgtgttgcttttagcaa

SEQ ID NO: 43658 - DNA, 1029 bp, Homo sapiens
attcctggaaaattcatgatataataaaagcatgcaaaaaattatttgggtttttatctaaaattgagttaggttacaggctcagaagaatgttaaacagcttctgtctacctgcatgtctaatgggatgtgtgaaggtaatgcagggcaggggacagtgcccattgactgccccaaggacacctaacgctgcccacacactcccaaactcccaggaggcagggcctaccctccctttgagagctgctgatcaagtaggagttttctgttttcattcatatttgaaaagttggaataatctgctttatgatgtctttattccctgaaaagttaagctaataatattggtcagtgttttcctatttaggaacattttctgaacatgtggtcattaggggattttagagtataagttatgtatctgttaattttttctgggtaattatgtggttgagatgctagtggcacacattatggttacatttgttcagtaactgtaactcgagccctggaaattaggcttctataaaatttcatagcaattcatgaaatgttgtttgtaagcaaaatgtacccagctccttgactaaagttaccttaaatattcttaaagatagagaggtaatacgcatttctttttctctttctgtatgtgtgtatatatgagagagagagagagagtgtgtgtgtacatgtccctgataattcctatctcagagcagtggaagtcctctgagtttgataatatgctttgcatgtgctatatttgtggactgcctcagaacatctcttggggagactacctgggttcagggaccacctgcctatgcacctgaatcatgtgagccctgattttatttaccacggagccaggcacttgaacactgtcccatcccaactgtgtccatcccaactgtggacagcttttacacggtccacctccttgccttccaggaccccttcctcccttctccttggcttctgtggccctgcacccatgaaggccagcacaggcaccaccttctctag

SEQ ID NO: 43659 - DNA, 1032 bp, Homo sapiens
aacatatctcatgaatgccactcttcagtaacatttagtttttctcatattttcacatttgtgtatgttctctgtcttcttagggcaactcagagttgtactttgaacttggtagtagtttgaactcttgttttggtttggtcaaagtaaagataaataaaaatagttaaaagttaaacttgctagtagagtcctgaggccacttctctgtcttccagacattgtgctgagccgtcaggctgtcagctgccccttctggttttgttgtttgtgctcttgcccttctttcccttccctcatgggttgcttcccttgcagcccctgagttacagatgcccaggactatgcagagcccggtccacgcaggccttgtgctctctgagccacgctgtgaggtagttggagtgacctgagtttttgtatctcctttaattaagccaaggaatttgctgtggaagcagcatctgagtgagaggctaacattggggggaccttaaaccgagcctgggcgtgtaggcagctctgtcctataggatttgctttgagaccctctggaataagtcatctcaaatgacttggctgtgagttctgtgagctgagaaatcagatttggagcctgttatctggtctttaaaatagcagctgtgggattctgaagagtgagggtcagatctgtggtctggctgctggctgctgtggtatggagtcagtgttcttagctaaccaaagactagcatattctctctctcatataactgttaatgtctgtttattttttggtcttttaaaaaaatctttgaattttagataattcatatctaccaaaaaaaattgcagaagtcatgcgaagaattctcacatatgctcttcacccagcttcaccaaatgttagagtcttttataatgagggattaccattagctcatctgtagaccttgtttaaattctgcctgttgaatcatgtcctttatccttggctcagggttcaatttgttattgtcattgtattcgtggttgtgtctctcttcagtc

SEQ ID NO: 43660 - DNA, 1034 bp, Homo sapiens
ttagggtttgcctcttggatgacctcacggtagggtttggtgttggtttcctgggcatgggccgtcagtgtcaactttcatagcacctgcagttcaggctcttgacctgcaggtgttgctgtagacagtgggatggtgactttgcctttgcttgtgctgggatgctgacaaaaatctctgaaaggctgtgtcagtcctgggcttttccttttaaaaatcacgagcagaattctttaacagagaagaaggaaaatatggtagcactaagaatgtcagttactgcctagaaactgttgtctttgtcctttgtgcttggactggttatctttttgtcctttggatgaggaacagagtgctccaacactgttggtgtgcattgggcagtgacagggccctgggtccaactaggccattcctcctgccctgggcagggaagcagagtagtgacagtgtacaaagagggtgtcatggaacaatctaacatattaaccccttctaggacaagcccgttagaacataatacctgagaaaactgttcagtactttctcttgctttgggtagtgtggcctttgtgcgcagttacagggacctcggtgcttcttgggaagggaatggcatcatttggaagataaatttcaggtttcctaatagtgtccttggcagatacttcatcatcatcatcaggctgctccctcctgacttggtctccgtaggtatgggcactcttcacttttctcatcagcaaagtcttttccagtagttcatccctccgctttccccagcaggtaaccatgcctccttggagtttgcacttcattttacgttattcctttatggctggctgtgcccacattttcagtgattaggggcagagacttactcagcctttctcacttcctggtgctgtgtgagatgacccccccagtgcatgccgaattccatttcttagtacctcttctttggttttgcttactgttttcgctcagtctgttataacaaaaatactgtagcctgggtggcttataaacaacag

SEQ ID NO: 43661 - DNA, 1047 bp, Homo sapiens
aacacattaattcttgatctcagtatttatttagctcttcatgtttgtaaactgctgcattacagtctttcagttatgtaggatgggaggtcagttggcttaaggtcagttccctcatttggtaaggtcagtagtcatacaaccatttgagatccagagccaaaattagagcacttgactcctctcacaaagacctaactttatctgtgtttagaggcttagcctcagcagctcgattgtttgtgtttttctctctgcaggagcactgctaggatttgctcatgatgcctgaggtataatggacacctgaaatgacagtctgttttaggtgactggattcacatcctcgctatgccgcttcctgaatgtattaccttgaacaagcagtataacctttctgtgtctcagttttcttctctataaaatgtaggtgataataatagtacctgtctcatagagctgttgtgaattttaaatgagccgatagtcaagcagctaatgagcagtagagcttgaatatgacatgaggtttccctgaatcaagcctcttgctttatgtacttgtactcactttttaggagttatgttttgtgggtgctctaaacttagttatacagtccttccttacagtctgagtgagaggagctgatcccttcttgtgtgggagttgtagtagtgtctgcaagacagccacgagcctcctggcctgctttgtttttttggaaaattcactctcttccctccttgataggatgggtcacctgtgtgcccccaaatccctgccaccttgagttctcttctgtttttctcactcctttactctctttctgacgtgttttgggggagattgtgtgtgtgcgtgcacactttttaatagagaccggatcttactctgttggccaggctggagtgcagtggtgtgatcatagcgcaatatatgaattgaactcttgggctccagcaatcctctcgcctcagcctcctgagtagctgggaccataggcatgcaccaccacatctggttaattttgtaattttttgtagaga

SEQ ID NO: 43662 - DNA, 1035 bp, Homo sapiens
aactaccaaagacttgagctggcggggatgacggaggcattgtgttgatcaatgggtgtggtcgcttgtttgaaatgtgacttcccaggtcaaagactgtcaatgtagtgcttattaaaatttctatttgagcttaattccgtaccctccaggttaagtttattgtatgttggaaacgctgtcaatactcattcagtgaagttgactgggcacttttgaatgtagtggtaagcaaccttttgctgaatgtagtttacactcttagttgccgcaggtgagggtgatacgggtgtttaagtaatggtttctctctccttgtgacacagttaaagagagaaaacccagaaagtaatagaaaactttttaagggcaattatttgatggagcccattgtaaagaaaggaaatagaaatgatggttgagaagtgaagtttttataagagaggtgggacttctgatgagattaaaagaaactattcagccaagtattaagcctatttgtagaaacccaagaagatagaaatgctgatgatacctccctcagttctctagatgttacagtttataaaatgcttcagatgtttcctcctgaagtcttaatgcatgctgcaggttggtaagatgttactttcctcagcagaagccaaagctttgaatgtcttggtagctaccagggtaatagggccaaacgaggaatggggttccattaggattcaatttcagaacttaaggctattcctcgtccttgtcagtggcataagtgccatcttagtgatgagagagctgttggaggtggcctttagcaggatcttatggcaggttaatgaagtcttgccatttgatcttcagtgtctctgtgaaacagataagtttcaagtttacgtaccaattcagcaaggttaagtgatttgaccaagaacacacagccagttcaccgtagagctgaaactaaaaatttcattttgtggattccaaatcttcctgttctgttgtttaaccattccatagtaggatgagaacacttttgtctagatt

SEQ ID NO: 43663 - DNA, 1058 bp, Homo sapiens
gggttttaggttacaaaactggaggagagttagggtgccaggaatccttaaatgcatctctgccctgcactaaaatgttgatgctttggttggtgagtaagtggccatacatctctgtgttcttttcctttctgaccacaggcctgttttctcccccaggttacccttaagttacaggagtcccagctgcctgggccagaccagttacagcagtttcaggtggtctgtgagactgaggaagacaaattcctcctgctgtatgccctgctcaagctgtcattgattcggggcaagtctctgctctttgtcaacactctagaacggagttaccggctacgcctgttcttggaacagttcagcatccccacctgtgtgctcaatggagagcttccactgcgctccaggtctgccacagccaacatcttggttgaaataagttgaagatagagatggaaaggggacccagttaatgttctgtttcttaagcacttagtaggggccaggttctagatgtgactgatactgacttctcccaactccaaaatacctatcatggccgggcaccatggcttatgcctgctgtaatctcagcactttgggaggccgaggtgggcggatcgcctgaggtcgggagttcaagaccagcctggccagcatggtgaaaccccgtctctactaaaaatacaaaaattagctggacatggtggcaggcacctgtaatcccagctactcaggaagctgagataggagaattgcttgagcccgggaggtggaggttgcagtgagccaagatcgtgccattgcactccagcctgggcaacaggagtgaaactctgtctcaaaaaaacaaaaccctataattatttccagctgaggaaactgaggcacaatgattaagtagggaaagagattaagaagaggaaaaaggaaagggtgatggttactgtgatactagggatggcagaggggccttgagcttgctctgctgagctgattctctgtccgctcttggctgcaggtgccacatcatctcacagttcaaccaaggcttctacgac

SEQ ID NO: 43664 - DNA, 1012 bp, Homo sapiens
tatggtaggtagaataatggcctaccactctgaaacatatgaatatgttacctaacatgacagaagagaattaagttgctaatcagatgactgtaaaataaattatcctggatcatctggatgggcctaatgtaatcacaaaggttgtttccttgccttttccagcttggctctggctcccttcctccagcaagggtgggttgagctctcacatggcaccactttgacctcttctgcttccctcttctacactgaaagacttatgggccaggagcagtggctcgcacctgcaatcccagcactttgggaggccgaggaaggcagatcgcttggccccaggagttcaaaaccgtcctgggcaacgtggcgaaaccccatctagaaagaaaagaagagaaggggaggggggaggggaggaggagttacatatatacacatacacacacacacacacgtacgtacatacatacatacacgctaactggacgtggtggtgcgtgcctgtagtcttagctttccaggagactgaggtgggaggaccacttgagcctgagatcgcgccagcctgggtgacagtcagaccatgtctcaaaaaaaaaaaaagatttgtgattaggattcttagtcctcacctgtattattttcctattgctactgtaacaaattaccacaaatttactggcttaaaacgacgcaagtctgtaggtcagaagtctgacacgggtcttaactggtgacccgagtcagatttgggacacaaagaacagaaaccaagctgtgcaggtttctgacaggcagtccggttagggagccctacagcaacccgccggtcctctctctcaggcagttgctgccatggctcattattccaaccggttctcctcagcccagtctatctcagtggctccattcatagggtgatgtgcccggcgggacactaaccctaaccaagcagagagacggtcatgcccgtcacgacctcggccctcgccccggccgaggcttctcctgc

SEQ ID NO: 43665 - DNA, 1031 bp, Homo sapiens
catggtagtgtgtgcctgtaatcccagctattcaggaagctaaggcaggagaatcgcttgaacccgggaggaggttgcagtgagcagaaatcgagccactgcactccagcctggggggcagagggagactctgtctcagaaaaaaaaaaaaaaatgcaatttagttctctaggcttttccatttaatagttttatatcctcctgtttctaaatctggatgacagtgtaacactccagtaaggtgaattgtgaattgctgaaattcttcagatgtttaaaagagttttcagtattcctcatgttagaattaatgcagagaaaaattttatcctttgaactagttacatgttgtggacttctggcctgaggctcttggggattatgtgacatattgggaagggacacatttctgctctgtggctgttactagaaatctagccagcaaatcagactacgtttgtgagaagacaggaaggcacagattagggttgagccagccttcaacaggtttggctggcagtagacacagtggagcacatcttaactattttggtaggtcctgggtttctcttggtagtttttgatagaaaggggaatggtgtgaggaaaaagtgggcatacatttcacctttccactgataaggcaggtggaattgggatagtcagtggatgggccaatagctggtggctgtgagaagaataaggatttccatactggtgtgtcatatttacagataggttgtgacctaaaaagttttttaaaaaacagcagttagggcctgggcgcggtggctcacgcctgtaatcccagcactttgggaggccgaggcgggcggatcacaaggtcaggagatcgagaccatcctggctaacaacggtgaaaccctgtctctactaaaaatacaaaaaattagccgggcgtggtggcaggtgcctgtagtcccagctactcgggaggctgaggcaagagaatggcgtgaactcgggaggtggagcttgcagtgagctgagatcatgccactgcactccag

SEQ ID NO: 43666 - DNA, 1574 bp, Homo sapiens
ccattcagatcagccacttgctgaccctggttcttaaggacacatgacattagtccaatctttcaaaatcttgtcttagggcttgtgaggaatcagaactaacccaggactcagtcctgcttcttttgcctcgagtgattttcctctgtttttcactaaataagcaaatgaaaactctctccattaccttctgctttctctttgtccacttacgcagtaggtgactggcatgtgccacagagcaggccctgcctcactgtctgctggtcagttctgggttcacttaatggctttgtgaatgtaaataaggggcaggtcttggccctagaggattgagatgtttttctaaatcttagaactatttttggataaattatatattttccttcctagtagaagtgttactgcctgtaactagctcaaaataccaatgcagtttctgcattctgggttttgtttttccttttttttttttttttttttttttgagttttgctcttgtcgcccaggctggagtgcaatggcgtgatctcagctcactggcaacatctgcctcccgggttcaaatgattctcctgcctcagtctcctgagtagctgggattacaggtgcccgccaccacgctcagctaatttttgtatttttagtagagatggggttttaccatgttggccaggctggtcttagactcctgacctcagttgatccacctgcctcagcctctgcattcagtttattcacatatttttggtaactcccatggcagctcctaggatttcagcggtctgtgggccagaaagcaggcaccagggctgacctcaaggccgtatcagagggccaagcagagttcttttggatacctgcttttcatcccacagggccttagagtcagaggtaaggtagcaacagagctagaatggggcaatgcactcttaccctccttctcaacttttatttaagctgtgctaaatgttttcttcaagggaaccagatttagttctttacagaattttccagtgaaataaaacatgttgtaatagctgtgtttgagatgaaataagaggttgtgggtagaggggaggcacctaaaggaaaagaggaaaggtgcctgggctacctatgcagataacctggagtggacttcactgtggactcgtggtactaaggcttggcctggacaggcagtctagggggtatgggaatacacggtgtggttgttcaactatttgcaaaggtcaaccaaatagaccacatgttcgcaaagtatcatctgaggaaattaagtaccttcttagccctctcagtcataaatttgaacaaattttaatacacttccctcatgcccttctatataaaacttaataccattagttccccattcttgacattttatttcagtttttattatatatttatttgaaatatttattaaattatctgacctacagaactaaattcttctccttttgttatttcttatgtcctataccatatatgtacctatttatatatatatttatgtatttttaaaatttttatttattttattttttgagacagtcttgctctgtcgc

SEQ ID NO: 43667 - DNA, 1050 bp, Homo sapiens
ttggttattcagagtaaccttagaacagaaattgggaatatatctttacaatgattgataccatggtatattgactcttagatgctattgatctgtagcaccattttttacaaacgactaaggaaaaaacctgccaattaaatcatgatatgccatcaattatgagacatcccaatttgagagatgttagattatagaaaagtatgcatttatgactgaaatggtagtggaattatttgaattctacaccaagcacttaccatgtgccaggccctttgcagagtgctctactgaccaagaaagttgttgctgccacattatagatgtggagcctaagggtcacagaaattgtgtgctatgccaaaaaacattgaactggtagatagaaaatgacagagctaggattcaaacctagatctggctgactccagagcctagttttacctggaattgatgttcagtttatcaaaggtttctccttttggtttaaaatcccaatttttggcctggcattgtggtttacgcctgtaatcccaacacttcgggagaccgaggctggtggaacacttgaggtcaggagtttgagaccagcctggccaacatggtaaaacgccgtctcggccaggcgcggtggctcacgcctgtaatcccagcactttgggaggccaaggtgggtgaatcacgaggtcaggaaatcgagaccatcctggctaacatggtgaaaccccgtctctatttaaaaaaatacaaaaaattagccgggtgtggtggcacgcgcctgtagtcccagctactcaggaggctgaggcatgagaatgacgtgaacccgggaggcggagcttgcagtgagccaagatggcgccactgcactccagcttggcgactgagcaagactccctctcaaaacaaacaaaaaaaagtctctactaaaaatacagaaattagccaggcatggtacacacatgttgtcccaactacttggggcactggggcacaaaaaatcacttgaacccaggaggcagaggttgcagtgagccaagatcacgccac

SEQ ID NO: 43668 - DNA, 1058 bp, Homo sapiens
cttgtctcaaaaaaaaaaaaaaaaaaaaaagacttttctaaatgttcacatctggcatcttggctaaggggtaatatctcctgtccttacctttatttctatatagaagtgggtttttgctcaagtttgtgtctctgttgcagagaatgaatataaatgaagttaaatgaattagagctttataaaagcattatagaaatacaagaaagaaaaatatattatcagtttatgtattgtgtgtgcattttgtatgtacaaatgctaagtgatccttcatttgggatcctaggtccttcatttgatatgctaatcatggatgctttgtaggtgctggagctggcaggtaatgcttctaaggatctcaaagtaaagcgtatcactccgcgtcacttgcagcttgcaatccgtggtgatgaagagttggattctcttatcaaggctaccatagctgggggtggtatgtattactacttaagccttgattcttattggtctttctgactaatatatcgttcagatcaatgatatagtatatttgatcggttaactagaaagcatataaactttaatttcataaatactaaatctataacaattctaagcttttcataatgatctgaataaatatttcaccttctagccatatgtaatgctatttttattttagccagttctttgtctaaatttcatatgatacttaaagcctgatgtttaacatatttcccatacttttttaactgtgtttgaaaaatgagttggagaagttgcataacatacactggaaagggttgaaataaatacacttgaaaagtgggtcaggatcaatgaaagtgagaggtaagttggtggttcttaatcttctttggataaccctcaaagaacctcgtgaaagctgtggttacagctgggcacggtggctcacacctgtaatctcagcactttgggaggctgagaggccccggatcacccgaggtcaggagttcaagaccagcctggccaacgtggtgaaaccccatctctactaaaaatacaaaaattagctgggcgtggtggtgcac

SEQ ID NO: 43669 - DNA, 1045 bp, Homo sapiens
gggtccccgggtgagagctgggcctggccgggtagagcgcgaagtctgttccgagccggatagatctgtcccgacgcttgtgacgctgcaccgcccgtcttagaaggaggaggacggcagaatccggcttggaaatgtagaaacaagtgctggatcttaatgtgatcgcttctctgtatgaatgaggtcaaacaggctgccgctgtacaagttagataagtctttggcgatgtttggttacgtaatctccctggcagtcagtttgagggtttctgcgaaagggtgcttgtatttgtggtcttttgagcgacaaagaatggttttatagaccagaaccacacgatttgttctaggtgattgcacaggttagaaatgaacgcccgttatcttctgagccccttgcagtttgcggttttcattatacaacagtactttcctttgcccttgctatggattttcagtcttaaagtattcatcttttcattctgaaattcagatctagataagaagagtgtggctttaaaaaaatgaaagtgaatagaacttcagccccattttaaagttgaggggaaaagagaaggtgctaaaggatacgctctgagttgcatcaaagattgtgtaaaaataataagactgttatggaatcttatttttgccggtattcgtgctttaagcattctgttgaaaggttacttcaacgggagctacctgcttaaaagttagcaccaagctgtcatttatcatactgcagatagtattagatgatttgtcttgtgcttgatgtgacagatatggtattgaatagacataacacctaactgtaaacagattggccagtcgagaggacaatgtttggttattgtaaaatacccaaatcttagagctggaatagactttagggataattgcttccaacgtctaacgtatagtttattgttattgtaaaaaacccaaatcttagagctggaatagactttagggataattgcttccaacgtctcacgtatagtttattgttattgtaaagtactttatagtactttat

SEQ ID NO: 43670 - DNA, 1688 bp, Homo sapiens
actctgccttcctggaactaggcctgcgttttctctgaaccattatttcatggggaaaatgaaatctacttcatgtgcctggtctacttactccttcagaagtgatttctgagccgtaagatacatgagaaaaaaatgaaggggaaaaggcagtatttatattaactacatgatgataaggatgtttctggtcacagtgaaaagccatgctagaattgtagtgtcatagaataatgtggaagtttagttcgtgttgtctgatctatttaataatttaataaggttatctcttccaagacaccttcccttcttcctcagccagaaaggatctttccctgagagtcattagtagctctgggctcctggaaccaagctcaggtgcctaattgaactctggtctcttcccacagcccccagcagggactggtgcttagtgagagtggactgccagattccttgagtgtgggggatttgggtgaatgagggtagcaagcctccagcgtgcttgggtctgcggtgaccctatgcattccttcagtgcttgctagaacagttttgaaacggtttgaggccttgccctgctccatccagagcaaggttatagaaatttcagacaatgacttcctccctcctggatctagtgtcctgggccttgtatagatccgtgccatctaatgtggtagccacttggcacacatgattaaattaaatttggagttttatttcattttcacactagccacatttcagatgatcagtagccacaggtggccagtggctaccatattggaccgcacagattagagggcatttctgtcgctgtggaagttgttttggacaatgctggtgtgaaaggtgaagggaatcctgagtgtttgctgtgctccaggctcagtacaaattttattttattatacacttaaagcaaaagtcttataaaagttgaggatgaagccaagagtggtggtaagggtaggagttgaaacagtgaagaggaataacagggaagagtcctgccctgagagactcatggaataggatatttacaaggcaaagcaaagagaaccaaagtctcagttctgcagaggagctgagtgccccaggagctagtggagggtgaggtcaatgtgtgctcatcttaaaggaaaaactcatggaagaggaaggtgctaatgttgaacacctattttgcgccagacctcttaattgttttaaatctttgaggtatcatcatgaggtcgtttttaagttcagtacagatgaggggcccaaggtcagaattatgtgtccagggttgcccagccacaaaccagcagatcagggtttgatgccaggcctctctaaccctgcatcctgagtggaatatagaagccggtgggaagtttggatgggaaggagatggatgccttcaagttcttgtcttggtgttaggtgtgttaaaggactggctgggatgagaagagtgttgctggcttgagcatagcacgagcagcacagctcctgtgttcctctgggtggtggggtcacctctcttaaaggtagaggctttcagctgattctgtcttttcaggccaggaatagttgctgaacaccccaggcctgctgaggtccctccttgagtctcatgttcaagcagtcttgtgagtaaagcactggctaccccttttcacttactatcttttcaagca

SEQ ID NO: 43671 - DNA, 1026 bp, Homo sapiens
actcctgcttattgcagcagttgcattcctaagaaactttcacgttgccagaaactgcgagattggtttgttagagaacagtttaggggttggagcttctctgactcaaaaacaaattattttcctggagaaaagccagtgtgttttgttttgttgtttgagacagagtctcactctgtcacccaggctggagtgcagtggcacaatctcagctcactgcagcctccaccttccaggttcaagtgatcttcccacctcagcctcccaagtaggtgggactacaggcatgtgccaccacacctggctaatttttgtaattttaataggcacagggtttcaccacgttcaccaggctagtctcgaactcctgacctcaggtgatctgcctggcccaagtttttaatacctaaaacttttaatgtcgttgcaagtaaaagtcacgaatgataacaaaactgatcttagcaagcgtaagtgccaccttctctgccatcaggtgacatccatcaggctcaactttttctctgacctcttgtattgatttgacagctttacttgcagctgaagtctacgtgcccactacccagagctgtagccaggaccatgtaaaagagtgtggtctctctttaatcaactacattaggtcaaaacttcattggggaaacttggagaatttcccttgccactctagagttcttgcttgcaagcaattgcaaatgacctcagccaccttgagcagaaatgtgctatttattgtagcctagaggatcaggctcagaggtgtacccttggatctggcctgtgcctgaggggtgctctggctctgcaggtgcttggcagccatgtcaaattcagtgcctgccctgtctatggtaggcactggcccagaagactgccacagaaacagtgactcacaggccctgttactgtgtcccaggctcagggataaatttggttacagacaccaagcgtctaggcctcgaggctgagcaaggctgtgaggagcagccaggcactggggccctg

SEQ ID NO: 43672 - DNA, 1088 bp, Homo sapiens
aagcatagacaggggccttgcatctcttgtgatattttttatttttttataaatttcaaagtgctttatcgtgctttctctttgtttatccttacaagaggcctgttaggtaaatattgctatgctcgtcttacagacagccaagacgcatagtgatagaagcatgggaagtgagcctggttcttctcagttctttgggtgctttccccctcaccatatagtcttgacttgtattgctctctgccagtgtctggctgatggcaaggcactgtttttgaagccaaaggagatgcagcatgactgatggaaggtccttgaaacttgagacagacgtgggcatgatctagccatgttcagaccctccaaggatgaccatggagagaagcaacaagacccatttgtgtggcactgagcagggcagaactcagactacagaagccagttcctgctcactgtgagggactcccttcttagagagtcttcccctgggctccatgtacaaaaaaaggagtacagactcctgctgtggctgaactggccctaaatccctggtctgctttggaagggaagtgctggggcactgaaaccatgtttccagttgtcaggtgtaatgaagagaaaggcactatccaaggaaggagttgcactaactgagtgcttttcaaactgcaggttataaaatcagtgtagtgggatgtggccagctgattcttaatgaggtagagtagtataaaaaataccagaattcatcacatatagtaaggggattcactaatgtctcatggaacttttgttctagttaaggatgtatatatatgcctgtgttgtgtggactggggttacagtacataattatttcttgctggggatataattcataaaatgaacttagttaggcccccttgttatttggctacaattctaattgctgtttattgactctttttactcacatgtgatttaagaaagtcttatgatgcaagactgaacattgtaacaaaattataaggcaagtatctgtaatgtaataacagctttcttttcaaagattttcctgctgtccatgaaaccggaaggtagacacccag

SEQ ID NO: 43673 - DNA, 1054 bp, Homo sapiens
tgctcatgatggccataacgcccacgctggaaggttttgggtttaccggaatgaaggcaaggaacacctggcctgcccagggcagaaaaccacttaaaggcattcttaaaccacaaacagtagcatgagcgatctgtgccttaagggcatgttcctgctgcagataactagccagacccacccctttatttcaggccatcccttcatttcccataagggatacttttagttaattgaatatctatagaaacaatgctaatgactggtttgctgttaataaataagtgggtaaatctctgttcggggctctcagctctgaaggctgtgagacccctgatttcccactttacacctctatatttctgtgtgtgtgtctttaattcctctagcaccactgggttagggtctccccaactgagctggtctcggcacttctctttgccttaaaaacaggtacagcggaccttcctggcatcagaaaaaggcctccagaaaaagagacacaggtactagcaattccaaattatccagagcccttctaagttgtaagatctgaaagaaatgtctgccatctatattctcagccacacttagtttcttaatctgcaagatggaattaataatagtacttactttatgatgctgttgcagaaattcactgagttgctacacgccaaacactgagaacccagctgggcatataataagcattctattgcatggcattattgccatcatttttacttctattactgctactgcttgtaactgcttgtaactgtttgtgcttttttgatatgaaagtccaccatcagggagcactgtagtggaaaaggtattaggccaggcatagcctttagttctctggccttgggtccttcatctgtgatattcagttaacaatacctagccagtaggggtgttaaagattaaataaatgtgagaatgtgcctgttgcttaatcttcctcaaagggttatggactctcagagccagaagaaggtcatctctcctttgctcctcgtatgctgggatctgccacatcaatggcaac

SEQ ID NO: 43674 - DNA, 1086 bp, Homo sapiens
aggaattttaaccttataaagacatccctagaaggagctaaatctttggggatttagtttcatattcgggttatgttgtaaccatttacttttgcttgttttactaggcttttttcatttctttgggtttttaatttcgctgataggtttataagctttactactacatgtgtgtgggtaagagtttcctatttaaaagcaggcaggcaatgatataacttaaatggtttttccagctgtttaataaaaggttttacttggaaaaaaatagtaaatatgaagacaaaaagtgatctccctatattttctgccttgtaagcataattttttgtttcgattttctaaaaattaataaagatgtctagaagtgaggcattaatttaaaaattaaaaatgtgaaatatttttactggtgagagacttcaaaaaattcattttaaatatgcatgaacattttttcacagtatttgagtatgtttggtcagattatttttacaagcctaaaaacttacagtatcttaactgttaaatattgcacatttcttttagaaagtacacacatttagcaggtttagaactttgaacagactttcagaagataatggcacagcatatttattttcatagtgatttagtgtaatgattacgaacataatttgggaaataaattagctttagcgaattttactgtacattttttatttacggcacataccttcataatttaattgtgaaagctacgcatttgcctttaattgaagcttttagcatgctttacttttaatgtgctaaatcgctaatttttgttcctttagatatgatacagttgaaggcatgtaaggcggggaattgtttttccaaagacatagtagttttactatacagggatttttaatacttaaattttgaatttaaaagaagtttttttttcccttcgagatggagccctgctctgtcacccaggctggagtgcagtggcacgatcttggctcactgcaacttttgcctcctgggttcaagcaattctgctgcctcagcctcccaagtagctgggattacaggtgtgcaccagcacatctggctaat

SEQ ID NO: 43675 - DNA, 1101 bp, Homo sapiens
tccttttatagctgctgggaagctttgccatgaaaattgcaccaaaatataagtataggcagggaagctagttttaggtatatcagccattggtttgttatgggctcaaagaaggataggtagttgaaaattatttggatgtctgtattctgtttagaatttggagtggttttggacatgataatttaatttgaactaggtcattcctgatgttattaataagttgtcttctttagttttctgcattcttattaattcttgatttctagggtgtgttttctccctgtgtcctcccctaatcttatacctgctgctcctcagtttgtgtgtatgcacatgtacatgcaaggatttttctgatgaatgtgcagggggcagtgttgtacttagtttcactttacttttgccagattctactaaaaattttaggtgagtttagccctgtttattcaactaaataagatacttggagatttatatctaaaggaagaatctcagtcattgtaaataaatgacctaaagtcattattctggaaatcaaccagagaaattcctttctggagttttacatcttttttggaactcttttgatatgatagctgtatgacttcaacacttctgaagtaattggatttggtgtttatatatcaactttacagtttaaaaaaaaaagaccagcatagtactttgattttagattacaactttgcatcattaaaaaaacagtaaaggatgtggaaacaaggagccatataggaatctaagaagcatgtaataaacataagactaatgtactaattatgtatggtgctcttttgctgactacttccattttagataaagaaatccaagaacataaagttaaaatatatgaatttccagaaacagatgatgaagaagaaaaaaaacttgttaaaaagataaaggtaggttcatccctgtacatacactaaagtaatctgaggccttaaaaacatactacagcgtccacaggaaagatcaaaagtatcggtgttttaagtagttggcttacaaaatgcctagggagatttaatgttgaattcaactttatagttaactttgaagattagctagtatata

SEQ ID NO: 43676 - DNA, 1070 bp, Homo sapiens
tgggactacaggtgcgcaccaccgcacccaggagttcaaggctgcagtgagccatgatcgtgccactgcactccagcctgggcaacacagcgagaccctgactccacaaataaataaatcaacatcatatgatctgtaccagggtataggcaggtgctatgatccccacttttcatcctcaactctaagttgagtcatacatcaacctctagtaaaaagtggcatgctctcagtcaaaggggtaagcccaaaccacgtggagagaatcttatctcttttgagagctaatataaaaagaattcctcctaggcataaaaatattgtgacatcagttacttaggctaaacatgcctattatgctaagtgagttattaacaataaatactttaactctgtgccatgttaattatcataatctgatttataatttgttttaaccttaggttatatataccttgaagccatttatattttggtatacttgtaatagttactatacactggactatgtatattggactaaacatggagagtcaaaaaagagtatgtggtcagagtagaaatcatgccctagcttccttcgtgtctacctcctaccttgagtagaagcggtagaaaaagtaattacctaagattttttggattctggtttgtggagaagcacccttatatttaggctgatgggtggcgaaattagaaagtattttttgtgatttagaattttatacggagatgttcattgtgattaattattctttgtattagcagatttttgctttttatagctgcatgatttcttgtttattattcattcattattgtctattaataaagaaaaactttatttcactgaagcagtgatacataatccaacttggatttttaaataatgactgacttttttctttgggaatacattactgttaaaaatgtagattattagatacattacttttaatgaatataagtggtataattagaaggctgaaaagaatccttggaaacgtgagtttaatttgatagctaagaaactgaggacaagatacttattctttgtagcgtattttcta

SEQ ID NO: 43677 - DNA, 1027 bp, Homo sapiens
ataattattatttctagaaagaataacaatgtctttatctgtatagcctacaatgtgcttcaacgctttaacttgtgtgttcatcctgaagtgggtgctcttgtcctcattttagaaaggaggaaatgagtcttggagagggtaggggacttgtaccaagtataggagcaaggaaaaaagtgaagtgactcaatcacagtgagccctcttcacaaatccagtgttgttcccactgcccatcaactgagaagctgcttttcctcttaaaaacaaaataaacgtagaaacaaagaaacaaaaatcctctcttctactctggattcagatgacagtcgtattttgctcaagaatattgagcaatcataaatgagttttctcccctccacactggagataaaccacaacttattataacaaaactggtcactgctcttgccaaagtatttcatcagcttctggcatgcgttatatcttgatacacttatccagcatgatggctggcgtgatcctctgcctatttagtatgtaggctagttcagcagaggatttaatgacaggagatttttctttggctccagggatcggcatgcacagacaggaccctgtgtgaattccccagcatgtgatgataagatacttccagtctgccagcatcaagcagcttcattaattaaaaacacattgcgtgttatcactaaagattgatttttctaggaagaattaccctttggcatttatgatgagcatgaagaagaacagataatacaattactgacaggactttcctcattttaggacagcaaatatttaagattaggattaagatttcaggagagacagcctttgtgattattctgcaaaggaaatatttgggactgctgttttcgttttgtttaggctgaccctgggaagtaaacatttgctcagccatactgagtatctgtgatttaatgggatatgggccctaaacatattttagtacttcacccctttatgcttaaaacaaaacagtgcaaaataaacaata

SEQ ID NO: 43678 - DNA, 1015 bp, Homo sapiens
tcaacctcctgggctcaagcaatccttccacctcagcctcttgagtagctgagactataggcgcacatcaccatgctcagctaattttaaaatttttgtggagacagtgtctcactgtgttgcccaggctggtcttgaacccctgagcttgaataatccttctgctgtggcttcccaaaatgctgggattgcacgtgtgagccaccatgccctgctcttctcacattcccatgcccagggttttcatgcatccttcccgtcattgcacatttgaagccagaacatttgcattttttaatgcttgctggattcaattttacattccaaggttaatccctctgctcctgagattagggaaatgccccttactccttgctcttttctttttattttgaccagagcctgcatgaaaagatgctcaccaaatggtaatcgagcatgtaaacgaatgaatgcataagataaatctggaggaaagtttgagaccagaagaacgtgtgaggacagcttgtatgggaataggctctgtgatgggaggcttctctgttgtcctgaatggcctggggagtgggatgggtgcgctgcaggctgctttaggactgagctcaagaaatcattttaaagtcaaactcgtaataatcactcttgagaataattaattagcaaggaatttgtgactgggaagctcagaagtctcaacagcaactctgatgggaggtcaatctttgttacactgaaacgccatggagcagttggcccatggagctgacccgtaaaactcacatgtgcccatgtaagttttctgtttttataccttccttgtcttcagcaaatcatgagaagcagcttgttgacaccccagtgtggcctcctgttggtgctcatgaccaccattgtgttattgaggcacccctgaacttccttccctaaacttggaagccttcctctttgagaagtagttaaaaagaaatactgggtgtggcacagtgactctaacctgtaatcccgattcttt

SEQ ID NO: 43679 - DNA, 1041 bp, Homo sapiens
ttcagcttttccaattccgaatcagttctatgattgatgcatctgaaattcatggtatttctgttattattatgatgatgtttttcatggagtaaccagttttcccagttttgttgtctggctcctcctttctgtctgagttgtgaggtctctctccagtgtcattttctctcctatagatgaggccaccgcgcatgtctgtcggtcacaaagtttatttcatacaacacagagtgctgtatatctgttagccttgccttttgtaagaactctcacatgtgaaatagtttgagatcataatttttcaatagctacctaatattttgtttgtatatatatgtaattttatctttttattgcttaggtaaactattcttttcatggcagagaggaatcttggctatcaccctgttctactcctaattacagaaggggaaatgtgtgccagaggggacatgactggcacggatccttggagaggggctggagtgagcatgtgagttcagactcctgaggtccctggacacctgctcctggtcctggtgtgtagctcatggtagatgtttgctttagtgggctcatgcatgtggagccccagttcttgcaccaggcacagaagagcctttgcacaccagctcactgggtgttccagtccagctctgggaggtgggctctgcccatctagagctgggctggcagctggtgtcactgcttaacctgctctgtcgcccagggcaggcagcttccgctctgtgctgcagtttgctgttcgtgcaacggagtgagaatgtgactttctccctggtccccatgggaacaggtggaacaaggcgtctaaagtacatggagcttcgtggaaggcaccgtggcagccaataacggggctgcatggaaggagcctctcccagccagcagggcatgtgtcttctgcagggggaggtgcagcggccggcaggctccgggcagtgtgcctgggccccggttctgcaacccaagttctccaggttcttcttgtgggtccagctccgtgctcagaggggg

SEQ ID NO: 43680 - DNA, 1080 bp, Homo sapiens
attttcctcaatgaatgtttgatttggatctttttatgtttttcagatctctacttaactttctagcatatagaatagttattatgatggacatttgggttatataaagctgttatgacctttctttctcttgtggacataggcttttatttctctttagtgtaaataagaatggaattgctgagtcataggttaggtgtatgtttaagtttataagaaattgtcaaaccattttctaaagtagttgtaccatttattccacattctaaataccatttcatcttttcaaataaatttaattattccagtgggtgagtaatggcctcactgaatccatatggatattaagtactgatagaatacacggtcacatatcagcaaatagacatgattagtgcttgactctaaaagcaaattgaattcttataaggttatcatatagctgagagccttggctctacaaacatgaataggtagctgagtggttagtttttccaagtgctaatgcttgtaattgtgtttgaggaagaaccacatgtgtatcacaggctggactgtctcttcttctgcaggagagctcagagaggctcaagagcttaatggtgattctggaacacctttgaaccaggaaagccagttgacttcctcataacataattatgctgtttagctaattactttttccagaagaaaaagggttgagagtctagaagtgtatgtggattactttgtcacagaagtaggtggctctacggctgaagtctggaagggagtgcattttcacataatgatgttggttgatgtaatgtttctaggcaccccatgtggtgattgatgagttgggtgagagtgaacgtccgtctaggactctggaattgggaatgctaacatggtatccgtgggtcgtcttgggaattttagcatcaccaagatggtttcttgttctctgtttgcttggtaaaattcctgtttttgctctttacaattccactagatttattatttcccttaaatgaaaaggaaaaagaaacaaactatgagatgaaacgttgacaatttcttcctttactttttcagccg

SEQ ID NO: 43681 - DNA, 1029 bp, Homo sapiens
taggctgagtttatagtgaggtactgtgcctggtgtgaaggagcccactcttggggacctagaatgtggcctcaacagtagtcctggggttgggattctggttcagccactaggcaaaggtatttaatgacattcatgttcttagtgtatgttgccaatttagcaaagcatccatcgttttgaagaaataacaattcagaactttttaaaacagctgtattgagatataattcacatatcacacaattcaaccatttaaaatagactgtctagtggtttttagtatgttctcagagttgtacaaccatcaccactatcaattttagaacattttcatcacccagtaaagaaacttcttaaccataagtaatcatttttcatttttctcttctcccttattctgctctcccccaccatatacctcctggccccaggcaattacttgtctaatatctgtctctatatatttgcctattctggtttttagctcttttttttttcttgggggagacagggtctggctctgtgccccaggctggagtgtagtagtacaattatggctcactgcagtctcaaactcctgggctcaaccaatcctcctgcctcaccctctcaagtagctggaaccacaggtgtgtgccactgcgcccaactaatttttgtattttttgtagagatgaggttttgccacattgcccaggctggtctcaaactcctgggctcaagaaatctgcctgcctcggcctcccaaagtgctaggagcacaggcatgagccaccacacccagcagttctttttatctaactgtaactatatatcgttgaccaggatctgccttccccgctgcccccaaacacttaagcatctggtaaccaccattctactatctcctatgagatttgcttttatagattctaaatataagtgagatcgtgtactgtctgtacccggcttatttcacttaacataatattctccaggggttcatccatgtggttgcaaatgacaagattttgttcttttttattg

SEQ ID NO: 43682 - DNA, 1030 bp, Homo sapiens
gttttgggtttaggttgtaattccttatatttctttcttccacagtgtatcggatctgtcgttctggaaagaagacccttctatttagagtagaaacaaacgaaacttctaaggtatcatctgtgttaagtgatgagaccatatttctttgatgtttctgaacatcaaagctgattcagtactggtagatgtgctcattctccctgaaacatacccatcatatttcctattataattacatctcattgtcctgtggaggtggacatgataaacattatcttttgttttcttgttttgttttgtttgagacggtctcattctgtcacccagactggagtgcagtgccacaatcatggctcaccgcattgacctccttggctcaaggcatcctcccacctcagcttcctgactagctgggactactggtgtgcaccaccacacccagctaattttcaatttttcatagagacagggtctcactgtgttgtccaggctggtcttgaactcctgggctcaagccacccgcccacctgggcctcccaaagtgctgggattacaggcatcagccatcacacccatccataaacattatattaatgtcacattacaaaactgagacctaagttgcttaggataaaatgaaattggaagactagctaacatgaaaatttatattttggctttttcatgttttttgataaaaccagtgtatttgaatgattcttttgatgtttagtaatggttttttgtttgttttttggtttttttttttgagacggagtctcactctgtcgccagtctggagtgctagtggcgcgatcttggcttactgcagcctccacttcccaagttcaagcgattctcctgcctcagcctcccgagtagctgggactacaggcgcatgccaccacgcccggctaatttttgtatttttagtagagacggagtttcactgtgttggccaggatggtctcgatctcgacctcgtgatcacccaccttggcctctcaaagtgctgggattacaggcg

SEQ ID NO: 43683 - DNA, 1023 bp, Homo sapiens
cccatggagtttttttccttttggcttccttttctaagactatgtaaaatactcaatttgcaggttattgaagcaaacctagatggagaattgaatttgaaaatagaaactgaattagtatgtgttacaactcattttaaagatcttggaaatcctccattaggtaagttttctagtgggttatattttgctttggataagttaattgtttcagataacctacctgttgaggtctcttcatgtaaaaaggttgaaattcagttgactttgtttcatgcttgggtgaagaacaaaggaattgagactggactatgtatccctgtggtgtagtggggcagttagccaccagggggagaagctgtgccaccaagtagctgacagatctgtgcagggtctccatcctctgtagaattcggatcaagttacataacctccaagatcccttccagctattcaattcctgtcctactcctaaagatttctatttctcacctggcatggattcagaaaggtagatacatttgttcttatattctcctccttcagttacttccatatgtatgaaattagtgtagcagatgcaaaactgtttcacttgatcacatttcttatctcatacaaggtaataagggacgatagagtcagttcagcaagtggggagagaggggacggttggacagtttggtgagttataagccaagagggggttagaatcatggctggaaagtggcagctgcacagtagcaggggctgcctgagcaggaaagcaggtaaaggaccaggggagaaacacctggggatgatgagaaaatcattttatgatacataagtgtgccagaaccaataaaatcggccctagtcacatttaagttactacgagtctgcttgaatataaacacagattttagcatagagttggaaggaatttttactttctagttaagagcatcctgctccagcagagtgaaatccatacggttatgcctttgataatattgtgtaaagcgattcattctgatgtca

SEQ ID NO: 43684 - DNA, 1026 bp, Homo sapiens
gatcctgatgtaggtgatgcctgcagtcctgctgtacaccccacattaaatggcatgacttgaattctctagttttagttgtagtcttgcagtatattttatttttaaaggatacttaacgaaaacattagattatttgccttttgttatttacataaagcatcttaaaaatgttgcatatgatagaaatgtcatgccatcctatatgtagaaaatgtctcgctcagtaacatcacttaaaacacaaatgatacttttggaggacaattagtatttattagtattcttggccttagacaccaatttgggtttcacaggacttgatcttttcctcagccggtcaggagcgatatctggatgtgcacgaaagccaagaagagaagaatttcatggcttagggctaacatggggtaacggtcatgccgatggttaaccctagagctcctgaaagtaaagatgatgccaaagggcccatttcctcttgctcacaatttgtttaagaagaaagtacagaaatatgctgggtaaaataattacttgacttttactagatggcacctacactgattttgaaaaagcctgtgttttatagagcactcttggtaacagtctcagatgtgatgcagtgactgtctgccatgtttttgtacagagcatggaaaaggcccttgaatcataggtgtaaatgtcccttagaggagggcctcctgctgattgcctgagttatattccccctggaccaatataggggcatctcagctgaagtaccctattccttcttgagccaaaagaatgcccacagggacatggttgctgaggtaaccagaggcaggcattccattctttaattttgcttgagcatccttgagttagtgaaatagaattggttttctttttatatttttaaaagaactttattcagaaaattgtaaaatagtatcccatagtttttgagcatgcatgtgttctagagttagttatggggcccttgtcattactagagtatattaatatttttaatacttg

SEQ ID NO: 43685 - DNA, 1080 bp, Homo sapiens
aaatctcaccttgagactacagtgaaaagtttccttatggatctctgcagtatgcttccaccacagattcttctaaagattagagcaatcttaatttaaaacagatttaatgcatataataaaagtttaattattgtaatatatactcattgaagaaaatctgaaaagttcacaatgcaaaatggagaagaaaacagacacaattctacaactcagaatgttctggtgtatttatctcctaatcatcctttctgtttacacacacaaacacatagcataatatattttaataaagctagaattacactgtagttacaatcatcattaaaacatctctatgtactatatgcagaactcaacattcctaataactcttcaggggtgcgtagttttccattgagtgggtgtaccatgctttctcaactggtccctggatgttccactgttgtagaggacaagatctttaggtgttgagaaaattcttataagaacagcagagaaccatatgggcttaagagaaataagaagttgatagccttaacaagacctccagaagtttatttttgttagcaccttagttcctgggtgttttctagggatcagcagcaccctcatcactggagacccagcccaggcccactgcctcaaggatctgcatgttaacaagatccccctggtaattccagcgcatgtgacagtgtgagaagctctggcttcatgcaacagaggaaagggtgtaactagaaaactctcagcaatatttcaaaatagtacaaaaagcagtctatgggtatgattcttgaaatcatttcaagtcataatattgttcacaaatacatcaggctaaatttaagaaatgggatttggggtttggaacaactcagagtaaagttaggttgaaatagaagcgataaccatcttggaagtagattttttatcagtcaaaccttcaaatctgtgttttgtgatttctttctttccatttagaaagacttctcctagccaggggtgagatatcctgtatatctcttgtatttaagttcccacctttttgtctagatatcttttgtgtttaatatg

SEQ ID NO: 43686 - DNA, 1018 bp, Homo sapiens
ctgaaaggttaattaagaatgttggttattttcacgggagcgtgtgatatttaacattaatattttatttgacactacagcctgtaatactgctctctttcaaaaacaagttttcagatttttataacagacccattttgttttatgaaacatgttcattacagaaacatgagaaaatagagataagtaaaaagaataaaagtcactattatcctaccactttgcgggacacactattaatatttaagcatagattcttccagatgttttgttttatacagcagtaggattgtgtaatgtattctctcttgtagcctattcttcaaagcgtatcttcactttccatgttaacataaatgtccttttatgattgtctaggattccatggatggatggaatataattgagtcatctggtagagcgcatataggacaggacgctaggttgtttatcttttgtttattgtaaaggaactatgtgggatgcatttggtgatctttttaaaaaatgtataaatttcttgagtaattcctggattaaagaatatgcactttttaaagcttttggcttgcattctaaattgtcctcttgaaaaagtagttcctgtgtaaaactccatctgcactgaatcagagctatggcagcattgggcagtaggcagttttggtatttgttggcattctttttgcatttattcaaaaaactgaaggtagtgaacgtagagcaatgaacaacacaaatatccttggtctcgtggaggttatatttaagttctaatgttttctcttgtgaacagtgcaatttgaaatgacaaattgaaacacttttagttgttgaatttagacagtttgtgtatatagtttaaatttttattcttggtttgccttctgtttttatgttaaaagattgttgcaatttttagtttttccctttgtaatatgtgattgtctttcattagaattcattttttgttttgttttggttattttgaaacagtctcgctgtgttgcctaggctg

SEQ ID NO: 43687 - DNA, 1049 bp, Homo sapiens
attccatgtcacaccattgtttggaaatgtcaaaaaggaaaatcacagctctgcaaaagaaaacataggacttaatgtgttcttatctaaccagtcttgttttcctgctgcctgtgaaaatccacagaggaagtctttttatggttctggcaccattgatgcactttccaatccaatactgaataaggcttgtagtaaaacagaagataatggcccaaaggaggatagcagcctgcctacatttaaaactgcaaaagaacaattatgggtagatcagcaaaaaaagtaccaccaacctcagcgtgcatcagggtcttcatatggtggtgtaaaaaagtctctaggagctagtagatcccgagggatacttggaaagtttgttcctcctatacccaagcaagatgggggagagcagaatggaggaatgcaatgtaagccttatggggcaggacctacagaaccagcacatccagttgatgagcgtctgaagaacttggagccaaagatgattgaacttattatgaatgagattatggatcatggacctccagtaaattgggaagatattgcaggagtagaatttgctaaagccaccataaaggaaatagttgtgtggcccatgttgaggccagacatctttactggtttaaggggaccccctaaaggaattttgctctttggtcctcctgggactggtaaaactctaattggcaagtgcattgctagtcagtctggggcaacattctttagcatctctgcttcatccttaacttctaaatgggtaggtgagggggagaaaatggtccgtgcattgtttgctgttgcaaggtgtcagcaaccagctgtgatatttattgacgaaattgattccttgttatctcaacggggagatggtgagcatgaatcttctagaaggataaaaacagaatttttagttcaattagatggagcaacaacatcttctgaagatcgtatcctagtggtgggagcaacaaatcggccacaagaaattgatgaggctgcccggagaagattggtgaaaaggcttt

SEQ ID NO: 43688 - DNA, 1047 bp, Homo sapiens
ctggctccagaccctgtgctcttaactcccgttttgcatcaagaacagaatcctatgaaaggcttgcacagtgcttggtactgagtaggcactccgtcagtattttagtagctattattccaaaggacactgtattctaggtactaagacaatgtgaatggaatggaaaacaattcctccctgcagaagccaactgtctaggaagacagataatgacattattaaaataatcagaacattggcaaaataaagaagattgaaatgcagttcatatgacagtgctaattaatcatactttttagatctaggaaaggccataaaggttaaattgacttggaaatggtaaacaagacaatggttgtgtcactgatcggtgatggccagtttttggttatccttatttgccatttaaatgattgaattgaaaggaagaagtaagacttggaagatgaatattgaaggaaaggtgaagatggaaaagagaagggggtttattctgagaacagtgactagaactctgaggtatggtagaaatttcaggataacagatgataaaggggaatgaagccatggagaggaagagaatgataatattaattgtgaaagtttgtgtcaagtgttttctgagtcacctttctttcagtttctcatttctagtattgtataaatgagtttaacatcaaaatggtatagtgaaaaaaaggatgaactgcttgacagaagaggtcagatctagttttgactctagcttatttagctttacagctttaaataaattacagtgtctttaaagctctggatcttaagttttctaattgttttttaaacaaagatttgtgaacacctacttacaatgtgacaaatgtctttgtaaggcattatgggagataaaagctgcattaaacctggctgttgtacttacaagtaatttggaaggcaaaatttcaaatacttgaacctaaagtagggtttcttggttttcatttaattgaaatactgttaggaaacaaaaatttttcataaatttttcttgtggatatgtaagta

SEQ ID NO: 43689 - DNA, 2275 bp, Homo sapiens
gatgaggagggtgtcttgcttagcttttgtgagccaggggaaggcagtgtgccacgcactgtcttttctgtggctgcttgcttcctgctgtgtgctgacatccccaccttactcgtgaggaaaatgaggctcatggctgtcagtggcttttcctgcaccgcactggggtgaggaacagaatctggggttgagcccagccttcccagcttccagccaaccttatatgcaaatacaggaattactgtcctagggaaagtgctgcatagacaatcctttttgttcttctactgcattatattattcacacagttataattcttttagctcaaaatataaaatgaaaagtgattgacattttaggctggatgagtaaattaaaaaaaaaaaagaaagaaagggggctttcgtggtaggcagagtgtgtaatgcccaaatcctacaagtaacaaaagaacagcaacttgggacttagggcattaggtgtgcagcctctgtgtgtgaaaactggctgtgggatgtgctgttagctctagcaatggttttagagttacgaagtggttccaagctcattaattagccaagccttaaggctgacctattccctgtgaacaacacgacctcctttcagcagtgttttgcactgtactacagtcatccaactgaaaactcactgagttaaaataggtgttaggaatatgattctctctgggagatactgtggcattcccctgctttaataaaaataactgccccatattcagggacctaggaacggaatttacctgcgtgagcttattaatccctcatagccacccaacagttgcttcatcatggagcagagtaaacccctggggcctcaggagttggctgaggtcgtatagtgaggacccaggtttgtgcagtcttctcggggcatgctgtgtgcagtgggtacttacaagttaactggtaaatgtaattctcatgagctgggtgaactgggggcaacttcgagcccttccccttgaccaccttagggagcaggggagctagctgtcctcagcagcctccgcagcccacccaaagtctgtccctcgctcagggacatggcagcccccagcacacatcctctgctcccgtctttcccgcccctggtgttttctagcctaccttgccctgtgtgtccctctggaatcaaatcatgggcagatgtagctgctgctggccgtgggccccgttctgttccctgaggtggcagcctctaacctggcaagtgttcttgtgtctctccagtgcgaggacgacgggcagacgttcttcagcctagatgacgggaacaccaaattctctgacctgatccagctggttgacttttaccagctgaacaaaggagtcctgccttgcaaactcaagcaccactgcatccgagtggccttatgaccgcagatgtcctctcggctgaagactggaggaagtgaacactggagtgaagaagcggtctgtgcgttggtgaagaacacacatcgattctgcacctggggacccagagcgagatgggtttgttcggtgccagccgaccaagattgactagtttgttggacttaaacgacgatttgctgctgtgaacccagcagggtcgcctccctctgcatcggccaaattggggagggcatggaagatccagcggaaagttgaaaataaactggaatgatcatcttggcttgggccgcttaggaacaagaaccggagagaagtgattggaaatgaactcttgccctggaataatcttgacaattaaaactgatatgtttactttttttgtattgatcacttttttgcactccttctttgttttcaatattgtattcagcctattgtaggagggggatgtggcgtttcaactcatataatacagaaagagttttgaatgggcagatttcaaactgaatatgggtccccaaatgttcccagagggtcctccacaccctctgccgactaccacggtgtggattcagctcccaaatgacaaacccagcccttcccagtatacttgaaaagctttcttgttaaaataaaaggtgtcactgtggtaggcatttggcatattttgtggactcagtcaagcaaccacagtctgttaatcatttctctatgctcagatgtcagatcctcttgttattagtgtgtcttgttctgcacagtgcaggagactttattcctttggaaaattcactgttccacaaacagcaggctgaatggcctcgcctctagattgacgtgggccagcctccttgag

SEQ ID NO: 43690 - DNA, 1050 bp, Homo sapiens
gaaaactgctaggcagttaccatgaatattcacatatttaaggctctgagaagtcctgtagtaaaatatatttcttttaccttttcagcatgggattttccagtcttatttaactgctttccatcttcacattacaatctagacctggtgattttgctgatgattgtagtttggttttggatacatttaaagtgagttccttttcaggccatttcttctttgtagctttcattggatctttcttcgctttctgatgtataactatcttttcagctaactccagattttctcatgtaagagcaatgattttatgccttttttgtgctattctaatttaggattaaaaaaaaattttaaggttgtagaaaggttgtaatagtaataggatgaactatacacacttcgcccagatacccttattaagattatggcacatttgcctttgttcttagttactgttttttcttctgaaccgtttaggagtaagttgtggcatgatgtccctttagtctgaattattacagtgtaaaatttctaagaacaagaacttctataaccacagtaccttataaaaaccaggaagttaacattgacgacgcagttcattgtctaatctatacccttcttcctaattgcctcctttatagcaaaagaacatcttcatcctaaatcttctctcccagcatgtattcataatcttgacctgcgtttcgagtagaagccaattcttgtagagtgtgcctgggctcagcctaggctcctcactcatggtgagattcaggctatgcatttttggcgggagcacccccgaaaagtgatgttgtgtcatcttcagtacatcgtctccggaagccctcaaggtcaatttgtctcattgctagtggtggtaatttagacacttgatgaagaagatgctgtcggccggatttctccactgtaaagctattattttcccctttgtagtaaataagtattaacagtacaatactttgatgccatgaaaatactcttttttctcatccacctttcatctgctggtttcagcatttg

SEQ ID NO: 43691 - DNA, 1051 bp, Homo sapiens
caatctttagatctttttagtaaacagagctaggacatgggcttttttaaaacaaaaaataaatgttgggttcacgttgatattgctaattcaaatttgagattacaggattttttacttctttgattttgttgttttttttttcctctgatgatctctgttaatggcattaacttaattacttattactttatattacataatacaaaatacatacctgtaatatcttgaaaatattaatgctgatatttattcagtaagacacctgaattgcgatttctttacagtccttttaatccttaaggattaatccaggcaggttaccttaaaataccttgcccaaagtcacttaaagtaattcttctctatggttctgtcaccaaactgctgggtaaatcaggtttgtttgtttcagtttctctttagtgtttgcaagtggatctgatttattttctttttggttgaatgctgctttgtaaattgcataaaacattttcatggttccaaagtcagatctatgaaataaggcacatgccctgtcctctcaactctgcctcccaacccctacaccagataaacagcttttattagtgtttgtttatccttctgtcatttcattgtacaaatacgagtgaaaagattttgttttctgcctctcgttaagcaaatgtagcgtgctgcaagtactgcgctgcgcagttcccgcagtctctgcatcccaaggatcgctccacagcagcgcatcgcgatggcccacatttcttttccactcttgggttttcttttatgtacatggaacatcattttttaaaatgtcccctactgagggatgttcaccatgtttccaggcaaatgttatgagacacagtgctgcattgtttcataattttgccatgtatctttgccatgagtcctgagaagtggggctgtggggtggaagggcagggcctatgtaatattgtgaagtatcaccagagtccctcagcaggcttacttcttcatctgagagtcatgctgtcagccgcatctctcatgaaggaggctgaccctc

SEQ ID NO: 43692 - DNA, 1031 bp, Homo sapiens
tcctctctccaataaattgcatgttgtagtaaaaaaatgggctcatgtttctggagtatttttcgttgtgtgtagtgcaatacaggaactttaaagaacaccatgggacccatgtgaaatgccactagtgaagctggaagtgcgcccaagaacagagaaaagtcacgacatgacaagaaaaacttaaattgcttgatacatactagagattgaatggttgccctccacaccacacagataattcattgtgtcaacatgtagacttacagaatcgaatgcagtacagtcccataattgtattgtctcttatgattttcttaataacatttttttctctagcttccttataaaaatatggtgtagaatacatatacgaaatatatgttaattaactgtttatgttatcattaaggcttctggtcaacagtaggccactagtaggtaagttttgggggagtcaaaagctatactcggattttttatttcaaggggcgtcattgctcctaatccctgtgttgatcagggtcagcggcactcaggctcctggaggctggtacagggcatcactccctgttccgcactcaacattgccctttcctgctgtggcgtttgtcacatgccgggcctcggggctcccgggccggtgactaactgtggcttctcctctccagtatggaatgctcctttaccagaattaccgaatccctcagcagaggaaggccttgctgtccccgttctcgacgccagtggtaagtaaagccaggagcttcagaagtctagtgccttttcagcttctgcatcacatgtgttaaggacgcctcatttcacacagggtgggcaagagaagctctggagagtgtgtgtgcatttcagggaagccagtatgtcccacgatgacgtgggttttgtagtctcaacagtgcaacgacagggagtgaattcctctgccgttcttctcccgtccctgcatctcccctcagggttgtgtaagtaggtggctctctttaagtgctcaaaaatggcagcaacaa

SEQ ID NO: 43693 - DNA, 1540 bp, Homo sapiens
taaggaatatctcttataatcacaatgtaactattttactttgataatctttatcttttaaccaaaatatttactgtgatttaattgtattatttagtgtgataatcatatttgtatttgaacctgccatttgcagttttttccaggttgtcccacctctcttgtattccttttctcttaattttttagatttattaagtatatttatgtttttccctctgttaacccaatacgtacatgtacatttactattttctcctggttaccctagatatcacatctttttttttttttttttttgagtcagggtctcaccctgcctcccaggctggagtacggtggcatgagctcatctcactgtagcctcaacctcccgggctcaaaccatcttcccacctcagcctcctgagtagctgggactacaggcatgcacttccatgcccagctaatttttgtattttttatagagacagggttttgccatgttgcctaggctggtcacaaactcctggactcaagcaatctgcctgccttggcctcccaaagtactgggattacaggcgtgaaccaccgcgcccggcctaacatgccccttgaacttattaaaatcttttataatgtagtacatttactgactgctttcaggcaggcatgaggacctttcactccatttgctccattgtcccttttgaaggattcttgtcatatatataaaacctcttaagacataatgttattgttttatatactctttaatcacctacatctttgcactttaatatttcctaaatttgcattcttctctctgggactagaagacctcagcttagcggttcttttcatgtgggcctgagaaattttctcactttttgtttcactttcattcttgaaggaacgtttcactggttataggatgcaaggttagcggttattctcttctgcatcttcccactgcattgtcttctgaatcttataatttatgtaaaaacattagttgtctgtcttcccattgcttctgtgaaaataatgcacgttttcctctggttgtttttgacattttctttgtgtctgtttctcagcaatttttccatgatatatgctcggagcgggcttacttatcctacaccctgaatctgtagcttgacgtctttttgtcaactttggaaagtttttggcattatctcatcaaatatttcccctgacctgttcttgctcttctcttgctggagtgcagtcgttcctgtattagacctttgcatcatgttctaggtatttttatcttagaaatgagtatgtgccatgagacctagagccagaactgagcttagatcccatgaaagaagagctgtcccacttgatgacttcacttcctgtttctgactctttcttcttctccacatggttggaatgtgtgatttgggtgtgtaggttgggatgctggatgtgtatgagactttgcagggccctgagtcctcattgccaggatcagaaagtgcagactactgagccagttaggtggcaagcctcagctagggagggc

SEQ ID NO: 43694 - DNA, 1029 bp, Homo sapiens
ccactagattagaagaataggattcgaaaaatcaggaccagggagaaaggaaatagtacatgaggtgttaattattttcacgactgaaccaactctcaggttcccaaaaagccagggccatgaagtaaacatgatgaattatacagttgactgaagctcctcagcagagacagtacctcctgactgtaagttctaaaggaaatttatcacgtggtactgcatatagagtaatgcccttgacagcaatttcatgccagttgccagagtgatttcatagggctgtttactgtagtcactttggatttcccacagtgtttctgtgcacatataccatatcccacatgtctggaattaagtctacagagtccttgtgagttgtaagttagctggcccaggtgagcttggctaaagtccaggggtctccataggagatgttcgtttagtcaactggagccaatggatacaatggtctagggatttctttacaaaaactcccagccttcgttgaactgtagtggcctttgagctggtccagagactcaaggtgaagtcaattaaggagatggaggaactgaaggaagcatagctcaaaactttcctggaggtgctgcagatccaattctgaatgtagtcctgttgtcccatccacttggcaggtagcattttgcacccagtaatccacagattccagagacattaaggatacatcctagtgccatttttataggatgctggggcccaaaccaaaagttccacagattggcttcctgtatctctctcccagaaccttattttatgttttcactgattaaaaaaagaattatggaaatcaaaactttacaaattcataatggaagaggaaatgtccatgttaatacatcatagatcatagaccactcctgtgtaagccggttttcagtgtaagggtcatcagtgggaactggtcacataggtgacatccattgagggcagtattctgcatggacctccagaaagaatgagattgctctttgtgtcctgttgcggaaa

SEQ ID NO: 43695 - DNA, 1060 bp, Homo sapiens
tgtgctggcatgcacacacacgtgtgcacacacatctacatgcacatacccacacgtgcatacatacatgtatagacatacacctttgtgcatacacacaggtatagacatacacctttgtgcatacacatacattatacacacatgtacatagacacacatacacatgtgcacacacctataggcagagcccactccttttcccctgatgaggttgtggtggtattaataatcataatggtagatgatatttactgaatgcttactgtgcatgatatgttccactgacagttttacatccattatcttaatcttcacagccccttgtgggataggaagttggccacattgcccacatccagtagccagtgaatagttgtgcttggagtttgccctgtaggctgacttatgagccatagcccaagccacatcccgagaacacacaatacggggagcccctccttaggggaaaatttctttccaaaatatcacctcataccttgctcagggaatactctttcggttataagtaataggcgtctaattcacaccagctagaggcccaaggcagcctcaggcggggctggaggtatgagcagcagctggcactctcccttcccaccagcccacaccagccatgcttgcctgtctctgcaaacgcagtctctgcttctctcatagcaccagccgagcgcagggtagtcacacctgtccctcaacccctccagattcttgggagggagagctggggtgtgtccagcattgtttcttgagtctgaggtcgggggttcttctggagatgcaggtcagtttatgcctgcaacaattctcctccctcaccaaagggccctgcctctggaggggcacctgtcttctccccatggtgcctacttccccttctgtctcattctccagagccaacatcagtctccctctctggaccttctacttggggtctgatcttggggctgctcagacatcagaatccctgagctcctcaggggttgcccctcttggctaagccctgcagcagcccctcctctcagtggcctgggggcaa

SEQ ID NO: 43696 - DNA, 1038 bp, Homo sapiens
gtggaacaacaggggttggggagagagtttaaagaaaaatgcagcagggctgaaaaaaaaaatgagaaaaccattggcatggctgatttgaacaagaaaagtggcaaagagacttggagagagatgagacacacacttcaacataatttcactttcctagagaagatcatgtatcctcagtgcagataagctcattgagagactcagggaagaagagcattaggaaccctgatttgggtagcagaaggcatgcactggtcctgaagacattccctatgatggttagcatatttataaagcattgttggagctcagttatattttccaaattcctgtttttcttttatgttaatgcattttaataacattcctacctaggacccagagacatgttttcttcacttaaattgtatttctgtagacttattcagccatgtcagctgtatttgaatattttgcttgttagggggaagtatactttcattgagtgacacataaattctggaaaagagatggtggatttcttgaaaaataaataagagttgaaaacaagtctctgggtcctgatccagccccagccctgggatttctttgagttggagaagtggcccgtaggtggcaggcagggggcagtgaccctacctgagagtgcaggctcccctggctggtcccccgtctgctgggaggctaacctgccctcacagagaagggctcttccgctctcgctgagccccgcctctaccacccccaccacccccacctgggcactcaggcttgagtgacattgactccttcctgcccaccgggtgacagctgagggtagctagctgtaggagggtcaagagggtccctgtagaatggtgtggtcccagttcctgattaaggtgggggcctcccagcccttccctctgctgtcagactccacgccggccacagaaatcaaagttcagagcaagtaagcacccccttccaaacacaagaaaaggggccagagagagcggggagcctcggagggagtttgtcaggacaaactaacat

SEQ ID NO: 43697 - DNA, 1025 bp, Homo sapiens
taagactgtggcaggaagcaagagtgagggtctgtgctaagattgacagcaaggaggggcctgaatgactcccacacacacaacaaccccgtgggggccactgagacaaaaaaccaggtgccccagagtggagtttggggccgtggagatataatgatctaccttcaactccaattgttcttaaacttcttcctttaagtttgcaaaaaaaattaagctcttgcttttttgtctatgcagtgaatatgtaaaaagtgacaacagaaagtctgggaacagtggaaccttctattagcacttcagggcttttataacgggattcagtgccaagccagccagaggcctgggtagctttgcaaaccattcctcccccaactaactctaaaaagacagagtttcatgctgttgacataattatgccctctttaatattgccgttttatttttaaaaacaatttgctatttaggggcttttttgcagtagagagaaagaaattgaggatttgaggggtggcttttctgactgaattgttcctgctgcatcttaactggtcatgaggtttgctttctcagaactgaaatcctgagttggaagcagctttcagggtcctgcccctgcacccttcggtggttgtccacaggccttcagctggagcctgccttgttcccagatccacggtggatccaagcacgtcccagggagggcacgtgtcaggggccaggatcttttcaagagggtatctcattaatccatgtcatagcaacactatgaggctggtgctgcttacagatttccattttacagatgaggaaactgaggcacagagaggctggatagctcagccatgttcccacagctagttactgatgaagcatggttatggccaagtctgtttctaagttcctctttggaaccaccaccccaggccaagataggtcataactaatgtagaacttccatacattgattaagcagtgttttgcttacattactgattctcagagcagttccccacagcttggat

SEQ ID NO: 43698 - DNA, 1032 bp, Homo sapiens
ccagcctggccaacatggcaaaaccctgtctctactagaaaatacaaaaattagccaggtgtggtggcacgtgcctgtagtcccagccacttgggaggctgaggcagaagaatcacttgaacccaggaggcagaggttgcagtgagctgagattgcaccactgcactgcactccagcctgggagacagaatgagactctgtctcaaaaaaaaaaaaaaaaaaaaaaaaaaaaggaaaggaaaaaaaaaaaaaagctgtggatccatctggtcctgggcttttttttttttttattggaagatttttataattactgattccattttattacccctacttgtctatttaggatttctgtttcttcctgattcaatctcaggaagttgggtgtttccaggaatttatccatttcctctaggttttttagtttgtgtggatagagatgttcataataatctgtgatgatcttttgtatttctgtggtatcagttgtaatgtcacctttttcatttctgattgtgctcatgtgaatcttcttttgttcttaggtaaacttgctagctatcaattttatttatcctttcaaagaaccaacttttgatttcattgatcctttgtgggtttttttgttttgttttgttttttggggtctcaataacacttagttctgctctgatctttatttcatttcttctgctagctttgggttttgttcttgtttttttagttccttgaggtgtgacattgggttgttaatttgagaactttctgtctttttgatatagacatttaacactataaaacttatttcttagcactgcttttgctgtattccagaggtgttgatatgttgtgtctctattttcattaaaaaaatttctttttctgccttaagttcattgtttacccaaaagtcattcaggagcacgttttttagtttccacgtatttgtacagttttgagagttccttatggtattgatttttaattttattacactgtggtccaagaagatacttgatatggttttga

SEQ ID NO: 43699 - DNA, 1035 bp, Homo sapiens
tttttttgagacagagtctcgctctgtcgcccaggctgctggagtgcagtggcgcaatctcggctcactgcaagctctgcctcctgggttcacgccagtctcctgcctcagcctcctgagtagctgggactacaggcgcccgccaccacgcccggctaattttttgtatttttagtagagacggggtttcaccgtgttagccaggatggtctcgatctcctgtccttgtgatccgcccacctcggcctcccaaagtgctgggattacagatgtgagccactgcgcctggccctgcctctctcctttttaagtgactccttggtagctccgtaatgtgataagagatcagatgctggtgtccagagaccccaggtctgagagcaagcaactaccatgatgtggacctggcgctcctcacagcatgctgagccccctggcccgcgtgctgggacagggtgggagagtggcagtggtctcactgcagcatttgtgggccctcacggatctgagttccacctgcagctctggtgtgtctcctttctagacatgtaagatacaagctcagtgccctgtaaaggctacgggccaatgggacttgatgaaaggaaggaggggagggaaaattctgcatgggagtagtcatgggtagagaagagccctcagcctcctattcaacagcacgcgattcctccaatgccgcctccctctgagctctctgccttcgctcaccttgagcccctacaacgggccgggtgttttgccagaccctgagaccaagaggttgaccgcaaagtgggccctgctctcgtgagcttagcacgatggtgacagagtgaagagctatctgagaggaagcaggatggagtagttggtagtctaagacgtggcaggcatgtgccaaaagagagcagccattattctatctagaaggacagggaggtcttccccagctgccttgcgtcctctccctggggatcccagagcatgcagcagccccaggcaggcttaccaagttcttccacgatgactgcaccc

SEQ ID NO: 43700 - DNA, 1416 bp, Homo sapiens
gaaatctgtaactacactgtatctgacggcttgtgtgtgttcagagttctagagcaggcatatgtgcagttggtagagagggtatcaggcattggaagggaactgatgagctgggtgatgcctccgctttcaaaatgcaggtgacacaggtagtcactcttcactcggctgcaatagcttaatagacttgcggtttgaaacattttacttctttaagtgcatcctgtgtgaaatgacaaaccccatccctgttgcagttcacatgttcatctgcagactcagcgcccttgggtggactccagcaatgtgccccacccgtctcagctgatgtccctggctgggcaggaggggtttgggaaactgcctgcaggaaggccccagggagctctgggacccggatggtgggtcgtgtaggattgcgtcttctcctttgcaccaaaaatctgagggtagctgcaggagagggtttcagggggtgggggagggctgggagagccccttttaactgcaccctcaggagcagttctcatccactgttctcatctgttgctttttttttttttttaatttggttggctgtttttgcatacctgtaatgtttaaagttgatccctgttaagcctgtaggttatgatcgggcattctcccaggtggaagacatttcgaatccctgtcattctgctctctgtggcattggtctttgtttaccttagtggagttattaagtgtgccttctgtgccgttctccaggttctgaaaatattgtgcacagggcaggctgaggacacagccacgtgatacccactgtagagagagggagagagagacctcctatgcaagctgccggccctctgttccgtagtaaggtcagtgcccgctgtctaccgaacactcagtacctttagttgctgggcaagccctttatttatgttattttaatttgaacctcagaagtgacctatgaagtggtcgttctgcctcaggaaggtgtggagataccccgaaggtgaggcagttgccctgagtcccaagactaaccagcatgtgggggcctgggatctgagccagtgtccagcctgctgtgcagtccttccatttgtcacctgcagtgcccgccgcactgatgatggcactcctctcatccagttttcccgctgcccctccatccgtgtgttgcagttttagataagaaaactgcctgaatcgcccaatgaacaacataccctggttctctggggctggttcctcttgtgcatcttgtagtgtttagttggtacccagcagaggcaagagtgcatttgatgctctagttgaaacggaacgccaatgactggtggtaggggctgcttcctcgctgttttgtgcccaggctaccttgtgatgctttttgctgaagcctgggctttgaaaggtggg

SEQ ID NO: 43701 - DNA, 1035 bp, Homo sapiens
gatcttgccttgggaatcccctgtcccctctttgtcctggcacttagtcagtgggctggaattgtctgggccgactgagtccctggcctcctccctttgctgggcgcccagggccctttggactccctggagtgacagaggagtctctgcctggggggatcagaactgggcctgctgcatgttgagcagtctggagtggggtcaagcaaagcatggccatggccttgtggttgcgtctcgtaggtcccttcaggagctggtaccagcacagggtgaaccgatctgtgtatctgaccatcgctcctcaatgggtccagagaccccaagaacctcatttcagagaatgaggccttggctaagtggtgctaaaaagcaatttccatctaaacacctggttgataatatggacacaggagaagatacgctgtcttcagatctactgataatgaacgaggttcctaacttagggagaaagtgtttaggtaaagaaatgttttgtagcttcagtggtggataaggaggggcctgttgtcatatctgtagattacctgtatctgtgtacattttaagtttgtattacttgtgtttccacacatggttcaaatttcatatttatgtatatatacatatatatgtgactgtgacgcatgcgcatgcacacacacacacacactcttcaagcttctcatgtgagtgagtgtctctccttgcggtggcagcattaggagcacatggcctggcaactgcttcctgtggtggagcccagttgcccctgactcccttgctgtttgttgaagctggagcagtaaccagactattgtgcttataactgcttttcaagtacgtaagagtaggttcacctctgagtggaaggaatggtgaagactttctgtgtttctgtccttgatacccccttgcagttgttaggctgccacaaagtgggagactgtctccttggagtttgagaagggagctagcatgtgttttgtgacaggactttgtatacctcatctcactcagttttcctaccaaact

SEQ ID NO: 43702 - DNA, 1379 bp, Homo sapiens
ctaatttgtaagatgggaccaaacaacattagaacatttcgttctttggacaatgaggaaatgattggcagtttctttgtggttgcccattctgggaatacagaagtgtgtaagacatagccggggcttaaaggatgtacccaagtaatagaggaaggagaattgtacctgttgtttaatgactctaaataaggaaacacctgacccctctgtctgtggacacagagttggaatttgagtccttcactgccaaggacatcattgcttcactgcaacttttctctttttttaaagaaaaaaaagctacttggtattgtgaaaaaatagctataaggttatattttgctttacttgtcccttcagaacttcactaaaagaaaagtaaattttatataaatgtattttatttttcgacattgtgaaggtgttaattccaattaaattggtctttgaggtcaggttcttggcatttgcagggtacttatatggatttttcagctttctaaggcgtaaatgtggcctttgtagcttgtgcagtatgaggggtgagtgccagggcatctagagaaacaacttaatcctgagagcgctatctttacctaaggtgggtgaaatgggattaaaaataaccctacccaaggaggacattgagggcagcttctgaggagaggctttatggagaacaagctgtgtgtttggaggccaggtataagtaatgtcggggaaggagagggggcggtaccctgtcaccccacctcatcactctgtcaccttgtcaccctggcattctcccccatagtccatcccccatcatccggtcactctgggccctgtcaccctggctcgcatcactggttctgtcacctcttcaccctggactcccctttcttgagtgcttgtcacagggctttgaagctgttgctgcccatgtgcccccatcaactatgttctcctggcagatgggaatgtgctttctgtggctttgaaatcttcgaacacatggaatttcccaccttgctgcaagctcatgggactacagatgctctcagagctgctctgtctgtgccatccaacatctttgccctgacacttctttggtgccaggcggggttaccctggggccttccaggggacctttctatcaccttaggaagccgctttggatcttggaatgacccttgcaggaagtccttgaacgtaagtttatggccagtccttggcctcctgagtgggcatgagagtgggcagggcagaggggctgtggcgtggtgcaggttaagggttcggggctcagctggtgggggacagcctgggaagctgggagctactgggcccgtggtacaccctgcctctggggtgcaggagagacaggagaggag

SEQ ID NO: 43703 - DNA, 1033 bp, Homo sapiens
tgctttcattttcatgttcaacctacagaaaaacctaaatcatcccctttcaatcttagccagcttgctcacagaacttcacaagatcagcccttcacacaccctcagctctgtttctgcaaaaaaaaatatcattaggatattgatagggactgcattgaatttgtagattgctttaggtagtatttcatcttaacaatattagttcctccaacacagcatgtcttaccgtttatttatgtctttattcttttagcaatgttttagttttcagtgtacaagtagttcacctctttgattacatgtatttctaagtattttgttatttttgatgctattgtaaatggaattgttttcttaattatctattggattgttcttaatttataaacacaaatggtttttgcgtgttcactttgtatcctgtacctttgctgaactcatttactagctctgatagttttttattatggaatctttagggtttttacatataagattatgtcatatgtcatctctgaaccttgatgattttagttcctcctttccaatttggatcccttttatttctttttcttgtctcagtgctctggcgaggacttccaatactatgttgaatagaagtggtgaaagttggcgtctttgtcttgttcctgatctcaggggagaagcttttcatctttcaccattaagcatgatgttagctgtggattggttacattttattagagaccagagatagcccagccctcttactgtatctaactatagtttacttgtcccaaggaaactgttccactgggcttatgggacacacattttcctggcggagaagccatctcctttggcaaatactttcaaaggtgatatttaggtaataaaattggcatattaagtgatatttttgacagtcttaacacacattaagtttgaaacttcagggagaaaataagaacatatttctatatgtcaaacacatccaggaattccagaaggcatattagtgagggccagtgagtctccacggatgagc

SEQ ID NO: 43704 - DNA, 1107 bp, Homo sapiens
aaggaaatatgagagtggattgcatgggttcttagcatgcacttagtacgttgccatgtgtgatgagccacatgccatgcgggatagacaaggtgagcatggattggtcacggatgtgtcatttggtcatctgcttactggcattgggttagaagatgtctatttgactatcttttcagaagggagggtaaacgctctacagtttaaatccaccataaacataatttgcaattagctgcgaggtgagggcctaagagtatcatctacagtctgctagactctagagtttcagttaggaacacccaatgtacttttcagaaaaagtgttattgggtgcaacatttttgaagtttatgacagttgtatcattttaatttaactagtacaagttgccctaacatggaaaaacaaaaaacaacccatataatcggaaacacaaagacgttcaacttcagctgctggatccagaagtgtaaatattggcattgttaagaaaaatgttgactttagaatgagtaaacttttgactctgcttgaacgatttttctgaactatagtccaataaagaagtttaagctttatcatgaagattatttaaattttcattaattaaaataaacaaattttaatatattatttataatgataatcttgcaaaggagggtttaaccttcgacattaaaagaacaatgtgaaaccaccacagcaagccaaacttgttagtaggcccttttaatcaagggaagcaaaaagacaacagatattgatacaatttcttaatcatctgacaacggttaatgagaaagtctttagttattatagacagaaagctgctatctatctactggcttataaaactattcctcattatctgtgaatatgaatcacatattttgataaatcagctgatgatttagaatctgaactctttaaagtagcacagtagatgatccagttgtataactgtaggatgttcagaagtgagctttttatctgggcatggtggtgaactcctctagtcccataagtcccagctgcctgggaggctaaggattgcttgatcccatgaatttgaggctgcagcaagctttgatcacaccactgctc

SEQ ID NO: 43705 - DNA, 1079 bp, Homo sapiens
ttctccatgccaatattcccagggtgcataaaggtaggatgctttgatctctggagcacctgatactgctccctccctgccgtccttttctttgactccagcctgccggcctgtgatggttctacgcggtttcttttcttttccatgaagtcctgtggtcgtggtgttgcagcgcctgcgtcctaatctctacgattgaggcagtactctgacctgttccacagtgtgtctagacttcattgtgcacatgggttcctcttctctgcacatgcctaccacagagcaggggtatccactctcggtgaatgcggcttgagaaggctgcatgtggaggtggccttcatcaccccacctcttttcagggctagaaaattggtgttttcctctggtgaggcttttaggatggagggattcgaggacctcctgcctgtggatagcctaggctgttttctgtggttacctttgctcaagttttctgttgactttctgggtctcagatcagttggatcactgcattaacagtcctgccctgggcattcatgtctgtgtgtggaccacagcacggcaaaagggaagaccttctctctgacaccagtgctagtggtgagggtgcctagaaagtgaaaattagtttctggtgtcggcctctcctggttctcctgagtaggatcttgctgttggggttctgtgctgtccccttcaggactcaggctctggatttgcggagagcatatctcaaattaactatgcagctgtgcaacaggagtaactgctggccaagttacttggattctttctcatcggttgagtggggatgctgctagtgtgtctgcacaggtttcttgaggggacttgatgcttcccacaaatgacagtagggatgtggccaccgtaaagtggtgctgtgcttcgcagcactgcgtgatctgacccacgcttacgtttcaaagccattgaaacagattcaagatcatgtattgatttaaaaaatttactcttttctgtcgggaggctgaccagactactgaagtggaaggaactgtagatgcttgaatagaatatgccacacaagtcttttt

SEQ ID NO: 43706 - DNA, 1032 bp, Homo sapiens
agtctcataatcatgtatcacatatctccccttttggtcctaaaaagaccagcatcccctttaaacattagcaagcttcatagcttgcaggtggctggtgtgtttcacacctgaaaatgggagaattatttggcatgttgtagttaatgatgagtatacatttgtttaacgtttgctatacgttgaaccctgtcctaagcctttatatgcattagctcatttaatcctaataaaagctccgtgagagagatactattttcatgctgattttatagctgggaacactgaaccccaatgactcaataatttgcccagacatcagccgctaaggggtggcatctggagatgaaccaagactctctggtgcctggatttttagcaagcatgttcagcgggacctgtttcaaaaaacagccatttgactggtcttcttatatctgggcccaggacttcttgatgtcaggtaagaggcaggggcaggtttcattttcaccgtttaacaattaggaaaatttagcttctgactcttccatggagggatctgttgagatcacccacgttgcaggcaggggacctcctccagcccaacagcgataggaggctcctggatggcacccttgctgcatgccagtcacactgctaagccattctctgtgtatttcatttaaacatgttggaatccagtggcattccaatgcagtgtattaaaatcctcagtgaggtgggtttcatccccatgctctgcagtgggaccagagcctgggaagaccagtgagttgcccaggtcactataaagtctcctccggtaggggtttcaattggtctccaccctcttctccatgcctagaacccacctgtgaactgagggctctgcgccttgagctctcagttcataggacttgagtgatgaatcaaagatcagagccagaattggaaccccaggtctgcctgctctgcacccctctcgtggaacacatgtgctccatgcagagtgcccagcggaatctctgctgagaacagtaccaggcattg

SEQ ID NO: 43707 - DNA, 1626 bp, Homo sapiens
gggggaggtgccacacacttaaacaaccaggtctcttgagaactccatcacaacagcaccacgaggatggtgctaaaccattcatgaaggatccaccaccacagtccagtcaccttccaccaggctccacctccaacactgggggttacaatttgaaatgagatttggtagggacacagaaccaaaccatatcagacagttcttaaaaatctttttcaatttaacatttacacctcgtttctgtttcttcactgtgttttctagaaccctagaacagttacatctgatactgccattgtgagctttccggccctaatgttaatggggatgtcatttttgcttcttcattacctgtgccacttgcctgctggaagttttggatagatgctttttatcaggttaagggggttccttatttatacctcaccactaaaatctttcattcctggcatgcaggggattttaaaagaaattctgttatcttctatgctttggatttcaggctcactctagtagattttcttttccctaaaaggaaatgataaaatctgttccagcaagtgattgaaagaatcaaaatgaagagaaactttacaattattgtaaaagttttctatttttttccttatggtagaaatgatattttattaaaatcacaaaccgtgtggcagggattcatacatccaggtatctgttgacttgcatcttcgctctgccattgattaactgtgtggccttggcatataattaccgtctcctagccttggtttctgcatctgtaaaatgaggtaacagtgctgcctcaaaggattgatatctagttgttcttaattaaaacccacctatctttgcatgttgtgttttgtgtctcacatgcctttacttccttcaatttgatcttcaaaaagccctcccatgagagattgtaaagcatttggtaagattctgacaggtaataggttgtcaatcaagggtggctgccattgccctgagtacagttatcatagctgtcaccaccatcttgggtggcatcatctggagagtcaggaatggctgtgagccctgggattctagtcccagggatcctgtgtgctcgattgtggagtgaagacacgtgcccactcttgtttcagtgtagcttgtatagcacatggtgccatgataaaaatactcatgttcgtatttgcagatttgactcttctggatgaacagtagcatgtatttttgtgccaagtacacactattttaactacttttgctttagggtgcattttactagatgatgagtaattctcccttaatgctctatgattgaccatcttaccgcttattttattttgttagttttaggattattccactagttctaagaaaaaaactgcttgaatttagatagatacatactacatttcatttataaagttgttttggatatttatattacttttaagagaattaatccttatgatgtttaatctttccatttaggaacttagcgtgtttccattcatttaggtctttttatatctcctaagtgctatgatattttatggtttgtataggattattcttagggctaacctaaaatatgcatacctatgtatataaactattgtgagtgtggtc

SEQ ID NO: 43708 - DNA, 1662 bp, Homo sapiens
gctagttttttctttctttagttccgggatacatgtgtagaacgtgcaggtttgctacataggtatacgtgtaccatggtggtttgctacatctatcaacctgtcatctagattttaagccccccaagcattaactatttgtcctgatgttttccctcccctcagtccctctcccctccctgacaggccctggtgtgtgttattcccctccctgtgtccatgtgctctcattgtttagctcccacttatgagtgagaacatgcagtgtttggttttctgttcctgtgttagtttgttgaggatgatggcttccagcttcatccatgtccctgcaaaggacatgatctcattcctttttgtggctgcatagtattccacggtgtatatgtaccacattttctttatccagtctatcattaatgggcatttgggttggttccatgtctttgcttttgtaagtagtgctgcaataaacataggtgtgcatgtatctttatgggctagttttttcatacagtcctctcttaaaaaaaaaagctgtattgaggtataattcacataccatacaatttactcatttaaatttgaagtatataattcaattataattagtatatttacagatatgtgcaatggtgtgtgtgtgtgtgtgtgtgtgtgtgtgtatacagattgctgtggtctgaatgtatcacccaaaattcatgtgttgaaacctaatggccaacgtgatgttattaagaggtggggcctttaggaggtgtttaagtcataagagtggacatagatgggattagggcccttttaaaagggcctgagggggaatgggtttgctctcttctgctcttccaccatatgaggatacagcatttgttcccctctggagggtgtggcaacaaggcaccatcttggaagcagagagaggccctcaccagacactgaaccccagtgccttgatcttggacttcctctcttccagaaccatgagaagtaaatttctattatttataaattacctaacctgtggattttgttatagcagcacagacagaaattgatactgagagtgggtgttgttatagcaaatacttaaaagaaaagtggaattgggtaatgggtagaggatggaacagtttggaagtgtttgctagaaaaagcctaaatttctgtgaacagagcattaagaatgattctggtgagggcccagaagaagaggagagccgtagagataaccagtgtcttcttagaaacttctaagtggctgtgatcagaatgctggtagtattatagacagtaaagcccgttctgctgtggtcgtatatggaaatgaatatcttattggaaactggaggaaagacagtccttgctacaaaggcgcaaagaacttggctgaattgtgcccatactctagggctttggggaaggcagaatttaagagtgacaacctaggatatttggtggaagaaatccgtgagcatagtattcagtatgctgcatgacttctcttaattgcttacagtaaaatgtgagagaaatgaattgaaaatggaatttataatccaaagggaagcagaggctgggcactatggctcatgcctgtaatcccagcactttgagaggccaaggtgagaggattgcttaagctcaggagttcaagaccag

SEQ ID NO: 43709 - DNA, 1027 bp, Homo sapiens
atggtacagtccctgccagggtgctggggggacctcgtctgcggagccggcacacaggtggctatgggcgggggagactgcagtctaaacccgcaaagctctccttcctagcccagtgaggggaagcgtgggtgtctttcctcattgttctttttaagtctgaaaggcagcgactgcagggattatgacgtgctggcggccagggcctcgggtgctgcctggagtctcctgcgtgtctctgctcctttgatgtcagcatcgggggtgggagcagggcccacgcattccccctttggcctgggtgggaacaggggaggtggtgggcagggccagaagggcttactgggattttctttctctctgtcactccagagaaaggtggtaaagaacacttgtttcagtttgaggtgctcggcagccacgcgctgaaggacggtttttaattgtagggtggggtgtgagtgcagtgtggttcagtcccctccccatcttgtgctacctgccgttgtacctggacctgtgaatcagggataatagttactatcttgtaggactgagaatggtgcatactaactgctgaggaacatggtgaatggagttatggtaattgcacgattggcatgaaggggtgagagaagttccagattggtcgattaaaatgtgagttatttttagtgtctcctaaggatttccatcaccagttgctcctccagccatcatgtaattaccaccccagaactaggcttccaaacttcgagagaacactgcatctttcgaattttggaggttaggctccaaaatttgcatatttaggccacagcctaaattcactgacacttgtgttcccacaaaagccaggcagcttcttggagtatgtacttgtgacttagtaagaatgtcttaggaaactcgcttggactagaatggttttacctttctttcagacttgggaggctgcattctgataattctcaggaggaagaatgtataggagagaccagggtttttaaggtgtgacctctgaacc

SEQ ID NO: 43710 - DNA, 1035 bp, Homo sapiens
gttcactatgtgacatcttctctgaggggtgcgcagttagagtcaaaagcgctaacaccttcaatgtttcttgcagtagccaggccatatgtggtcagcccggactgtgagaaaagaaagccttgtgttaccctttgtgttgtgttgaaaactgctcttggctgctttcagaaccagccttaactctgcttttgtttgatcgacttaaacatattggaattttgtggtcatgaccaccgtggaacctctccttttggagtgcatatctgcactttttccagcctcctcctccagtgaccttcaggggcctgacctggcctccgagcagttggactagggtagcttttccactctttgaaccccagactgagatggggttttcccagcgccctgccccttaacgtgtgtgaatgcagtataggatctcagtttcagaatccattgtccactgttgactgttaggttcttactgctgtctacaatgtctagcttttcctaccatgttctctgctagaggggagtagaaaatctgcttactgcttactgtggccttgtaaacggcagtgaatatctccaaacgttctgttttgcttccatcattgcaggctcgtgtgtatgtctgtggtgtatgtgtgtgcgggggtgggggagtatgtgtgatgtgtgtgtgtggtgtatgtgtgtgtgtggtgtgtatgtatgtgtgtggtgtgtatgtatgtgagtgggtgggtgggatgtgtgtggtgtgtgtgtgaggtgtgtgtggggtgtgtgtgtgtgtgaagtgactagcacatagcagatgcttggtatgtataggatctgttctttccctcgctgactctcagtttaaatgggaccctactttgtcctcgttgttcagtaacgttatgcctgtggcttccagaaagagcctctcccttcctggttcttgctctgacattttggggagaagggtgagacgagagtgatcctggaagagtagaactggccggccctgcaggtggaaggttgctcgagcaggcggcatct

SEQ ID NO: 43711 - DNA, 1049 bp, Homo sapiens
agaccttgcatgtctgggaaaatgtccatctactctcacagtttacggtttgtctgaatatggatttctaaattaaagatagttttccctaaaacatttagaggcttccattgcctttaggcagaatggggttgagaaagaagctcttctgattcttgattctgtgtatgaaagagtaccagagtggttttttggtttgttttttgttttgttttgtcatgtctggacacttgtaggatattctctgtgcctttgttccgaagttccttgaagatgagtcttgttgggtctccactttgtgtgtggggtatgttgagggcccattgaagctggaatctcagatctttctggtcttggacatgtttttgaattaatcctttcatttcttttcttccattttcctcttctctctttctaggatggcagttatttggtttttagccacctggattggttctctgtattttttatctaatagtctgtgtctgttgtgttgtttttaggttttgggatatgtcctcaatttgaccttttaacttttctgttggattttgtttctattttcattttgaatttcttaggatctctctctatatatatatttatattctttttaaaaaacagactttagagcagtttcaggtttacagcaaaactgaatggaaggtccagagatttcctacatgccctctgccccacacacgcacagcctctcccactactgggaatcctgtacatttgttacagttgactattgacacattattgacattcaaagtgagtattctttttttaatggcataatattcttatttcatagatacgtctatctcatttgtagatattaatttttaaaaactttttgtgtatcgtttcttctctcccatttgtaaatgatttacttttaatttttctgtttgtttgtgtccagcttacccggaaagcagagcctatggcaaagccttctgtgcttctattgtaggagggtgtgccagcctggtggagggaggctggaaggagggaacctgggtgcagggtgaggcggggtg

SEQ ID NO: 43712 - DNA, 1049 bp, Homo sapiens
tttgtaagatttatccatgatgatatctgtgttgttcattcatttatttacctgttttcctgataatgaacacttagattgttctagtttttcagggctagaaacaatgagcaagaaacatatgtctctatttacatgtagagacttttctagaagaggaaagtgacaggaaagagactcatcttcagctttatgggatacctgaaatgcttatgcagttggcgggccccccagtgtctgcaaggtccccttgttgcacaccgatgccagtgattaaggtcagtagacatcttgagctttgccagcatgtaggcgtcagatggcatctcatgtagctttcatttacatttctctgattaggaaggatgagcatcttgtcatatattcattagcaatttgggccttatattggattaattgccgtttcatagcctttgctcttttaaaaaacatgccacgtttggcctggcatggtggctcatgcccgtaatcccaacattttgagaggctgaaacaggaggattgcttgagcccaggagttcaagaccagcatggtcaatatagtgagaccttttctctacaaaaaaaatttaaaaattagctgagtgtggtagcatgtgcctgtagtcccagctactctggaggctgagatgggaggattgcttgagcccaggaggtgaaggttgcagtgagttgagattgtaccactatactccatcctgggcaatagaacaagactcagtctcaaaaagaattgaattaaattaaacattgttatgtttactttttttgattattaaattctcctttgtcagttatttacacatggaacatttctaagcctgtggcttgaacttaattaatgttttcttttcttgtacaatgattgtctttacattctaatattatttaatttttcctttttctctcagatgtatataatctttgcctatttaagagatccttcccgtaccctaaaagactaaagatagtctgaatttcttgtaaaactgctctctcacatttgggccctcttgtacctggggttt

SEQ ID NO: 43713 - DNA, 1105 bp, Homo sapiens
accaaccatgagggaagtgatgcttatgatatggttcttacaggaggcagaatcatatctgttggatcaataggccctttccacagctggcatacaaaaagactaaatggaaaggaagaaaacaataacaatatgctttggctgatagaacgcttgctatgcagtgttaaatctccaggggctggaaaatgaatgataatggcagatatttatttcaccgcaagtgtgcgttcacattttgccatttattttccccccgcagtttattgctgtgcgtcattccctactcaggccaagcgcttctgatggacgggcctcttcctgacctcggacctttcccagtgtctcttctgccctggctctgattttcctgttgttcttcctcctttcaggataaaagggctcattgtatacccagaatttacttcctttggggtttacatataaatgcattaataacagagatttgtttgattgaggtttatatttttttgaaggaggtaaattatatgcaaattttaggttgataatattcacctgtctgaaattcactgatacttggaaatgttcctgtgaagaactctgctttattttaattcattattaattcatgtttttcttattggatattcagttccagaatttattgccaatttttcttaaaactagattgtatccataaattgaccagtatagtcaatttggatagaactgaaactttctgtctacctggtaaaactaagtgcctaaaaacatgaactataaatgtagttactaggaactcacaacttatatatactatccattcaatgatacataggacccaatgtctttgtgtttttgaggttttcctgttactgtgtactttgccattttacatagttcactaaaaagaaagaagtgggagaagaagggtgttctattcattattctatattatgattctcttcattattctgttctcttcattattctattcatttcttcacccatttattcactaaacagtgacatagtacttacttgatgctaggtattacaccagttttgtgggctataagagtgaataacaagcacgtgacctctggccttggattttactacc

SEQ ID NO: 43714 - DNA, 1193 bp, Homo sapiens
aactgtgtgctcagatgttcagtgccatgtatatgtggggcttctgaactcttttgaacaaatacatggtttgtatcaagagttcagaagaggtggagcaaccaccttccccgggtgtatgtggctctaagaggccacctctcggcagccggctctgcagctcacccagcccatgtgcagattgctctgagctgcgtgcctgctcaagccacagctgcacagggcaagttctctgtgcacaccctgtggccacctcaggtgcctgtctctggcaagcctctcactccctccagtgggaattcctcccactgccctctaggcatttatcctttactgtactcactataccatattacacacacctgttatgtgcctcctctactagtttaagctattaatacttggaggcttaactgttttattcatatttatatccgtccttcagataggtgcctgacacatagcataaatttaataaagaaatataccagaatttatctcaccatgtgaattacaagtatcaaattatagtggaatgtgctattctattcagcttcattaaacatgttttccaggctaaagagcatctagtacccagcattttaggtctgtctgtaggacatccctcaagagtcaacagtgcatcaaagacctgttgcagttatacttgagaaagatgtgaaaatctccgtggatttcagcatccagccttggcaccttctcgagtggtttcttggtctggccttgctgctggatgccttcagttgtgtgttggcctctctgaagtggctctcagtgatccccacctcctgtgttcaccccctagcctcttgtagcctcttgccacgaatgctgactgtacttagtgactcctatctaaggaatagaatatggcaaaggtagtgggatgtcacttcttacatccaagattagggttgaaaaggactgtggtctccatcttgggcaccctcgctcacttgctcactctgaggaaagccagccaccacgctgtgagctgctctacggagacccacatggcaaggagctgagggagacttcagccaactgccagcgaggcgctgaggccctttgtccactgatcatgagcctagaaacctgccaacagccacttgagtgaagttgggggcagatccttccccagtagagcctacagatgagaccatagtcctgat

SEQ ID NO: 43715 - DNA, 1097 bp, Homo sapiens
ttactttgcatttctcatatggttagcgatattgaacattttttcatatgtatgttggtcattcgtatctctcttttttttgcaaaatgtctgttcacattctttgcccactttttaattcagttatttagttttttgctattgagtttcagtttcttacatattttggttattagccttttatcagctatatggtttgcaaatattttctaacaaatccatggattgtctcttcactctgttcattgttttctttgctgtgcaggagctatttagtttaatgcattcctatttatgaatttttgtatgtgttaatttaaacaaggaggtgaaagatctgtacactgaaaactatatagcatgctgaaaaattggaaagggcacacaaaaatggaaagatgtttcatgttcatggattaaaataattaatattgttaaaatgtccgtactacccaaagtgatcctacacatttaatgcaatttttatcaaaattccaatgtcttttttcaaagaaatagaaaaaaacaattcttaaattactgtggaaccagaaaagaatccaaatcttgagcaaaaagaacaaaggtggaggcatcacactccctgatttcgaaatgtaaagctattgtagtcaatagctttgactacagcatggtactggctaaaaaacagacatatcaaccaatggaacagtacagaaagcccagaaataaacccaagtgtttatggtcaattgatttttgacaaaggtatcaagaacacacaatggggaaagaacagtctcttcagtaaatgatgttggtaaagtttgatatccacatatggaagaatgaaattggggccttatttcaggccatatacaaaaatctacttaaaatggtttttaaaaagttaaatgtaaggcctgcaactataaagctactagaagaaaacatagagggaagctctatgacattggcctcggcattgatttattgaatgagtcgacttcacttttgaaatatagttttgccagatgaagcagtagtccccaccctttgtggcaccagggaccagttttgtggaagacaatttttccacggaccagtggggcagg

SEQ ID NO: 43716 - DNA, 1096 bp, Homo sapiens
tgggataactattgcggatgcagtagctccttgctttgggaattggttttatgttatgctctttattaatataagagtgggctgcagttaaattcctgacccttgcttaaaatagatctacttgttttttgtcattgtggtttctcttctgtcttaaaaagtgggtttagtaaagaacatgcaaccttttcatagggtaagcaaggagtttgtaatttatagtcagccccttaactgtgttatttcctgacatgaaggattccacaaaggaaacacattagtaattggatgctgataatcccatatggaaaatcagtgaattttttttttttagcttcccttgaattaagaaacataaataaaagttgaagtctgttcttacagattaagacatgagaattggtgctctgagccgttcataggggaaatgttctggcctaccttaaggatggtattaccagcaccccacacagctgctggacagaggccacaatcccatcattttaattgaggcacaagaacagaagatcttttggtcaggtgcagtggctcatgcctgtaatcccagcactttgagaggctgaggtgggcggatcacctgaggtcaggagtttgagaccagcctggccaacctgtctctactaaaagtaaagaaaattagctgggtgtggtggtgcttccctgtaaccccagctactcggaaagttgaggcaggagaatcacttgaacctgggaggcagaggttacaatgagctgagattgtgcctgtgcactccggcctgggcaacagagttgagactccgtcaaaaaaaagaaaagatcttcaaagagccctttacaaaagggtgtcaggtatttagtgtgctaggctgtgtcattatgatatggtcagtgccttgtgtccaaactggtgttcaaggccaagggctagggcagaagaaggcaagccttccttttgcagaagagaggaaatctgcctcatattcagtcctgtgattctgcctttacaggccattgcatcccctttacaacagacaagcttagacctgtgcagggagttttaggtccctgtctgtgtgaaacagcacaggactct

SEQ ID NO: 43717 - DNA, 1076 bp, Homo sapiens
agcctgagagtggaatggtgggacccgggctcctgcagggaatttcatggcctgaccttttgtgcctcggctccagccctttatttagtgtgctacagtatatatagattgagaatgctaatttgttctttgccagctaaagtacccagggcaatatgatgaggagtcaatttaaaggactgctgtcttgggtgggccgcctggaaacactcctgcctttgtgcttgtgcttgatagtgcagctgctacgacagtgtgacatggaattcagggtctcagctgagccacacggcattccagaacacatttcagaaatcctttaagcatgggtgtgttagaacaaggagtaaaaatagagaccaagcttttggtggagagaaggctaggtgctggcccgggtccccaggcctctggttgtgagatctggccttgccctcaggagctgggcttctcaaactctgcacaatctaagggacaaagcaggggctgggctggagtctcatcggtcagctgagtggccgcatcaggtggggcaacattcagggcctgcattgctcctgcatcggcacaccaccttgatgtgaggtcatcggaacctcctgaggtgacaccactgagtgcctggctcactgcagccccgtgattcattgtgagtctctgctctctaccctaagccctgtggagcccttgtttttgccaggaggaagtgatctcggcagagaactttcctagtcgtgccactggtcattgctagagtatgctcagtccccttctttgttctcttccatgggtgaacccaggcctggccaaacttctgagcatgttcctccagaccctcaaatatgcagaccctccctcatgggatgaacacgatgcgggaatgaaagacaactggtctcactgcaagtgaaggaggccctggaggatactgttccacattgtttctctagtttggtccctaataattttataaagaggagatataggaagggctgcattgtggttgttgatgagtttcccagagaatgaatcttaagagtcacacaatgggttggatgttactgtctctgacagta

SEQ ID NO: 43718 - DNA, 1050 bp, Homo sapiens
agacagaggctgccgagggccagacagggcatccttccctgattcagaatgccctctgcttatttgttaatcctattgactttcttctatcaaaggcagacagcgggaggattagtggaaagaaaattgtctcaggaacaagaagctttggaccctggtgccagttgtccaaggtgaaattgctccttctccacgcagcctgcaggcccatcctgatggggcctctccagactttttcagcccagggctgtctgatgatgcttctgccaggtgccagtgttctctgccagtgctgccagacacaggtgcttctgaacacttgactggtgattattgcaactgggagctgagtctttcaccttttaaaattttaatccatttaaacttacatagctgtgtgcggctagttccagtggacagcgaggctccagcctttggatttgccactctttgtttgccaccgcagcttcccaggcctcacctggggtctcaggctttctctctcaccttggcctggagagctttcttgcccctttctcagaatgcctgttgtttaagctgcagctggggctcccccaggaggccttctgagagtatccctctcacaccccacgccctcccctgtccgaaaacctcctatgggattatgattgtccctttacttgcccctctgacccactgaattctgagcagctccttggagccaggactattactttgtaagcttttgtgtcattggtttgtggcctgtgatgcacagaacaacccctgcttccttcttgctggtggagggagttagataacatgatcttaagactcatgtgagctctaaaatcatatgattcagtgttcccagaatattctagagtcctctttcaaaaaaactgtttcttaaattgctgcttaaatcttgtttttgccagcctgtatgagaacagaccgatcaactggcactaacatatttggaactgatgtgcttggactcagcttgccagccatgcagcctagttcggtgcagatttgggaggtgttaagaggtcttattttgag

SEQ ID NO: 43719 - DNA, 1069 bp, Homo sapiens
ttcctgatgcattcagttctttccctcactcatatccagtgtctaatttacttgtccgaacatctttgtccaagaaatgtagacatattatttttaacttctattgttctcactttgtcatttgttaatactttcagtgaagaagcatcaagaaaatgttaatatccttatattttttcagacaagaattacgtgtttaataagcaattttgtgttcaaatctgaggagataaatggtgttaggtcttcgaatattttatataatttaggtgtatgcttgctaattataaaggttagatattgctgtgaaatttgtggctttagtacattattggtggcaggcagattctgttggctcttcactgagattactcctctgttccctgagattaaggcagtgtttgcagtgtgcttgagggaaatttgttttccatctgattctgcaaccgtttattataaaatcaaactttcagtaagcctctgtcttcccacatgataacaaactgatgtggtgaagctgttgctgttgctgaaactaccactcctccttgtgttgtatagaaacaagctagactgggtgcagtgaattaacgagatttcaccctgtggcctacaaacgctcttctagaagattactgaagggagataggttggtgaatgtaaactcactgactctgtgtctggctaaattattaacaggtagttattagttatctttgtgaaaaacacaaatatacgtttttacttggattgaaattgtatgttttttactaggaatttcattaaaacagtgatgtatgacttccttgactcctggggaaagtgttcttttaggaaagaggctgtgtgcaaaaactaacaagtcagacttgatgtgacttttagggagttttagagctcagttgaagtataagaattgacagaatactcagaacacaagtaaaggcaaattgccttttggtgaggttttgaagtatatttaactctctactttatctgtttactttgcgtttgtctgaatatttataggagccatcccagtagtcggctgttacagaacacagggcta

SEQ ID NO: 43720 - DNA, 1086 bp, Homo sapiens
taatttagtcaaatttcaaaaatcctttgcttataataactaaaaaagtgaaagtgtataaagcattttgataagcttccattgactcaaaactataaagattaatagtttaaagtaatgtcaaaagtctagtgtttttgaagcttgcaagaaaaaaatttcattattaatattctctaacatttccttctctcattcatacaatgaattcattactatgtttgaataataaataatttataatggcctttattaatagatttgcagttctttcctttgtaaattcttaaaatagtaaggtgaaaattattctctttgttgagaataggactttttatttaaaaatagattgcctaagtagaattgaataactaaaatttagagtttcaaaatattatctcatgtaatttttttatgctaaaatacaaaaccattttacaaacattgcaattatgattaatttaattgctacttttctgccttgtattgcttatgttttacacacattttgcttaaatatttagtattcttccataacttagttagctaatatcatgagaagaaaaggcttagcagctgaactactattcattttcttgctttgccagatgtaacatagccaagaaagatagaaaaaaggtgataggatatatcttcatgtaaacatattaacactctgtttggtaagtatacaaatagtatttgctagtaagagagttcttacttacggaatgttttcaaaggtatgtccttgagtgtctaggattgattataataaaccaacctggaatcgatggttttatggagaaagatcccctaataaaaatgccacgtaagttctgtaaatacctgagtatacaatggtgaaatttcatagctaagacagattcactttatgttagtaatgtggctgccaacattaccttttcaaataacctctttatttgaatcactgagaattaatcctagggcaacaggaaaggacctgggttgctatgccagctagatctctcctgcttcttctgtgcctgtgtttgcttctatcctggaaattattagcccagcttggtattggttgagatctta

SEQ ID NO: 43721 - DNA, 1051 bp, Homo sapiens
aagacactggcttctgcgtagtttaaaataaaatatggaaagtaattgttggatctcaacactgatggttccttaggagcggtgaggggactgtagaatgagaaatggatgggactgcagagtgagaaaaggaatggatgtgttaccaattgcgtaaccttttttaaccttttaatagagataggctttttatattgcgtgtgctgttctttgtcagtgaagatatcatgagtaagatctgtgcttttcttattgcctttgataattaactgaaatttccaaaaataatatcaatttaggctttggagtttgttttttgttttattttaggaggtggaattgacccatgttagacgtgaattcagtggctggtctcatttacatctttatataaatgagcaagtgcttattgtatgagaaccaataccagtgagtatcttttttgttttaaacaggcagtcatggatcaggtaatgcagtttgttgagccaagtcggcagtttgtaaaggactccattcggctggttaaaagatgcactaaacctgatagaaaaggtaattgcttgactatgagagaaaaaattaaatctttgcattttctaagccttttgtttgattaacatcttgattaatagcccttgcattactttgatcaacatttttattgattgatcctgcgcgacagctttttaacgttgtcacttcttcctaaattttttactcgtctaaatttttatgtattttcaaatggtgtaagattatttattacagccttatgttccatgtaacattttagttagtaacattttatgacttttagtatcttacatattttctctttggaaaagctttgaagtctccctactcagctcccaccccaacgaacaaaaccttaacatgaaaccaacaatatagtttttgccaaactagaaagttaattttgttatttatcatgattcatgtgttaaatttgtctacttttattcattcattgagttaggagctggtaatataatagagaatataacatgtatataatatagtatatagt

SEQ ID NO: 43722 - DNA, 1059 bp, Homo sapiens
tcaataaatgtgatgacatcagtggaatgaaggaaaaaactttatgattatctcaatagatgcagaaaattgtttgataaattcagtatcccttcatgataaaaaaaaactctcaacaaattagacatacaaggaacatacctcaacataataaaggccatatatgacagattcacagctgacatcatactaaatggggaaaagctgaaagaccttcttctaaaaactggaaccagagcaggatgcccacattcaccactcttattcaacatagcactagaagttctagccagagcaatcaggcaagagaaataaataaaaagcatctaaattggaaaagagtaagtcaaattgtctctttctgtagatagcatgatcttatatatagacaacctaaagactttaccaagaaaaacccttacaactgataaattcagtaaaatatcagaatataatattagtagtattttgatgcatcaatgatgaaaaagctgaaaaagaaatcaggaagacaatcccatttacaataattaaaagataaaatacctcggatctaaccaaaaaggtgaaaggtctctacaagggaaactacaaaacactaatgaaagaaataaacaaatggaaagacattccatgtgcatgaatcagaagaattaatatcattaaaatgtttacccaaagtaaacttgattcaaagcaatctctatcaaaatactattgtcatttgtcacagaaattgaaaacaaaaataccaaagttcatatgaaatcaaaaaagaatcagaatagccaaagcaaccctgagcaaaaaagaaaaagctggaagcatcacactacttaacttcaaaacattacagggctatggtaacccaaagagcatagtattgatataaacagacacacagaccaatggaacagaatagaaaacccagaaataaatacatatatttaccaccaactgattttcaccaaaggtgccaagaatgtgtatcagggaagggataccctcttcgataaagggtactgagaaaactgaatattcatctgcaaaataatgaaa

SEQ ID NO: 43723 - DNA, 1030 bp, Homo sapiens
tgccaggtttgaggcacaggacttgcacacggccagtgcagaagtcccataagaacataacctacccaaggccagctcacctctctgttacatatgctcatgagattagtgctatagactcagtgtgccacttccctgcacatgcgagggacgacagtgtcctgacacagcagtgaacccagtgtggtgccaaggagaaagttgtttttttggggccagccagcacacatggggtggcttgtccaataccctcaccggtccagatatttaatactcaaaaactgtcttctccaaagctgtcttctccactgtccatcaagttggggtcatgaagcatttttcttaaaggggaatgagtagaaattgcttagctatattctactccatccagtcttgctcaaggagaggtctgctgcaagcaagagacggcggctacacccctactggaagtgcttgacctgcaggaggcacagctgccctagagttaaccttgaggggtacgttatttttgatctctgaagcccactgtggtttctgctgccttggtggagaaggcagtgcaggtacaggagactcacatccagcccagctcgccctgctgctgggggcctcaggcggtggggatgcaggagaggctggcgggctgccattgcacactgctgccggcctggcctctggacacatggccagtgtgcagggtgctgtcccggggatggtgatggctgcacttcattcattccatccacaggtgtctgtggagggcccacgacgtgtcagttgtggtgcgttgtggtgtgcaggacagggaaggtacctatgcctcatgcagcagtggtatagtcatgtgagagtgactagtcatttctgaagcatcttcaacatcacattaaaaaaaaacttaaattaggccgggcacggttgctcatgctggtaatcccagcactctgggaggccgagtcgggctgatctcctgagctcaggagttcgagaccaccctgggcaacatggtgaaaccccgtctctactaaaa

SEQ ID NO: 43724 - DNA, 1101 bp, Homo sapiens
aatgccctaaccaaattttcccgaaagctctattatttttagtattgaattttgtaaaacctgagattcctcaggcatatatattgtagtctagcagaaacactatatattctagcatatagggtaattggataggagatatataataataggaaaacgcgttatttttttaatctgccagaacatacatttttcttacctgtcattattattattattatttgaggtggagtcctgctgtatcaccaggctggagtgcagtggtgcaatctcggctcactgcagtccctgcctcctgagttcaagcaattcttgtgcctcagcctccctagtagctgagattacaggcgtgtgccaccacgcccagctaatttttctatttctagtagatatggggtttcaccatgttggccaggctggtctcgaactcctatcctcaagcaatctgcctgccttggcctcccaaagtgctgggattagaggcgtgagtcacctcgcccagcctcttacctgtcattcttgaggagcccagtgtaggagggaagggctgtgtatctgtgagtgcgggtaaagcacacggaagctggccatgttcgtcatcttggtttcatactgacaagcaggagtcagtgtgccccatggcgtgggggccctggaaggaagcctctgcagctgcagaaagacagaccccacttggaaaataaaacagcagcataaggacttgggctctaattacagagttgtcaggttgaagagaagtggttgtgggataacaggaagagaaaatattttggttcttctcagcataatgaattttcatcagtacgcctatttccttgtttagctttttgcgcaaatgtggacctttcgcctcctcctgtgtgctcttccttaaaaccctatttctccaattgttttatagatcagctttgtcagagcttgggcgtcagaggtcattgctgttcttgtattgacttgttcatttgttctttatccattcacttgttccctgcatattttgaaagtgttttgcattgcattgaactggagacaggggatacaaaagacaagccctgcttttgtcactcagtcctgtggccc

SEQ ID NO: 43725 - DNA, 1020 bp, Homo sapiens
aaccgtgactcgcagcatcttgcagacgtaggtcggaatgcggctttagcatattctgaaatatacagctctagaaatgctaaatctattggagatgtctctctaaaacagaaattggggggcagtggcaatctttgcagtgctttatttctagcattcttttgtaatctgaagtatcataccaagtacattttaaacagtggattgtctttaatttacctttttaataaaatgctgacactcagtgtatatagagatatgaaaggctatgaaaaaatagaaaaatagatgttttaaagaaatagaaagtcatgagaaagggggcggctctccctgtaatgcattgtctgccccgatatcccagcttttcatgggttaagctgtgtcttctcatccttctttctgcctttgtgagagcttctcaacaacatgcagattcctgagtactgacaaactttttcttgcttctatttgcagtgcacagaagccaaaaagcattgctggtatttcgaaggactctatccaacctattatatgtaagtatttgcacctttctgtggtttcattctgtggccatacctttctctgggaattgtcttgctaaagttctgggtgtgggatggggaaagcccggcgtggcccagcctctgctgcggtgccaggcttgcctcactgggggatgagcaggtgacctcaccgtggtgtctggcccactcagaccagttacgttgaggacagcctgaaattctgtgccctgttctgtgatgcaggtgagctcacatgtgagggtttaaagggggcgagatgtctgtggaaggcaaaagttatgttggcttatacacattttcctagtcaaagagagaaaggatcataggagcagacttatgagcttgagcaggacaagaaacagtcctcagcggagccactgtgacagtgtgtgtgtgtctgtgcgtatgtgtaggaaatcacaatgatcgcctgtctctgaggcctcctcgccagagagctgctgtcacagcc

SEQ ID NO: 43726 - DNA, 1021 bp, Homo sapiens
ccctgcatggcgttgtatgctggtgttcttttgtgggcaggacacctgcaagagggctacagctggagaaatgggtggggaggagtggctgttgacagctccctgggcccagagagaattgagtcagaattggggaaattgcagagcgagctcaaaagcagaaacccagttgggggaaagtactgagcccagggctctaaatgactaatgcagaaatgatgttaagtttacctccagtcagagtgaaactttgggcagcccccgctccctacacgcagctgcccttcaggggaagtgagaattggcccaagccacaggtgaccatgacaggaccttgcactagctgagacccgagggtttaggaaattatatgagaaatgaagcaagagatgattatcttttgacagccaagtccccagatggaatttagatatttgaactaggcctaaggaatgtctgtctattaagtgtctgtagaaatttctgtcatctgcttgcacttgctgttttactctgctaccattcttttctctctccatctcgtaaaaaaaaaaaaaaagctacatgaaatgatttccttcacggattttaacaagccaggacacagtgacagctattagaaattatagctgacagggctgggagacagctgtacagtttgctggtgaccttgcacaaatgagttgttttgggtggaaaagctgttgcttatttacaacactgaggcagagttgttgcttttggatctgagttttgccatcctccttcctgtgggtgttttcactcatctacctccctacccacccaccacacactgggtacgagaaaaggtaagaagaaaagactgggaggatcagaggatatgaaggtcagtccccagacaacatcatcgaagttcaccccatcactatgttgatgactgaggagggaaagccaggtagggatttaggattaacctgagtgctgttctacattcagcctcccttgctagtctccctgatggggactttcctttggtggg

SEQ ID NO: 43727 - DNA, 1107 bp, Homo sapiens
gatggagtctcgctctgtctcccaggctggagtacaatggcacgatctcggttcactgcaacctctgcttctagggttcaagtgattctcctgcctaaagcttcccaagtagctgggattgtaggcatgcaccaccacgaccggctaactttgtatttttagtagagacgggccttcaccatgttggccaggctggtcttgaactcctgacctcaagtgatctgcccgcctcggcctcccaaagtgctgggatcacaggcatgagccaccatgccagcctgcctgttcttaatcatatgtggaagctaaaatatttgatctcatgaaggtaatgaaaagaagagtggttaccagaggctggaaagggtagtggggagacggggatggagaggagttaattgttggggatgaaaatacagttagaaggaataagatgtggtgttcggtagcacagtagagcaactgtagttaacaaaaattaattatatatttcaaaatagctggaagagaaaatttggaatgttcccaacacaggaagtgataaatatttgaggtggtagatatttctgttactctgatttgatcattacacattgtatgcttgtatcaaaatgtcatgtgtagcccataaatatgtacaactattaggaatccataaaatttgttaaaaaaaatacatgctggatttgtcttatgtttttaaacagctttgttgagatgtcgttcacatgccatcatctcgcccatctatattgtatgatttaatttttgatagagtcacagggtttttcatccatcatcacaatccaattttggaatattttgttcctcctagaagaaatcttgtacctttagcagtcactcctgattctggcccaccctacccaagccctgagcaaccattaatctactctctgtctctaaatttactctttctggacatgtcatataaatggaatcatgtaacgtggtcccttaggacgggcttctcttgtgttatagcatgaatcagtacttcattttcattgctaaataaccggatacaccacatttggttatccattcagcagttgatggacatttggattgtctccactttttggctat

SEQ ID NO: 43728 - DNA, 2015 bp, Homo sapiens
gttttcttgtctgtctgtacttgcaatgccccacagagtacttactaaaccgcatattgattagaacgtctttggccctcagtgataggaaacccaattcaagtagtgcagacttggaggaagttcattatctggcatggttaggagtcctcctgttggaggccccgggcctgagttgttcagaggctctacacaccctctcatttgctccaccttccattctgccattctctgcggacggtcctgcccttgtggttgtgtgtaggttgcagcagctccttacaaaatgcaaatcagtcagcatccagcatgtctttcttatgtatgtgttttgttctgttgtggctgggcagagttacttggccccttccttttcccatccccacaatattccagtattttctaatggggcactcattttgggtggggttggtgttagatgggtcctgaagaatcggaattttcagattggaagtcaagccaacgattgaaatataaacagacataagagccttcttgctagcatatggggtttttttaagtcctttttttttttttgaaacatcttatgtttgagtatttttttaaaactttccaaccttattttatttctccagatgatggtggcaatgtgataaccagcacttagcaggtgcttgttgtgtggcagcattgttttaagtaagcacatggtgtttcatctgtgcagccttcccacccctgccccaggctccgtgctgccctcctgtccattttgcagatgagtggactgtggctcaggagactggggctttctcaagattttctgcagtcggacctagcattcaaacctcagcagattgacttgccaacctaaaataatgaaaggggtcagaatatgatttaaagagcatttaaataagtacaaagtgtgaggtaggccacccagaaacaccaactccgaagaaatggagtcagttttccgaagtaggaagtgaaggcttcatttatgtgggctgagacagtggagtttttagcaggattacaacattattcatacaaggttggtgtgtatgttatagcaatttgattggctctaggtgatgtttctttttggggaggggatatttaacattttcttaacagagggtgtaatagtcctgggttttctttcacctggtctaagcgaagcagggcaatgaagggggagttaatctacaacaagggtcattaattcagagggcgggaggcttttgaccctgacatggtttccctttagtcaatgtacagagcaagaaaaagaagaaaatgagttatctataatctgagaaacataaattgtaaccatatgtgactcagatcacagtcacatttctctcaaagcttgaagtgttttgggggggggttccaacagcttttaggtttatttgttttcacagacttcagagtatgttcttaaagccccaatgtgtgaagtttatataatcatagcatttttctctttgaggttccatcatggcctgtcgtggagggagttcctgttgctggttcacgttatgcattttggttattaagagactgagaaactccatcatgttatcctaagtaatgtgtctttattataaatagaatgtggaaatttggaagatgagaattttggctcatggaatccagaagtggatgaacaggtttgcgaactggaggatggcttagaaaggaactggcaaggctcactgtggccttgagacctggtggaatgagtcagggtcattgtcctgctgggctgaacccctgtctctcccacctcctcctgccttgctaggtagcctgcactcacccagtcctttgtggcaggctgggctcagaaggtctcagaggaagctcagcaggtggctgggagagagcagaggctgcccttagggacactaggtgagtgcagcagctttctgtttcatacattgagtgcttggggcccctcataggtaagcagcagaggggcttccagcacatacccatgttctcattatcatatacag

SEQ ID NO: 43729 - DNA, 1498 bp, Homo sapiens
aacaaaatctgtatcgaaattaatttttaaaacatttcctcagatatacctccaaaaaatttaaaaagactaattgatttatcatttttattgcacatttgattgacactatacatgtattaccaattgaatattattaaacataaacagtaaaatttactggaaataaatttctgagtgagatggacgaggatatttcaagttagggcatgtataactgatggaaatggaaaaagtttcatgttgaacttccgagtgatgtgcccagaccgcatagtaatctacaattaggtcatctttcaatttaattgaaagcaaagaatttgaaaccagttgagatgcaaggcgtgcgttgacaaaaactctccccttgaccaaactttggttgggatcctctgagccctcttctcactaggcctccaccttgccctctgtgtctgtcctcagtggagctcagtttcagcaagagtcctgccaagtcatcccctcacgcttaatatctgatcaccttaggctgtcttcagcaagaattcctccttacttctacccatcatgcctctcctcttagcaattttgtatccgttgaccccctcactctgctccttggctgtgaattcacactgattttggttgtatttggagttgaggtcagtctgtcttgctgttgtgatagattgacccctattgcaatagtcttgaataaagccttaccatttttgacaagtgtcagaacaatttctctttaacagtgtcactaccagtattttcagtggccttagattggtacttgagagagttttttagttctggaccagcacatcccagtaagactagaaatgggagggaggtgtgcctttctttgtaaagggagagaagggtgactgtaaacggggaattagcactgtcacttgaccagcatccggaccagggcctgtgtctcaggcagtcagctttaggaaagcagacccatggaggttgaaggtttggaattcgagtcctttagcagtatggaggagcgcccttggaaagctttcagtatctacagagacctccttgccattctcagcgttggctgtacattagaatgaggtagggagtttcgaacaattacctgcacctggagcctagtcatctttattttttaacagatgcacattgcttctgatgcatagatgaggatcagaagtcttcatccagtacagcagactgaaccgactactgtgggtcctgaaggcaccatactttcacttcctgttttcccattcctttgactgccgtttcaactcccaccatacttgaagaccctcaggtggtgtcatggaaggctactctcattgtccacttgggtatgagttaagtccccgacttgggcaagctactccctaggcaagctactcccacgtgctctgagctcagatactgtaattgcttgtttgtttttttttttttttggaagaggggagcagtctgtgaattcttcttcttttttttttttttt

SEQ ID NO: 43730 - DNA, 1051 bp, Homo sapiens
acactttgggaggcccaggcaggaggattgcttgagcccaggagttggagaccagcttgggcaacataatgaaaccctgtgtctacagaaaatttaaaaattagccaggcatggtgcatgcactgtagtcgcagctactcaagaggctgaggtgggagggtcacttgagcctaggaggtcgaggctgcagtgagctgaggtcacgccattgcactccagcctgagtgacaaagcaagactgtctcaaaaacaaaacaaaacaactacttgatatcagcggaagcttgtcaggtaaacgtccaaagaaaaagaagaaaaaaaatatatatatattgttttagtcacctagaaatacaagccattctaaagattttacttacagaacactaaaagggcgagaaagtaactgattatcttgtggtatgggctgtcccagagggaggctactgcctagggacattgagttaaaaatcttcctcttttttttttttgagatgaaatcgcactctgtcccccaggctggagtgtagtggcatgatctcggctaactgcaacctctgcctcccaggttcaagcgattctcttgcctcagaatcccaagtggctagggttacaggtgcatgtcaccacacctaatttttgtattttcagtagagacagggttttgctttgttggcctggctggtctcgacttcctgacctcaggtgatccgccctccttggcctcccaaagttctgggattacaggtgtgagccactgcacctggcctatattaacacatttttgatgtggctcccatcccaagggttaagaggccaggctgggggcacgcactctcctaggcctcactaaccacagattgtgacacagcctccacctcctgggctcaaacgatcctcctaccttagtctcctgagtagctggggccacaggtgtgtaccaccacactggcaaattttttgatttttttttttttttttttttgtagagacaggatcttgctatgtcgcccaggctggtctggaacttctggtctcaagagatcctcct

SEQ ID NO: 43731 - DNA, 1019 bp, Homo sapiens
tcactctgtcacccagggtggagtggagtggcgcaatcttgcctcactgcaacctccgcctcctgggttcaagtgattctcctgccacagcctcctgagtagctgggattacaggcatgtgccaccacgcccagctaatttttttctgtatttttagtagagacggagtttcaccatgttggtcaagctggtctcgaactcctgacctcgtgatcctcccgcctcggcctcccaaagtgctgggattacaagtgtgagacaccacacccggccaagctattatcatttaagctataaactaaatgtctcccagttttgcttggtccaagcccagctatgattaagggcagtttgaaggctaaaggcaagattggggggtggttaaattacatctcacttgttagagtttttgcaaatgtggtttcatttgtgtgtgtgtgtctgggggttttgttttttttgttgttgttgttttttgagacacagtctcgctctgtcatccaggctgaagtgcagtggcacgatctcggctcactgcaacctccgcctcctgggttctcatttttctttgctggtccatctttcacaagcatgcaaaggtggtttcagagcccatccatggggctgtggcctgaacataaggtggacatgaatttggctcagagggatctgatcctccgagaaatactgatggccacatgggaccctttataagaggggctggtcccacaggctgcccagctctcagcaaactgcccaaaagctgccgtctcagacaatccctgctttgttgtgttagaggagtgagtttgaaatgatacaagaactgcctttcatacgttttgaattctggactcactggaaacagctacggaacagctctcccaggagttacgcacatgcctacactaggatggactcagaaaggcatggctgattgtccgtgtgacgccattgttcattctgattatgaacaccgcttacgtaaacagaaagagctaagaattgggatcatgaag

SEQ ID NO: 43732 - DNA, 1810 bp, Homo sapiens
gggaggctgaggcaggtggatcacctgaggccaggagtttgagaccggcctgggcaacacggtgaaaccccgtctctacaaaaatacaaaaaaattagagacagggtttcaccatgttggcgaggctagtgtcaaactcctgacctcaggtgatccacccacctcagcctcccaaagtgctggattacaggcatgagctaccacacccagccgcctttgagtctttttactgttagcttagataatttataaccaatgttggggttgtctaagtagtgaacattgggctactagtttaatgaggaatgcataaaagtaaaatgaagagatttctcagggagctcccaatctcattttcaagaaatgacaaaatcagccaggagcggtggctcacgcctgtgatcccagcactttgggaggctgaggcgggaggattgcttaagcacagaggttcaagaccagctgagcaacgtggcaaaactctgtctctaaaaatttattcagggattgtggtgtgcacctgtcatcccggctactcaggaggctgaggcaggatgatcacttgagcccagaagttcaaggctgcagtgagccatgacggtgccactgcactccagcctgggtgacagggtgagactctgtctcaagaaacaaaaaaggaatgacaaaattagatgggtgcagtggagcatacctgtaatcccagcactttggaagctgacgcaggaggaggttgagagcagcctggcaacatagcaagaccctacaaaaaataaaaaaaagtagccaggcgaggtggggcatacctggagtcacagctactcaggaggctgaggcatgagaatcacttgaacccaggaggcagaggttgcagtgagtggagattgtgtcactgcactccagcctgggtgacagagcgagactccaaaaaataaataaataaataaaaataaaaatcatttctctctcttttcttccttcttaggatgctttcattggatttggaggaaatgtgatcaggcaacaagtcaaggataacgccaaatggtatatcactgattttgtagagctgctgggagaactggaagaataacatccattgtcgtacagctccaaacaacttcagatgaatttttacaagttatacagattgatactgtttgcttacagttgcctattacaacttgctatagaaagttggtacaaatgatctgtactttaaactacagttaggaatcctagaagattgctttttttttttttttaactgtagttccagtattatatgatgactattgatttcctggagaggttttttttttttttgagacagaatcttgctctgttgcccaggctggagtgcagtggcgcggtctcggctcactgcaagctctgcctcccaggttcacgccattctcctgcctcagcctcccgagtagctgggactacaggcacccgccaccacatccggctaattttttgtatttttagtagagacggggtttgaccgtgttagccaggatggtcttgatctcctgaccttgtgatccgcctgcctcagcctcccaaagtgctgggattacaggcttgggccaccgcgcccagccaatgtcctagagagttttgtgatctgaattctttatgtatatttgtagctatatttcatacaaagtgctttaagtgtggagagtcaattaaacacctttactcttagaaatacggattcggcagccttcagtgaatattggtttctctttggtatgtcaataaaagtttatccgtatgtcagaacggatttgtggaattttca

SEQ ID NO: 43733 - DNA, 1063 bp, Homo sapiens
tctcggttcactgcaacctctgcctcccgggttcaagtgattctcctgcttcagcctcctcagtagctgagattacaggcgcctgccatcaggcctggctactttttgtatttttagttgagatggggtttcgccatgttggccaggctggtctcaaactcctgacctcaggtgatcctcccgcctcagcctccctaagtgctgggattacaggcatgagccactgtgcccggcctgatgaagcatattttaatctgtttcacagttttgccttgtctggcaagattacctcctggttgttacacttgtatgtgaccactcattagtgtcttctaggcaactatatatatatattttaatgtgatgtgctctagcaaaacaatgtctacaatacagccatctcatgctcacaagtatcaatataggtgtgagtatgaggtggattccaggaccatgaagaggtggcagattttaattaattaactaattaatttttcagagacaagggcttgctctgttacccagactggagtacagtggcatgatcacggctcactgtaacctcgaaatcctgggctcaaatgatcctcccgcctcagcctcccaagtagctgggactataggcatgcaccaccacacccagccagattttagtaaatataaatattttatctgaaatttttaagaatatttaatattttaaagaatacttaatattaaacatttatgaaatacaaataatagcataagttaactcttctagccttccacatttacttacttgagtttcttttcacctcaaacaaaataaattctgttaccacttagatacaaacatttggtgtttaacattttgtttcttttattatgctttttatttgtttatttgtgggtttttttgagatggattctcgctctgttgcccaggctggagtgcagtggcatgatctcagctcactgcaacctctgcctcccaggttcaaacgattcttctgcctcagcctcccgagtagctgggattatccatgcaccaccatgccaggctaatgtttatatttgtagt

SEQ ID NO: 43734 - DNA, 1068 bp, Homo sapiens
tttgtacagattaggtcttagtatgttgcccagggtggtcttgaactcctgggctcaagcgatcctcccacctaggcctcccaaagtgctaggattagaagcatgaggcaccacacccagcttactcatgcaagtttctcctgagtgtcttcctcaggtgggattgctgggtcatagaaattgcacgtgttcagtgttttttgtctgtttgttttttagacggagtctcgctttatcgcccaggctagagtgcagtggcgcgatctccgctcactgcaagctccgcctcttgggttcatgccattctcctccctcagcctcccaagtagctgggactgcaggcgcccaccactacgcccggctaattttttttttttttttttgtattttttgtatttttagtagagacggggtttcaccgtgttagccaggatggtttccatctcctgactttgtgatctgccctcctcggcctcccaaagtgctgggattacaggtgtgagccaccgcacctggccgcatgtgttcaatgttactgaataacaccatattgttttccggagggcttgttccaatttactatactttagaaggctattagcactgaatgacttataaaaagagtacatgattctaatataattagccatgagaaaatttgtggctgggcacggtggctcactcttgtaatcccagcactttgggaggccaaggcgagtggatcacctgaggccaggggttcaagaccagcctatccaacatggtgaaaccccgtctgtactaaaaatacaaaaattagccgggcatggtggtgcatgcttgtaatcccacctacttgggaggctgaggcaggagaatcacttgaacccaggaggcagaggttgcagagagccaagatcacgctactgcactccagcctgggtgacagagcaagactccatctcaaaaaaaaaaaaaaaaaaaaaaaatttgttagcttacaaaaatgtgatctatagaaaacctttcagagctgggtaaagtggatcacacttgggcttgagcccaggagttggagaccaatgagac

SEQ ID NO: 43735 - DNA, 1079 bp, Homo sapiens
atcatgggcatatttccatggtatgacttattttgaatgccaatgtttatattaaatcacatttcaaactgtgttcactgtgttctttcaagacatttatattattttaatgtattggtatttttttttttttgatggagtcttgctctgtcacccaggctggagtgcagtggcacgatctcagctcactgcaagctctgcctcccaggttcacgccattctcctgcctcagcctcccaagtagctgggactacaggcgcccgccaccacgcccagctaatttttttgtatttttagtagatacggggtttcaccatgttagcgaggatggtctcgatctcctgacctcgtgatccgcccacctcggcctcccaaagtgctgggattacaggcgtgagctactgcgcccagccatatattgtttttttttttttaatttttttttttttttttttgagacagagtctttctctgtcaccagggtggagtgcagtggtgcaatctcggcttactgcaacctccacttcctgggttcaagcgatttccctgcttcagcctcacaagtaggtgggactacaggcacgtactaccatgcccagctaattttttgtattttagtagagatgggctttcaccatgttggccaggatggtctcgatctcctgacatcgtgatctgcctgccttggcctcccaaagtgctgggattacaggtgtgagccaccgtgcccggccagcaatgtattggtatttaacgtattgataagaaatattacaattgttagcaaatattttatacacacagatataaaaagcatccgtatacctaccatcctacttaaaggaaaattattataatatcattgattaactacataccttttctcaatctcatttcctttcttactttcagaagtaactactgtcctgaattttatgttgtaaattatcatttatgacattaaatgatagtctctttttaaagtttccagtggctattggagcatcacagtaactgagaatgttcacagtactgctgtgagaattcttatatatgtgtcatttttttttttttttttt

SEQ ID NO: 43736 - DNA, 1065 bp, Homo sapiens
tcacatgatgtcagtttttctcattcctggtgatgttaactttgttcacttggttaatatttgccagattgctctactttaaagttagtagtttttctttgtatttaataagcatttaataagcatcttatgggaaaatatgtgactgttctgtttttcatcataacaatgcctactaatttaagcatccattttttctttttttttttttgagacagggtctcaccctgtcgcccaggctggagtgcagtagctcaatcacacagcttactgcagcctgaacctcctgggctcagcttcctatctcagcctcctgagtagctgagactacagacgtgcaccactatggctggctaatttaaaacttttttttttttttgtagagagaaggtcatgctatgttgtctgggtgagtttcaaacttctgggctcaagcagtcctcctgcctcagcctcccaaagtgctggggttacaggcgtgagccactgtacccagcccatcaataatttttgcctgaaacaattattactgtgatctttgtattgaaagtcctccatggatctgttgtgtgcttacatgtcttgctgtgtgtgccaagaatgcaaggcccaagaatgctctttatctggggcttttctcagggttgtttatacagttgctaatcttcagagacaagttaatgtttcttcctggacaaagagcaggcttgcccactcactacttggtatgaaaacaatagatttcagctgggtgtagtggctgatgtctataatcctagccctttttttttttttttttttgaggtggagtctcactctgctcattctcactctgttgcccaggctggagtgtagtggtgcgataccggctcactgcaacctccaccttctgggttcaagtgattctcctgcctcaacctcttgagtagctgggactacaggctcccgccaccatgcccagctaatttgtgtatgtttgtagagacagggcttcaccatgttggccaggctggtctcgaacccttgacttcaggtgatttgccccctcggcctcccaaagtcctg

SEQ ID NO: 43737 - DNA, 1044 bp, Homo sapiens
cctagcgaagatgaagatagaatgcaaggtagaaagtgctggatacctttagaaagctgcaggactggtgcgatgggagttgagacgtaagaacctgcccgtccgtagggctctggatgctgctgaggcccgaggcccctatggcagatttgaaaattcacccttgtagagtcattcctgcctttgagcggactcccttttaaggtaaatttccaaagagctccacaattgtttccagtatccagtgtcccgccaaataccagggattcagtaacacgtggtattttactttatttattttctttttgtaaacatagggtctcactatgttgcccagggtggtctcaaactcctgagctcaagtgatactcctgagttcaagtgatcctcccgcctcggccttccaaagtgttgggattacaggcgtgagccaccgcgcccggctgtattttatttttaataaataacggaaattgttctgaattcaaaaggcaccaaagggcatgtagtgaaaattaaatcttcctcccacttctagttcaacactagagacaagcaaagttacccctgggtactctatgaattttcggaatgctttctgaatttataaacttacatatgaatataatcatttccccacacaaatggcaattcataatacacactgcagggtgtgttatactttaagtgtcttggagattgtgccatatcaagactaatgggaagtcctcggtaacagcagcgtgatgttctttgtaagaatgactcaactaggggccagggctgggtggctcacgcctgtaatcccagcactttgggaggatgaggcgggggcatcacttgtgcccgggagttcaagaccagtctgggtaacatagcgagactccatctatacaacaaatacaaaaattagccaggcgtggtggtgcacgtctgtgatcccagctacttgggaggctgaggtgggaggattgctggaatctgggaggtggaggttgcagtcagctatgatcttgccactgcacttcagcctgggctacggag

SEQ ID NO: 43738 - DNA, 1060 bp, Homo sapiens
aggttgaagtgagccgagatcacgccgttgaactccagcctgggctacgagagcgaaactccatctcaaaaacaaaaacaaaacaaaacaaaaaaaaccccaaaactcttggcctcacgtgattctcccacctcggcctcccaaagtgctgggattacaggcataagccaccgtgcctggcacagtatagtgatataattgttctattttattattggttgttagtctctgactgtgcctaacttataaacttcatcttaggtatgtacatataggaaaaacatagtaagtataggcttcagtgctatccatggtttcaggcatccactgggggtcttggaacatatcctatgcagataaagagggatgactgtagacatatataaagtagaacaaggggttagcaagagacaggggcttccttagaccgagtggtcaggaaagcatgtccaggaagtgacccaagcagagggtggcaggatgtaaggtcggtcagcaccaaagaccaggtcctgcaggcattttagccatagtaaggagtttggagggtcaagactgggagggtgacatgatctgatttacttttttttttttttttgagacagagttttgctattgtcgcccaggctggagtatagtggtgcgatctcggctcactgcaacctccgtctcctgggttcaagtgattctcctgcctcagtctcccaagtagctgggattacaggcacccaccaccatgcccagcaaattttttatgtgtgtactgttttagtagagacagggttttgccatgttggccagtctggtctcgaactcctgacctcaagtgatccactcgcctcggcctcccaaagtgctgggattacaggcgtgagccactgcgcccaggctgacttccttttgaaaagatctcactgactatctagggacgactgtaatgaggcgggattggaaaaagggaggccagcagtattgaggagagaggcaggtggtagaggttgcatctggggtgtggtccaaagatcaatatcatcatcaccatcaccaccatcatcaccat

SEQ ID NO: 43739 - DNA, 1029 bp, Homo sapiens
ttttgtcgctgctttcataatttggaaggcttctgttttattgagtatacgaagctagcattcttctaacttaatcttttctgtttgcaggattggcctaatgaagaagttcaacctggagagatggaaaatcagctctcataactaagttaatttagtataaaaatagaattgatagtgagggtataaagtgtaaccatcagttaaacctctcctgtcattcctggcttccttgcttcagaattgaaatggaagtgggggtgtccctactctgtagaatctgggactgggcaaatgtttgtgtggcctccttaaactagctgttatgttatgattttattctttgtgagttaattagaataaagtcattttcttccaaggtatggttcatttagtctatagtctctggttatgaaattagcatcctcccagatctgacagctccctgaggggttatataaggagtagctcacttgcaaacataacatgctgctcaattcaaaggttctagctgctgtgggtctggagttatgtaagctgagcagtagcaggaaactctgcttaaaatattgtttaaagctgtgcgtgctggcatgtgcctgtaatcccagctacttgggagactgaggcgggagaatcacttgaacccaggaggtggaggttgcagtgaactgagaccatgccactgcactcactgacagagcaagactctgtctcaaaaaaaaaaaaaaaatacattgttttaatcaggtgaatgataaaggaaacaggaataggtctatttggggtgggttccctgtggctaggtcagcactgcgtatcactattcctctactgtttccaagcaagcttgtgcaacccaccttttgttctgttttcttttgctttaggcttttagcagcctggagttatagtttgtctctagtgataagtggaaaagagcgatgaggaaggggttttactggcctaaccataaactgtaactaaacccatgactgcattctctcccttggacgcccctgattgaag

SEQ ID NO: 43740 - DNA, 1027 bp, Homo sapiens
ggaaacatgagtctaatttgatagctaagaaactgaggacaagatactctttgtagcatattttctaatgtcatttcattgtctcaccaagaagtacttgcataaagcaagttggattatagcatctgttgaatatttaaggttgggtaaaatgggtgagtttaacagatattttcccttatttcttttaggggaatctggattgggaaagtcgacattaatcaactcattattcctcacagatttgtattctccagagtacccaggtccttctcatagaactaaaaagactgtacaggtatggatattagtattgttaattgatgataagctggaataatattaatacatacaaagcacatgttgtaacttttattatccttccttagaggtaagatgcaaatttgcccttagccagtgtaagatggtaaatatgacttcataacattaaaaaaaagaagtacagttaatcagaagaattatcttgactagaactttccaaatttgtcctaaggactctcctagagatgaaactgtgacatagtaaccaattctcctggagttgtactatctagtatgatagtcatttgccaaatgtttacatcagttaaatgaattaaattaaaaatgcaatttctcttttgctccagatacatttcaagtgctcaacagccacatgtggcaagtggctgccattttgtgcagcacatatacgaagattttcatcatttcagaaaattgcattggacagtgtagagaaaacatgattcatagaaaagctattgttatttaaatacagtgttctatattagtcagtggggtaatgccatatcatagttgaatagcaatagcaattctgtaagactcccaaggtatatgtgatctaatttactgcttctcagtctttgctatgcattccaatcctgggcatcctgttaaatttagttcttctagtagttctgagatgggctgtgtttctacatttctaacaagatcccaggtgatgctgatgctgctggatggtaga

SEQ ID NO: 43741 - DNA, 1053 bp, Homo sapiens
gaggggagtatagactgcagatggtctgttgctcatctagaacaagagggagaaacaaagctttccttagttccttttctcccttttgtgtgacccagggtggagagcaagagagaaggggcatcctctttctcctccttctctctctcctttgggttcaggctaccatgataggtgctgcaacatggatacaagcgtgacctttacccatgttcctggagaagctagtcggcaggatttagttacacttacctgcttaaaattctagccttttgccctgctggatttctagacccactcagcccaaaaggctcccagggtaccccagatgttggaagaaagtatgtagtagttggatttgggcaagattttttaatgaagggaatgttttaatactatttttggctttccttgctatggccccagtgaagaattaaaaaagcacaaagtaagactgattaacttttatacataaaatttctgtctcgtttgaatgccaatgtaattgaatgcagaacagatgccttaaaagtgtaaaaattgaatggctgcctttctttgttggggacagtattgaagctaagatttgtcttattaggatggcttcctcctggctgttgaaagtggagtttttctgtttacacataggatgtggggcctgattactgatagacataaaagggaaaacaatggaagatgagaggttttgggcaaagggctgacaaggctccccatggagaaaaattctattccattatgtggcactgcaggattagaagtgttaggtaaaaactctgactccaaattctttttaggcaaaagttaggtttggggttggataggctattattatagtatgccccccagcataagaaaatcaactgttcaaactcattggacaatgctgaacttttacatggagggaagaaacaaatggagagggggagggtatttacatgaggtgaccttcccctatacagtgccataaatgtctattactggggacaaaacgcccttactagaaaatttagactgaaatcccaaagtccccct

SEQ ID NO: 43742 - DNA, 1035 bp, Homo sapiens
tgtgagtctgtctggtcttggacttcttttgttgttaattttttaaattacgattttaatctcactgcttgttattggtctgttcagggtttctgatttttcccgatttaagctaggagggttgtacatttgcaggaattaatttatctcctctagatttttgtgtttatgtgtgtaaaggtgttcatagtagccttgaatgatcttttgtatttctgtgatgtcagttgtaatatttcctgttttgtttctaattaagcttaattgaatattctctctttttttcttaatcttgctaatggtccatcaatgttatttatcctttaaaaaaccaggtttatgtttcatttgtctttttttctttttaatcttatttagttctgcactgagctaggttgtttcctttcttctgctgggtttgggtttggtttgttcttgtttctctagttccttgaggtgtgaccttagtatattgtgctctttcagactttttgatgtagacatttaaagctatggactttcctcttagcacggcctttgctgtatctcagaggttttgataggttttgtcactatatcattccattaaaatttttaaatattttttgtcttgattttattgctgacccaatgatcattcagaagcagtttatttaatttccatgtatttgaatggttttaaaggtttttgttgttaactttcaattttattccactgtggtcagagaaagtacttgatatcatttcaattttcttaaatttattgagacttgttttttggcctatcatatgttctgtcttggagaaagtttcacgtcctgattaataaaatgcatagtttgtggtttttggctagaatgttctgtaaacagctgttaagcccatttgttccagggtgtagtttaaatccgttttttctttattgactttctatcttgatgacctgtctagtactgtcagtggagtattgaagtcccccactattattatgtttctgtctatttaatttcttaggtctaatagttattgttttat

SEQ ID NO: 43743 - DNA, 1066 bp, Homo sapiens
tttctcttgtctgattgctctggctaggacttccagtgctatgttgaagaagagttgtgagagtgggtatccttgtcttgttccagttctcaaagggaatgctttcaacttttttcccattcagtattatgttggctgtgggtttgtcatagatgacttttattacgtggaggtatgtcccttgtatgccaattttgctgagagttttaatcataaagagatgctggattttgtcaaatgctttttctgcatctattgagatgatcatgtaagttttaactctgtttatgtggtgtatcacacttattgacttgcatatattaaaccatctctgcatccctggtatgaaactcacttgatcatgatggattatctttttgatatgttgttggattcagttagctggtattttgttaaggattttagcatctatgttcatcagggatataagtctgtagttttcttttttgatcatgtccttttctggttttgatattagcatgatgttggcttcatagaatgaattagggagggttccctcttactctgtcttctggaatagtgtcaataggattggtaccaattcttctttgagtgtctggtagaattctgctgtgaatctgtctggtcttggactttttttgttggtaattctaaaattaccattttaaaagctacttgcttttggtctgttcagggtaggagggttttatttttacaggaatttattcatctcttctaggttttcgagtttatgtgtgtaaaggtattcatcgtagccttgaatgatcttttgtattaatgtggtatcagttgtaatatctcccattttgtttcttattgaggttatttagattttctctcttcttttcttttttttttttgagatggagtctctctctgttgcccaggctggagtgcagtggtacgatctcggctcactgcaagctctgcctcccaggttcaggccattctcctgcctcagcctcccgagtagctgggacgacaggtgcccaccaccatgcccggctaattttttgtatttttagtagagatggggtttccc

SEQ ID NO: 43744 - DNA, 1051 bp, Homo sapiens
caggtgtgagccatggctcacataaatgcatttttgacagggatggctgataaattttcttgctgtgggatgataagcaaataaggaaccttttatttttccatcttactgatgtcactctccctatacatttttactttctattttctatttcaaatttttctgtactttaggttcagacatttaggacaatatgctagaatttacatgatatggttgatgttacttataaatttaagtttgcttcaggcaaacaggaattacaggattttcacccacttaagcatatatctaaataacaacataactaatttctaaatatttgttttatatataagaagtgctaaccatattctgcaaaatatataatttttaaatttagcaatgcaagactattgttttgcttctaaagttggattacagtagttttattttgtgtaagaatagcatatatttaaaacataaatactaatttcttgtaaatttttgtttattataaatttattgttagaatcttttatttataattatactgtttttttcctgaaattttattgcaacacagcgcatgccaatgatttgaaatacctgctttccatgagtacacatagtcaaatattgtaattatctagacaaattttttaatggcacataaatattgcaaagcagattttgtgagtaaacttctttagttattgttttgcagttccatattagtgttttatttagtgtactttttaaacatcagtttattgtgattttttgttttacttatatatttagacattttgcaattctgtttgtaaactttaagtcaacatggggtttaattaaaagataaatcagccgggctcagtggctcatgcctgtaatcccagcactttgggagcccgaggcaggtggatcagaaggtcaggagttcgagaccagcctggccaatatggtgaagccccatctctactaaaaatacaaaaattagcctggtgtggtagcgggtgcctgtagtcccagctacttgggaggctgaggcaggggaatctcttgaacctgg

SEQ ID NO: 43745 - DNA, 1318 bp, Homo sapiens
ccttatggtaaattttttttttttttgagacagtgtctcgctctgtcgcccagtctggagtgcagtggcgcgatcttggctcactgcaagctctacctcccaggttcatgccattctcctgcctcagcctccggagtagctgggactacaggtgactgccactacgcctggctaatttttttgtatttttagtagagacggggttttaccatgtttgccaggatggtctcaatctcctggcctcgtgatccgcccgccttggcctcccaaagtgctcggattacaggcgtgagccactgtacccgtcccgccttatggtaaaatttttaaaattccttacaaattttgaataatagacctttgtcagaagcatattttacaaatattttctttttattgtgtaggttgtttgtttactctattgatagtttgctttgctgtgaagaagctctttagtttctttaggtcccatttatcaagttttgcttttgttgcaattgcttttggcatcttcatcataaaatctttgccagttcctatgtcaataatattttctttatccaattgacataggtattttttagattttctttcagggttttttacaattgtatgttctacatttaggtctttaatcacctggagttgattttttttttatatggtgtaaggaaagcatccagtttcagtcttttacatagtgctagctggttattccagcaccatttattaaatagggaattcttcctgcattgctcttgtgacctttgtggaagatcagatggttgtaggtgtgtggcatgatttctgggctctcttattctgttccattgttctgtagtctgtgtttgtaccagtatcatgctgctttggttactctgttgtataatttgaagtcaggtaatgtaatgccacctgctttgttctttttgcttgtgattgccttggctattcaggtttttggttttttttcggtttcatataaattttaaaatacttttttttttttttttttttagttccgtgaagaatgttattggtagtttgatagaaatagcattaattctgtaaatttcatttggcagtatggccattttaatgatatcagtcttttctatccatgagcataaaatggctgcccattggcttgtgtcatctctgacttctttaagaagcattttgtaatttttgttttagagatttttcacctccctgattaggtgtattcctagacattttattatttttgtggttattgtgaatgggattttttttgatttggccttaggttgaatgttgttgatgttcagagatgtta

SEQ ID NO: 43746 - DNA, 1059 bp, Homo sapiens
atatcagactgttccagatcttctgaaaaaataatctgcattaacgagatctgaagtttatcatacacattaaaacttgcgaggtaccttttaactcaacatgtctttttcatctcaaaaatacacacaactcattctgtatgatgcagatatagcatttaaaaatagacatgttggcgtttatgccctaatttatactttattatccagaaaagtaccatatatacacagatgttgtggatcttcttataccactttcttttctcagggttagataatacattagaaaatatttctgtgttaaaaattcttttatggatagtttcattcactcctataagtcagaaccagttttctttactgttttattttaccttgaaatttaaaattatgcccatggccacttggtaaatgtatgtgattttgtgtatgtgtgtgtttttgtgtttttcagggaccattgacatttatggatgtggccatagaattctctttggaggagtggcaatgcctggacactgcacagcagaatttatataggcatgtgatgtgagagaactacagaaacctggttttcttgggtgaaggtaacttcaatacacattttctaatataccctaaaggttttaattctcttttttgtagaatgtttttggtgatttatgctttgcataaattgagtttcagatccctgttttcaaaaaaatcttttagatttgtcattgtagaaaatagtttattcaagatgtttcatctttaccataactttccacattcctgagatgatctttatcattcagtcttgattagtggtaattttagaaatttattggcataaaatattgttgcccacaccttaaaatctaactcccaacaacaattgttttgattcagtagtaccaggtagtgaaattaagaaactacaaatttaaaatattttctaaatctttagaaatttttgttataaattagcatttggggattaatttactagaatattctattgcattctctttactgagcacattaccaagttggtaattggagaatatgtgcaag

SEQ ID NO: 43747 - DNA, 1103 bp, Homo sapiens
ttgatgggaaaccttaggcaaatttcttaatctgagattcaatttcttttcttttttctttttttttttgtgacgggatctcactctgtcacccaggctggagtgcagtcatgcagtcttggctcactacagcctctgcccccgtgggctcaagcagtcctcccacctcagcctcctaagagctgggaccacaagtgtgcaccaccacgcctggctaatttttgtattttttgtagagatggggttttgttatgttgcccaggctggtctcaaactcctgagatcaagtgatccttccacctcagcctcccaaagtgctgggattacaggtgtgagccaacacgcccggctgagattcaatttcttcatctgaaaaatgaggatacctatggacaactgtagcttgttcataaaagaaaaaaaaaataagtatgaaaaatggggatactatctcactatctcttaggtagtagctgtatcaattaaagtaacatggaaccaggttcaatggctcagagacagggtgcagaagcgaaggcaggaggattgcttgagcccaggagttcaaggttgcggtaagctatgatcatgtcactgcactccagcctgggtgacagagtgagatcctgtctcaaaaaataaaaaataaaaagatagtaataaaatagcatgggtgaaatgttgcgcacatgatagatttgcacttacctctttcttcctctacacaaacccttgccccaactaggcgaatttagacactctaccctaaaatacatctagcactttctacccatccttctgctcatgctgtttctctgcctcttcctctccatttactgaactcttacagttcttggtgattctcaccattatatgctccagaagggaagtatataatacatatatatttttgacagtatatacctggtccctgccataaatgcgcaatgattatcgccaaatagttaaatgagcacctttagacttgtttgaatgcctcagaaatatcatagaattaaaaaggaccggccaggcatggtggctcacgtctggaatcccagcactttgggaggcagaggtgggcaaatcacctgaggtcaaga

SEQ ID NO: 43748 - DNA, 1047 bp, Homo sapiens
attaaatgtggtgaatctgtgggggcgcccaacccctcttcatctacttttacaggtgcccaccgccacccccagctaacttttgtattttaaatagagacagggatttatcgtgttggccaggctggtctcgaactcctgacctcaggtgatccacccgcctcagcctcccaaagtgctgggattacaggtgtgaaccactgtgcctggcctctgctttaagaatttgtaaggattttgtttgctagtaaatcatcaactcttctgaaagtatctgtttgggtccactatttcatttccagtttgaaaaggtgtacacacacacacacacacacacacacacacacacataggcacgcataaatacattttttcttctatatatctcttataactaaagtttatctttagcttaatatattggtatatttcatgtaatgtaaatcaaaccaaaaaaaattatgtgttcaattggctcagaaataaaaaatatgcaaagaaaagtattggatacaattttataactaatgattcagaattcagaaaccatggcttctaattctacttctacataatctttattgtaactatcataatgtcccagtagttgtagcagggagaaaacaatataaaatatatctcttgagaacattagtctccaaatgatttagggtttcaattctcttttaaaaagaaaattactaaagaagtaattccattgtgttacctaatagtatattgttattatctgttacctccaatgttaagtaaagtagaataggttaccatggaaaagataacatttgattcattgcacttcagtgttaaaacatgagaaaccatttagttttcatagttaaattaagctcacacattgtctaaataagacattttaaaattcactatatgctacttggtcaagcacacaagaagcattaggttttttctgatttagtgatcttagagattttgttttcttttctttttttttttttcttttttttgagacggagtttcactcttgttgcccaggctggagtgtaatgg

SEQ ID NO: 43749 - DNA, 1019 bp, Homo sapiens
acaaatgtcataagaagagcctacacttttaccttggccgatccctcccctcagtgcaagctctgcgcaagagtgaacttgaacttcactcagtgcaagagtgaacatacactttgtgcaggctttaaagaacccagcacaaagccagtctgcatggcctagagacatattttgctggctaatgattacttgtttttctttttgtttttgttgtatttgcctgtttgcttagttcctgacatacaagaaaatcactgtcaaaacattagcttaacatttattaaggaaacaaaaagacttcggtgaccacaccttataaagcaaacagttttgtaaatcactttggaaaatttcactaaaaataaaaactttaacaatgtaataagtaaataaaatttaaaaccacaaaacattagtgtgtttgtaggggggggtctgatttacagagtaaccacatagtaattataattattataatgtgcagttttcaaaaaaagttacaaggcatacaaagaatgggaaagtatggctcattcaaaggaacaaaataaattgacagaaaatatctttaaggaaacccagacatcaaacttactagacaaagacttttaaacaactctcttaattatactcaaatgtcaaaaggaaaacataaacaaagaaagaaaggaatcagaaaaaagtattaaaaagtaggaatatcaacaaagataacaaattctggagtggaaaactacaatgataaaaattaaaaaatcaacagagggatttaagagtatatttgcccacgcagaagaaatcatgaagataagaaaatggaaaatactgactctgagaaacagaaagaataaaaaataaaaaatgagcagagactaaggaatctgtgggacaccatcaaatagaccaacattcatattccagaaggataaattatgttaaaaactttaccattctttctttccacctttctttcttcctccctccccctcctctttttacttttcttcctcttcctttct

SEQ ID NO: 43750 - DNA, 1082 bp, Homo sapiens
caagcttctcaatgcaaacgaaggttttcagctgccacagtcagactgtgtcattcaatgtggctcttggtagtttttgtgtagttctgcctcctttgctgtgtactattttttgttttgttttatttttgttattttttctttgcactgttctaaactggccctgtagggcttcgcctcccagtccagtactccctagcatcaccaccaatcactgcacatagggcacacagcccctgtgtttctggtgagctcttcatctaccttttttttttttttgagacagtctctctgttgcccaggctgaagtgcagtggcacgatctcagctcactgcaacctccacctccagggttcaagggattcttgtgcctcagcctcccgagtagctgggattacagtcgtgagccagcatgtctagccttttttggtatttttttgcagagatggggttttgctatgccacccaggctggtctcaaattcctggactcaagcaatccacctgccttggcctcccaaagtgctgggattacaggcgcgagtggctgtctctctctctctctctctctctctctctctctcaagtgatagagtcttagggccaggcacagtggctcacgcctgtaataccagcactttgggaggccaagatgggcagatgatgaagtcaggagttcaagaccagcctgaccagcatgatgaaaccccgtctctactacaaatacaaaaattagctgggcttggtggtgtgcacctgtaatcccagctactcaggaggctgaggcaggaaaattgcttgaacctgggaggctgaggttgcagtaagccgagatcgtgccactgcgctccagtctgggccacagagtaagactctatctcaaaaaaaaaaaaaaagattcttgttatgatgaccaggctcgtctcaaattcctaggctcaagcaatcctcttgccttagcctcccaaagtggttggattataggcatgagctaccgtgctggccaaaatagaatgttagtgacacaccctacattgaatttacttggaaggctgattcttttcccatgccctccctaggaga

SEQ ID NO: 43751 - DNA, 1060 bp, Homo sapiens
agctactcgagaggctgaggtgggaggatcgccagaatctaggaggcggaggttgcagtcagctatgtcagctatgatattgccactgcactgcagcctgtctcaaaaagaatgatacaactaaccagtcacctactgactgatgtttaagttgttcccaatctgctattcaggctgcagtgaatatcggtatatgatgcttttaggaggatttgtgtatttgagaatcacaaaaacatctatatatgtgactagaagcactgcacaatagaagactagttattagttccataggcattacatggtgtgcatgcagatttattataactgctgttaaaaatgttatgaggagaccagtcgtggtggcccacacttgtaatcccagcacttggggaggccaaggccggcggatcacttgaggtcaggaggtcaagatcatcctggccaacatggtgaaaccctgtctctgtaaaaatacaaacattagcaagaccaacaaggtgaaacactgtctctgtaaaaatacaaaaattagcctggcatggtggtgtgcatctgtgatccaagctactcggaggctgaggcatgagaattgcatgaacttgggaaggagaggttgcagtgagccaagatcatgccactgcactctagcctgggtgacagagctagactgtgtctcaaaaaaaaaaaaaaaaaggccgggcccagtggctcacatctgtaatcccagcactttgcgaggctgaggcaggcagatgatttgatttgaggtcaggagttcaagaccagcctggccaacatggtgaaacctcgtctctaccaaaaatataaaaagttagctgggtgtggtggcgcacgcctgtaatcccagctacttgggaggctgaggcaggagaatcgtttgaattctggagacagaggttgcagtgagccaagatcatgtttctgcactccagcctgggtgacagagcgagactctttctcaaaaaaaaaaaaaaaaaaaaaaaaaaaaaaaaaaaagctgggcatggtggttcacacctataatcccagcactttg

SEQ ID NO: 43752 - DNA, 1313 bp, Homo sapiens
ggcccgccaggtgcgcagcggcgcgcggtgcccacccagccctcccgccagccccaccttacatctttatggtccctttgggccccaggttggtcctcagcacgtcctgcagaccccgcgccccgctaatgttgaacgccagcgccgcctgcgctccggccaccttggccttggggttcagggtcttcgccgccgccataactgctccagaggaagaaaagaaagcgacgcggcacgcggagagcccagagcaggcgcgccgtggccgggatgcactatccggatcttccggaaaagtcggcgcgcccagcccgcccctagcgtgcccgcgccgccgctattgggccacgggctgtccggcccccgctcattggtccgcggctgcacggtgcctgcagtcccacccctcgcccagcggccgcgacgctatggcgcactggagtaccctgttcctggcagtaagtgcttctgggttctggcgttgctgctcagtggggcccaagtttgcggacccgggatctcaggatgcaggcagggcttatgccccgcgccggacagggcgtagggtgggcctcctcctgcccctactcgcgcggtttgctcctcagtctccttcccttgctgctttcacgactttcattggagctttctggaccctgtgcttgacggtgctgtaggtgccgtggggacacacaggctagtctgataagcaccctccgccggaatcatgcggtgctgtaaggactaacgaagatgaagatagaatgcaaggtagaaagtgctggatgcctttagaaagctgcaggactggtgcgatgggagttgagtcataacctgtccgtcattaggactcaggatgctgctgaggccctaggcttctatggtagatttgaaaactcacccttgtagagtgatggtgtccagcctttgagaggactcccttttaaggtaaatttccaaagagctccacaattgtttacagtatccggtgcccgccaaattccagggattcagttacacgtgatattttacttcattttttctttttatagacacacggcctcaccatgttgcccagggtggtctcaaattcctgagctcaagtgatactgctgagctcaagtgatcctcccgtctcggcctcccaaagtgctgggattacaggcatgagccaccgtgcccggccagtattttatttttaatagataacggaaattgttctgaattcaaaaggcaccaaagggcatgtggtggaaattaaatcttcctcccgccactagttcaacactagagacaagcacagttaccccgga

SEQ ID NO: 43753 - DNA, 1105 bp, Homo sapiens
aagtgcagagattacaagcatgagccatcatgccctgcctgcaatttttctgtcatgaactattaataatttactttttgcttaatattctatgactatatatatttatgtaaatatagatactttaaatttttctttgataccaatttttccggttttttttttttttttttttttttgaggctgggtactgcttcgtcattcaggatggagtgcagtggtgtgatctcggctcactgcaaactctgcttttttggcttaagtgatcctcccacctcagcctcctgaataaatgggaccccaggtatgagccgccatgcccaggtaatttttatatttgttctagacaggaagtctcaccatgtttcccaggctggtttcaaactcctgggctcaagcgatcctctcacatcagcttcccacagtgctgggattacaggtgggatccacacctggcctgccattttcttttcatagatcattaagaatttactttatgccgggcacggtggctcacgcctgtaatcccagcactttgaggggacgaggtgggtggatcacgaggtcaggagttcaagaccagcctagtcaagacagtgaaaccctgtatctgctaaaaatacaaaagttagccatgtgtgatataatcgcagctactcaggaggctgaagcaggagaatcgcttgaacccggggagaggaggtggcagtgagccaacatcgtgtcactgcactccagcctgggtgacagagtgagactgtccaaaagaaaaaaaaagaacttgctttttgattagtatactgtaaatatatatatgtatatgtgttatatatttgtatatgaatatatgtgtgtgtatattttcatagcgcacacacacacacatatatattgtgaaagagatatctgaatacctagaaactgataagcttcttccaggttttgaaaccacccttagaacaaagacaaaagaagtacaaagtatcattattaatgaccatggaccaagatgaccatgagtcaatagtactttgcacctcaaccaccttccagcagagcatcttaaagggctggatgtatctgaacatcacaccctttcacaggg

SEQ ID NO: 43754 - DNA, 1114 bp, Homo sapiens
catggtttacttgactatcgctatcagtattttgcatctctcatcatttttgtcaacttcctcatctgctaacttctctccaaggtatgtcatattgtgacatactgctgctgcacgaacatggccagtgtcatcctattaaacatgtagaatccttccctaatttgtttttttaccctctgtctctttgttttgcatttttcttacccttattgtcagaaactccagaaagtcaatcgtagtgatttatcaccaattgctccattaatttatactttgcttacatggaattttgcccaacagacatcattacaatttctaaccttttttttttttttttttttttttcctgagacagggtcttgctctgttgtccaggctggagtgcggtagtgctatcacagctgactgcatcctcaacctctcaggctcaagcagtcctcccacctcagcctcccaggtggctgagactgtacgtgcttgccacaatgcccaactaataatttggacttttcctatacatgggttccaaagggctgactgcgaaacgtgagtatgcatggattttggtatatgcagagatggggggctggaacgaatcctttctgtatactgacggacgaccatatatgtttttacacttatgctgtacgacacatattgttccatagccttgaaaatagtaatttttaatgacaaataattttgaatttagtggtataatataaaagcagctgaccaggtgtggtggctcacaccggtaatcacaacactttgggaggttgaagcaggaggatggctcaaggccaagagtttgagacaggtctcagaaatcaagggaatcaccatccctacagaaatatacatgaattagcctagtgtggtggcatgttcttgtagtcccagctacttgggaggctgaggtgggaggatcacttgagcccagggaggcttagactgcagtgagtcatgatcaggcctctgcactccagcctgagtgacagagtgaccccatctcaaaacaacaaaaaagtagcagctaacattaactgtccttctaccaggtgcctataaataccatagatagtttaatttctttttttttttttttttt

SEQ ID NO: 43755 - DNA, 1050 bp, Homo sapiens
aaaaaaaaaaaaaattaaccctttatgaagttcccagtaattctttgcttcctaagtgttccccataagcctctgaattttgtttgcttttcatataccatttaaaacgtttaagaacttgtgtctgtctgtgtcatcctttttttttaaagaatatctttttgtcacttccagctggatctaccatgaaagacttcagagtccaggaagagagactgactgggcaacatgttattcagttacaaaaagacttggactatgactcaaaaatgatcaaataatagttcatgcatcaaatgcaataggaagtacttctggagggtgagagaagcatccagttaaggtgacattgaagctgggtcctgaaagatgaggaagaattgtatgagagtgggcagagaagggggaggtggagggatggggaatgggctgggatggagtgagctgctcaagtagggagaccagcactgtaaagacctggacgataaagacggcacattttattcagggaatggtgaattaagtgtggcaggaatgctttggagagatagtaatttgcttgtatggaattttgcccaagaggcctcattacagtttctaatcttttgatgttatcatctatcactgtccttgccaaatagtttggaataggtataatgatcacaataacatcaagcataatatttcattaattctcacaaaatcacaggtaggtgccacagttatccccattttgtgaatgaagtgatgaagacttaggaataatgagtgatttgcccaagctcacctggatattaagactgagtcaaatgtggggtctggtctgactttaatgtttgctttgttcatgagcaccacgtattgcctctcctatgcagttaagcaggtagacaggtgaaagaaaagcccatgttagtctctactcacacacttccgactgaatgtgtgtgtggaatttctacaccaagttctccaatgctctggatattaactgggtatcctacaattttattctgacacttcctggagttggcgtagaccccacaggtt

SEQ ID NO: 43756 - DNA, 1075 bp, Homo sapiens
aggaaagcttacttaataacataaactcttggttatgaattagatgtttctcctatgaaagcttgtggggatctttgagcaacttaatacctgattatttctgttcaaaaatgccgagaactaaaaatccattcaaacctttacttttctccttttggaaaagtgcatgaggtgttccttttggtaaaaagacacactgtgcgaccacagagacctgagcctgaacccatgaagatgtgaacaaggtgaacaatgagactatgtaaaggggaggttaattccaaggtgacaggaactttatggagaagattatgatttctacactttgtatccccttctaactctagtatgaagttacattgtatacgttggtgctctaatctcagtctgtggatattagatattaagattggggagaaaataaaacagccagttaatgtgcaccatttttataggcactgtcagtagcatataagaaatagcatgtttctcaaaagtaaattagttcatagtagtcagttggcacatttggcaggtacttctgtgaacttttttttgctatctttaaactcttcattcattgatcccgttaatccaaagcttatttaataacataagcttttggttgtcaattagatgtcaggaaaaacagagaaatgaacagctaatataatgagttaaaaggattgaggctgtaggaataatgttaccaagaataacttgaggattgtttgctactatagctagctgtgattatcaaaatagggagatgcctgtttttctcacataaaagtaattgtgcaggtaggctgaggctgacattggttcagttgctcaaacatggtaagactggcttccctgtgcctctcttcactctcctttctggtgcacaatgaccaagagagctcctgtcgtcatgtctccatccatcatgtctccatccaattataagtaaagaaaatgcagcatgagccctgcctgcacccacagtcaggaaaagcaagaggctttttttgaatcctagcagaattttgcataagcctcttggttttaaaaaaggtgaattttaaaataa

SEQ ID NO: 43757 - DNA, 1922 bp, Homo sapiens
ccgtaattccagctacttgggaggctgaggcagacgaatcacttgaactcgggaggtggagatcgcagtgagccaagatcgtgccattgcactccagcctgggcaacaagaagcgaaactccatcttaaaacaaacaaaacaaaacaaaaacaaaaaagcataatctctttcagaatttttaccttcttggtgtggttctgttaggaaaggcttccatgggaaccttcaataagtgacctaaaaaaaaatctcagagcaattcctttttttttttttttttttttcagacagcatcatgctctgtcacccaggctggagtgcagttgcacaatctcagctcactgcaacctccacctcctgggctcaagccttcctcctgctttggcctcctgagtagctgagactacaggtgcatgccaccgtgcccggctaatttttaaattttttgtagaaacggggtcttgttatgttgcccaggctgacctcaaactcttggcctcaagcgatcctcctaccttgtcctcccaaagtgctgggattacaggggtgaaccactgttcctggtttagagccattctttttttttttttttttttttttgctttgtggttttgagacggagtttcactcttgttgcccaggctggagtgcaacggcatgatctcggctcactgcaacctccgacttccagtttcaagcgattctcctgcctcagcctcccgagtagctgggattacaggcatccgccatcatgcccagctaatttttttgtatttttagtagagacggggtttcaccatgttgggcaggccggtctcgaactcctgatctcgtgatctgcccgcctcggcctcccaaagtgctgggattataggcatgagctaccacgtccggccctagagccattcttaacagggtttgtctccctggaaacttcccgaagcctcaccctcccaggaattccctgctaagtgccacagtcatctcttcaccactcggtttccactctcccatccttgcaccgagatcccactgttaggcctttttcaagcacagaccttctcatgctcagtctctctgtggtgtggaagtgtctactgggtgggcctcacagaaggttccaggccctggtacaagcccaagggaaatgatgatccaaaatggactccgataaagtttctgccactctgcattgggggcttttggtaggagtccagttcaattttataaaaataaaaatacatgtctcgcacttctgagtttgcagactcaggtccattctgtatttgcaaacgaggacaaaaagaaaggtggctgggtgcggtggctcacgcccacctgtaatcccagcactttgggaggtcaagatgggtggatcacttgaggctggccaggagttggagaccagcctggccaggagttggagaccagcctggccaaccagcctggcctttcaccatgttagggtgcctaaaaatacaaaaattagctggatgctgtggcacacgcctataatcccaaatactcaggaggctgaggcaggagaatcatttaaacttgggaggtggaggttgcagtgagctgagatcatgccattgcactctagcctggacaataagagctaaactccatctcaaaaaaaaaaaaaaaaaaggcaattgggggaaaacagtccttccagctcacctagcactgcccatctttttccatattcagatcacatggcgaggcaggtatgcttgtccatcttggcggtaaggaagcgaaggctcagattcccatggctagtcaggcaggtacagggacttgaacaagatggcactttcccatggcccacatgctgcctaagaccctgaaggctgactcctggacactgtccccagccatctgcctctctgcaactatctgccacccctccacc

SEQ ID NO: 43758 - DNA, 1021 bp, Homo sapiens
aggtggaggttgcagtgagcagagatcatgtcactgcactgcagcctgggagacagagacctgtctcaaataaaaatgaaaacaacaacaaaaaaaatgggctctgaaaaggcaggtaggagtttgtgaaggatggagtggcagtgtgaagacaccggggcagaaggaccagccatgcacaggcactcaagggtgaaagatcctatgctggccaggtgtggcggctcacgcctgtaatcccagcactgtgggaggctgagacgggcagatcaccctggccaacatggcaaaaccccatctctactaaaaatacagcaattagccgagtgtggtggcgggcacctgtaatcccaactactcaagaggttgagacaggagaactgcttgaacccggaaggcagaggttgcagtgagccgaaatcacgccattacactccagcctgggtgacgagcgaaactccgtctccaaaaaacaaaaaaaagaaaagaaaaaaaaagaaagatcccttgtcctggaagtggctgaacttgggggtggtacaggggagacaactgatgggcctagcggggtccgtgcacaggggccggtgtcactgtgctgggctgttggaaatcccctgactgctcgctggccaaggtctgtgaatgggaaacagactgtgtctgggagtgtgggggctatgcattctccctgctcactgccctggcaactgtcacggcttatctgctgcttgagccccggcgtgctccgctctcccctccctgtagcctagagttgctgctggggtcagttagccctggagacggggcctgagctgggctgtaaggctgaggggtggttgggctggagatggggtctggggcagagctctgcagcagcctgtgggtttgtgccagggttgaggatggggctgggattgcaggaaggctggtttgcatgtccaacaggaaatctctctgagaagcatgggttcacatgggctgggcctctggggcaggcaggttgggtaagggtgagatg

SEQ ID NO: 43759 - DNA, 1024 bp, Homo sapiens
tttcatcttagtgatgattgctaaaaagtttagttagagacagatagatgtatgggctgactcttgactaatttagacatcttccaggaaaacatttctgtcttgtcatctgtggctctgcctgtggggtttctccatgtttcttttgtttgtttgtttttgtttacttattaaattattattattttttgagacaaagtctctctcttgtcccccaggctggagtgcaatggcgcgatctcggctcactgcaacctccacctattgggttcaagtgattctcctgcctcagcctcccaatagctgggattacaggtacgtgccaccatgcctggctaatttttgtatttttagtagagacagagtttcaccatgttggccaggctggtctacgaactcctgacctcaggtgatctgcctgcctcagcctcccaaagtgctgggattacagggtgagccaccgtgcctggcctattgtttataatttttaaaaaattgtttaatgcctatctatctatatttactagagatggggtctcactatgttgcccaggctggtctcgagttcctaggctcaatcgatattctccctcatcctcccagagcattggtattacagttgttattctttttattttctagtctgttatgctgaattgcatttatcttttaaatagactttaaatattctttggcagaaagtgaggaataaatacatatattacacctataaaatcagtaaaacgaaatgaaaattatcaagcccaatgttgtaagggccatagggaaataagcgcgtacacgtggttaatgacagtgtgcaccgagtttctgaggagtgtggctagcaatagacacttagtgctataacattgattcttttttgttttttgtttttttttgttttttgagatagagtctcgctctgtcacccaggctggaatgcagtggtgcgatctcggcacaccgcaagctccacctcccaggttcacaccattctcctgcctcagcctccggagtagct

SEQ ID NO: 43760 - DNA, 1028 bp, Homo sapiens
gagtaattgggactacaggcgcataccaccatgcccggctaatttttgtatttttaatagagacggagtttcactgtgttggccaggctggtctcaaactcctgaccttgtgatctgcccaccttggcctcccaaagttctgggattagaggcgtgagtcaccgtgcccatccagcatgtataattttaacgtaatggctaatcactcatgaggggaagaaatggctaatcactcatgaggggaagagatttttgaacatttttaaataatagagacagggtcttgctatgttgcccaggctggtcttgaacgcttggtttcaagccatcctcccaccttcgcctcccaaagtgctgggattataggcgtgaaccattgcacctggccccggggaagggatttttgtatttattaagcagttaagtatcattgctttttagccatgttattctatagtctttacaataaccttattcattcagttattgttcttgcaacaaagatttgagaacctatgatatgcccatttgtgcagggaaaaaactcctcaaactgtatttttcctctgctcatgccacagcagtcatcaacacagaagacttccatgaccatatgtgtggggattcttcccctacacaacacaccagctgggtgtcttctagttcactttctgcactgggtgtcttttagttcagttcctgcactatttaccaggagatagggtcagatcgcacagggtgaggactcagtcaccatgactgcccctcctaacccccatcagttgcaactccgggcctttaggacttctaactgaccagcttcaagttggggttcccatggctgcctttttaggttcaataatttgctgaggtggtttacagaactgagggagatgcttatgtttaccggtttattacaacagatattgcaaaggatccaggtgaaggagatgctgggggcgaggaatgggggaaggtgcagaacttccatgccctccctgggcgtacaccctccaggaacctccact

SEQ ID NO: 43761 - DNA, 1044 bp, Homo sapiens
aaaataacaaaatgatagacctaaatccaagtacatcaacaataacaatgaatgtaaatggtctattcacaccaactaaaagacaatgacagaagagttttttttaaaaaaagacatgactatacattttgttgctgctgttttatttatttatttatttattctgagacagagtcttgctctttcactcagcctggagtgcagtggtgccatcttggctcactgcaacctctgcctcccaggttcaagcgatcctcatgcctcagcctcctgagtagctaggactacaggcacatgccgccacacctagctaattttttgcatttttggtagagacaggttttcgtcacgttgcccaggctggtctcaaactcctggcctcaagtgatctgcttgcctcggcctcccaaagtgctgggattacacgcatgagccgctgcacctggcctgactatatattttaatataggtagattataagtttaaaaatggaaaaagatatgttacgtaaatgctggtcaaaggaaaactgaactgattatatttacataagacaaactatacctcaaagcaaggaaatttacaatagattaagagggacattacataatggtaaagacccaacaccatttaaaatgtgtacacatctaaaaacagacctcaaatatatacagcaaaactgacagaacttgaggagaaatagacaaactcaaaattatagttggactcttcaagaatggacagaacagatagaaaatcagctaggatatggaactaaacacaatcataaaccaactaatattgataaaacactccatccacaactgtagtctttttgaaggcacatagccaggcatgatggcacatgcctgcaatcccagctattcaggaggcggaggcacaaggagcacctgaacccaggagttggagactgtagtgcactatgattgtgctgggaatagccactgcactccagcttaggtaacacagccgagacccatctctaaaaaaaaaagcatatagaacattcactaagattatgtc

SEQ ID NO: 43762 - DNA, 1048 bp, Homo sapiens
ctatctcaaaaaaaaataaattaacatacacatggtgtctacataagtcttcacattgctttttctccttcatacgtggaggtgactttactgagctataaaatgtaatgctaaattttagtatgagaagaatcagagttttctagtttgtcccttccatttacagctgaagaatcagaataagtgtttaaacatagggattaatgccttgtcacagggggctacatggacacttgagggcagaggctaaactggaacccagtgtgccgccctacccattgtcttatctattgcaccatagaactgtggtattattagagatctggacagcattgtgcttgcctcaaaggaagttaaagctgagtttattctgtgtcttgctcatcctcatgtggtaatctgctacgttaaatgtttcaggtatgtctgattgacccgggctgcttccgagaaattgatgagctaataaaaaaggaaactaaaggcaaaggttctttggaagtactcaatctgaaagatgtagaagaaggagatgagaaatttgaatgacacccatcaatctcttcacctctaaaacactaaagtgtttccgtttccgacggcactgtttcatgtctgtggtctgccaaatacttgcttaaactatttgacattttctatctttgtgttaacagtggacacagcaaggctttcctacataagtataataatgtgggaatgatttggttttaattataaactggggtctaaatcctaaagcaaaattgaaactccaagatgcaaagtccagagtggcattttgctactctgtctcatgccttgatagctttccaaaatgaaagttacttgaggcagctcttgtgggtgaaaagttatttgtacagtagagtaagattattaggggtatgtctatacaacaaaagggggggtctttcctaaaaaagaaaacatatgatgcttcatttctacttaatggaacttgtgttctgagggtcattatggtatcgtaatgtaaagcttggatgatgttcctgattatctgagaaac

SEQ ID NO: 43763 - DNA, 1050 bp, Homo sapiens
cccagctacgcaggaggctgaggtgggaggactgcttgggcccaggagatttgaggctgcagtgagccgtgattgtgctactgcactccggcttcagcaacagagcaagaccctgttgccaaaaaaaaaaaaaaaaaaaaaaaagaaaagtgtccagttttcaactgggtaggtagattatatatctatgaattttaattcagcatagaatagaggatagagttacaaaaggtgggtctaacagggtttagaactgcaggactggccgggcgtggtggctcatgcctgtaatcctagcactttgggaagctgaggcaggaggatcacctgaggtcaggagttcaagaccagcctggccaacatggtgaaatcccatctctactaaaaatgcaaaaattaattagccaggcatggtggtgcatgcctgtaatcccagctattcgggaggctgaggcaggagaatcaattgaacccgggaggcagaagtgacagtgagccaagattacaccactgcactccagtctgggtgacagtaagactctgtctcaaaataaataaataaataaaaataaaaaataactaaaagagtataattggattggttttagcacaaaggataaatgctcgtggggatggagaccccattctccatgatgtgattattacgcatgcatgcttgtatgaaaacatcccatgtaccccatatatacacctaatatgtagccacaataattagaaaattttaaaaaactcatgctgcaagtctttacaaaagattattttattaattcaatttttgcataaaagactgttaaaagaacttgctaacttgaaaacaattttgagtatttatgatctttccaacttgaaaacacctgaaccttatagaacagattgtgtaaagcagccagggccacaggagtgaaagaagatggagacccgccgtctggtcatgatatgagaggcctggacagtgacctcacgaacaaaaagaaatgatcctcttcagtccaaagtgtgtttgtgagactaatgactccatgccctcac

SEQ ID NO: 43764 - DNA, 1133 bp, Homo sapiens
actgtgagactcccaagccagatcacagaacccaacacagcttcctcctaggcctcttggtatgtttgttcttggaactcaccaacatgccatgaggatgcccaagcatttgtggaaagagccacaaggaatgaaattcaggaccccagctgaaagccagggctgagctcccagctgacagtcagtgttaactaccagccacgggactacaccgtcttgaaagtggatccttcattctcagtgaattccacatgggacagagaggggctgaccctgctcagccctgcccaaattgcacattcaagggcagaagaaaggattactattgttttaagacattgaattttgtcatgatttgctactaggcaatagataactgatacaggagggagaatggaagcagaggcattcattagagaacataattactcaggcaaaggatgatgagggcttagctaaggcattcattaattgaacaaaattatgacatgtcaggcatggtgctatgacatgggactataatgtgaactaggtagacaaggtctcgtctctgaagaaattgactggctattgggcagaaaggatggaatacagaatatagccactgagctactttattatgttaacctaaagatgcgtgatcttgtcatgtaatgttaagaggcatttaaaaaatagaataaaataactagaaacatgcattattatatgggtaaaacttttggcatccagatagcataaaaatggcattggctttactctctaagccctattgaacatgttaggaagcgggtttttttgtctttgtctccattagagaaaaccttcatgtgggcacttttgatgctcccctgccattgtgtgattttcagttcaaagcacttgctatttgcatcagtgcttgttgctttttttttttttttgaggcggagagtgggaggattacacagtgttcttttcaagtgctctcagtccctgatcaaaggaagggttttagagccttagtttgttggagattccatataagactattcttggtttggggttttgagtaaatcacttttgcttaaacaccagagagaaagagtactaacccatgcattgtcaactacaaagtcctatccaagtgccaa

SEQ ID NO: 43765 - DNA, 1081 bp, Homo sapiens
ttcagacacattggtggctttcaaccttacctcactatcaaatttctgtggactttttcaaaacatacttcttctagtaatagtaagctatcatgatggtgattttcaatgaggaaagaggtgctcatactagactttctagatgcaaggagatgggggtacattgtagtttagtttttttttttcttcctgagataggatcttggtctgttgtccaggctggaatgtggtggtgccttcactgctcactgtagctttaacctctcaggttcaagcgaccctcccacctcagcctcccaatggcacaggtgcgtgccattacacctggctaattttgttttgttttttatttttggagagatagggcctcactgtgtttcccaggctggtctggaactcctaggctcaaatgatcctccctccttggcctcccaaaatgctgggattacaggtatgagccactgcgcccagcctttgtagtttagaaagccttcccaacaggtgatctaaatactggctttagaaaaatgtgtcctaggttcttatttctaagaaccctgcatgagatagcaagcagagggtggtatcttgttatgcaaaagaacctgctgcatcttaaagcatgactttgacttgagctatttgaggaacaggagtaaccacgtgtttatctcagtcataaaatcacctgtatcttgttcctggggaacctttcattttcaacagaaatgcattgtaacagatctagtaagctaattaagccccatcgtgctcccccagataactaaatgagttaacctgttgagtagagttgttgaacattatccatctggatgctgaagggagtttgccaaaacccatcattccgatgttggcttcactgacactattgtttctccttgcagtaattggccagcagcaggttcaactgttccctgggactactcaagaatttgatattagcaacatgttctagcagcaatgactcactggtcttctctcttcacagtggcatccagggcatctaaacgttgctccactcatcgcaggtgatgagttaggacacacccatttaaaatac

SEQ ID NO: 43766 - DNA, 1050 bp, Homo sapiens
gaacgcggtcggggaggaggaaggtgccaagagtgactctgacatggtctggcttctaaaatagagcgttatgctaattagcaaagtaaaatccacagataaagggtatgagatctagtgcagggttcctagaaaatggggaggaatagtatcctacgaagcacagcggagggcctggcctttggcaggaagagatgcagggcctcttcatggggaagaagaaaaaaggatgcactgtgatgaggtggcaggtttgtggtgttggtagcacccaatgtaatttttttttttttttgaggtagagtctcaccttgtcagccaggctggagctggagtgcagtgacacgacctcacctcactgcaacctccgcctcctgggttcaaacgattctcctgcctcagcctaccgagtagctgggattacaggcattataggtgcccgccaccatgcccagctaatttttgtatttttagtagagacggagtttcaccatgttggccacgcttgtctcgaactcctaacctcgtgatctgcttgcctccgcctcccaaagtgctggaattacaggtgtgagccaccgcgcctggccgccaatgttatttttacatctatctttgttgactttgccccgatgggcttgaggggaattcacaaattgcgcttttcttctctctccgaagttggggtcaggttgacggggatcacagtgccagttctggtatgttgcacccagaattaggacatgtaccacttggccagccacagggagtgatggctaagtacaatgtcaaagtcagtgctctctgcgggaagggagagctgaggagagagaacaagaggattgtatctaacagtccttttcctttctccatttactaatcagagaagtgagcgaggaaatatagagatccagagtgttacactagtggatatcactccacgtgaaaatttgtgatccaaggctaggcgtggtagtggctcacacctataatcctagcactttgggaggccaaggctcaagggtcacgtgaggccaggcatttgagacc

SEQ ID NO: 43767 - DNA, 1039 bp, Homo sapiens
acatttctagaagaaaacataagagaaaacctttgtgaccttatgttaagcaaaatttcttaaaaacaaaaagcatgataaaaaactacaaatagacaaattagagttcatcaaaataaaaaatcatctgtctataggatactgttaaaggaatgaaaagacaaggcatataaatatatttgtgggaaataacttgtaaatcttgttatagaagtcttgaatccagaatatataaagaactttccaaacttgataagaagaaaacaaacaacccattaaaacagatgaaatatacgtacacacacttcaaccaagaagtggttcatggtcccggcgcagtggctcacgcctgtaatctcagcactttgggaggttgaggtgggcggatcacgaggtcaggagatcgagaccagcctggctaacacggtgaaaccccatctctactaaaaatacaaaaattagtcaagtgtggtggcacccgcctgtagtcccagctactcaggaggctgaggcaggcaaatcacttgaacccgggaggtggagtttgcaatgagccaagatctcgccaatgcactccagccttggtgacagaacaagacttcatctcaaaaaaaaaaaagaagtggttcgtatgcatggcaaataaacctgtgaagaaacaatcaataccttagtttttagggacacgcaaattaaaactacagtatacgccctataatttattattttaatcacattgtttgcaaatgttgactttattttgggtacccggttatttatgatacactcacagttcatttctgcataacagagtgtcaggacatggaggcagcaggggaagcaatcaggtacagactgatacaccttactaggccctgagatctcaggggccttctctgggcttcatatcctcattgggatgaatattttaggaagactgggatgtttgtggcatgtcctggtcacccaggctggagtgcagtggtgtgatcatagcttactgcagccttgacctcctggagtcaaagaatcctcctgt

SEQ ID NO: 43768 - DNA, 1051 bp, Homo sapiens
gggcttcaccatcttggccaggctggtctcgaactcctgaccttgtgatccgcccacgtcaacctcccaaagtgttgggattataggtgtgagccccagccccctacctactgttgattttttataaatactccaccatactgaagaaatttccttttattcctagctttatgtgactatctattatcaatggctattgggtttttatcatatcatttttttgcgtctattgagattatatgatttcctttattctgctaatatggtgaattgcgttgattttcaaataacaaaccaaattctattcatgcagtaaactcatcttggttactatgtattatcttttttgtgtatcttgggattcttttgtatactattatttaaaagatgtttccatttctgttcatgagagatgctgaactgtcattttctttcttttaatgactttaagtttcaatatcagtattatggtgacctcataaaatgagtaaggagaatagggcctctttttctgttctctggaagagtttagtatttcaaatcaaacaccataaataattgtaggaccatttagattttctgtttatcaattttattaagttgtgttttctttaagactttgtacatttcatttaaattttcaaaatgactttgtgtaactgcccctaatattcaaatgccaaatatcaaatatcaaatgccaatttgataagcccaaatagtacctcattcctaataatagtatgcatatttttatttcttattcttttttttttctttttttcttttaagatggagtctggctctgttgcccaggctggagtgcagtgttgcgatcttggctgactgccacctccgcctcccaggttcaagcggttctcctgcctcagcctcccgagtagctgggactacaggcatgcaacaccatgcctggctaatttttgaatttttagtaaagacgaggtttcacagtgttgatcaggctggtctcgaactcctgaccttaggtgatccgcccacatcggcctcccaaactgctgggattacagcc

SEQ ID NO: 43769 - DNA, 1034 bp, Homo sapiens
gacagaagaatcgctcaaacccgggaggcggaggttgcagtgagccgagatcgccccactgcactccagtctgggcgacagagagtctgtcttaaaagaaaaaaaagtacttgttgaagtcattttcataaaaagcagttttggaatgtagctgattgcagttgttttcagagaataattcagaacagtaacagtggttcacaacaacaacttaggaaagccatggttaagatccgatgaaatttcccagttgacaaggaatttagttatttcttacatgcagtattttaagataacaacaccaggatcatagggccatcagacttctataaatttcatataatcttttgaatattcacattaataacatatccccatacaaatataactttaaaaaagaatcaattatgactgataacatattttaatgaatttatatactttttagaatatttatatcaataacatacccacagaaataactgaaagaagatctaatatcacttaccatttgtcaatgcattccatataattttccaagtaagacaaataatttaatatctctgtaagatgtgacatacattctttgaagcttttcaggggcctaactggacaatgccaaagttaattttaggtcagaaacaattttggattttgattctgtggaaacctgccagagatgccaaaaggttcaaaacacttgatcaaaacagaatcataggtcactcataaatagtagttactcatttaatcagagtgataattaaaatacttcaaaagcaatatggaaattcacatagatagaaaaaccttaatctggcagggtgtggtggcttacgcctgtaatcccagtgctttgggaggccgaggcgggtggatcacaaggtcaggagtttgagaccagcctggccaacatggtgaaacctcatctctactaaaaatacaaaaaattagccgagtgtggtggtgggcgcctgtaatcccagctactcaggaggctgaggcaggagaatcgcttgaacccaggaggcgga

SEQ ID NO: 43770 - DNA, 1035 bp, Homo sapiens
attttttcagctccatccagtaatgtgtaattaagaaccctattactggaagcaaaaatgttcatttgccttgcattttgattatatttagtaatttggaatgctgacttttaggacagataggacttaatgcggctttttttttttttttctcatttggtacatttgattctctaaagtacttttttcactgatctcctatttcagagcaagtccctgaagtaacagagaatgtagagatattgactccaaatttcacttactttctgtgagtgttaatttttttttttttttttttttttttttgaggcagagtctctgtcgcccaggctggagtgcagtggcacagtcttggctcaccgtaacctccgcctcccgggttcaagcgattttcctgcctcagcctccctggtagctgggattataggtgcctgccaccatgcctgactaatttttgtatttttagtagagacagggtttcaccatgttagccaggctggtctcaaactcctgacctcaggtgatccagttgcctcagcctcccatagtgctcggattacaggcgtgagccaacgtgcccggccacgtgttaaaatttttaatctgttttatatatgggagacatcaaatgttctcaaaagtacacagagtgatatagtgaattcttattacctattgcctggcctcatcaaccagcaacttatgggccatcctcccctaggtaccctttgtatacccctttctgttttagtttgaagcaaatgtcagacctcatctgtgagatattctcatgttaaagtagaaatggtgttacagtgagtccattcacttattcacctgggggctggatggctggacatttaaaatagacagggaccaagggtgggctggggcttggtggtagggccactgcctggatgagttattgtgaatttctgcagctgtcagtaagatttgatgagtatctcccctaaagtgtaacacagatctcgtgtgttgtctctgaaattattactcagcactctgccattccca

SEQ ID NO: 43771 - DNA, 1046 bp, Homo sapiens
gcccctgtgttctgcctgccaggccagctgtctcccagccatgctgctggacccccgccaggctcccatgtcatggatgcctgtgccaccccaggcaataaagaccagtcacttggctgctcttctgaagaaccaagggtgagtgccacaggaggaggaggaggacatggggtttgattttgtgcctttcagtgggtaatgaaggctgaaaggatgactttcgcttaactctttcctgctgcaccaaagtagttcacggtatttgccccaagctaagctttccccactgcaggtgtgagatgtggatcccttagcccttggggcagagaccccaggccagttacctctgaccctgggccctttaaatataggctgtttcaatattgtgtgtcctggcttaacctgcatgttctggttgtctgtgtcagctgtgacaggcccttagctgctccatgcatgctcagctcacccctgctctgccctctgccctaggaagatctttgcctttgacctggatgccaggcggctggcatccatggccacgctgctggcctgggctggcgtctcctgctgtgagctggctgaggaggacttcctggcggtctcccccttagatccgcgctatcgtgaggtccactatgtcctgctggatccttcctgcagtggctcgggtgagatggtgagaaggcgtggctgagggactcagaggtccacagcagcttagacctggagtcatctgttttggtcttagttctgacactttaatgggcttgggaccctggagcaaaagttctcctctgtgaagcgaggatttcaggagcgaggatttcaggactgaggcagcctgtgaagctgtgtaaccgagacacgcttttccttaggtatgccgagcagacagctggaggagcccggggcagggacacctagcccggtgcgtctgcatgccctggcagggttccagcagcgagccctgtgccacgcgctcactttcccttccctgcagcggctcgtctactccatgtgctccctctgccaggaggagaatg

SEQ ID NO: 43772 - DNA, 1050 bp, Homo sapiens
gtgagtggactactgggaagatgcctgccacctgggccgagggtgctccctgacttgaatatcagaaggtttcagcacctctgcgccaaggaaatagttgaactctcttccttttttgagcagatacacttattttctgccctgtccattcttcctcctgtcttgaatctgtaataacattgttctttctttcctgccaggtgcttcagaccaagcggagctcccggaggcaaagcctggagctgcagaagtgtgaagagatcctccacaagatcgtgaagtaccgcttcagctggcccttcaggtgagtgctgtgttctcaggtgcaggggagaggagtggcctggctggttctaaaagcttccagagcccctgaggggctctcagccaagcccttgcttttcaggacgtgtctcagtggcaggggcactgccgtcaaggctgtgcagattctccatttggttcttctccacagggagcctgtgaccagagatgaggccgaggactactatgatgtgatcacgcaccccatggactttcagacagtgcagaacaaatgttcctgtgggagctaccgctctgtgcaggagtttcttactgacatgaagcaagtgtttaccaatgctgaggtttacaactgccgtggcagccatgtgctaagctgcatggtgaagacagaacagtgtctagtggctctgttgcataaacaccttcctggccacccatatgtccgcaggaagcgcaagaagtttcctgataggcttgctgaagatgaaggggacagtgagccagaggccgttggacagtccaggggacgaagacagaagaagtagagaggcagggccgtggtaagggagctgaggtggggggacagctagggagggtgggagggaggcgagcgaggaagaccaagaacctggaagagatcacagggagtccagaaacgcctgtcatcccaagcttatgctgtttttctaaaagctctttatggggcttgatattgggttggtggtctttgtccagaaatatgaagggacaaagagggccata

SEQ ID NO: 43773 - DNA, 1029 bp, Homo sapiens
ccagccatgcttgctctagatattttttaaattttggtaaaaatatgcataacatacaaatttacttttttttttttttttggagaaagagtcccactcttgcctaggctggagtgtagtggcataatctcagctcactgcaacctctacctcccaggttcaagcaattcccctgcctcagcctcccaagtagctggaattgcaggtgcatgccaccatgcctggctgatttttgtattttttgtagagacggggtttcaccatgttggctaggttggtctcgaactcctgacttcaggtcatctgcccacctcagcctcccaaagtactaggattacaggtgtgaaccaccacgtccagcccaaatttaccatttttatgtgttcgattctgtggcattaagtatattcacgttgttttgcaaccatcaccaccatcagccttcaaaactttttcatacacttctgacaccaaatacatgggtttttaccacactaagcaactctctagttctctgctgataccaactactcttaaaattcagtttaattctgactctttctacttggagtttgtgtcagatcctgcaagttaaagtgctctgtcccacgagactattctcacttcagatgccagtcgcaagccccacgttgccacctgtaccatctatacattgaggattctcatgaccctctccttaagtatgataatttgctagaatgcctgacagaacccgggaaagcattttacttaggttaaccgggtcattttgaaggatactactcaggaacagccagatggatgagacgtgtggaacaaggaaggtggcggagcaggggtacgtggggctttcacgtgttctctgaacactccttccttccagcttctgagtgtgttacctgaagctgatcagatcttgttccagtatcttcgtagagcttaatctccgaagtctcccctcctcttgcctttcaggagcttgtgggtagggctgaacattccagtcttctaatcatctggtctttctgg

SEQ ID NO: 43774 - DNA, 1021 bp, Homo sapiens
ttgagcccaggaggcggaggttgcattgagccaagatcatgcccctgcactctggcctgggtgagagagcgagatgctgtctcatacaaaatgaaacaaaaaacccccaaaatttagtatattcaaatagtggaatattatttagccacaaaaagaaatgaagtactgttctgtgctacaacatgaatgaacctagaaaacatgctaagcaaaagaagtcagacatcaaaggccatgtggtgtatgattccattcaaatgaaacatcttagaataggcaaatctatttcaaacagaaagtggattagtggttgccagaggataggggaaggggagaataggagtgatgattgctaacaggtaagagattcctgcttggggtgatgaaaatgttttggaattacatgtgtggttctacaacaaaaaactgaagtacatgcttcaagttggtgaatttcatgtcatatgaattaaaaagaatcaaaaaaccctgttctgtctacaaagtagcatcaaatttgcgactgccatatttgttgtagacattatttctatcaaagccaggacaagattttggcttaatgcctcctctcattgctgactctgtgctcaatttcacggttgaatttaggtttgatggaagagagaaggaaaatatgattcagtacatactctacaccattgccagacttttgcgaaggacaataggtacattatattgatgttagcccactgcttaatgtgtaaattaagtaaaactgtattcagaattgtgttgtctgaatacagatgtgtctaggcaaattaagaaagacagaggagggccggccgcggtggctcacgcctgtaatcccagcattttgggaggcagaggcaggcggatcacaaggtcaggagttcgagaccagcctggccaacatggcaaaatcctgtctctactaaaagtacaaaaattagccaggcatggtggcgggtgcctgtagtcccagctactaggtaggctgaggcaggagaattgcttg

SEQ ID NO: 43775 - DNA, 1030 bp, Homo sapiens
gctttgatataaagatatttagtcattcttcattctaagttgcagtacccctaaactttggaactgtgtaacgattccacttcagagagcaaatatctgagataacatgctgtgtttaagatatttaagagaaattagcatcttttatacatgaagatatatttgatatatttcacaggaagtatctgtgttgttacaaattgttgagtttggcactgtgtactgcttagatttgaaactagcaattgggtatttactaaagtcaacctaatgtctcaatttttcttaggtaagaaagcaaacttaggtaaaaatgcaagcatgaacacacaacatggaacagcaacagaagttgctgtagagacaaccacacccaaacaaggacagaacctatggtaatgtgagcattcatctggttgctctttctttttccttttaattgttaaggaagaaagtatttagtatagtgatgccagtgagttaataattatttgcgcaggatactttgtgtgactgatattttggatatcaaaacttcttgcattagcagacctgattttttgttaagaagatacttgtttttttaagggttggaattttgattttttcccccctgtaatataactttgtatattatgtgatagatcttatatagcagtagaaatgtagcttaaatttggttgggaatagaagtatttaagattttccttaaattttattaattaacaaattgtatgcatagctattcgtttcctttatgcgcatttctgcttttaggcagcgagctaggttttagaggatccattctacggctttaactgtgatcacctgtgatttaatgacctttcatttttgaattttgggtataggtttactctctggagggaaagggacaagtatgccaattaactttataaaatttcatataatattttaataggaaccatattggctctggtgtcctagtacagaattaacattaggcatcatgaaaatagtaaattacttattctacttctagatagtagat

SEQ ID NO: 43776 - DNA, 1803 bp, Homo sapiens
aattgtatgcatagtttttgtctactatttctgctggaggggttcacagattttgtttaaatatttaagaatcattaatatacataaacagaactagttacatagcaaaaatgtctagtattaagtctggatgtcaagggaattttgtgttgacatgacaaaaacattagctaacattcatgtctttgttttttcagggacaaagtatctatgaagagatatgaatatgtagctttacctgaatagctggggaagagggcctttaagatgcttaaatgttgcttaagttagttttagattttaaaattaattttgctcctattcttaaattctagtatatgactctcaacccttctactaagaggaagaatactggatccccagacaggaagccctcaaagaaatccaagacagacaactcttctcttagttcaccactaaatcctaagttatggtgtcacgtacacttgaagaagtcattgagtggctcgccactcaaagtgaagaactcaaagaattccaaatctcctgaagaacatctagaagaaatgatgaagatgatgtcgcccaataagctgcacactaactttcacattcctaaaaaaggcccacctgccaagaaaccagggaagcacagtgacaagcctttgaaggcaaagggcagaagcaaaggcatcctgaatggacagaaatccacagggaattccaaatctcccaaaaaaggactgaagactcctaaaaccaaaatgaagcagatgactttgttggatatggccaaaggcacgcagaagatgacacgagccccacggaattctgggggtacacctaggacctctagtaaacctcataaacatctgcctcctgcagccctacacctcattgcatactacaaagaaaacaaagacagggaggacaagaggagcgccctgtcctgtgttatctccaaaacagctcgtcttctctctagtgaagatagagctcgtctcccagaagaattgcgaagtcttgttcaaaaacgctatgaacttctagagcacaaaaagaggtgggcttctatgtctgaagaacaacggaaagaatatttgaaaaagaaacgggaggagctgaaaaagaagttgaaggaaaaagccaaagaacgaagagagaaagaaatgcttgagagattagaaaaacagaagcggtatgaggaccaagagttaactggcaaaaaccttccagcattcagattggtggatacccctgaagggctgcccaacacgctgtttggggatgtggccatggtggtggaattcttgagctgttattctgggctacttttaccagatgctcagtatcctattactgctgtgtcccttatggaagccttgagtgcagataagggtggctttttataccttaacagggtgttggtcatcctcttacagaccctcctacaagatgagatagcagaagactatggtgaattgggaatgaagctgtcggaaatccccttgactctgcattctgtttcagagctggtgcggctctgcttgcgcagatctgatgttcaggaggaaagcgagggctcagacacagatgacaataaagattcagctgcatttgaggataatgaggtacaagatgagttcctagaaaagctggagacctctgaattttttgagctgacgtcagaggagaagctacagatcttgacagcactgtgccaccggatcctcatgacatactcagtgcaagaccacatggagaccagacagcagatgtctgcagagttgtggaaggaacggcttgctgtgttgaaggaag

SEQ ID NO: 43777 - DNA, 1034 bp, Homo sapiens
tggcaatgaatttaaagtgagaccactcactttttttttttttttttgaggcagagtcttgctccatcgcccaagctggagtgcagtggcgtgatctcggctcactgcaagctccaccttgcgggttcacgcctcagtctcccaagtagctgggactacaggcacccgccaccatgcctggctaatttttttgatttttagtagagactgggtttcaccgtgttagccaggatggtctcgatctcctgaccttgtgatcagcccgccttggcctccgaaagtgctgggattacaggtgtgagcctccacacccagctgagaccacccacttttatttatcttttattttagccgtgtttcagctgaacatatgcagggcaggagtaaatagagtgagttaatcagggttatggtttttccaagtagatacaatagaataagagagacaagggaactataggtttatgtgagattaattatcatgattgactaaaatttaatctgggtaaagcaagacatgggggttaggatggtgaaaatgtaatagaattaatggatttaaggttctggtgagattgaaggattgtagagttgtgggactggagggagtggatttggaacataagagggtatgttcaaagagaggatggtgtgaaattagttgtgggaatgagttctttttttttttttttttttgagacgggggtcttgctctgtcctccaggctggagtgcagtggtgtgatcctggctcactgcaccctcctcctcccgggttcaagcaatttcgagcctcagcctcccgagtagctggggtgacaggcatgtgccaccatgcctggctaatttttgcatttttagtagagacggggtttcaccatgttggccaggctggtctccaactcctgacctcaagtgatctgcctgcctcggcctcccaaagttctgggattgcaggggtgagccactgcgcctggccagaatgagttcttaaaagtgttgggtgaggacaaaggggagtttgaggcccaggtc

SEQ ID NO: 43778 - DNA, 1030 bp, Homo sapiens
gaacaacacattccagtttctttttgtttgtttgtttgtttttttgagacagagtctcgctctttctcccaggccagagtgcagtggcgggatctcggctcactgcgagctccgcctcccgggttcacgccattctcctgcctcagcttcccgagtaactgggactacaggcgcccgccaccgcgccaggctaattttttttgtatttttagtagagatggtgtttcactgtgttagccaggatggtctcgatctcttgacctcgtgatctgcccgcctcagccttccaaagtgctgggattacaggcgtgagccaccccgcccggcaacacattacagttttaatcaggcaacaaaaagggcagaggaacaataacctgcagttgcctggaactcttcaaaggccagttggcctttgaagttagatagcttagccaaaagagggatttgttaagtatatcctactcagtgtaggccatatttttttcctctgcgtgtagccatggttctgtgggctcgtttctctcattgtatctttaatgtttaaatctttttttttttttttttgagatggagtctcgctctgttccccaggctggagtgcagtggcgccatctcggctcgctgctagctccacctcccaggttcaggccattctcctgcctcagcctcccgagtagctgggactacaggcgcccgccaccgcacctggctaaaattttttgtatttttactagagatggggtttcactgtggtctcaatctcctgacctcatgatccgcctgcctcggcctcccagagtgctgggattacaggcgtgaaccaccacgcccagcccctaatgtttaaatcttaattggggtctggctgggtggctcatgcctgtaatcccagcactttgggaggcggaggtgggcagatcacctgtttgagttagagaccaggctggccaacatagtgaaaccctgtctgtactaaaaatacaaaagttagccaggtatggtggcgcacacctgtaatcacagatac

SEQ ID NO: 43779 - DNA, 1077 bp, Homo sapiens
ccatgcctggctaatttttctatttttggtagacatggggtttcaccatgttggccaggatggtctcaatccctggaccttgtgatccaccagcctcggcctcccaaagtgctgggattacaggcatgagccaccacacccggcctgatttttctttaaagtctcgctcttaaagtttgtttgttgtgtatggctgggcgtagtggctcttgcttgtaatttcagcagtttgaggggctgaggtgggaggattgcttgagcccatgagtttgagaccagcctgggtaacatggcgagaccctgtttctacatacacaaaaaattaactgggtgtggtggcgtgtgcctctagtccaagctactttggagatggaggcagggtgatcccttgagcccaggaggtcaaggttgcagtgagctgtgatcatgccactgcactccagcctgtgtgacagacagagtgagaccctgttttgggtggaggaaaaaaaaaagtttgtgagttaggggttagaacagaagtactttaaaaggtaaattatattgttgaaggaatggttgctagaagaaaaaaaatgaaaagtaagttatattattttgagaacactttaaatatattttatagtaacaaattttgcaaacttgctaataaaggcatgtggaaattgagaaaagcccactatttgagtgttgtcctcagagttctaacatgttgccctgggtgaatgagaacagtgagataagaatcaatatggattgccaaggtttgctaattcagggttttgctgcctagattatattgcttattattaagttgtgtgcagcatctgaatgagctgctacaagtaatttctttaatttttatcctttttttaatcaagaaacaggagttgcagacagatatttgtggttgtggtgagtttcaagtgacaggaacaaatgtaaaattgtggacgctctctttttctttcaaccttccatgttgccgagacagtcataaatatttttttctgtttagcaattaggaagggcctttggcaaaaattatactgctggtaatccaggtgtcctttcttc

SEQ ID NO: 43780 - DNA, 1052 bp, Homo sapiens
aatgttatgaaatttggctataatttaggttaagactaggaaatggaagcttgcttaaagtgctggaagatggcagtgattttactcagaaaacttaagactcatgtaaaatactggtctacaaagttaaaggcatatactcaggtttattatttgttttccctaccttaaacaataatttcttatttcctaatactatctgacatgtcactgattgttttctgtatataagctgtgtttttcctatttataaaattaggactttggcttctcagccagggcaaaacatagtaacacagatgataagtagaacctaaaacattgctttgttttctttctttttctagaagaaatttaaaataatctgttgaggattaaagttgatcacataggacccatccatccaaaggcatgggatgttttctctctctgtatactctttggtttttgtagaatgtaatgttctgtcaggctctgagtacatttactgtagagtgagaccaggtgtaaagagagtgagttctgagcaatagttttagcaggccaggcgcagtggctcacgcctgtaatcctagcactttgggaggccgagttgggcggatcacgaggtcaggagatcgagaccatcctggctgacatggtgaaaccccgtctctactaaaaatacaaaaaattagccgggcgtggtggcgggcacctgtagtcccagctactcgggaggctgaggcaggagaatggcatgaacctgggaggctgagcttgtagtgagccgagatcacgccactgcactccagcctgggcaacaaagtgagactctgtctcaaataaataaataaataaaatagttttaccaaaggacccatagtgagggcttacgtgggagagaggaaaattatgtaaagatacaggaattttggattgttacctgagtacctaatatgatgatgagggtgtgtttgtggttttctaaaatctttgtagaatataaattacttgagaataagaactaccttgcttattttatatcttgtaacgtttagcatagtatgttg

SEQ ID NO: 43781 - DNA, 2081 bp, Homo sapiens
ttacgtttttcactaattttctatgatttgactagatgacagagcacgtagatcgccacgaaaacttcctacttcattaaaaaaaggagaaaggaaatgggctcctccaaaatttctgcctcacaaatatgatgtgaaactacaaaatgaagataaggttagttgacactttactttttacatgtgatagatgttctttaagaaaatatcatagggttgcttttgttggagaaaatgtgctgaagaaaaatgtaaatgaatgtacagcagattctgagtggttttgtagttacagtaattaatgacttcaagttaatgtaaattatattttctttcctagaagataccatgcttttcctctttcttataggaattagtagagtgtaagtaatttacatttgagcttgaaattcagtttgaaaattaagaatctgttcccagcagttatggactttccaaggaaatcactcttcccagttaaaagtagagcagtcaggccgggcgtggtggctcacgcctgtaatcccagtactttgggaggccgaggtgggcggatcatgaggtcaggagatcgagaccatcccggctaacatggtgaaaccacatctctactaaaaatacaaaaaattagccgggcgtggtggcgggcgcatgtagtcccagctactcaggaggctgaggcaggagaatggcatgaacctgggaggcggagcttgcagtgagtggagatcacgccactgcactccagcctgggcgatagagcaagattccttctcaaaaaacaaaacaaaaaaaaatttgccaggtgtggtggcgcacgcctataatcccagctactcaggaggctgaggcaggagactcgcttgaacctgggaggcggaggttgcagtgagttgagattgcgcccctgcactccagcctgggcaacatagagcgagactccgtctcaaaaaaaaaaaaaaaaaaaaaagcgttttgctgattggaactaagattctaagaaatatggaatgttacttttcaggtattcctacaccacctgtatgtgcagaatcttagaaaggtggattaggagactgggtgtggaaggcaatgcacatttgtcttcaggtataaccattttacagaagaaacagctaagacctgagaagtttaataactgtcaaaattcttgattcagtaaatgaaaatgggaaggattgtaacccaaatcttttgcttctttatttacattgttttgttcctgcctcagaatgctgacaagtccgattccattctgactgttggtgttatggttcgtgatcagaagccttggctgggttgttaggattttttttttcttttcttttctttttttgagatggagttttgctcttgttgcccaggctggagtgcaatggcgcaatctcggctcactgcatcctctgcctcctgggttcaagtgattctccagcctcagcctcccaagtagctaggattacaggcatgcatcaccatgcctgactaattttgtgttttttgtagagacagagtttcaccacgttggtcaggctgatctcgaactcctgacctcaggtggtctaccaccccttggcctcccaaagtgctgggattacaagcgtgatccaccacgcccggcctaggttgttgttttgtttttttgtcttttttgagacggagtcttgttctgtcgctcaggcgggagtacaatggcacggtcttggctcactacagcctctgcctctcggattcaagcgattctcctgcctcagcctcacaagtagctgggattacaggtgcccgccaccgtgcccggctaagttttgtatttttagtagatacgggatttcactatgttggccaggctggtcttgaactcctgaccttgtgatccgcctgcctcggcttcccaaagtactgggattacaggcatgagccactgcacctggccaggatttttttatatttgaatattggatattgttaaatacaatttttcacagagtttcttctcattcagcaaggtagctgattaagacatgcctagttttaggccaggcacggtggctcatgcctgtaat

SEQ ID NO: 43782 - DNA, 1026 bp, Homo sapiens
tgactttttccataggattctattctttgccttctgtttttcagtttgcatagtgtaatgttatatgctattcatggcacagtttgaattcttaactgtttgtagcctggtgatttccaagcctgggtcagacttttaactgtagacttgatctttacttgcctgtcctatatgcaatttatttatttatttatttatttttgagacggagtctcgctctgtcacccaggctggagcgcagtggcacgatcttggctcactgcaaccttcgcctcatgggttcaagtgattctcctgcttcagcctccccagtaactgggactatgggagcacgctaccacaaccagctaattttgtatttttagtagagacggggtttcaccatgctggccaggctggtctcgaactctggacctcaggtgatctgcccaccttggcctcccaaagtgctggaattacaggcgtgagtcaccacgcctggcccctcctttatgcagtttagattcaacatgtgtaaagctgaattgacttcactcttcttgtatcccaaggcaggtaaacaagaattgttctctcattcttttacttggctcaccgtccatccacctagtgtctaaggcagaaaagttaaaatacctttaacattctcacgtctagttggtcacgaactggaagaattttgactctctttccttctgtattacagttacattagttcagatgtttgtttatttttgagacagggtcttgctctgttgtctaggctggtgtgcagtggtgtgatcatagctcattgcagcctcaacctcccaggctcaagtgatcctcctgcctcagcctcctgagtagctgggaccacacgtgtgcatcacaacacctttctaattttttttgtttgtttgtttagagacagggtctcaccatgtggctaaggcttgatttaaactcctgggctcaagcagtctccccacctcagcctcccagagttctgggattacctgtgtgagcctgtgtgcccagcctaat

SEQ ID NO: 43783 - DNA, 1029 bp, Homo sapiens
agcttcccaagtagctgggaccgtaggcatgcaccaccacacccagctaatttttgtaggttttttttttttttttttgtagaggtcagttctcacgatgttgttcaggctggtcttgtactcgtgagttcaagcgatcctcctgccttgacctcttttttttgaaacagggtcttactctgttgcccccaggctggagtggagtgttgtgatgacagcttagtgcagcctggacctccttgtggcctcggcctcatgctgaattacaggtatgacgcactgtgcctggctgtatacacaggtttttgactgcgagaggaggagaggtcagagccctaacccccatgctgttcaagggtcagttgcacttttttctctccataatctgtaatctaagtccctctcacacgggagcaggtaaaatcctgaaactatgatgtcctagggacctggagactctaacaataatgtttttaaatttgaacaattgagatttggctcactgggaagaccgttcagcctctgaggccttcattaataaagaatttgactggacttgattattgttgtctccaaaaatgtaggtgcaccaagtgtttggtgtgtattggtctccctccgcatgagtattagaggatcaaatgttagcttactatttaactggtacaaactttgcattagaatgtgatgttgtctgtctcccattctattttgtgtgtctagatgttttggatctgtgcagatggtttttgaggtactttcttaatgtagttcgaagcaaacttctgagagtgtcattgtagttggtccatcccaagttgttgatacttcagtttgttttctcctgtattgtgaatgctaacgtctgtattttccagtttccctcttctttttgatactgaagttttgtaataagggcattacttgcaattccttgaggttgagaagtgttttggttaggaatattctctctgctttccgaacatcagttttattgtggtcttacttctgcctctatattcctgaaat

SEQ ID NO: 43784 - DNA, 1023 bp, Homo sapiens
aaactaaacagttgttaaatatctatctgtatgtacttgacactgggctaattgctttacataatgtcttgcagaatttgcacggaaatcttgaagtggtaggtagccttgtacatttaaatgacatgttgaggttgatacatactagttatgagtgctttcagccgttatgtagcgaaattgtaataatagtccgtagttctcaaactttggtgtgatacttaagctactgaaaatgcgttcttggctgggcatggtggctcaggcctgtagtaccagcactttgggagaccaaggtgggcagatcacctgaggtcaggagtttgagaccagcctggccaacatggcgataccctatctctccaaaaaatacaaaaattagccaggtatggtggtgcatgcctgtagtcccagctactcgggaggccgaagtgggagaattgcttgaactgttttttttttttccctctcaggacaaatgtttaatttgcttctccatcatgcttgaactgttcttcagcccattccttgagagttcagaaggtctaggatagacctaacatttttcagttctaacagtctgcagggtggtagtgatgctgttacatgaggtacaacactttagtagtactggcttaaacaagacagacgtgattatctcatgtagtaagtcttagatagttccaagtttggtatagaggctgaatactattgtcaagacctagactttctctgtctttctgttctgttcttctcagtgtgttgagttctggtccttagctttgctgtcccctgagttgtgaaaaaatgtgactgtattcagagtgagggaatacttatcaaagcaggctaagaaaatctttccagaagcatatctggaaaaatctttcttgaagcataaaatagaaagctccaccctttatctttacatgttattggctagaccttggcttacataaccacccagagctgcagcgggggctgagaaagagagtatcttcctttgtatttaagtctcaaaag

SEQ ID NO: 43785 - DNA, 1309 bp, Homo sapiens
atgcgtggctagttttttagtagagacagggtttcaccatcttggccaggctggtcttgaactcctaacctcgtgatccacccacttcagcctcccaaagtgctgggattacaggcgtgacccaccatgcccgggctaatcttctttttttagacagtctccctctgttgctctccatcacagctcactgcaacctccacctcctgggctcaagtgatcctcccacctcagatccctgagtagctggaactacaggcctgtgccaccacattcaactaatttttttttaatagagatggggttttgctatgttgcccaggctgctcttgaactcctgggcttgagcgatgttcgtgcctgggcctcataaactgccactatgcagtttttttttttttttttgagactgagtttcactcttgttgcccaggctacagtgcaatggcatgatctcagctcactgcgacctccgtctccaaggttcaagcagttctcctgcatcagcctcccgagtagctgggattacagccgcacgccaccacgcctggctaattttttgtatttttagtagagacgggggtttcaccatgttggccacgctggtctcgaactcctgacctcaggtgatccacctgccttggcctcccaaaatgccaggattataggcatgagccactgtgcctggccggcccctacttttttttgttttgtttttttctggcccctgctttttaaagtaacaactctaggttgaacatcccaaatccataaatcagaaatgctccaaaatctgaaagtttttgagccccaacatgatcgtcaaaggaagagctcattggagcattttggatatttggatttgggatgctgaactagtaagtataatgcaaatactccaaaatctgaaagaaattcaaaatccaaaatactcccggttctaagcattttggataagggatcctcaacctgtaataataaaaacttactgttctctctttaagacatatttgttaatgtatttctcttacattctctctgatgacacagtgagtttttttttttcttttaatagttttttgtaaagtcgctatgttcaggctggttttgaacccctgggctcaagatccccccactttgtcctcccaaatgctgggattgcatgtgtaagctaccatgcctgttggagcttcttaaatatggctaaataatgtgttagaatgttatcaagctttttgaaagcttaaataagtccacttactgattcctcctctgtccttattttactacccatcccttccactcccctagt

SEQ ID NO: 43786 - DNA, 1033 bp, Homo sapiens
atgtagtgagaccaccatctccaaaaacataaataaataataaaaaagaaaaccacatttttctctttgcttttgagtggagtctcgctctgtagcccaggctggagtacagtggtgccatctcggctcactgcaacctccacctcctgggttcaagtgattctcctgcctcagcctcccgagtagctgggactacaggcacgtgcaccacacctggctccttttttgcactttttaagtagagacggggtttcaccgtgttggccaggctagtctcgaacacctggcctcaagtgatccgttcccctctgcctcccaaagtgctgggattacaggcgtgagccaccacacccttccacatttttctcattttaagaccaaggctgacacctggtatggttgttcatgccagcactttgggaggctgaggcaggtgaattgcttgagcccaggaatttgaggtcagcctggacaacagtgaatgaaaccctgtctctacaaaaaaaatagaaaaattagctggacatgctggcgtttgcctgtggtcccaattacttgggaggctgaggtgggaggatcacttgagtccaggaggcaaaggttgcagtgaagcgagatggtgctattgcactccagcttgggtgacagagcaagaccctgcttcaaaaaaaaaaaaaaaaaaaaaaaaggaacaaggctggaggggcagaccctgtgtgtgacatgtcttgcttgctagtttgctagtggcacaaagaaagagctagaagacatcatgactttaagcctcttccgggaagtgacatatattacatctgctcacatctattggtcgaaaccagtcacggggtcaagcttgatgttaatgaagaggggaggtacattcctcttcagggaccttgtagacaagccacatggcagtgggtggagatgtaaaaatcctcttatggaaaggaggtgaatagttagaaactaatacaatctatcatatttgaaggttcaatgaatgttttctgggaaaagttatttttga

SEQ ID NO: 43787 - DNA, 1034 bp, Homo sapiens
tttcaattaatttaaatattacctcacttttttgtcattatggtataaggtaaggcactttaaagtggaggggtggtgatctggtttttttcttgtcctgtgaagacttggaatgttctggagaagttccactagctctaccaaatactgcattataccgaagtaccccacttttttttttttttttttttgagacggagtttccctcttgttaacccaggtggcagtgcagtggcacgatctgggctcactgccatctccgcctccagggttcaagtgattctcctgcctcagcctcctgagtagctaggattacaggcgcgtgccaccacgcccggctaactttttgtgtttttagtagagatggggttttaccatgttggccaggctggtctcaaactcctgacctcaggtgatccgcccatctcggcctcccaaagtactgggattaacaggcgtgagccaccgcgcctggccagtaccctactttttaatacattcgaatcggcagtggagtagcaacttgtgagaatccgacatatacttttccaatgtcattaatgttttgagccgttgatggatgctcacacactttcagatgatactttctcaggtctggttctagcagagtataagaaacatgccatagagaagagacaatttctaagtatatttcaggtactgagctatgtaaaaaatggctgtaggaagttaatttaggactggcaacgcaggctttttcatattattgaatgaatgaaattgaaatatatatatgaagagttttgatggtaacaatttaaaactgaaaccggaaacattttaagtggtatgtatttaataaacattcttcattttttaatttcccataacagcatttaaaactgttttaacaaaagaagtcttaaaacatattatatattggggggaaattgctctttcgggaatttctgcaagtggaagcactttgaggatggtttttaaacaattgtactgtatggttggcagattggcatatttctttattaggctat

SEQ ID NO: 43788 - DNA, 1043 bp, Homo sapiens
gtttttttggtttaaggcagggtctcgctgttgcccagactagagtgcagtggtgcgatcctggctcactacaacctccactgcctcctgggttcaagcaattctcctgtttcagcctcctgagtagctgggattacaggcgcccactaccacacctggctaatttttgtatttttagtagagatggggtttcactatgttggccaggctagtctcgaactcctgagcccaagtgatccacccatctcagcctcccaatgtgctgggattataggtgtgagccactgtgcccggccaggcttcccagtttctaagtcaaaaaaccaggaaagactgtggatgtggggttggatctgcagcgccggaaatgagtcccagggttgtaggcaggggaggatgtttgatcatctgctggaaggagcagagtggacatcccattataattcgggtgggtgggaaggttctggttgggaggggtggccctggcattccatgctctgcctgctcctaggtcgttgaggaagaggaagactcaggtgccccgcccctgaagcgcttctgtgtggaccaacccacagtgccgcagacggcgtcagaaagctagcaccatcccggccctccgcctcctggccctgcctctatttattgcattctggttctggccgcgccgcgttgctggggtaagggcaagcactggggtcaagagcctgcacacatgagccttccgggctggaaggctggcgtaggacttggggctgtagcatcatcttcctgaccctggcacctgtgtctacttgctcccgagaagaggagcgctcatgtcttttttgcaccccaagttggctggagcatcggccaccccaagattcatctgtgacctccaggcagcagtctctgctccagaatctctggacggagctgctggcagcttctgcgagaagagagagatgtggaaggcaccttctagaagagagcgtgcctcaggttacttgaacttgaacggagactgtagactcccggactttcccctaggactgggggcc

SEQ ID NO: 43789 - DNA, 1028 bp, Homo sapiens
aggctggtcttgaactcctggccacaagtgatctgcccacctcggcctcccaaagtgctgggattacaggcatgagccaccgcgcccggccaataggtcctatttctgaggttcactgagttttcagtgagatcatctgtatctcactgtcatagtcatagcagcacgtgacacacatacaacaaatgtcaagacccctcctcctccctaaacgccaaaggtttgaaggtgggcttcacgggagtggggaggagaagggcttacttggcttgacgccactaatgtcgggccttagggctcaagcaggaagggctctgccaccccctgcaggctcctatcctctaagattcttcctttcctgatccaacagtcatactcccacactctgaaatcgtcttggtgtcctgggagctccctggcactttgcaccgctcctggggcaagaaggactttccactttgcattgtctcgggttgtttgtttactttccttatctctcccgctaagctgtgggcaccctgcctgattcatccatgtgtcctgtcccagtatctgtctcagcataggtgcaaagggttccgcggctgagtgaagggaagaacttatcagtgttaaacaaagcctgccccagcccccaggaagccacatggttacagcctttccatgagaaacagtccagaggatggggtctctgggctggggaggggggcttcacttggccctgactttctgagagccctggacaaactttttttttttttttttgagatgggggtctcactctgttgctcaggctggagtgcaatggtgtgctctcgactcactgcagcctcctcctccggggttcaagcgattctcctgcctcaccctcctgagtagctgggactacaggtgcgcaccaccacgcccggctaattttttgtattttcggtagagacagggtttctccatgttggtcaggctggtctcgaactcccgacctcaggtgatccgcccacctcggcctcccaaagtgctgggattacagg

SEQ ID NO: 43790 - DNA, 1058 bp, Homo sapiens
caagctgctctgcagagacaagatccgcctgaacaacgccatctggagggcctggtatatccagtgtgagtggctaccaccagcctcccaagccgggagggactgccccctccaaccctcctgccagagggttctacatggtggctgcccaggaaaatccccggggtcctcaaggccagcactagcagagttctgccaaccttttttttttttttttttttttgagacacagtcttgctctgttgcccaagctggagtgcagtggtgccatctcggctcactgcaacttccgcctcccaggttcaagccattctcctgcctcagcctcccaagtagctgggactgcaggcacccaccaccactcccagctaatttttgtatttttagtagagacggtttcaccatgttggccaggctggtcttgaactcctgacctcaagtgatctgcccaccttggcctcccaaagtgctgggattacaggcgtgagccaccacgcctgaccctgacagccttttagggggagaccaggcccccagcaccaggactcctgaatagctcctgacctccagcgggtctcggggaataggtcccaaagggtgtttccactgtgaagctgggcacagcagaggtcacccctcagtagcactagggtaggctgagatttgaggtacagttcaaagcccattttgcatcccattagcatagttgggtgccttgaatgcgagggtaaaaagggccattagacactagcggggccaactgcatcactttgtaaatggagaaactgaggatcccgcatgggtctccaccagcctttcattgaagtccttcctgaatatccagtaggtgcccaccatggccaattgggcagaggggatccagagaggccatgccatctcgtggaaggaactctggacttagagttgcccagagctagttcctccaccccgtctctgccccttgctggctgtgtgacttcaggctagttgcctagcctctctgaacttgtttccttatctataaaaacgaggccacggtggctcacacctgtaatccc

SEQ ID NO: 43791 - DNA, 1030 bp, Homo sapiens
gagcctgcagtgagccgagatcacgccactgcactccagcctgggcgacacagcgagactccgtctcaaaaaaaaaaaaaaaaaaaaaaaagccaggtgcggtggctcacgcctgtaatcccagcactttgggaggccaaggcgggcagatcacctgaggtcaggagtttgagaccagcctgaccaacatggagaaaccccgtctctactaaaaatacaaaattagccgggcttggtgacacatgcctgtaataccagctactcgggagtgtgaggcaggagaatggcttaaacgtgggaggcagaggttccagtgagccgagatcgctccattgcactccagcctgggtgagaaaagcgaaactccatctcaaaaaaaaacaaaaagcaaaaaaaaacaaaaaacagcagggaaccatgcattttcagaaaaatgggacaaaggtactttttcgtgggaatggactgctttgcaccctggaagcttggaccaggaatgggaagccagggcaggaggggcccatcctgccccagactgtgctgagaaggagagcatgggggagaggtcttccaaggctgctcagtctttggtcatatcagcaggaactcagcggttctggtgtcccttggcctccagcagctgaagtgccagcagtgaagagagtagaaccaagaccaaggtgggatggaggttctaaagtgggcactctcagtgcttaaactgtgcctgtactagggggacactctgactgtctaggcctgaggctctaaagctcccacagcccaatccctctagctacagccgacatctctaaaaagcccatcaagcagttgctgcccccacatcgtcagggatggggaccatccacctcacagaacacccctaactttttttttgggtggggggacggagtttcacttttgtcgcccaggctggagtgcagtggcgtgatcttggcccactgcaacctctgcctcccgggttcaagcaattctcctgcctcagcctcctgagtagctgggattacaa

SEQ ID NO: 43792 - DNA, 1030 bp, Homo sapiens
gttcaagcgattctcctgcctcagcctcctgtgtaactgggattacaggctcccaccacacctggctagtgttttgtatttttagtagatacggggtttcaccatgctggccagactgaggtctcgaactgccgacctcaggctgtctgcccgtccagcctcccaaagtgctgggattgcaggcatgagccactgctcccggccctattatccatagttctaatccacagggattacagcataatgctagcagggccaggttcatccttgagacagtgtggctggctgtcacctggtcctccctttaccagccagccccattgcacactgtgcagcccatcccctcccagaaatagagtgacaaactctgcacttaagtcccctgtttctgtttaacttgcagtgcttatcacaggcccttccttaattttttaaacaaggctgcttgaggctggggtaaattttggggctttgggagtacacaggactactgagggacggggagttggtggcttggtgttcatggtggagacttggttctttacgcagagcaggctaaaggcgtgttttttctgctctgtttctaattcatgttaagtagttggtcatcactttggtcagagctgctgctgaagctctcttaactgtgagtcactggacgttggcagggagttggctgtgagattgtaggtgctcaagtgtttctgttcgggactgagtgtgaatctgtaaaaggggaaaatcctcgcaagaggtctacgagaaggatgagggcccaagtctagggtctaaacaaagccaggagtggtttggtatattactgagtgcaatcattgcgtgccattcctgcactcaatgtattgtgtaaaatccttaggtaaaatgggataaacccacagctggtcctacttggcctcttgaaaaccattccatcattgtgccaatctagcctgaaaaggaaaaaaaaaaagggaaaccattgattgtctcttgcctcggaggttgggggtatgcccctactccaggcttt

SEQ ID NO: 43793 - DNA, 1029 bp, Homo sapiens
agactagattgagtctcatctggtcatctggtcccctggctggccacctggctggcagccctgcctgctgatccctgggagcaccccccaccccgctccctgggctaggaactagaaccctaaggtcccctcctatggaaaatgtcaagtgtcctttgggcatttgaccccacggcttgtcttctccacccagaggctccctgagttggagcctgtctgccccattatgtcatggttgcctcctgggcatcctggagccgggacctgggctcccctgccttcatgtcccccacttgctctggcaccacggcctccactttgcctccagacctgttattcctggccgagcgcccagcccctggtgtaaaccccatgaggtttcaaaggaagaagatggtccctcaagtcgcatatgggctctaaacacttcccccgcggcccctgtggttgccctcaagtttcctgagctccgttgagtcagaatgagtgttttcctggtgacggatggctgtgtggtgtaatgtgctgatgtttaggcgcctggtaggttacctgagggtgtgtgtgggaaccaagtggtcaggggaaccatgggcccctacataggataatagcctctggcatgtcagccttcatccccctagctgaaggggaaactgaggcacaaaagaaacacggcttgcctgctagagggaggggtggtagaaaagggctttgcctcatccctgaagatagtcagactcaggcctggctgacactgggggacagccagtggagctggggttgtgaagcgtttgaacccagatctttttgctctgatgtctgtctctgttactacctcctcgccccctgattagatggtgaagccaggctttgctttgaatggtctgaggcttccgctccagacacccccaccctccccacacaaggcattcagagcccagggaggctgtacccattgctgggtggccctgcccagggagggctttctagcagacaggtggacggctggcaggcaggagcccaccc

SEQ ID NO: 43794 - DNA, 1035 bp, Homo sapiens
ccttcaggcttcaaagtgggggcggcctttgagcagtggggagtgcaggggcacctggccaaggaggcctgctgctcccagccccagcctgcctctggctgggcagcctcacctgtctctgtggttttctgcttgcaaatgagcacattctcgtaggaattggcatcatcatctgcaggagagagaggagtgggcacgggggtgtgggcagaccctgcaaagcctggctcatcctcccgctctgtcctgccttccctttgcaggggacctcttccgccaagccctagccctctgggtcccccgggacctcaagccttcttctggatgagcttcctaatgggtgctggcctggtgcccctgcatgctcttccctgagccctgagctcctctgtcttctttgtttcttgttgagacggtcttgctctgtcacccaggctggagagcactggcaaagtcagctcactgtagcctccaactcccggctcaaacgatcttcctaccccgcagcctcctgagtagctggaactacaggcatgcaccaccacgcccagctaacttttaaaattgtttgtagagaggatctcgctgtgttgcccaggctggtcttgaacccctaagcttaggcaatcttcccaaaatgttgggattacaggcgtgagtcactgtgtccagcctctgtcttctgagatcccctccatatgcactctggagggggtactctgcgggggctgcaattcaggcccatgccgggtggctggagagagggagggaggcaggggcagcctcaggggttcatctctataatcaggagctctccctagagccactgccgggaaggggctggactcttccagatagggcagggcaggctgaggatgctttgctcggggacccaggctgagtatggcacctcagcgcctggcaccccatcttggccttgtaatggggaagctgggctctgactgatgccccacccaaaatccatcagtgatgttgggggtcctaagaaatgagcactgccagcctggcggggtg

SEQ ID NO: 43795 - DNA, 1046 bp, Homo sapiens
tcacattgtgggtgatgacgtgggcccaggggatcccctggcccctaaagggcaggcaggagcactgtgctgttccccagtagccttcagaccccacaccctgggttttttctgcaatgctgtgccctgctccccacttctgcccctggagggtgggtagtaaccctcaaagccaggctgaggaaaaggtttctcacttactctcccatgtcagcaaaacatttttctcttgggaattcttttgaaaactgcttccgcatcctgataactccgcgtctaaatgccatttgagagattcacttcccccttatttgggggaagaaactgggaagggctgtccaagctttcagcctatagctgtttcttaccaggtttgtggacaacagacaagcgatttttgaagcatctgggtagatctgggcagtgaatgcattttcgaggccacttaggaaggggaggcccgctcagaaacaggggtgatggttcgggccctgttttgtcttggagggtcactgagggctcaggaaaccatggcttccaccgggaaaaggcaagggcaggtgtgggtgacctctggagccatcaggaggctttcattgggaagatgtaggggtcgacattgtaccagaggcagagcctcatgccactgcggagaatgctgcagggaggacggagtccccagcaccatgcacctgcctgctggagtagcctgaccccttgtttagggtgtcaggctgaggctgggggaccttttgtagggaaggccagttcctactccggggtggaggtgggaattggcccaaaagacctcccagttctaaagtgaattccaagtggttctgggcaactgaccccccaagtgatctaagacagatgacttgtgactttaaagctgtccccaagtgagcatccttcacaggcccttggttgctctcttgttcatctgtcttatgtttgggaaatttatcttcctggtgccggaagcacttctctttgatggtgagaggagcattccccaaactcatcctggttgctggagaatttga

SEQ ID NO: 43796 - DNA, 1037 bp, Homo sapiens
ctgtgcctggcgaaataaattttttttagggccaggtgcggtggctcacacctgtaatcccagcactttgggaggccgaggcgggcagattgcttgaggtcaggagttcgaaaccagcctggccaacgtggaaaccccgtctctactaaaagtataaaaattagccggacatggtggcgcccaggctggaatgcaatggtgcttgtaatcccaggtactaaggagtccaaggcaggagaatcgcttgtacccgggagacagaggttgcagtgaactgagatggtgccagtgcacaccagcctgggcaacagagcaagactctgtttcaaaaaaaaaattttttttttttaatgtggcagtaattcatgttctttgaagaaaatttagaatatattaatagtttgctgcctttttatttatttatttttttgaggtggagcctcactctgttgcccaggctggagtgcagtggcatgatcttggctcactgcaacctctgcctcctggattcaagtgattctcctgcctcagcctcacgagtagctgggactacagacgtgcgccaccacgcccagacaattttttttttttttttttttttgtatttttagtagagttgacgttttgctgtgttggccaggctggtcttgaactcctgacctcaagagagccacctgcctcggcctcccaatgtgctgggattacaggcatgagccactatgcctggccattaataacttgctttttttcttctctttttatatactatcaatgtttacacagttgagatcataatatatataatttttgtatcctggtttttccttttaatgttgtaggcattgctctacattatgataatctggtaaacaggcttttttgtattttttaaaattttttgtagaaatagaggtcttactttgttgcccaggctggtctcgaactcctggtctcaagcggtcctcccgcatcagccttttgagatgggaggattgcttgagcccaggagttcgaggctgcagtgagctatgattcca

SEQ ID NO: 43797 - DNA, 1045 bp, Homo sapiens
tcccagctactcgaggccaaggcaggaggatcccttgagcccaggagtttgacgctgcagtgagctatgatcacgccactgcactctagcctaggtgacagagtggacacccttactttgagaaacaaaaagagtttgggcttcatagtgagggcagggaggagtcaaggatttcagttagggaaaaatgttttaatagggccgggtgtggtggctcacacctgtaatcccagcactttgggaggccaaggcgagtggatcacctaaggtcaggagttcacgaccagcctggccaacatggcaaaaccccgtctctactaaaaataaaaattaggcaggcatggtggtgggcgtctgtaatcccagctactcaggaggctgaggcaggagaatcgcttgaacccgggaggcggaggttgcagtgagccgagattgtgccattgtactccagcctgggcaacaagagcaaagctccatctcaaaaaaaaaaatgttttaataggtgtgtactttaggaaagtggtcgtggttacaggatgggaaatggatttgaatgggagcatggagaccacttaatggcccattgatagcaatcagacgagataatgggcttaagaaagtggtagccgggatggagagaagggatggagagaagtaaaggacgctggagacgaaggaggaggatggtgaagccctggttattgaagtactcagggtgaggatgaggccaaaccaagatgatggcaacctcaacttcatggcatagacagtccatggtgggaaacatgggtggggcctcaggtttgtacaggagaatgaagtgttcagttttgaagatgccgaggtgagtacctgtagtcccagctactcgggaggccaaagcaggaggatcacttgagcctgggaattggaggctgcggtgagccttgatcacaccactgcactccagcctgggtgacagccagagtgcatctctaaaagaataaaaagaacttgaggtgagagttccatggggcatccagtccatgtggataaatttgtagcc

SEQ ID NO: 43798 - DNA, 1088 bp, Homo sapiens
tctttgattctatgtttttgatcctcctggcactccagacctgggtgatatgcaggagagcacactgatagaaatccttgtgtccagtgcccagcaactcctgcctcagcctcccgagcagctgggactacaggtgcccgccaccacgcccggctaacttttttgtatttttagtagagacgggttttcaccgtgttagccaggatggtcttgatctcttgaccttgtgatccacctgcctcatcatcccaaagtgctgggattacaggcgtgagccactgcgcccagcatgttagacaatttttaattcatcctctctgtgctgttgttttctcagctgtgaaaggaatattctggtggggacaaggttacagagttgctgagagggtctcatgacatgaaggtactggccttggcacagtgcctgggggggcggggactccgcacatgcctgtgatgtcacagttactgtcagttcacagcgaaccttccctccttttcctgttgactttcccacactcctgtaaccatccctccctcccttcttcctctctctctctctcactcacgcacacgcacacacacacacacacactccattcactgtctccatgactctggagtaaactaacgtctcgagttgccattggaagccccattgtcctcattttgttttgttttgtttgtttgagacggggtctcgctctgtcccccaggctggagtgcagtggtgcgatctcagcccactgcagcctctgcctcctaggttcaagcgattctcctgcctcaccctcctgagaagctgtgatcataggtgcccgccaccacacccgactaatttttgtgttttttagtagagacagggtttcactatgttggccaggctggtctcgaactcctgacctcaggtgatccgcccaccttggcctcccaaagtgctgggattacaggagtgagccaccacgcccagcctccgttgtcctcatttagactttcctgggttataggcacttttgacttcctggggtccttcttcagttaaaaaaaaaaattagaaaattaggccgggcgtggtggcacatgcctgt

SEQ ID NO: 43799 - DNA, 1038 bp, Homo sapiens
tcagcctcccaagtagctgggattacaggcgcttgctaccacgcctgactaattttttgtatttttagtagagatggggtttcaccatgttggccaggccagcctcaaactcctgacctcaagtgatccagctggcttggcctcccagagtgctgagattaccggcgttagccaccacgcccagccttcccgttttttctgattggcctgacttcttctttttctctttggtagcctccacctccccagcttggctattcgatcactgccgaggacctagacttagagaagaaggcttcattacagtggttcaaccaggccttggaggacaagagtggtaaggagcacagatcgttgcactctcgagaggtttcaggtgtctgttttctttggttttattttggtgtttggaaaaatgggtttctctgggaaaatccgaagtagagttccatgttttcttgtggtctttctcacctgagatatccgtgttggtcttcacgggaactggacagcagggaccactgcaatttagggcagacattcctccatgagctgtgctgagagcctgctctccgacaggcatgtggaaagaagtcccagacaagccaggactgcttcacctttctttctttcttagatgctgcctcgaactctgtcactgagaccccacctaccactcagccttcatttacctttaccctgcctgctgctgcaactgcctccccacccacctccctcctggccccaagcaccaacccactgttagagagcttgaagaagatgcagactcccccgagcctgccaccctgcccaggtgagctggagtggggccgtggatccagccttctgagcagcatccccggcttgggttggaataagggcgtcgtgcctgtcagtcgctggagattgctctgcaggccgaacgcaccctggctcagcacaccggagcgggcctacgtttaacagcgccggagcccacatcaggaagtgttagagaaggggtgctgcgacgctcaggatctgaagcctggcttagct

SEQ ID NO: 43800 - DNA, 1059 bp, Homo sapiens
gcccaggagttcaaaaccagcctgggcaatatagtgagaccttgtctgtacaaaagaatctttaaagaaatttttttaaataaagtaattggttagcaaaagtttactaatcaccttctatctgttggacattaggattgtctctaactaatagaaaatacagatcattgagtgatcaatataggccagcagaacggagtagaaagcccggaatgtaaagcagtgcatgtgtgcgagctgattcgagacagagctgtgatgtagataaacggacagagggtgattcgaaaggtagactgagtccagcttgtattgggtcataaaagagatttataggcatttagaattgagcgcagggtttttaaacaagtggtcatgattttttggaaaggggattattgcatagtataaggaacagagcaggctttgctgctggacagacttagattcaaatcttggctctgaggctgggcgggatggctcatgcctgtaatcccatcactttgggagatcaaggtgggagaacctcttgagcccaggagttcaagactagcctgtgcaacagagcgagactgtgtctcaaagaaaaggaaaaaaatgcttggctctgacatctagtagctataaggtcttgggcagacaatcacataacatctctttttcttatctctgaagtgctgttgcaatgattgagggtaatatttaaaaagcacctattacagtggctgtcagtaagtgggtatccagtatacagcagccagacaaaaagatgtaaagcatgtaaggagaaacgtttttgagacaaggaaaattttgagatgagttcatcagcccagaaggctctgagtcatataaatgaacattaataaccataataccattacccctcttaaattattaaccttaatattatttaatatctagttattatttttgataagcaaacttttccagctttggactatgggagccaaactggctcctgtatcctttattttgatcccagcagtcttcgacagatagcttcattgctttttgcccaccttcccaaagtccatt

SEQ ID NO: 43801 - DNA, 1080 bp, Homo sapiens
aaaatgctttgagaataaggtctgctctgctgccttcaataccagaaaccacactgggaatgtgggctgccatcttcaaggttcccactgaaccatggaaggttgtggggcaagggcaagtaaaataacccagttttcctaccattttgaagttgcttttttcttgattcagtgttcatttggagtattagtcagttttcacactgctggaaagaactgcctgagcctgggtaatttataaagaaaggaggtttaattgactcacagttccacttggctggggaggcctcaggagacttacaatcatggtggaaagctaacaagaagcaagtaccctcttcactggctggcaggagagaggggagagtgcaggggaaactgccacttaaaaaccatcagatctcgtgagaactccctcactatcacgagaacagcatagggcgaaccgcgcccgtgatccagtcaccttccaccaggtccctccttgacccctggggattacaattcaggatgagatgtgcttggggacaaagagccacatcagatgatctggttattgtaaacctttgattatttttctacagttctcatgaagttgattcagacagttttgcttggtttatcaatgtttctgtggggggatggggacttggagatacctactctgccatttttgctgataccagtcaacatgttatattttcacttttacataattcaatatgttttccagtttcccttgcgactcactctttgacccatgaattatttagaagtgtatttaatttccatgtgtttagagattttctggtttctttttaaaattgatttagtttaattattttacagtcacagaacgtattttgtatgatttcagttattttacatttcttaagatttgttttggccgggcatggtggctcacacctgtaatcccatcactttgggaggccgaggcaggtagatcacctgaggtcaggagtttgagaccagcctggccaacatggcaaaaccctgtctgaaaaacacaaaaattagccaggcgtggtggtgcatgcctgtaatcccagctacttggaa

SEQ ID NO: 43802 - DNA, 1054 bp, Homo sapiens
tgtgccaggccggactcaggctacttttttatttttttttttgtagagatgggatctcactgtgttgccagactggtcttgaactccaggtctcaagcgatcctcctacctcagcctcccaaggtgctgggattataggcatgagccaccacacccagtccacataccattttaaagtgttacaattcaggctgggcacggtgtctcacgcttataatcccagcactttgggaggccaaggcgagcagatcacctgaggtcaggagttcaagaccagtctggccaacatggtgaaaccccaatctctactaaaaatacaaaaatagccgggcatggtggcgcatgcctgtaatcccagctacttgggaggctgaggcaggagaattgcttgaacccggtaggcagaggtttcaatgagccgagatcacgccattgcaccccagcttagacaacaagagtgaaactccatccaaaaaaaaaaaaaagaactgtagacaggatagtttcatctacctgtcttcatgtgttcaatgactctctcttccatctgctctaatgaattcgaaatagtctggtgaatttttcatttccatttctatacttttttttttttttgtttttttttttgagatggagtttcgttcttgtcacccaggctggagtgcaatggtgcgatcttggctcactgcaacctctgtctcctgggttcaagcaattctcctgtctcagcctctcgagtagctgggattacaggtgcccgccaccatgcctggctaatttttgtatacttttcagcttcagactttgattcctttcaataatttctatttttttcctttctttttttctctaagctttagtttgtctataataaattcttttattgagacagggtctcactctgtcacccaggctggagtgcagtggtgcaatcttggctcactgcagccttgacttctcatgctcaggcaattctcccacctcagcctcccaagtggctgggactacaggcgcatgccaccacacttggctgattgtttgcattttttgtaga

SEQ ID NO: 43803 - DNA, 1035 bp, Homo sapiens
caccacgcccggtgctttacattaaatttaaacatacttgagcaccagattttttgattttctctacagtcgtcatatgagtgaaggtggtaatatgggacactgcattttctaaaactggccaagcaagagaaccatctgttgagcttttggcattttcagaatattaggcatcactccaaaacctactgaatcagaatctcaggggttgtgccctggagaattattttttaaaagctcactaggtgcttctgatttagctcgttctctgatggcatttggataatcagtcctaaggccccaggccctgctctgtcattgactgtcattttgagtgagtcatttgatctctgggtctttttcccacttataaaaaatgagggtgagagctgggtgcctagatttgtttgtaatatttaatctcattttgatgcatgcagggtctgtgctaatagcctcccttttattcctgatgctggtcatttgcatcctctctctttgctttttttttttctttgattagtctggctagggatttcttatttttaattgatcttttcgaagagccaacatttggtttaattgattttttaaatgtttctattttaacttcactgatttctactcttacatttttttttttttaatttttattttttgagatggagtcttgctctgtcacccaggctggagtgcagtggcacaatcttggctcactgcaacctccacctcctgggttcaagcgattctcctacctcagcttgggagtaactaggattataggcacatgcaatcacgcctggctaatttttgtatttttagtagagatggaggtttaccatgttggccaggctggtgttgaactcctggccttaagagatctgcccacctcagcctcccaaagtgttgggactagaggtgtgagccacccctcccagcctgctcttatattaattctatttccttctttctgcttgttttgtggttattttgctcttctttttctagtttcttaaaatggaagctcagattctt

SEQ ID NO: 43804 - DNA, 1054 bp, Homo sapiens
gttttgaagaaactgggttggttatcctcagtttggattatgttacccttgtttcacctttagcacattttttaaaaatatcttgtatgtcttggtaaaattggtagtttgatctggaagtctaatcaggtttatgttcagttcttttcacacaactataccatacgtggcatttgtctacttctggaggcacgtgttaccttctttgtttttgtgaagttaagaactattgacttgattattgctgtgatttactattgctgtgatttgccttcattaggggaggcaaaatggtgatctgctaattctaccatttcttctttatttactagccaaaatacttttcttttctttttttggagacagagtctcactctgtcgcctaggctggcacgtttatggctcactgcagcctcaaactcctgtgctcaagtgatcctcccacttcagcctcccaagtagctgggagtatagtcatatgccacaatgcccagctgattttttaatttttagtagagacaggtttctctatgttgcccaggctggtcttgaactgggctcaagtgatcctcttctttaacctcccagtgttgggattataggcatgagccaccacggctggcctagaatacttttctaaagataaatttctattctctatttgtttatgtaattcatgcaggaaagacagtttctaaaatattgagtaggcttttaagcaggagggtattttgttttgttaccatcatgagctcatgggtttaaacagatagtaaatatttcagtacatagaagttgtgattctttttgaaaattaagtggttccatctttggccagacggaatccctttaagttggtttctgagtccttttgaaatatatttgatatatatgatagcaaatatatacatataatatatgtttgatagcaaatatatacatatatatttgatagcattattttctatttagcattttattttgaaatcatttcagattttcagaaaaattgcaaggattttacaaagaaatcccagatacttccttttgttca

SEQ ID NO: 43805 - DNA, 1050 bp, Homo sapiens
cattgattataaggagaaaccaattttgttacttgtggatttaaaagattttctaggacttggaaaaatttcttcattcaagttgatataattgtggatagctttcctaacaacaaccattaaattactgacttatggcttattattggtgcttatgtaagcagagggcctgctgcccaaggagaacttggtgcatataatttttccagggacggaaatatcgtgatccaagtaaacagaattctgtttttactgttgagtcctagatcatggggggaatgaatgacatgatcatccttcagatatttgttcgtctttttgtttgggttgcacagcaaacaatacaaacagttactctcttgtgaagatttcctcatttctgtttctcatttcagttctcagtgttttcgttttgtccttttcactttgctgagtcagtcagtaaagatgaccagtgatttaattgcagtcaaatccagcgggcaattcctagccccttcctcacaggaccctttgtctgcctttgacatccgttacttcgaaactgatattttctccatggagtctctcttttcttggctcttaaaaagattcatctgtaagtatttctgtttgtctttaaatggtgaagtcttttgttttgtttctttttttctttttttgagatagggtcttgctgtgtcatccaggctggagtgtagatgtgatcaaaactcactgcagcctcaatctcctgggctcatgcgatcctcctgcctcagcctcccacgtagctgggactacagatgcacgctgccacacctggctaattttttttgtattttagtagagactggctttcactgtgtcacacaggctggtgtcgaactcctgagctcaggcagtctgcctgcctcggcctcccaaagtgctaggattacaggcgtgagccactgctcctggcctagagatgtattctcactgtattgctcaggctggtctcaaactcctggcctcaagttatcctttcactttggcctcccaaagtgctaggattacaggtgtaagcca

SEQ ID NO: 43806 - DNA, 1057 bp, Homo sapiens
cttagtatttattactaacctcccttaagcagcaacagcctacaaagagatgcttggagcaatcagaacttcaggtgtgactctagcaaggctcatctttctgcccggctacatcagccttcaagaatcagaagaaaggccaaggtgctggactgttactgacttggatcccaaagcaaggagatcatttggagctcttgggtcagagaaaatgagaaaggacagagccagcggctccaactcctttcagccacatgccccaggctctcgctgccctgtggacaggatgaggacagagggcacatgaacagcttgccagggatgggcagcccaacagcacttttcctcttctagatggaccccagcatttaagtgaccttctgatcttggaaaaacagcgtcttccttctttatctatagcaactcattggtggtagccatcaagcacttcccaggatctgctccaacagaatattgctaggttttgctacatgacgggttgtgagacttctgtttgatcactgtgaaccaacccccatctccctagcccacccccctccccaactccctctctgtgcattttctaagtgggacattcaaaaaactctctcccaggacctcggatgaccatactcagacgtgtgacctccatactgggctaaggaagtatcagcactagaaattgggcagtcttaatgttgaatgctgctttctgcttagtatttttttgattcaaggctcagaaggaatggtgcgtggcttccctgtcccagttgtggcaactaaaccaatcggtgtgttcttgatgcgggtcaacatttccaaaagtggctagtcctcacttctagatctcagccattctaactcatatgttcccaattaccaaggggtggccgggcacagtggctcacgcctgtaatcccagcactttgagaggctgaggtggtaggatcacctgaggtcaggagttcaagaccagcctgtccaacatggtgaaacccccatctctactaaaaataccaaaaattagccgagcgtagtgacgggtgcccgtaat

SEQ ID NO: 43807 - DNA, 1031 bp, Homo sapiens
tgaccctgaacagggccaggcaggtttatggaagaagtcgggtgttcaggtttatggaaagggcttttgttgttgctgttgttgttgaggcagagttttgctcgttgcccaggctggagtgcaatggcatgatctcggctcactgcaatctctgcctcccgggttcaagcaattctcctgcctcagcctcctgagtagctgggattacaggcatgcgccaccacactgggctaattttgtatttttagtagagacggggtttcaccacattggtcaggctgatctcaaactctgacctcaggtgatccgcccgcctcagcctcccaaagtgctgggattggaggtgtgagccaccgcgctccaccctgatggacatttattacatgcaaactgacgactatctgcagggagtgggtgtgtttggaattaggcctggggagaagcggttccaggattccatatatggggaatttaaggtgtggagagattgaaggtgcccctgaacagggccaggtgggtttacggaagaagtggggtgttgaggtttacagaaagggcattttaaacaaagattgctgctgtcaaggcaagcaaaaggctggctaaatggaaaggggctgggagatgctgcctggaggaggagccaaggggtcaaggtgcaggactccctgcagggaccaaggtccttgatgaggagcagaagcacactctcactttttttttttttttttttttgagatggagtcttgctctgtcacccaggctggagtgcagtggcgtgatcctggctcactgcaacctccacctcccggattcaagcaattctcttgcctcagcctcctgagaagctgggattacaggcgcccaccgccacgcccagctaattttgtatttttagtagagatggagtttcgccgtgttggtcaggctgatcttaaactcctgagctcaggtgatccacccaccttggccccccaaagtgctgggattataggcgtgagtctctgcacctggcttgcacacccttactt

SEQ ID NO: 43808 - DNA, 1114 bp, Homo sapiens
ggctggagtccagtggcgcaatcttggctctctgcaacctctgcctcccaggctcaagcgattctcctgcctcagcctcccgagtagctgggattacaggcgtgcgccaccatacctggctaatttttgtattttttgtagagacggggttttgccaggttggccaggctgatctcgatcaagtgatctacacaccttggcctcccgaagtgctgggattacaggtgtaagccaccatggccggccctgcttatgtttctaataacagtagttgccacaaagcattgtgaatattaaagataaggatgcatgtctggcaatgggcattccctccccttactgagctgggaaggagctagaagaaggggagtcttataggcaccagcgtgggggatgctaggacacctagtgagcccaaggccaaacatttttgcaggcttcaggatttgggggaaagccatttgcaagattgctctggtttgccataaagctttcaaccctgggactggccagaagtaggacgagacaaaatgacccaaagcagtgtgtgaggacacgtcaatgtcacttgatgtgtttccacctggtgaatgactggcgagtcattggaatttcactgtacttggtaggccctggcccttttcacattcacatagtcctgccttagtttgctttcttcctgttttttctttgtttgtttgtttttgtgtgtatgtgtgtggtttttttgagatggcgtctcactctgtcacccacactggaatgcagtggcacaatcatagctcactgcagcctccccaggctcagatgatcctcccacctcagcctcctgaatagctaggattacaggtgattttttttttaatcttttctagagacagggttttgccgcgttgccaggctggtctggaactcctaggctcaagtgatcctgctacctcggcctcccaaagtgttgggattacaggcatgagccacggcgcctggcctcctgctgttttaacagcctttttcctgcctctttttctcccttggccgccactgcacacatgccaatacccaaacccagcgacctctgtgcctcctttcctgcccgcaaaattcagctgctggg

SEQ ID NO: 43809 - DNA, 1047 bp, Homo sapiens
ggagcagaggggagggaaggggaggggaggggaggcgaggggaagggaggggaggggaagggaagggaggggaggggaagggaggggaggggaggagaagggaagggagaaagaaggaaaggaaaggaaggaaaggaaggaagagaaagggctttagctaaagtagcagaatggctacacaccttcccaagattagctgcatgcataatagtaaagaaataagaatgagaaagacccacaaggacaaagaaaatgagagagggatcattatcaaatagggtattttaacacattttggaaagaaaagaagaaatgataggccaggcatggtggctcacacctgtaatcccagcactttgggaagccgaagtgggtggatagctttagcccaggagttcgagaccagcctgggcaacatagtgagaacccatccctacaaaaaatgcaaacattagccgggcatggtggctcacacctgtcccatctactcgggaggctgagtgaggcaggaggattgcttgagcctgggaggtcaacactgcagtgagccatgatcacaccactgcactccagcctgggtgacacagcggaaccgtgtctaaaaagaaaagaaaagagatgctgacaggaggaaagcaaatgccaagagagacttgaactgggagacatcatactggaggcacgggggcagaactgaaggcaggtggagaggatgtctaagaaccagtaccagccaggcacggtggctcatgcctgtaatcccagcactttgggaggccaaggcaggtggatcccttggggtcaggagttcgagaccagcctggccaacatagtgaaaccccgtctctactaaaaatacaaaaattagctgggtgtggtggtgcatgcctgtaatctgagctacttgggaggctgaggcaggaaaatcgcttgaatccaggaggcagaggttgcagtgagccaaaattgtgccaccgcactccagcctgggtgatagagtgagactccatctaaaaaacagacaacaacaaaaaaaactggtaccgc

SEQ ID NO: 43810 - DNA, 1033 bp, Homo sapiens
ccactgtgcctgaccttggtagcatttttatgagaatgaaatgtgaatattctcatcccatccggagaggctacagcagtcattcttgtttaggggttaaaagttttcaccgggtcaggggccgggtgtggtggctcacgcctgtagtcccagcactttaggaggccgagacgggcggatcacgaggtcaggagatcgagaccatcctggctaacacggtgaaaccccgtctctactaaaaatacaaaaaattagccgggtgtggtggcgggtgcctgtagtcccagctactcaagaggctgaggcaggagaatggcgtgaacccgggaggcggagtttgcagtgagccgagatcgcgccactgcactccagcctgggcgacagagcaagactccgtctcaaaaaaaaaaaaaagtgttcacctggtcactgtaaccccaggagacgtttctgtccccttctcgttggttttcctcaggtgttgtcttttgtctctgccgtggctgtgttttgagtgactgtagatggtaagctccatgtcagttaaccagcaaatatgtttttcaggactcactgtaagtaccaggtgtgaaaaaacagatcccaccctcatggagactctgcttggtcccttgaggacaggagacctgtcatcttcttctgctttctctgcaaaggcccatcagggttctgggtgagcaggttagctggaatgtcagtctgccctcaacagtgcccttcatgccacagaaaaggtttcccaagtgcctacagggccaggcgccacaagtcagggctgaacctggcttgattgctgggttcgagttgctcttggaccccaggaagagctgacgggctcatggtcaccgcagtcactttcataaccacagtagcagaggatgtgaaaagggtgggatgagcccaggaagccagcatgaactgtctcaagctgtttattcaagaactcggtgccggccaggcacggtggctcatgcttgtaatcccaacactttgagaggccgatgcgggcgga

SEQ ID NO: 43811 - DNA, 1075 bp, Homo sapiens
ggctgaggcgggcagatcatctgaggtcaggagaccagcctgcccaacatggcaaaacctcatcgctaacaaaaactcagccaggcacggtggtgggcacctgtaatcccagctactcaggaggctgaggcaggagaatcacttgaactcgggaggcggaggttgcagtgagccgagattgcgccactgtactccagcctgggcgacaagagtgaaacttcgtctcaaaaaaaaaagaaaaaaaaaaaaggtagagatcctgctgttacatgctacaacatggatgaaccttgaagacattatcttaggcaaaataagtgagtcctaaaaagacaaatactgtatgattccacttctatgaagtgcctggagtaatcacaaacatagagacacaaagtagaatggtggttgccaggggcttgggggaagggagatggggagaaattgtttaataggatagagtttcagttttgcaagaggaagagttctgccgatggatagcggtgatggttgtacaatagtgtgaatgttctcagtgccagtgaactgtacacttaaaaatggttcagatggtaaattttatattacgtgtattttaccacaacttaaaacttggaaaagaaagtaaaacgcatttgtacttatttaaagatgtattaaaacatgggataaggtggaattccaagcttttaaaaaatctgtttctggaactggagaatttgcattatccacatagttggccaggtgcagtggctcatgcctgtaatcccagcactttgggaggctgaggcaggcagttcacctgaggtcaggagttcaagaccagcctgggcaacatggtgaaagcccatctctacagaaatacaaaaattagccgggcatgatggcgggtgcctgtaattccagctactgagacgggaggatcgcttgaacctgggaggtggaggttgcagtgagtcgagatcaggccactgtactgcactccagcctgagcaacagagtgagactccgtctcaaacaaacaaacaacaacaacaacaagaaacagttgattaagctgttatgtaggctgggt

SEQ ID NO: 43812 - DNA, 1044 bp, Homo sapiens
tggcaaaacaacaatctacagatttattgcaatctctatcaaaatcccaataatgtttttgcagaaacagaaaaacccatcttaaaattaatatggaatctcaagggactctgagtagccaaaaccatccagaaaaagaaaaacatagctgggggactatgtttttcctgatttcaaaacttattataaaactatagtaattaaaacagtgtggtactggcataaagacaaacatatagaacaattaaatacaatagagagcccagaaataaactctcctcaatatatgattaaatgatttttcaacagagtgccaaggccattcaatgaggaaaaaacttttttttttcaccagatagtgctgggaaaactggatatccacatgcaagagaatgaatttggacacttatcttacaccatatacaaacattaactcaaaattgatccatgacctaaatgtaagacctaaaattataaaactctaagaagaaaacacggggcaaaactgtcgtgacatttgatttggcattgatttctgagctatgacaccaaaaggcacaggcaacaactacaaaaccagacaaactggacttcatgaaaattaacacttttggggcatcaatagacactatcaacattaaaaaaggcaacctacagaatggaagaaaatatttgtatatcatatatctgataaaggattaatatccagatcatatagagaactcctaaaactcagcgatgaaaaacccaattcagaaatgggcaaaggacttgaataaacatttctctaaagaagatatatggtagtttcttttgctgtgcagaagctctttagtttaattagatcccatttgtcaattttggcttttgttgccattgcttttggtgttttggacatgaagtccttgcccacgcctatgtcctgaatggtaatgcctaggttttcttctagggtttttatggttttaggtctaacgtataaatctttaatccatcttgaattgatttttgtataaggtgtaaggaagggatccagtttcagct

SEQ ID NO: 43813 - DNA, 1994 bp, Homo sapiens
cagatgttcatgctacaactgtcaccagcttggggcttgggatttagatttctgttgccaggcagtcatttctttataattacttctcgtttctatttaaaaataccttctccttggaaagtaaccccagatgagtgtgcgcttctcaccaagctcagaagagctaccagagggaggcattatgagagctacgctgccccctcaccccaagactggcaggggactggtggaggagccctctctctcccaagtgctggttgacaagcagcaggtgataagggatgaggccctgagatctttcctggtgaaaagtcagctgcagatgcagaggccaggaaagagggcatacctcagagagaggtctggactgaaattccactcatgccttccctggagccagacggcttcccctctatcctctcctctggtttccatcttgggctcattgggtaatcaggataatgtccaaaaaagtaaaaaactttaggatggcgtttttgatctcaaatgtcccttccagactataaataggactatcctaggagttctgaactttccttgaggctgaacttgtatctcttttgggagagaaactacatggctctttttgtaagaagctctctgcccagtgaactctcttaaactttgtatgtctgtaaatgtctacatttcaccatctttttttcctcctttgttatagccaagattttattggtccttgcttggtgatcagtacacaagcatcatgaattattaatgctagtattaaaaagcctaagcagtgtaattgtgatactttgctaaagagtttgctaaagagttactcaagtgatgttgcaatctaagagttggagataatttacccacaaattaggacattagaactcaaaatcttagaaggttgctaatttgtaagtctttcacagggaatatcctgataacacaggatgtgctatattacacattatatccacaacatattaatactttgggggaaattctggacttttgggagcacaatattgccacagatagtgtgcagttctcataggtagacaaaagacagaagacacagtgataatagtaggggaacaaacacacatatgaaagatgagtaatttaaaaggtttgcttatgtcttggtcatttggggcatgtgtcactttagagggtttttttataatgttctttatagtctatggaatggtaagttaacatcaaataaagcctcccttaatcaagccttccactaatttctggttttagtgaaattaaccagtacatgattttaactcttaaaaaggcattaattaaaaaaaattacaagatagagtctcaccgtattgcccaggtagcagtgcagtggctattcataggcatgatcatagtgcactatggccttgaactcctggcctcaagtgatcctcccacttaagcctcccaagtagctgggcctacagacatgtgccaccatgcctggctttacaagatcgtttagaactaacaccagttcttctcaagcttttccaaaaaattgaagagaagggaacactccttaattcatttgatgaggtcaggattaccctgataccaaagctagacaaagacactacaagaaaactattgatcagtattccttataaacattgatgtaaaaatcttcaataaaatattagtataccaaattaagcagcatattaaaaaaaattatacaccatgaccaagtagggtttattgccagaatgcaaggatggtttaacttatgaaaactggtcaatgtaatacaccacattaacagaatgaaggaaaaaacccacatgatcatctcaattaatgcagaaaaagcatttgacaaaatccagcaccctttcctgataaaaacactcaatatgccaggcacagtggctcacgcctgtaatcccagcactttgggaggccaaggtcggaggatcacgtgagcctaggagttcaagaccagtctgggcaacatggca

SEQ ID NO: 43814 - DNA, 1432 bp, Homo sapiens
gagtaaagaaaaagaaccagcctggacaacatagtaagaccccatctctacaaaaaataaaattagctggttgtggtatcacgtgcctgttgtcccagtaactttggaggttgaggtgggaggattgcttgagcccgggaggcagaggttgcagtgagcaaagattgtgccactgcattccggcctgggcaacagagtgagaccccatctcaaataaaaaaaaaagaaaaagaaaaagaaaagaaaagaaaagagaacagccctaaacccaacgttagtcaatctgcaaaaaaattattttgtttaatgactacctatcaaatgtattatgaggttgcagagcttggtaagcaaagggaaaaaaggggaagaatgtattatgagatataaaaaatgaattagaaaaaatttaatgagttaggagaccatgagaatcagccaaggtataataataactaactaattattgtgtttggcagtattctaaggacatcattgtattacctttttaaatcttgacaagaacggatgaggtgggtatcagccacattttactctcaggacgattgaggcacagagaggttaagtaactcaccagaagtcacacagctggaaacggtctcaacctttacccactgcctcaggcagcctctgagtactgagcagatgctggcattggagttagaaggcatttgaggcttacagctgggcatgtacatgggccttgtggtctctgggaagttgtctaacctttctaagcctcggtttccttattgtcaaataaacataatacttacctggctgatttattgtggggattcaattaagcccaatatgcctgaaggcattttgtaaactgtggagcactagttcagtgattattgttataatctgactggggagacgaacccgagacagcagaagtgtgagcaatcaagcaggctgtgattaactcttccttagagggatagatgtggtactaggtaatgggataattaccaagagcacgtggataaagcacaggctttggggttgggagccctccccgaggactgaagcacatcttgtagcatgagttagtgcttgctgggtggaggaggggatggggcattccagtgacagaagaacataaataaagagacatctagactaggcagataaacttcccagcgggtgcagtggagactcattggctggggtagacagagaggcaaaattggccactccctcctctgaactatagcagggctggtgacctctcctagttcctgtgaccttgtgctggcatcatttctctctgtggcccccattgaacactgagcttattgagggcaggtctgtgtcttgctcttgcctgcatcctgaagctcatggttagtggtgaatggggtcagcaagggaaccctgggcctaggtgggtagttcagccctg

SEQ ID NO: 43815 - DNA, 1030 bp, Homo sapiens
aaaccccatctctattaaaaatacaaaaattagccaggtgtggtggcttacgcctgagtcccagctactcaggaggctgagacatgagaatcgcttggacctgggaggcggagtttgtagtgagctgagatcacgccactgtactctagcctgggcaacagagtgagtgttggtctaaaaaatatatatatatctcctgggctcgagcaatcctacgccgctcagcctccagagtagctgagactacaatggggaatgccaccaggcctggctaatttttgtattttttatagaaatggggttgcactgtgttgcccaggctgctcttgaactcctggactcaagccatcctcctgccttagcctcccaaagcgctgggattacacatgtgagccgcctaagcctggccaaatattgatttaattccttgatatgccaggtattgttccagaccctggggatacaacagaatacaacagcctgagttcattgtccctgccgttgtggagctttctttttttgttgtttttaattattttttctgtttttatgtgttgtttttatatatttttttcatttttatctttatttttggagctttatgttgtaaatttttagggacagggtcttgctctgtcacccgggcaggggtgcagtggcacaatcatggcttgaactcctgggttcaatcaaccctcctatctcagcctcctgagtagctgggactgcagacttgtgccaacatgctaattttttttttttaaagacaggatcttattatgttgcccaggctgtcatggaccttctcttctatttagcaaacagacaataaaccctagagataattggctataatccaaagatggaagcatctcccttttttccttcccatcccctcccctcttccattcccctcctgtcccctcttcccttccccatcctgaggagtggacagagccctgcacacagtcaccatgtcccctactgcagcgaaaccttttccccacgcctccagggtgtcttctccctc

SEQ ID NO: 43816 - DNA, 1049 bp, Homo sapiens
gtcaggctccctcccacatctggaattcagtttcctccacatccctcccaagtcctcatctccacagaagaggaactcgctacctcccaagccttctacttgggccatcccaaacaacttgactgctagaaaagcctcacatttggcccagtgcagtggctcatgcctgtaattccacccctctggaaggccaaggtgggaggatcgcttgagcccaggagttcaataccagcctgggcaacacaggagaccctgtctacaaataataaaaattagccaagcatggtggtatgtgccagtggtcccagttactcaggaagctaaggcaggagaattgagcctgggagtttgaggctgcagtgagctgtgtttgcaccactgcaccccagtctgggtgacagaatgagaccttatctcaaaggaaaaaaacataaaaagcctcacactcagctcctatctgcctctctctaaggaaataccaaggtaattaacaacagtcttattggctgctgtatgaagcactgtgtggtaggcattgattttacttggtgttttgcaagtgaaacttatattaaacaagcagggtttccacagtcaagaagtagaattcaatcatgcagcagctttctgtctttaaatctttgcttgcccttggattgtgtctggttactaggacagacttactgtccagttcatgttaataatcaaaactaggaatttaattcaaaggtaaagctgcttctcttcccctctcaagctttctttgggctcccacatttgaggaggacagtagttgacttctgtttattttgtttcctcttccatcccaccccagcccaggccaactatggcttctgaggcatcctgtgttggtggagggggttataagagagtagagatggggcaagaaaagccccttcgacatctggccttgttactgtctcagcttgatgggaatttgtaactgactctcccatgcagtgcttctgggggtctttcttacctccagttcccatgatcaggtggccatctcagtcttgctgcttcaa

SEQ ID NO: 43817 - DNA, 1065 bp, Homo sapiens
tgtccaatttcgggagccttgtcagtgtgtcagtttttcctccccgaagacactccttccccaagtaattgtaggaagataaaaaaactgttaccagataacaaacactgaactcctatttgaccagaactttttcctctcgagatagttttttctttttaatgaaaaaagcataggaattggagattggcttgtctcacgcagccagtgcacatttggaattgacggaaacaacgttgctatttccacccatttgttttcggcagccttaaggccctcattctcatttcgggtgaatctgtctatctgtgaacgtggcccgcatgtgcattcttttttttatatatataaagtcagtgacgaggaactcccgagacgtgtaatgacaccacacttgttttctttgtttctttgttttatttaggcaagaagaggtgtgagtaattgaggaaaaactgacagatgcttttgctaataccaaaattgagcttacaattaggaactgagtatgtgtaacaggatacaggtgacagtgaagatagaagaaccacgatgaccacagactcaatgtgctctgtaacatcgcacagtttacccagcatgactttccttaggaggccccctcctcacgctagagtaaaagtcccagttaagtgaagcctaccagaagaactagtagaagaagctttgccgcttttgtgcctctcacaggcgcctaaagtcattgccatgggaggaagacgatttggggggggaggggggggggggcagggtaggtggggctttccctaatttatcttcatgtccagtgagcagtgttgcgtttttccttgtagcatttggaaatgatttactggaattacaaaacctatttttcctttaaatttcagctttggctctggctgctttttagaataatgcaagataaaaatcacacctgagggctgaaaacggagagggaatgggagacttgatatttaagcagcttgaatggtttttcttttctttatttttaaagaaatgcacttgcctatgatactgtctctccagtgaaatgattactcc

SEQ ID NO: 43818 - DNA, 1045 bp, Homo sapiens
atctctgagtagatgctgcttgaagtaatgactgtaatcacttttgccaagcataccccccgtttataatttaagaaaaaaaatttttttttttttgagatggggccttgttatgttggccaggctggtcttgaactcctggcctcaagcagtcctccccacctggtgtctcaaagcactgggattacaggcatgggccaacatactgaacataatgattcaaacatagaaaaaaaagtctcctggtagttcagttcccccatgccccaggagtttagtacaggggtgtccagtcttttggcttccctgggccacattcccttgggccacacataaaatacactaacactaacaatagttgatgagctaaaaaaaaaaaaaaaatcgcaaaaagaattctcagtgttttaatagagtttacgaatttgtgttgggctgcattcaaagccatcctgggctacatgcagcctgtgggccacaggttggataagcttggtttagtagatctttttggattctaggtccctacctgtcgtctctgtatgtaatataatgttatacagatgctgcagttgatcaacacggaacaatggggactcaagggacagggagtaaccacttttcttctctcctctcctctcctctccccatccccagccagttggcatgtgctggtagtcccagctcctcggtaggcagaggtgggagaatcatctgagcctggggaggttgaggctgcagtgatctgtgatcctgctgctgcactccaggctgggcaatagaatgagaccctgtgtcaaatataataataataataatgtatttcatatggttgtcaagtaatgtaatagtatatgactctgatactatagaaaccaggtaaataaatttagtattattggctgatattaataagcagttatttgtagtcataaaaatatacaacattggtttgagatgccactttagtcttctgaaagtgattagccttgggggtgatgagggcgggagccttgagaaatggccatcttgggagaagcattga

SEQ ID NO: 43819 - DNA, 1119 bp, Homo sapiens
tgggcgtgttccaaatgtggtcgagctactgtatccaaaggtgatcctggcatttcataatctccttgttccaatgtgtctggggacagctaggcagactttacataagtacagattgcctctctgggcactgctgggagacttcatttgtggcaggaggagtgcccccaggactggtgagataatttgagctttaaatagctcctggcccttgaaataaggacaacatgatttaggggaaaggccagaacttgatctttgtggccttcggcacgctggcctctccttgcactggaggcagtcatgagggctgcaccgcggggcggtttgtcttcagcattcgcacactcagtaaagtatgccagagatgggtggcagcagcgcccaagggctcagctccttccaaagccaagtctgggcagttttttttcaggctgtatggaactagggtttatggaaaggaagcgatgtgaggcagctaaggcagtttccgcttaatatagagaagaggatgaaacggagaagagacactcgatacaggaagatgagctgggagatcgttaggaaatgtagacatcccctgtggtgagaactaaaatgaaggaaaattattcagggtattcttaaaagtagttcctcatgtttctgtagcattttactttttcaagaagactttgctgggcacaatggctgtcacctgtaatcccagcactctgagcggccaaggtgggaggatcacttgaactaagggttcaagaccagcctgggcaacatagtgagaccttgtctctactaaaaatttttaaatggctggatgcagtggctcacacctgtaatcctaacactttgggaggctaaggtgggtggatcacttgaggccaggagttcaaggccagcctgggcaacatggcaagaccttgtctctacagaaaaatacaaaaattagctgggtgtggtggcatgtgccttagtcccagccactcaggaggctaaggtaggattgcttgaagccctgggaggctgaggttgcagtgagccaagatagtgccactgcacttccagcggattgatatagtgagaccccatctctaaataaagaaataaataaatcagccatag

SEQ ID NO: 43820 - DNA, 1002 bp, Homo sapiens
aggcgcctgtaatcccagctactctggaggctgaggcaagagaacccgggaggcagaggttgcagtgagccaagttcgcaccattgcactctaagcctgggtgacaagagtgaaactcagtctcaacaaacaaacaaacaaacaaacaaagcaaggaaggaaattcttacacatgctaaaagatggatgaaacctgaagacataatgctaagtgaaatgagccagttacaaagaaagacaaatagtggttgcttcaacctatgggaggtatctggaatagtacaattcacagaagcagaaaggagagtagaagttttcaggggctggagcggggcagggaaagcgagttgtttgttgagtgtagggtttcagtattgcaaggtgaaaaagttccagagatctattgcacaacgatgtgcatatagttaatactactgtgctgtccacttaaaaatagtgaagatgggccaggggcggtggctcaagcctggaatcccagcactttgggaggccgaggtgcatggatcgcctgaggtcaggagtttgagaccagcctggccaacgtggtaaaactctgtctctactaaaaatataaaaattagctgggcgtggtggtgcacgcctgtagtcctagctattcaggaggctgaggcggggagaatcgcttgaacctgggaggtggaggttgcagtgagctgagatggcaccactgtactccagcctgaatgacagagagagacctcgtcaaaaaaaaaaaaaaaaaaaaagcttaagatgggctgcgtgcgctgactcatgcctgtaatcccagcactttgggaggctgaggcgggcggatcacctgaggtcgggagttcgagaccagcctggccaacatggtgaaaccccgtctctaccaaaatacaaaaatcagccgggcatggtggcgggtgcctgtaatcccagctattcaggagggtgaggcacgagaatcgcttgaacccaggaggtggaggttgcaat

SEQ ID NO: 43821 - DNA, 1026 bp, Homo sapiens
ttcttaatggttagcaaagacatccagaatccattccaactctgccactgtcttgctgtagggttcagagccagccactggagtctcttaggtcttcaacattttctgatgtggaaaaatatataatgcttgttttctttcaccttatgaaaattaatatggtgaccttcttaattcgttccaggctatgcttgggcctgggagtcacacctgaatctgagtactgacttttccacttaacattttgtccttgggaaaatcactaattttaacataatatgccttcaataaatgatgctgttagttcacatttgaatttttaagaggatagtactgatgtcaaccatgaagaagttaatgatgtgaaaagaggttaaagaacacaacaagagccctcctttctaaaaaagtgttaaagatgggacattaggaaggttttcaagtcatgaaaattcttcattcacaaacagtaatggagttttggtaggtggtttttggcttttaaagatgtggagggagatggggtagaaatctttgcattgcttaacatttctaaagatctgaaaaatttaagatcatgttatgcatttaagaacagagacaagtgttcataaagttagcacacttgaaacttgatacatttagacatatcaagccctacaaaaaagttttttaaatccatgattttctacttttgaaagtatgtttggtagaaaaacgtgtcctctatttatcctgaaatcttccagggttgtttttgttttgttttttcctaaagccctcatatgttgttatgggaatctcctgtctgtagtttacatttgaaccctggaaagaaatttggttttttgtttttgtttttgagacagggtatcactctgtcacccaggctggagtgcagcagcaaggtcatggctcagtgcagcctcatcaggatcgcctaagcttgggaggtcagccttccaggtagatgagactacagttgtgcaccaccacacccagcttttttttttttttttttttttt

SEQ ID NO: 43822 - DNA, 1068 bp, Homo sapiens
gggtagtacaattatatcaataattcaaagatctagatagaatgctgactaattctgttttggtgtatgtgacaatgtaaaattagttcattttatctttttttgattcctaggttttgaaaaatgtcctgggcagtaaataaatttagcaggaaagtacgcctactccatttatccaaatgttaatgaactttctcttagtgaacatggcactgttgacaccacctaagtcataaaaacgggtctcaagggaggaaatgactcagtgtgtttaatacaggtttccctgctaagcctcaatctggggaagtcctgttggttttgggaagtgagcagcagttctctatgtggtttaaaaaaacaacgacaaaaaaaaaaaaaaaaaaaagagacagaaaatgaagtgggtaaagaagattctttaagtctattttagaatccctattgggtctagaatgccatcttctgtacaaagtattcactcagaaatgtggaccctgagagctcgggaaataaggcttgtgtaatactcactgggtggtttgggccactgggcctgcctctgaaggccactgatgtttttgtctcctacaggtgctcagctttaagggctactgggaaaaactgaactccaacctagaatatgttaagtacgccaagccacacttccactataacaacagtgtggtcaggagagagtggcacaacctgatctctgaagaggtatgagtgggtcagtgagaacaaagccagcagcgaggcatagtggactggatccaggtgatgcctttaaatcataaggctggcttccatgtgcagcactcttcccaattgccagggacttgatcattgtcattactgatctcaatgggcagagatgcttctatgatctctgttctcctagggaggaaactgaaaagcagaaagtttaaggggacacacagcacattcatagtagaagtatgattaatatccatgtctcagatgtgttctcaggttacttatgtagttaaaaattgatattaaaaaatctaggtgttcccaacttagtggtcattaggggttggg

SEQ ID NO: 43823 - DNA, 1047 bp, Homo sapiens
gagcctaacaaaaaggagcgtccatacagaagctcaaatgggctgtaccctgtagcatcccgaggacaggcctgaattctgagaagggcaagtggtaaaagtattgtccagtcctttttaagttggaggctgaacttggcgaggtgtgtttttataagaccattagtccattttacctttcctgaagattgaggatggtaaggggcctgaaggttccactgaataccaagagcctgagaaactgcttgggtgatttgactagtaaaggcctgtgtgttattggactgtatagaggtgggaaggccaaaccgaggaattatatctgacagaagggaagaaatgaccacggtggccttcgcagaccctgtgggaaagtcctctacccatccagtgaaagtgtctacccagaccaagaggtgttttagtttcctgactccgggcatgtgagtaaaattaatttgccagtcctgggcaggggcaaatcctcaagcttgatgtgtagggaagggagggggcctaaacaatccctgaagagtagtagaatagcagatggaacactgagaagtgatttccttgaggatagatttccacggtggaaaggaaacgagaggttctaagagatgggctagcggcttataacctatatggaagaggttatgaaatgatgacagaatagaatgggcctgtgaggctggaaggagataattttccttggtctaagaaccatttgtcttgtgtgggaagagattgataggtagaagttagtcagtgggggagtaggtggaagtgaccgatgagaaggagaaaaactggcagtgagggacagaaattggaatgctagctgcttctttagctaccttatcagcataagcgttgccttgagcgatgggatctgacaccttttgatggcctttgcagtgaatgactccagcttcctttggaagtaaagtggccttgagaagagtttttattaaagaggcattaatgatggaggacccttgcatagtgaggaaacctctttttgcctattatataacagcatggagg

SEQ ID NO: 43824 - DNA, 1048 bp, Homo sapiens
cacagtcttctttccagtttgaatgtgtacttaaggagagcaaactgggggaaaataaagttgaaaattgtagtacaggcatcagccactgcttaaaggcttcactgaagagccattagcagccacacagcaggaagcaaaaggtagagagagtaaaaggggccaaatagagtaaatagaaactatccataaatgtctctcctggggttaattatgctgccagaattttcatatggaagaacatcagctcattttgatacttattttaagaaagggataggaggcctataaaatgtgtatcaggagccttattcaataatataaatctctgaaaagaaaagcttaagttttgtggttgtttaaaaaaaaaaaaaaggtttgtggttccagtcaattctccaggaagaggaagctattttaggtaagaactggtaggtagagagtaaagtgtatttatccacaccttgaagcctaggtctggcaaagaaatgtaaggaaaaatgatagactcatagaatgtctgaattgcaaatgcagccctgtacgtaatttgttaattttctttactatcctttactttctttttgaacagtgaataacctccagaataaccattcttggcttcatagtttgagccacactgtcagaccacttgtggttaagaggatagtgtttactgagtgccttgtgtatctcttatgtttgtgggtgttatgcatcatcccagttctacaaagctttccaaggcatttttcaaaactgagctggaatttcatgtttattctgactctacaccagttttctttctaatatatcctattttgcaagaggaagcagaagtctaaagcatcaaaatgttaaatccagacattggtcagggctctttagaagtttaagttaatttaagttttatgtttagaaaataggcattcaaaaaagatgcagtgtttcttagagtgctggtagattccagtgcttttatctcatagaaaagaacaggtttgaatgtgtccccgaaagttgtgtgtcccccagagttcatgggtta

SEQ ID NO: 43825 - DNA, 1044 bp, Homo sapiens
gcgccggggccctggaaggtgccgggttctgacaagctgcccagcgtcctcaaacccggcgcctcggccgccagcagatgagccgcgcggccacggccaacccgcccgccccggcgcaggcagttcttcttaggttccgtctcacggcgttttaatttattttcactgtcacacgcatagatccacgaggcaccaaggcctgggagcatcgacgtgaagtcccacgtgtccggtgtgcttgggcggcatcgcatcaacgcgcagacctaaactgatcctaaagcccccggttcccttgtgggggctttggcagctatggaagaaccaaaataacgtgaagaacatcacagagagacagtgcagtgtagctttagtttaagaaaaaaaaatattcctccccactgcatgaaggacttggatgtcatccaaactttatatcaagaaacaggacaaagttaagagcaatcacaaactggaatatcgccttaaaaatcaaactgcacggagcaagctgaaactgagacaagattatatcttttaattgatctaaagcgttgtaaataaattgttctcgacatatctagacaggggttaaagggtttctttgacacattcggaaccgttcacccatgacatgtttccatggctcacccttggcatccatcctcggtgttagcagcagcgttccctgcctcctgcaggatgacttagaaatctagtgagtttcttggtgtgatgccatttttattgccctttctgtgatcaaatcatatttctgtacattttcagtggtagaaaaaaaaggttttaaaaattgtatcctagggaacagtttgccataagtcagaattttgcagtttagctcatagatcttaattggtttttctctaaaatatgaattttataattgaaggaccacaatttgtttaatcaagataggcaacgctgcagttcctttatgaagaggcttttctgtcgtcccaggctagcagagatggatagcttctttgtcagcaatgtgatttcacttattttattgtctta

SEQ ID NO: 43826 - DNA, 1038 bp, Homo sapiens
atcagaaaggtcatcggcaaccttgactagagcagtttcaccagggtagtggtggagagggcaggctgaggaagccagtttggaatgaaaggattttccttcttaattttagccactgggcctggggacattggacaaaggggctgcataaatcccagcaggccagatatggctgatttcatccttctaggatgggtctctattatttctaattgtagttagagcatctcagaacgtgaacgatgctgtgtagcacatcttccttggcaaccacctcataaatgaacatgatcacacactttagccaacgcccaggtccaaaaaaggagaaagggaggcaaggaaggaaggagggaaggaggaggcagggaaacaggtaggcaggcagggaggcaggaaggagaaaaacatcgtctgaaggaagcagaactaaattgaactcttctggttattatatgtcaagatttcataaaaactagattttccagtcttagagaagggctcttcctgtccagcacaatctgtgtcaccttgctgaggcaggtgatagggcaaggtgggatatgggctgcctactgaagaggccccttgtgctttacagagctttgcaggctcgtgcctggagctttgcaggctcgtgcctggacagacaccatatgtttcgtactgaactgaagagttcctgtgcagaaaaatgaaaatattcaaccactcatatagatatccatcttttaaatcactttgtgatatagtaaatcttaatttcttgttaatatttttaacccatagtgacttggaacattttagtttttagtttctcccgctgttaagtgtttaatgatctataaacaaactcttgagaaacttttataagaggaatctttgaatttgtgaataatttcaccttttacgatatgaaaaatcactggaggagggaaagaaaagagtgtctccctgaatctcagaagtaatttgaagccaactaatgatggatggatgaatattttttcatttttctggataggaactctccagttc

SEQ ID NO: 43827 - DNA, 1047 bp, Homo sapiens
gcacttgacatttcttctgttgttaccacagatgtgtgtatctctcaactataacctttagcttggtgcactttgtgaactttatgtaactgaaccatactgtacatgttcttctctgtggtttgctttctatatgttatgttcatgagattcatccaaggttggtgcatgaagctatagtccatttatttttcactgctataagttatttcattatgtgaatatgctacaacctataataattatctatttttccattttatggacatttgagattttccctgtcaatttacactttggttgtttccaagtttgttgtaactcatacaatctttgtacatctttcctgctgtacctatgcaagactttctctagactagactagatgccttggagggcacaaatttaacttacctaagtaacacaaaagtattgtccaaggtggttttacaaagttatacttgtattagcatatgtaaaaaagtttttcttactacacacactcacaagatttgtacgtcagacttttaaactctcattctggtaggtagaaaattatatattttagatttggatttgcatttcttgattacaaattcatattcatcattttttcttatatttattagacgttcatgttctctcttaactaaaaaatgcctgtacatgtctttcctcattttctgttgaatatttcttcatgttgattatagaaatgcttatatattattggtgatctttttcatcaattaatgtgatacagatatcttatgccagcttatggcttgcagtttcactttctttatgatgctctttgataatgagaaagtcttaattttagcgtaattggcttaacccttttttttttttttatagtttctgctttctgtgtcttgtttgagaaatcattctccaagacatggtcttaaacgtcttctcttatatcttcttctaaaagttgtatagttttactttttatatctaagtatttaatcacctacagttgatttctctgtatgatataaggtagaacctcaatctcaattt

SEQ ID NO: 43828 - DNA, 1098 bp, Homo sapiens
gctgattccttaaggttattttgaggattaagttagttaatagatgtaaaatttaacgaatgtaaactagcatgggcaaagcactccaaatgtgacagagaaccagcatatcacagtgaataagcatgcagtctctgagccatgagcctgggtttgcatctcctcgctgtcccttactagttatataaactttggcagatttcttgacttcattgtgcctcagtttcctcaactgtaaattgaatacttatagtgcctaccactaggaacgccacttgcttattctgtgcttttgtgtgaatttgggaaaagtatatcaccgggacagatacccattaattttactacctaaaggtatcttgatgcaaagaaagagtcccaggcaaggtcacagaacaggatgcagtgagtgagggctggatttctgccccatcccactctctgccgagtgcctttcaacaagcagcccagtcacgcaaccctatgccatgatcttgtctacactgtaggattatcctgtctattaaatgagttaatacctgcagaacacttagaaccaccccaccacgtagtatgccctcagtaagtaccagcaattttcctgcctataccttttcacagtttactttccagccaggtttccctacagcagcaccatttaaaactgtcattttaaagcacaaaaggcaagtagagagctttttctaacacctcttttggcagccaccacctattttagttatttataaaacaatttatctctgatatattcaaaataacacacttaaattaggcgcatgcaaacacataaatcctcacaaacagttttttctcctttgggacaaatttgaatggacgcaatcactgattttaaaatacctcctgcattcccagcttgtgttcacacctgtgcccaagtgaggcacttccagtgcaaagtggaatgggacacagaatctgtcctctttctagagaaataaaatcagtgattacagttcactgtgctccgtgttaggctgagtggaaagggagcacaaagtaggggctgagcaaatagcagatcggaaaaggggctcaataaggtatgatgctggagtt

SEQ ID NO: 43829 - DNA, 1030 bp, Homo sapiens
attaacccttgacattttttactgatttcccagtatttgtgttcattaagaaatattttactttctcccgcattatcttttcaactttttctaatttatattctttctttgccttcactttggtttaactaacctaaacttttcctttgaggctgatttactctcaaccccagcccagtggttcgaggctacaaaaaagagtggccttttccttccaatctagtacttagttcttacatgatatcgtaagtcattttactcattttaatgcaatttatctgcaaacaaaataagttgatctggttgtccatatgacagacacttgttggataacctctctgcttgtagaattaaattatttgccatgaaaaatgcaaatgaatacaacttctgaacccagttttcaaagagcagtatagtggggaagatagtatgctaagctcctcaaaaatgaagaggagagtttaacaatgatgtgaggagtcatccaccgaacaagaatgaaatgaaaaacaactgactgtgaacccaggcatgttccgagaagacttggtgaaagagatggaatttgagcagaattttaaagatgggctggatttagagtcactcctaaatgttcaagttctactagattgcttcatttggtgaccttctcttttctcctcaccccttgtccctatgttattgttcccaatcctgtggctttacttcccatctagatgctgatgactctctttttccttccaactctgatttattccgtctgctattatgaatacatttaagtgctatattcatttctcattattctattaagctttatttctatgatgttattatttctagataatttcagttcactccatcttctgctgctactctagccaggtctgtatttgttatattacctttcctttcaagttctttctattactaaactatattcttacctgtgttcttctaatctttattctatacttttctctatgaaatccttcatggaggaaaatatttcttatacttaataaaa

SEQ ID NO: 43830 - DNA, 1123 bp, Homo sapiens
atgtgtctgcttccccttctgccatgattataagttttctgaggcctcctcagccatgtacaactgtgagtcaattaaactgcttttctttatgaattacccagtctcaggaagttgttatagcagtgtgagaacagactaatacagtgatagttcctactttactcttatcaaaattgttttagatattttaggtcttttgccattttatataaattttaggagaagcttttctagaactacaaaaatcttgttgggattctcataggaattgtattaaacctccagattaagttgacaataatatatatctttactgtgttgagtattccaatccatgaacatgataagcccttccaattatttaagccttctttgagttctttcatcagcatttcgtaatttcagcaaaaatatatggcacgttttgtttagtgtatacctaagtattccattttctttgagcaatgtaaatgggtattgtgtttttaatttcagtctctgtatgtttgttgttagaatatatacatgagattgattttcatgtgttggtcatagatctcatgtacttgctgaattcatttatttgcaggaaattttttggtagatttcttgtaatttctacatagactattttcaactgatataatcataagatatttcttatttaagctgttgacatggtagattacattgagtgattttcaaatattaaatcaaccttgcatacctgggataagtccaactaggacatggtaaataattcttttcatatactgttttatttaacttggtaatattttattgaggatttttgtgtctatgtgtctgtgttttgtgtctatgtcttttgtgtctatgttttgtgattttgtgtctattgagaaatactggtctgtaatttttttttgtactgtctttatctggttttggtatcggggtaatactggccacataaaatgagtagataagcattccttcatcttctgttttctggaaaagattgtgtaaaattggtgtcaattttttctttaaatatttggtaaaattctccagtaaaacaactgtcctggggatttttttcaagaggattttaattacaagttcaattgctttaatggtt

SEQ ID NO: 43831 - DNA, 1025 bp, Homo sapiens
tgctagagaccaatgtgtcccaaaagccagttgagtagtctggattcttgaaaaagttctaaactgtgacaaaacaagaaaaaaaaaaagcattatagagaggtttgttgttgttgtttttgttgtttttcagaaataaagccctgaatttacagaagtgttttcattctactgttgtggtagttttcatgaaaactttttattttagaatagatttatattttatttagaatagattatatttatgtacaaaaatagtacagagagtttatgtttaactttcatccaattttctctgttatcttgcattagtgtggtatgtttgtcgtaactaataaacctatgttgatatattattattaactgaagtccatacatttcttttgtttttacctaatattctttttctgttgcagaatttcacccaggataccacattacatataattattatgtcccttagattgtgacaatttctcagattttccttatttttggtgactcacaattttgaggagtatttgtcaagtattttgtagaatgactatcagtttgagtttgtctgatgtttttctcatggttagtctgggttatgggtttgggagaaaaagatcatagagataaagtgccattctcatcattttattaaagggatgtgtgatcaatgtgacttatcactatcgatattaagcttcatcatgtaactgagtgatgcttgtggggtttctttactgtaaggtgatttcccccacactctaccccctttcatttatgtagtccttggaaaaaagtcactatgtgcagcccacacttaagtagtggggatttatgcttctcctccttgatatctatatacattatataacagcatctatatacattaaatagaattcttctatacgggagatttttctattctacctcatttattcattcaatcaatcattaggttggtgcaaaaagtaatcatagtttttgccgttactttcaaacctaatattttatactttggctataatccaata

SEQ ID NO: 43832 - DNA, 1080 bp, Homo sapiens
tgtagcacagagggccagtcatcattttccccttgattttcttttaatccattgatattcctctcttaaatgggtacatgataatattgctctgtactgtcagattctttttaagttagcatgtgtgtttttgatctatcttattaatttttaaatttcaaagggaaaaataatttcccttatttttgaggagcatctcatcataaaattcacacatacatattcacatatacataaacacattacattcaccatattataaaaaaagttacttcaaaaagcttcattctaagttacattttataaattgtttggttgagaatatctctggcagttccatcagttcattcattcagttgcaagtctaagtatatgccaggtgtacaatactggatattagagatcaatagacgagcagttggtcgctgcagtcaaatatcataatcaagttggaaacagacaagtgggtagtttagactagtgtagggaagagtaacccccatcggttcttagttagaatggatccctgtaagaaaaaaatagattaacaagagaaaagcagaagtttattaacatgaatattttatatatacatgggagacaggaaataaagtagttctcctagaagtggcttatatagcatcttcaactaagaatagaatagtaaatttttaaagaaatggcaagacaaaggaaaagactctgagtctctaggggaagcaacttgtgaaaaggcaataatggcataaaaaggctagttagtgaagcttgttaacgcagattcctctggtaccatctccaggtcaataagggtctaaaattgtcttcagtggttaatctttgttctccctggtagaaggggaggtgggataccttttgtttttgtaaatctatatcctgcttttaggtaaatggaaggcaaagagctttcctgcctctgctgcttcttgtttgtcttcagctcaaccctccttcatattttggggaggtatatcctggtctcccacactactcatccatccattcattgtattcattcacccatctgatatgtatttagcaccttctctaggtcagtca

SEQ ID NO: 43833 - DNA, 1051 bp, Homo sapiens
ttagaaatgtacctccagctattctacatttttatgttaatcatttgcatttaaattctgaagtttagagaaatcatgggtatcagaaaatcatatcctatgcctcatatgcctataaatttgtaagtctctacctttactctctttctttttatgcttctctttccatcactccttcccattctttcctcccattccaccctcactaaatccctttcttcttccctatgctgtcttattccctttcatcccttactttcattcacaactttgtacaaaaagaaagctggatgactttcaaacatatgcacataagttgagaggtgctaacaatatagttggaatcattaaatactagagtatctcatggtgtttacattaagtgttataacacttggaatctgattctcctatataaatcactcttgcttagttattgttttatttgcttaacagggaaacaattacattttactttgatagtctgtgtattctgtaactatttaattgattctattagttttgtgactctgtatgtctttctgttattattttaattgtagcctttctggattaatatccaaaaaagaaaaatattccatattcaatgtatatttgaggtgttcatgaacagtatcaaaaatatatttgtacatacaaatatagacagtgaaacgtttggccataagaatttcctattattctgacagtacacatcactaatatagtttccataatttagaaatctgacacacacacacacacacacacacacactcacacacataatgcttttatttaattaatttttaggtatactattttggagagaaaaaaatggaataggataaatgaattggtagatttgacaagccagttggtgtaacagtgatatgtatgatcaattgctctatttcaccagcattcttcctccaagttaacctgaacctgattagatgattctgtgatgaaggccagtggcaaccttcaaatacatgccgtgttcaagttttcaagatttatatctgtcttttaggatttacattcatga

SEQ ID NO: 43834 - DNA, 1059 bp, Homo sapiens
gaataagtcagtaggtggtaatttatgttgttgataacaaaatctaatgttttagtttcacaattagaacataccagaaagtgccatcaattttttctaaaaataaaaggatatttaagaaacaaccaaactaaacctataaaaaatataatatgctcactatgcatatttaagagaatattgaacaagaattaatttttttgatagtaaggaaggaaatattttctgaaaagaggattttgggtttgctttcctttttaaaaatatttagagaagtatattttagcaggttataggaattcatgcattttttaaatcagtgatcaggtatgttttactaattaagtctgatggctctttttatattcctgcttacagactgaaaattatatgctatttagaagtatagatttttaaatatcatgttaatgctaaaatattcaagtaaatatgagcagatcatgctgcaggcgcagttatgaaatatttgaggcccttttcatctcttattttttgtgatgtatgaaaggcaaacatttgtagaactcaaaaaagtagtacttaatatttatatggctcttaaaatgtactaggaatacatttctactttataagctctacatacataaagcatagccatactaaagtagaaattttctatttataatcagaactggaaacttgattaccatgaattttctcatctagcctgatgaaacccccattatacaggtgagaaattgagacagattaaatcatgtccccaaagtcacacagtttgtaaatagcaaagtcagtatttgatcccccaaaatttggctcccaaattcacgttctaatcattgagctgtactacatccaatgtatgacctgaaagtagggtggccaaacttaacacataaaacaggatttatagttagggttgacagataaaatacaagacctaatattgcataggaaatacttatactaaaatattatttgttgtttatgtgaaatgcaaattaactgggtgtcctatatttcatttagcacctttaccctaaatgaatattttgt

SEQ ID NO: 43835 - DNA, 1046 bp, Homo sapiens
gttaacctcttgctcagttcttgaaaatagtaagatatataattataaatcttttttcctttactgtgtgtgtgtgcctgtgtgtgtgtgtgtataaaaacgtaaaatatttaatatagagaatatgttaactgcatttttaatcagtgcaaacaaaacacatcaacttgacatgctggttatttcttttattaaaaataataaatgaaactgtttttaataaaattcttattgctattcatttttctatagtagagaagattttcaaacaagattaatgggaaaacagaagatgaaataaatattccatagttgtctgtgaattttttattgtctcttttgcaccttgaacttgatcgctttcatcacttagataaatccgtgacttgaaatgttggtgcattatggattaaacaaaagtaccacagtgttttttatcctgtattgatgataaaccttcaaagtaagataattatttttcaattaggctccatacaaggactagaaagcattagttatcaacatgtacggaaaataatcagcattaagttgtcatattttggctgcattaatgtcgttaaattaacataatagtcattataagcagatgctctttcctgaaagatttttgcaattaacgttgtattcatttgcacacctatatctgcacttttttccaactcattaatatgagtctcactttccattgcctaaagtcatgaagcagtgtaaatttataaaataaaacttcacctccttgccttgtttagaagaaataccacattattcatccaccacaccagttgtattgaccttctgtatgaaaattaatgccctccaagtttccactctgagaattttctttgggtttcatagcaagttctcttaatttgggggctgctgcttattcttgctctgaacatgtttgtttgcaatccccatcctggaagggctgaccctgctgtccatcgtctctctttccctggttcctagctactcacaggtgagtatgttcttgattgtctttgtaccatggaagcagaaaa

SEQ ID NO: 43836 - DNA, 1117 bp, Homo sapiens
gaattgcttgaacccgggaggcggaggttgcagtgagctgagatcatgctactatactccagcctggaaacacagcaagattccatctcaaaaaacagtgaataaggtgaacatagatttgggatatgaaagaaattagttttgtggaagacctgattgaattacactgagttacgctgaattacactgattgtaactcacaatagtgtttctacatatttaagccctttaagttagtaaaactaaaacacactaaaaagaagcattatcaagggtaaaactgtaaagtttctaatatatctttaacatttttgatatttatgccaaatttgtttcacagaaaagcaggctcttcaaaaattatgagaaaccatctcctgttaagaatagcagttactaacacaccaaaaggtatagctatgcaaggagtcagcatccccttttcataattatataatccctagaagactatgatcacagaggactgttagagtgaggctcgttggccacatatctaataaaatgtctaaaattagagcagagctttctagtatactttgtgggaaaaataattttatttctcaagcaaaaattagtactataaaggttgtaaaaatacgtgttaacatctaacaaggcaatgtgtttttgtggatatgaatgaatctaattatttgtgactttatttatgaaggtacatttatttctaaacatgttgtaagaagggagagtgacatcaacctgtggattagatcaccaaaaaagcaatcatcttattccaatggaaagaaattccctgagttaaaaatgatcaaaaatggtatgtattgagagtatctttaagtaatatagctttgagttctgggatgttaagttgaactgtagctccacgtttagacagaggagtagaagcaatatatccaactgaattttaaagcaaactacaactttcaacccacatattgcaacagctgtatatcgtacatctgtttctacattaatcttattgcctcaaataagaatcatcaatttggcaactcttttttgaaattccttttagagtgtaaagcatattcttttgtgattacttcagaatgaagctgccagatttttgttc

SEQ ID NO: 43837 - DNA, 1051 bp, Homo sapiens
gaatcttatagaaattcatttggagtggaacctgaaaatatatgtattttaaaagcacttcccgcctccctggagctctgatacccatccatgtttggaaaccagcagacagtgttgcctggctcagtaaaaaaaaacttctgtgttttgtgctagtgatgaattgtagccaaatagcacttacttgcataatttaaatctcaaaagcaagaatactttttcttaacgaagctaggtcttaaaattgaagcttgtactttttaaagttatttattcagacatagatttagttttcacttatcaatccttcctaccaaaaagcacaaggtgctttgcaaatattaaccacaggagaaacaggagtcttgacaaaaacactgtcaagtagatgaaatgtttttagtcaatgaaaaaatataattctgcttttcaaattcagtttcgaatgatatttctttctctagtgatgtttcaatctgttgctttgttggttaggagtattttacttacacttagatactcttctacacactggcagttgaacattctcttttccctataattccttttctctttactgctgaatgataaaccacacattatttccattatttacatagaagaaagggagttgaagtgctactttaccattcctcccaacgtatcttaatttatccctttttgattgtctcccatcatcctgaagtggtgtccttgaatttcaaaatgaggacaggttttgattcatgttctatcacaatctactgtcacaccataatttctggactttagacacctgaagtactggtaaggcatctaaaaggggagtttgtgtctttctcccttagaggttttttccagctgaagtagttttcatttttataaatccacagggaagccacacatagacttgtctctccacaaacaccttgttctcatcttatttttcttattacttttctatcaaatttacctgccctgtgttatgttctgctgaagtccagaattcagcttatttttcccttcagaataatttcagaaaatgactgta

SEQ ID NO: 43838 - DNA, 1013 bp, Homo sapiens
tatccactaagttgactgactttactctttaaaaacaaacaaacaaacataaacattatgatagtttatgatatatgttgtgaatgactgcccaataaaaagaatcttaggtaactgttttgtaaaatcaacacaatataaatgttaagctattaagaatactggctaatggaatgaatgcactctattattctcattttaagtaaaactcattttctttccatgagttttattttaattaagaatcaaattgttcataacactcctgacaaaccccttatcccagctgacctgctgacagatctgtatattctaagtggtacaattttaagaatctcaatggcatccttttacattcatgattattcttcttagacaagggttgttgaattaagtcagctatgaaatagctataactttaggcatttataacaatattaaaccactcatttatccagaagcttagaaaacagtatgttgtagataatctgatattttggatttaaagcattagaatacatttaacaatagtctctataaaatatatatcaatctacttttgattcaatactttatagtattttggctgggcgcagtggcacacacctgcaatcccagcactttgggaggtggaggcaggaggatcacttgaggctagaagtttgagaccaacttgggcaaaatggtgagaccctgtctctacaaaaattttttaaaacattagccaggaatggtggcacatgcctgtagtcccagctactcagaaggctgaagcaggaagattgctggggagtttaaggtgcctgggaaaattgcccaggaggttaaggttacagtgagctatgatcatgccactacactccagactagggaacagagcaagaccctgtctcaaaaaaaaaaaaaaaaaaaaaaaaaaaaagtataatatctcaaagtaaccattgaaaaattaattattcttgaataattttgaaggtgggttggatgacctactatggtcatctggattt

SEQ ID NO: 43839 - DNA, 1033 bp, Homo sapiens
cttctatggaatcacctcattctttccttatcccccaggctattaaattttgtcacttgatcatggccctttccttcattgattggtgccattaattgtgttgccatattttcctgtttttttgtttttttatagtgtgaggaaaggaggttatgaattgcacctttatttattatgtcacatcaagctttattttttatttttttaaagactcaaaagaaaagaaaaaagttatccaaaacttaaacagcaatgagaatattacaaaactttgatagaatcagaattgcagttaatgctcatttcaattgcatttaagtttgcaaatattagtaacctactgtttttataactgctttacgaggaacttttctaatagcttagaaagagtcagctttccttctgcttttctcctatgcaaagttgtatcccatgttagaaatatctacatttatgcctttttttctcctattactctttaataatattctactgctatagagtgaacatagtaaaacaattgaatccaatattttagtttgttttttattttaactttaatattttaatattttgattttttatgttattttatttttattgtttcttatttttatttttaatttcaatacgtttttgggaaacaggtgtgtttggttacatgaataagttctttaatggtgatttctgagatattggtgcacctatcacctgtgcagtgactacacattgggtatagtataatgtttatttttaattgaccaataataattatatatatattttggggatacaatgtgatgttttaatatatgtgtacattatagaataattatatcaagctaattaacataccattacttcacatttttatcattttttgtagtgaaacccttaagaatctattcttttagcaattttgaaatacacaatacattaatattgacaatggttaccttgctgtgcaatagatcttgaaatttatttcctcctttctaactggaactctgtattgttcgatcaacttctctgc

SEQ ID NO: 43840 - DNA, 1049 bp, Homo sapiens
tttaaaagaaatgttcaggccaggcattttggctcatgcccgtagttccaactacttgggaggctgaggcaggaggatcacttgagcccaagagttacaggcttcataagctgtgattgtgccattgcatttcagcccaggtgacacagtgagaccctatctctaaaaaaaaaaaaaaaaaaaaaaaaaaaaaaaaagaaagaaaaagaaaaagaaaaaaagaagaaatgctcaggaaatgaaattgctgcaagatacttttcaaagcttgcatgatttgagagacataatctctatgtgaaggaagatccaatcattgaaaatatgtaaactctttcaaattattctctaaatttaacacaacctaaatcaaaagtaaaatgggatatacatgggaaagtaacaaaataaatatgagatctgtgtggaaaactagaagtatcaaactaattaggaaaatatttttaaaatataaaaaaagaagatgaatttgccctactcagaattaaaatacactaaaatcctacaaaactcaaaacagagtagtgcaatgctgaaatcaacaaaacatgcagtcgaacagaattaagagtttagacattgcccacatatatgtggaaatatagtgtatgattacgttggtattttcaatcaatagagaaaatttatatcttatttttaatggcattgatttacctaataactattaaagaataaaacatctcctgtatacatcaaaatcatttcatatcaatcaagaacttatttttaaaaatgggagaaaaaaattagactagtgtatactaaaatatagcatgttaatgtgtatagaatcccagagcatggtaccaaaggcagaaaccgtagaagggttgatacaatttgtcttcaaataaattagaaactttaagatggtagaacatgcaaatacccaaaccaaaaagccttgtttattgtaagagtgtttgcaatatgtatgagaaagtattaatactgctaactttttaatgggcaattaagagaatgaaaaagtaaaactaggagaaaat

SEQ ID NO: 43841 - DNA, 1034 bp, Homo sapiens
tgtccaacatggtaaaatcccatctctactaaaaatacaaaaattagcttggtgtggtggcgggcacctgtaatcccagctacttgggtggctgaggcaggagaattgcttgaacctgggaagcagaggttgcagtgagccgagattgtgccattgcactccagcctgggcaacaagagcaaatctccgtctcaaaaaaataaaataaataaaataaaataaaataaaatggttttaatatgttgcgtttccattataatttatttcaagaaaattttcaattttcttcttaatttctttattgatccattcaggagcttattgtctaatttccatgtgtttgtatagtttccaaaattcctcttgtcattgatttttggttttactctattctggtcagaggagatactggataatattttagttattttgagttttttaagtcttgttttgtggtctaacttatgatttgtctttgagaatgatccatgtactaaggagaagactgtgtattctgcagccattgggtgatatgttctctaaatatctatataagtccattcggtctatagtgcagattaagtctgatattgctttgttagatttttgtctagatgatctgtccaatgctgaaaatgtggttgtgaaatctccggctgttattgtattggggtctatctctgtctctagctctaacaatatttgctttataatctgggttgttccgtgttaattgaatatatatatttattattgttattacctcttactgaattgacccttttatcattatataatgaccttccttgtctctttttatagtttttgtcttgaaatcaatttggtctgacataaatatagatacttctgcccttttttgtttctatttgtatgggatatctttttccatctccttatttttagtctatttttgtctttatgggtcaagtgtaattcttgtatacagtaaatcattgcatcttattttcttcatccactcagctactctgtgtctttagattagagagttcatt

SEQ ID NO: 43842 - DNA, 1051 bp, Homo sapiens
tgacaaaggatgttggaagacagatttggtttgtctcccactctttttcatgggatatgggtgtttgtaagtaagtataataatgaaagtatcacaagtttatagaaaaatgaaggttcaaaggcataaaaaattagaatagaaaaatacgtgtcatacagaaacatggactagaaataatttgagaagtattaaagtctatgggaatgtatttcttaatagttattagcatggctcagaagaatgagtactagaatactagcgagagaatccttgttctagtgcctctctcccgtgaacttctatggaatttcaaatgagtcttggaacattcctggcctccagttttcttacctccaaagtgaaggagctgaattaggtgcccttaattgtctcttcaagcatttactttctattgtgtttattgaatactctagattgagcgagttcagttctactacatattaaacacatttcaacacatctgtaataattaaagtggtatagtgttggtacaaaagtagaagattcatggaaaaatgtagaggcccagaaatatattttaggaaaatttaatacctgattaaggtggcatttttgttcactgggataggctggacaaaatattgtcttaggactgcctaaccatttatagaagcatacaactgtattcttagttactctttacatcaaattggattctagaagcaccaaaattttaaacataaagagaagagaagatagagaaaataatggcaagaaaactttttaaaaacatattcagtaagatggcctttgtaagtatctcaataaatttggaggctataaaggaaaacatggatacatattatacatgcaaattaaatacttctatggagttgaaaatgccataaacaagtcaaaagacaaacacaaaatggggaagatacttctaaagcgtgtgatagagaattaatttattttatacagagaattcttacaagttaatagaaaaagttgaacaacccaagagaaaaatggtcaaagaatatgaacagacagttcacagaaa

SEQ ID NO: 43843 - DNA, 1008 bp, Homo sapiens
aatgtagtaagatttagagatctttaaattgtattttgtgtaaacattttagctttaccttggaaaatgctctttgtttcattgacccaatatctagacaatgtgaggctaagggtaggaataaagcaatggaggggaatagaggaatatgaatgtagtttgcatgcttgtgtgtggggagatgggtagaaacattacataaaggggtcagagggaggtgactgagaagatggcatttgagcaacttgaaggaaatggcaaaaagccctcacatgaggcctgtcctttgaggaagtggatttgacgtcccatccactaaccttaggcttgaactatgtgatttgctttgaccaattaaatgtaagcagatattttggtatcctttgtaattgcagcaaaacggattcaagcaatttgtgaggcaaggtctttccagctgaaacaggggtatgccaaggttgtagcccaggggaaaccctggtgtgtcggagggacgtcaagggacaataaatttgaaccacaacgaatgaagaagtgaatgtaagaagtgagagagtctaatagctattgggaatcaagtcttcccattcaatccaggttcttgggctccatttggttgttgattaacctctatgattttgactgttctatactgaaacatgaccatattttgagttatagcatgtaaacactcttgaatgctcatggctgttctcttgagttgtttaattctctcattgttgtttcacttctgcctgtttattgtttgttttccagtgtagaatataagcaatttgaggagaagggctgtatcttatccatgtttggacctctagtaaggcctagtatagtgaacacccccattcagttagtaccagctgagtatttcttatcggaaatgcttgggaccagagtgtttcaaatgttagactttttcatattttggaatatttagaaatacataatgagatatcttggggatgagacccaagtctaaacatgagattc

SEQ ID NO: 43844 - DNA, 1042 bp, Homo sapiens
ttttttctgagcagtaggtctcaaacattgggcttaaaatatttagtaaaccatgctttaaacaggcatgctgtcatctaggccttgttttccactaatagaacacaggcagagtcgatttagcatcattcttaagggcccttttttagacttgtagaatagtaagtgaacactggcttcaacttaaagacaccagctgtgttggcccctagcaagacagtcagcctgtcctgtgatgctttgaaggcagacattgacttcttcctagctgtgaaagtcctagatgacatcttcttccaataggctatttttgtctacattgaatgtctgttgtttaatgtagacacattcatgaatgatcgtagctgcatcttctagataacttgctgcagcttcacattagcaccttgtacttttaagttattgaaatggtttacatccttaaacttcatggaccaaactctgttagcttctaacttttcttcttaagctttcttatctttttcagccttcaaagaattgaagcaagttagggccttgctctggattaggctttggcttaggagaatgttgtggcttgtttgatctatccagacaactaatactttctccatattatcaaaaaggctgttttgacttcttatcatttgtatgttcactggagtagcactttaaattttcttcaagaacttttccttggaattcatgatttggctaactgtttgctacaagagggctagcttttgatctatctcatcactagatatgccatctttactacttaatcatttctactttttgacttaaagtgagagacttgtgactcttcctttcacttcaacacttagaggatattgtaggttatttgttgtcctaatttcagtgtcatcatgtctcagggaatagggaagcctgaagagaaagagagagaggaaaaagtggttggtcagtggagcagttagaacacttacagcatttatcgattaggttcattgtatcatatgggcatggttcatggtgccccaaaatgattataataata

SEQ ID NO: 43845 - DNA, 1029 bp, Homo sapiens
gaaatgtccagaataggaaaatccacagagacaaaaagtacattagtatttgccaaggactggaaaagtggagtgcggggagtgattactaatgggtacagatcttctttctaaggtggtgaaaatattttataatgattcatagtgatagctccacaattctgtgactaactaaaagccactgaattgtaagcttcattttttatgttttatctatttttaaatccccgcgattagtaatgcaaatgacttatacactttaaaacaactattttatggtatgtgcttatatctcaataaaactattattttaaaaaacagaaagggagcatattagaacgatattttccagaagattcctctggatttggtagttattcatgatgacttaatagttgtttggatgtaggagttcaaagggttttatccatctatatgcttgcagcatctagaaccatatcgtggaaaagtaatgaacactaaatgtgtgaagaaatcacacatgaatagatattagaaaaaatgaaggccacatttagctatgtagatgatgacatcattcattaagccagaaaaaaaaatgagggaaagcaaatttgaggtgaacatggaggaatgtttattttttggcatcaatggacgtatagatggatgcgtctgtcataagcattgagaaaactgtaatttgtagcaaaaaagaacagaggtgaataatatcagactcatctttataatctgaccattcaaaaaaatttaaaattaaaaagattatgtacatagtacatatatatacatatatatatatccacaattgtattaatcatattaagatagcaaaagtgatcgaagcttagtttaaaggaaagtggtgagtttagcttttgatatgttacttttgaggtggtacgagaataggagttctgtgaggacaggaaatttctgtgttttgcttatcattgtaaccaataataacaatagcaatagtacccttagaagtcactaaacacatttgttgaattaataaaacca

SEQ ID NO: 43846 - DNA, 1036 bp, Homo sapiens
tcattgtaaattaaactataaagtgcttagctgcaaagcctaacacataggtgccagacaaatattatctaccattgttatacttatcactattattcttacttgaagaactatgtagaaaataattattgaaatccatgcaacaacatttagcatacttattaaatgcaaactgtgtgaagcattgttcaagattctggagtctatattttaggtaagaagctagacaataaagaaataaataataaatgggaaatttttatatacttgtaagtactcttgaaaattaaatagggaaatatgaaagagagcagctagggaatgaaagaagggaataaagatttttcattttttgtaacactagatggtatgcttaagtaagatcataactaagaagtgaatgataaaaaggagtcaggcttacaaagatttcagggaagaggatttcagacaagggaacatagaaaacaaagggtctgatataggaataaacatgctctgttcaggaccagaacaaaaaacaactgaaacagtaaagaagtggaagagctataaggtcaaagagggatagtacatactgacccacagaaagcactgtaggacagagtgagtgaggagtttgaaatttttccggagtgcagtgggaaatgaatctaattgtttaaagcagtaatgtaggttggaggtaatggcaagcaacacccagcagtggcagaagaaaacagaggaagccgaagacttaattaagatgggaatattccctaaattgattctcagactcagggcaatccctatcaaaatgacagctgaggagctgccttttttttttttttttttttttttttttttgcagaaattgacaaagtggtccaaaattgatgtgaagaaagataaaggacccagaataggcaaaacaatcctgaaaaagaacaaagatagagggtacctcccaattttaaaactttttttttcttttatttttttttggtggcagggtctcactctgtcacccaggctggagtgcagtggcatgctc

SEQ ID NO: 43847 - DNA, 1034 bp, Homo sapiens
acccaggctcttaactgaaagcaaacaaatttatagaaagaaaaaaatttgttctctcacataaggtgttctgttatggaagcactgcctttttgtcctattttatcttttgtcagtagacactactttccaacgtgttctgtgagaatgttaacgtggttggatctacttgagggaatcagcaagttttattaaatattagacgacctcatcttttacttttaaggaacatggatatatggctatgtctaaagattgaatattaaattatgtcaaagcactaaaaaaagttaataaatttacaggtcacatttctttttgtaattttctttgaaaaaccaaggccctagtggtcaaacattgaaagtaggttcttgctatgaaatgaaaaattagtaaaatgtaaatgtatctgttaaattgtaaatctattttcacttattaacagtgttattaagtgaatataaaacatctcacttactacaaataaatgaacagctttagtaatgcaaatgtaaaaaggaccatagtactgcatattgttatccaaattatgtccatctaatgacagaaattcaataatgactcccagtaaatatactcacagcagttggtaatctgcccacagtatacaattctgaacaggttatgtgtgtggtatttcagtccttctcccagcatgtttcaaagcagtttttgttataagaactttgaaacccacaagaaagaatttttagtgggttttcttcaattttgaaatgccttgggtctgtagtaacttattacatgaatccagcagtaactttggctttgatgtgcatagttccctattttgtgatgtgtaagaagtcatcaacatatggatacatgatatttggcctgcaacatttgaaattaaaaaaataaagaataaataaagcaatagatccaagtcagcttccaaaatatctatgcaaaaatgctactgttttaaaacaggcattagctccatctattgttctatgacctaatttgttttaacttaacttgaaaga

SEQ ID NO: 43848 - DNA, 1086 bp, Homo sapiens
cataggcctagttaaaaatataagcaaaactgatctctcaatgtcaatgaagctgtgcagacaaaaaaaaaattgcttaagatagggacgatccacagtgtggcagaggcaaagaagaaaagataacacagaaagaatcatgggattatggaagaacagagaggcttgagtaattaaggcaggattgaggggaaatgaagtcatttagtgttgatcatgtattcacataatttaataaaattataaagaattaaatatagatttgacatatgtttttggttatgattttagcgtgctatttttctgcaagacgtcgacatgacagaaagacattcagttattcattatttcaaccaacaaatatttatggaacaggctccttgtaaaataaaacattgttcaagccatgttagggcaaaattaaaaaggtaaagatgaacactctcgaattaacataaaaaaggtgaggattgttgcagtcgagaattgatgggatcatggctgcgaataaagaaatgacaacatttccagggaatctgaaaaacagtgactcaggatgttcaagacagccagagtctctatgctcacataagatctactataatagtgtattagagctattatcacagatgtgaattcaatgagcaataatcagttgtatagaacacatccctacaaaccattgtgtaattgtgtgaacgaacagctctaagaatgcaaaaggagagatcatttctgcctaagaaaaccagataaggtgtgaggaaaggttgaacatgggatcccggccataggaatggaaagtattccagcagtaataaactggaggaagagcaataacccaggagtatagagggttcagcaaaccataagataaatatactaccagaagcacagactttgttgagagaattagtggatcagagaactgaagaaagactcagtacagagggcagtacagttgcagagagccttattgcctagaaaaggattgatgctgtaatagtctgatgagcaagataaaatagtgcctagaaaaggattgaggcagtaacaggctgatgagcaggataaatcagaatcaaa

SEQ ID NO: 43849 - DNA, 1062 bp, Homo sapiens
ttagtcctatattcagtcatgctgtgggttataacgtggtttccttaaacacagtgacccaatctatttcttttattctagaaataaagatctacttcgactgtgtttcttttctatgaatgccagtattatagtcagtttctttcatcagaaattgtttaagatagtatcacttaatcttgactggtgtttgtatttattttcttttttgaaggtcaataaaatatcaaggctttggaaactgagaacattctaagatcaagatcaacatgttttttctaaaaattaatgctgtaaataggaaacatttggaaactttttttgcttttcatttctaaatacttttctgtttttcttcattaatgtttaaattttagagagcaaacactgcagaagtcgtgacttactgaatatagatgcatgtccactattcttattaatactgattgctgatgtagattattgtgggggctgagagattcgtaacatagcatgttatttattagcaatttcagaataagaactcaacagaaaatcattctaactaatgattgtttgaagttctggctctataatacatgtgatattttaaattcctagatactctaaacaattatgctttatgaattaaccttttttcatataacctatttcacatattattattgtatacttcctatgaatactattgtcaaagtacagtagacaaaacaaaattatatcctttaagcaagatggatgctgtaaatgtatgtatggacatttttatttctggttatttcctagatattgtttgtaatatctgctacaaagaatttaattttaaaatgacatgttaatatgcttctatatggcatgattatacataaagacatcattttacctacaaaaggcagaaaatattaatctctcaaatatgttaattgtctctttcaaaataggaagtgttgatatcttaaaatatttgtatatctgacaattgtgttttatcatatgtataactaattagttcacaaagaataagggggttttgataatcacagtggttgttgtatttaaagc

SEQ ID NO: 43850 - DNA, 1044 bp, Homo sapiens
tttgctactaaacagttaatagagtcaaagacagaaaaggcaagcaccataaatgccagtatgatgcaaaataattacagcacattcataagttagtcttctctctttcaagtatattttatttttagttaacatctcagaaatttaattttatttcctaggaattttgcaatttagctattccataagaaattttatgatacttatcatcgtacgtaatttcttttatggcatactgaccatagcgtttatgaaataacacaaatttgaaattgtccttgatatctgtcaatgttaaaattaaaaatatagattatcttaatttattaattaaggatatgtggatagaagatatgcattttatttgttaacacattaggtatcttacttaatcaatacaattatgccacaacatctcaagaaatcttaagatcaactttttgtttaaaaaaaagaagtgttttaggtattttataaaaactctttctccagtatgcacagtaaaactttgacgtttctgaatttctaagaagcatcccaaaatatactaaattatggaaaggttatatacttattttaataatgctaccattgctgtgattctcttttgaaattattgtttactcatacccagctttgggtcaagactgtgttttttttttttttaatgactacatatatgtggttcataaagttgagtctgatttgatttcaagacatatattgaaaactgcctttttggttaagtctctgatttagcctgattattatttttctttttcacctttctcattaagagtggaatgtacaatatgaactagatgacctcccactctgtgaaatcatttgcctttctgtaagattcattattgtcaaagggtgaggcaactctctaaatattcttattataaaataaaaataaaaataattttaattacatttacatactttaccataatttgaatattcttttccttaaaataagttgcccattcaatgtccatgtaagcctcaactgactctctaatgaactaagaataactt

SEQ ID NO: 43851 - DNA, 1029 bp, Homo sapiens
ttgtatcattgacttaccatcccagaataatcatatcaaaggataaataaaatgttatagagttctaatttttctgaaaattaggaattgattttgttttactcagatgaatcactgcatgaaaagtagagaaataaaaaatcaaattttaaaacatctttataagaagcttgttttttcccttaaattttgggtgcatatttagtaattaccattttacttatgcagtctctctgatgtagagttcttaaactgttgttactggagtctattattataggatactaccatttaagtctttacaataaatcagaaaatgggaaaatacacctttgcagccatttaatgaaacagatttcaactaccaacacacagtaatttaaagattatgatcaagtttcctaaccaaatatacactgcaaatagatactagtggagaataaaggctgaagtattgttttttgatgagtaccaatcatttttctactttagttcatgttctatctctgtgttggaatttctgagagtggagggaagacaattaacaaatcctagtaaaatacgtgagtgttaaaatcatttttgttcttccaccacctatagtacatattggtgaatggtcgtttagtttgtcctgggagaactctcagggtagctctcattcctgccttggcaaagtatttactataagtgaaaaaggaggtgccttttaaatttggaaaatcagaattaggccctcataaggttggttttaaaataccacttaaaattgagtaaaggtcaagaaaaaaacaagtaactccatcaaaaagtgggcaaaggttatgaacagacacttctcaaaagaagacatttatgctgccaacaaacatatgaaaaaaagctaatcatcactgatcattagagaaatgcaaatcaaaaccacaatgagacaccatctcactccagtaagaaaggtgattattaaaaagtcaggaaacaaaagatgctggcgaggctgtggagaaataggaatgcttttacactgtt

SEQ ID NO: 43852 - DNA, 1070 bp, Homo sapiens
ctgccccaagtttggtccatggccagctccttttcccttcctatcctggcttcatctagcaccaggaggagacccatgcactcatgtcggcacctgagcctgcatgaccagtctccaaccatactaaagatctctaaaaaatatctcctttggtctcctttgggcctaggaggacacatatgggtaagaacgttccccttaggaaggtggacctaaggaaaatgcttggaagtaatgcccaggttaattagacagggaatttgggagttccagctacctggagaatagtctatatagagggatatgagctttgggtgggtatcctgggccccatggattcttaactccttggaaagttgtgacaggagaaagaacagcattgggcctagctcaggggcctgggtctaagggtggtctggcttttttgaaaaacatatgtttcctagaatgagagattgctcttgggaaatatacaaatttgtgtgatgaagacagtaatggcactgtagtttctgaaaagaaaaatgtattcatataactcaagaagaaatgttaaaggctgaacacggtgggtcacacctgtaatcccagaactttgggaggccgaggcaggaggaccatttgaagccaggagttcaaggctgcagtgacctatgattgtgccactgtactctagcctgggtgacagagtgagatcttgtctctaaacagaaataagtaggagaaggggaaggagaggaatatttgagacataaattaatgcagaagcctatgaacagggaagactatttggtcttatttactatttgccttgatcaaagttctgtttatcaatacaaatattaataagactatataagaggctacctatgataggtagaaaaattaggagtgaaacgcatggttgctgtatccttgccaggtgtcatttttccagctgttgtagtcatagggctagactgtcagacagttcgagaagcaggtggctataattagttctttatgtaaacattaacattgtcatccctatagacaggagagttaagtagagccttttcccattatcttct

SEQ ID NO: 43853 - DNA, 1098 bp, Homo sapiens
aatttcaattgaatttcagtattcaattgaatatatagtattcaatttttcctttcatgtcaataggtatttatacaccatttatgtattttcagttgaagagctaaaaatggttatgggaataaaagacttcaatcacgattctattgttccctttaaagaaaggggtgttattttcctacctactattcatggaacaggaggttgtgttaactttgtaatgctgctgtaacaaattaccacagacttagaggtgtaaaacaaggcaaacttattatcttatagttctggaaatcagaagtctgaactctctctcactgggctaaaatcaaggtgttgacagggccatgtagctttgtgaaagctccagaggagaatcagtttccttgcctttccagcttctggagaacacctgtttgccttggctcatgcccccttccaccattgtccaaaccagcaacatcaggacaagtttttattgttgtcgttgttttcacattgccatgtttcagactctctcttcagtctctcttccattttcaaagacccttgtgattaaattgggctcacctgtgtagctagggtaatctccctatttaaaggtcagctgattagcaaccttaattcttctttgtaccctaattacgttcacaaattttggagattaagacctagacgtctttgggagccattattctgcctaccacaaagctcaagaaggttaagatgaaaagctgttactgccacttgatgacaggtggttgaggatatcattgcatccctgctgaaaacttcatgctggagtgtgtgtgattagtgggccgaatgcaatatttctctaaggcatagaatgagactcagtactttcccctcacctcgctacaggctaggatgcctagcagctaagtctgtgctgaatgttattaatgagttaactactaattatatgagctgattccatcagaatatacctgaatgtatataagtagtaggcagctaatatattcagataaaaatcattttgaacaaaactgaaaatatagccaaattcaaaatatagtttatgtaaataccatatccatttttttcctttcaaca

SEQ ID NO: 43854 - DNA, 1050 bp, Homo sapiens
tttttagtagagacaggggtttcaccgtgttagccaggatgatctcgatctcctgacctcatgatccatccgcctcggcctcccaaagtgctgggattacaggcctgagccaccgcgcctggccaaaacaattatttttctctcacctactcctgccttaaagtgtaccctgtcagaccccattgccctacctctagacagcatcgctagcccacctcataactatttgtttctttcatgtatcggaatagtctcaattttaggtatgaaacaaaaatgtagtctgttccgaagacaaactttaaccttgcatccaatttaaaggttctctcatcttttgaactctggaaaccagtgaaaagggaggttagtgtggtctgtttctttgccatttgctctagctcctcccaacctcaccttcttctgtctcctcttgagatcagggcaaggaatgaggaggaacaagaataaagaagcaaaagcttcttcctccatttctccttaatctccccatgtgtgtcctttgttatgtcaggcatccagatgctgcttttctgttatgaatgatatttgtatgttcttcaaagacactccacctttatcatcaccatcgcacacctcactctgcctattgcagcattttctgacaggggaatagactaaacctgaccacttataattcagctccttcccactgcattatacctccagggtctttctgaggctgtccccttaacccaacaggcagccctcctgggcagcatcccttcaagagaacttgtacttgttttttctgaaaagcaaggaaaacctcaggcatccctgacctaccatgtagtggaaatgcagccatctcacttctttcccaaatattatgagcagctccactcaggttcccaccttcagaattcttctgccaagaagtaggcataaatccccattcttatgaacattcctcaggctcatggaaaaagctgtcatattctacaagaactctctcacactttgcttgtgggtatcatcatgggacacctatactttttcaataat

SEQ ID NO: 43855 - DNA, 1067 bp, Homo sapiens
gtgaatgtattttctttttttccatctttcaactgataagtatattttaaagaaatgtagataaaatactgtttgaagtatagtgaccactattgccaaatggcatgaaaacattaagatgagactacatgagggagtatggtaatttaaatcacacttgagattaatctttacagagattaattttttttttcactataaaggaaagtgtttctgctgaagttagagatcttcaggttacaaagagcttggcagttaaaggagaacgaggcaaagcattccaaatttgaagaattcagtaggcatgactaacaaatgttgtgtctcagaatagataataaattagggcacttgttaaaagtatgtggttgccactgtagaaaaagtgtgtagtgtgattaggagtgatgtatgcatgtttcctgtgatactgtgccttcaattttgtaattctatattatcaatgtgtactcatagtcttgctatgatcttttcccaagataactcttaattgctccagactttacaaggctgactcagaagcaaactgtagaatgtcagaaaagtaatctccaccacttatcgttaactagtgaccatctaacatgacagatggcgccctgcctgtcttcagcagcttgtgggacaaagctgaatgtcaacaccactgggatgtaattattggaatctcttgggtccagtttggcgtgaccctgaaagcaattccccgagaactgctgggagcaatgcagtgatggaaagagcagagaaaggagaggtttgggagaccagcagcattttcaatttactgacaagtgttttcacgctgcttaagaatacgtattttgcatgtgacaaatcagattgacaaattgaagaattcatgggactttcattgtggcctaatttaaatattatcaaagggctttattttataatgcagaggcaactatttaatgatttaagtaattttgaaaaatattttaatgatgagaaagcagtataatttatattttaattgtttcttaaataatttggtaacattctcattatttgggaacacactt

SEQ ID NO: 43856 - DNA, 1043 bp, Homo sapiens
ccctttgtgcctatgcgagcaagtcagtgcttagatggataacagtagaaaaaaattattatacactctcctcatttcattatgcaaatttatcaggatgtatctccataaattcactataccttgcactgtcttttaaaacaaaagattcagatgttctttttcatggatatcattcattgcattaaaaaaatggcaccgagacacactcaattttttctttcataaacatcttttatataaggaggttgtaaaaaataacttattttaaataaaaaaactatcactttgctataataaagaactatcactttggttttagttccattactgttaaaaaaaaaaaaaaaaagaacgagcattgggaaatagagctgtgagctttgggcagattccagcacttttttgccttctgcattttcatttatatattactgaagacctctgttgttaaggaaaacacatttaaaggcaaggaacagaaaggtaagatgttctgtagctcagagtatgagttagcaagaagggcacatggaaggtagaactaagtgctgagccatgtgctattttagggtagcactagccatgaaacaatttgctgagctgtaaaagatggcaagtatgttccacgttttaaattgcaggcttttcagaaacaatcatttcaacccatcctccttatccaatgagaatgagctgtctttaagctctcaatagggatatgttacttctgtaaaatgctttttacttttcaaataattcccttattatttaatttattatagaatgcctatgaagtaaattggcatggaggctaaagctcttggttaaggttctacagcttaatggtggcattgacaagactagaagacaaaatggtataagaagagaaaaattaattatgagcagtgcttgtatagaatcagagataccctgcaaatgtatgttacaaaatctgcagaaatgcaaggctattaatatgagtattaacaacttgcttcatgatatttcttctccaagtatgtacaacactgtagctttaa

SEQ ID NO: 43857 - DNA, 1024 bp, Homo sapiens
cttaaaagttaaaaaaaaggatactagtgaaatctagatattgttgaatgataccaaacatttatttccttttcctactgatgtttggctcaatgtgaattgttaatgttaataattgttaatgtttggctcgattagaatccctttccagtgttctgaagtcttctgaccttggtctcttattgtcttctttcttcttctcatgatgttcttaacttttccaattatctgccaagtctcctagtttgtggcttggtccttaggggagcttgtcatgcagtaatgaaaactctaggcaatgttccttgcagacaggtaggcctgccctagttttcattgctggaagaaattttaaatatttttccagttggaacatcacaacatctcaatagagtttgcagtatcgtcctcctcataacaaacacattttaccctaattataccttccaccatgaatggggaaggggagatcctgaccttctgcattttaagattaagaaatttacttgttttgttgttgctgttgtttttgttttgagacggagtcttgtgatccgcccacctcagcctcccaaagtgctgggattacaggcgtgagacaccgcacccggccagaaatttacattttttaaaaactctctattgtctgtggtgagttacgagcatagtttcttcaatatttattagtcattttctctttatcatacgtgtgtattttcctaataaaaattaacatgtggctaggtgtgatggctcatgcttgtgatcccagcactttgggaggctgaggcaggtagatcacttgagcccagagagtttgagaccagcctgggcagcatggtgaaaccccatctctataaaaaatacaaaaattagtcatgcttggtggcatgtgcctgtagttccacctacttgggaggcagaggcatgaggcggcaggagataagaatatgaactgtttagtcagagggctggcatatctctcaagtgcagatggcatatttgattgtcctagagtgatgtt

SEQ ID NO: 43858 - DNA, 1035 bp, Homo sapiens
aacttttttctatgtacatcaacaactaaattgtgcttattttgcaatgaggattaatactttaaaatggtcacacataaaacatatattgcaatttttttattcatttgacataggtaatacgttcatgctaataaatgaagcatttttttcttctaaaatcatactcctattgtgctgggaatggtttctgtttcagatgtcatattttgtctttcattttaatatgtaagaatctttgaaagatttccatttattttggaaaagatactcattttctatgataccatatttattttgcagaatctttcatggagaaaagcttatgaacaccaacttaatattcataatggttgagagcaaagggacatgtccatgtgacacacgactgctcatacaagcggagcagacttgtatcctttgacatcagagctatctggaaaggaaaaccatcttaatgcattttgaatcttgtcacattgtttatattcataaagagaaaactattagactgctctgatcacctcgcaaaggcagaatcgattcctcactcaaaatttggttggaatgtcaagaataattatgctacacatgccccagaaaaggataattcacaatttagttctttaaatccctatgtacttgaattgtgttggatgagagtaatgatgtataagttatctctctcacatgttttgggaaatacattgcattgtatttatttttaatcatgtgaaaaaaactaacatgagattccttaacaagtctcttttagctgacggtccaaatccttgtgacatggttaagcaacccagataccgaaaagggcctgatgtctgctttgataacaatgtcttggtaagatcacacttctactggattaaaatactataaattaatggtcactgtccgcaagaattcaaggatacaaattgcaattttaactcaaacgtaatgtcttaaccatagtttttctcattaacatgacatacttgctggtagatttttttcatttcagtagttttcatggttagc

SEQ ID NO: 43859 - DNA, 1064 bp, Homo sapiens
gaaaaggaaaacttgtaaacacattaaaatataatgcaaacaaagtgctagtaaaattatttcaaaatgatgtggagggccaggcacagtggctcatgcctgtaatcccagcagtttaggaggccaaggagggaggatcatctgaggtcagaagttcaagaccagcctggccaacatagtgcaacctcatctctactaaaaatacaaaaattagccaggcgtaatggcgggcacctgtaatcccagctcctcaggaggctgaggcaggagaattgctttcaacctgggaagaaaaggttgcagtgagcctagatcgtaccactgcactcaagcctaggcaacagactgagactccatctcaaaaaataaaaaagtaataaaagtgatgtggggtagagttagattatcagctgtctggtgaattatacaagctggcattgtctagttaatggcatctggctctcttaccatgacattcagaccatccaaagattctaactcaatctacgtttccagttttatctcttaatgtacagttcaaacttcattgtttacccctgtattatattttctccacttttaatttttttgttttattttcaattctacaaatctgcctttttgtgttcgtgtctctatgtgcctagttcctagagcccatctctggttgtgtgcatcttatcattcattcaaaataaaatgcaggccgagagtgagggctgacgcctgtaatcaaagcattttgggaggccgaggcaggcggatcacctgaggtcaggagttcgagaccagcctggtcaacatgatgaaaccccgtatctaataaaaatacaaaaattagccgggtgtggttgtgggcacctgtaatcccagctactcggtaggctgaggcaggagaatcacttgaacccaggaggcagaggttcaaatgagccaaggttgcaccattgcactcacgcctgggcaacaacagtgaaactccatctcaaaaaaattaaaataaaataaataaaataccaacatatgaagacttgcccccaaagcaatctttctttattttgttc

SEQ ID NO: 43860 - DNA, 1038 bp, Homo sapiens
ggaaggaatctaaacatgactgagccataaagtcaggcaataacaccacgtagtgaaactggtcaggagacggattgtagctgatggccttaggtcacttttctgtagggctgccagatacgataaaagatgtccaattaaatgtcaatttcaaataagcaatgaataacttgttagtgtaagtatgcttcatgcaatatttgtgatacacttttgctaagaaggtatttattttttattgaaattcaaagttaactgattgtcttgtatttctttttgctaaattcatcaaccttgtctttcaggctttcagtttctatatttgtaatatgggaaagtcagcttccccattacttcacagtattgtaaagatcaagcaaagcctattcgtccagatatatagaattttataattttcatttttaacttctgtaagctacctatttttatttttgtaagtgaatacttgccacagagctattgaaaataaaatattttgcaggaactagaaccttctgattcacaatagaagctaaaaaatatccttgttgattattaatatgctacttaaagcagagtcacatacaaagaggcaggtgagcaatttatttttatatatatacacacctatatacatatataggtatataggtgtgtatatatatataggtgtacatatatgtatatatatacacacatctatacatatgtacgcatatatatacgtatatatatacacacatatatatttttaaccccatcagtattatgtacccataataattaaaaataaaaaaattaaaaattgaaagataatatgtataagttttgacatacacacacatattgtagaatggttaaatctagctaattaacaaagcctcacctaacatagttattattatggtctatatatcatcattaactaaagtcaccgtttatatgatagatttcttgaatttattcctcctctctaactgtaattatgcgtcctttgaccaacatctccccatctcttcctcccttgtaaccaaccca

SEQ ID NO: 43861 - DNA, 1049 bp, Homo sapiens
tattgtaattttctaggagggatagatcttaaattaattcccccaacttccaccctaatggtagttatgtaaaggtgatggataagttaattaacttgattttgatgattactttacaacatacaggtgtatcaaaacatcacatttcatactttatactattttatatgtcaatgacatctcaaagctgttacaaaagctgtagttgacattataaataacagtaagattcttcaaatagtcatatggtgccatcaatgtatggtgaggccttggaccctgaataaatcaagaaaatgtattcaaacttaatacaaacttaattcaaacttaagagggagcaatagtgcaacattttattggttgaagtttgcagaagaacactggattcagagctcgtcaaatattctgtattccttgtcataaacaagatatagatagaagagtcgtgtcttttagaagaattagcagcaaatataaggggtttcttttgtgctgttacaaattagatttttctttcttctcttgagaatccagactgaacaatagaatactctaaaagggagaattgctgacaccaaggccagttttttaaaactaagtaaacaaagaatagagatgtatgcttggctttctgaatcgattatcagtgaaatcctattatgccgttcagaataaaggcctcaaagtcaaggtttgatttccaagcattcactgcttttagtaggcttggccttggacatctataaaagacttaatttttacaaaatcgaattttctaacagggataaagatcttcatttcttaaaagttgacagaaaatgagaactaattttactcctaatctaagacaattagctaaatttgtcagcaactggtagtaggttcaaggctagattgtcactgagcagtcttctatagtgaaaaaatattgaacactcatgtacttctaatctcatctgaagcaagaaactggaagtatatgtgaatgtaaaacattactatttgtcaggggtagggaggaaaaagagggcaactgtcaatatata

SEQ ID NO: 43862 - DNA, 1062 bp, Homo sapiens
ccattttccttacactccaccccctaggccaaggcagacataggccttggacacacaggtctgacacagaggccttatacataggctctgggcacacaggccctggacacacaggtccaacacataagccttatgcataggctctgggcacataggtcccagaaacacaggtttaacacataggccttacattccactccctaggctgagggagtttttctagtgaggagatgtgcccacagggtggaatcctggacccagagttcacagcagtaatacagggaacaacaactccaggttatggcaggcaaccaccccatggtgactttaccctaatgttgcttcatacattaagccaggtttttatttccctacctttaagggtgttggggcaggcagcaacaggttaccgttcatccgcatacctggttggagaaggtcatccttcctcccctaggtcttgccacatggcctggccgcatatgggcctgtgaccaactagttacttttgtaacttctaggtagttaaccacaaggctaagactcgataagctccccagctgtcggtgcaggttatcatagttgtcacctccttggtgatcaccattcacattgctctaggttcagcccattgactactttgtccacacctggtatcaaaccatatggtgtcaatactaggttggagtgcaacagcagtccaggcagcagtagcaccttggctaaacccatctgtgtactatgccccatagggaatggaggatgcccttccttaaacggtgaaggcttgaggtctaggggtgcctcaggccccatggccttatcttgcattaggactacaggtcccaagatctcttgcaactctgctgctacgggacttgtactcagcatacttggctgctccaagtaggtgccccactttgctaaagtggatgtctgtgcgtcccagtttggggggtcattttccatgaatgcatccatctgctattaggtaagttgtctgcacgatgactgtagcccatccggccatgctgtcatgagcctgaagggcagcatatgcag

SEQ ID NO: 43863 - DNA, 1021 bp, Homo sapiens
ccagtttgtggtattttgttatagtagcctgagtagatgaagacaggtggaaaaggggtaagcagggaattccaggtacacagaacagtgtaggatattttgaggctaaaaaaaagcctgagtctgtacacagctgccagaatttcagcgtgacaagtcagccaggtgccagcagagattgacaaaagatgaggacagaagagtaaacaatggtcagaaaattaaaattcttacattcaacatagagaaagtgtactttgcctgtaagcaggagagtggcataatcaaatttgtattttaggtgtgcattattctattatttaattgaaagcaggttttgttttagtttttggcttttagtgagcttgcatttcaaatctagtgggtgttttgtagcaagaaaaagtacagccttatagaagtacaaacaggtgaggaaggagagctgagtttcttctgttttacttggaagtgttatgaccttgtctgaccttagatatatcagccttaagaatatacccaagggatcctgtactctgccagcctcaacaagactagctcctcaagaggttgtctctctttttgtttgtgtgtgtgtaaatattttttaaagacttacttgcagtttatcatattatatagttgtctttttgaaaaacactctagaatattacttaagaaccaggatattgggccaggtgcagtggctcatgcctgtaatcccagcattttgggaggccaaggtgggtggatcacctgagatcaggaattggagaccagcctggtcaacatggtgaaaccccgtctctactaaaaatacaaaaaattagcagggcgtggtgtgggcaccagtaatcccagctacccaggaggctgacacaggagaattgtgtgaacctgggaggcagagattgcagtgagctgagatcgcaccattgcactccagcctgggtgacagagtgagactccatctcagaaaaaaaaaaaaagaactaggatattgtacctagacttcttgtct

SEQ ID NO: 43864 - DNA, 1035 bp, Homo sapiens
gtgatgaagttaaaaggatatttcaggatatatccacaggaaattatataagattttatatgttatttaagaaacaaaaatgctttcctacaatgagaatttatttttataggattatgcttttctctctccacgtagtattataaagcttccttaaaatgcaggagaattgcagaagagcagtagagacagttttgcccattacttactactgtggtttgaatgtattccccaaaagttcttatgtttgaaacttaattcccaatgtagcactgttgggaggtggagcctaataagaggtgattgggcaatgagggtggagacctcatgaatggattaatgtcaatgtctcaggaatgggttagttatcatgggagtgggttattacaaatcctgccactggtgcctctctctgtttacttgcttgcttctgccttcaccatgggaagaccctcgctggtgctagcaccatgctctgggacttgacagtctccaaaactgtgtgccaaataaacttctgttctttataaattacccagtccatggttttctaatatagcagcagaaaatggactaagacacctactcaccaatcattttcctatttccccccttctcaaaactctcatactgtaactgtcataaaatgtagataggattatgtaggattgatcctaggcccagcttcagggataggttctgattggttcaggactgagataaaatctgtctaagccaatcagcacaacatgcgtgcatgattatagagatcacatcaagggtattttaataggtgggttcagtattattgtttgatggttgtgagaatatgacccttattctcccactggacggatgaaaaggatgatttcaggtttatttccaaccattttgtaactatgaggttagcaatgctgaacatgatgtgttaaagataatgctaacatatgaagaagttaagaaccaaggaaatgtctttctttagccagtcaaaatgatctttcataatctggttctggaacaccttttcagcct

SEQ ID NO: 43865 - DNA, 1052 bp, Homo sapiens
gtatacaagagaggcatcaactttctttttaaaactgtttgcatttcctatcaatttttctatgccatttcatcatctgctcctgttctggccagaaccactgtcttttcaatttcctgttgccagcctctcttgtacatcgggagctctggattaaagcttcccagccaccctttgcttccttatctttttcctgtcttatgctatttagcaggctttttggatttactgtcttggaaaggcttcttgtcattgtattctattcaacattcttaattgtgtcttttttttttttttggtctcaggtatctctcaaattctttccattctcactttctctagagcccaatatagctttttatgcaagacagcttgctccacatagcccaaataatttctcaacatttttcccaaccatggtccacacatccccaataattaactcttctgttttgatatttctggttttggttgaataagaagaagcgaagagaagaaaaaaaaggactgcgtgtaattagagggagagtgagtgacttggttgcccccagtaaatttttgtaattaaataaacgttaaacagtatgtttcaggttctctccgtaatacctttgctggctgttttatttatttttgtgaaagaacctttaaaggttatatcatatctgtgatatattatgctcagttaagtatttgctgagtatttaatattgaaacattatcttagacatttaccgtgaaacttcctttaaaaaagacaaattttaactttgatgcaattattgcactgtgttctttgaacaattttaatctttctaaactccacttaatatttcgcaaatacttttgtgtaaaaggataaaaacaactttatgccaaacgtagatttttcttctgcctatgtaaaatatttaagtaacttaatttaccaaaagtagcaaaataattgttaattctttatttatttttgttccctaaataggcagcttgtagagtctgtaggtttttttgttttgttttgtttttgagatggagtctcactctgtcactca

SEQ ID NO: 43866 - DNA, 1098 bp, Homo sapiens
cgtactatttttcacacacaaaagggagaatatatttattcaaaaatatggcatgatgatatgctttgttaatggtggtggtattgatgatagtctgagaaccacaatcaataaattagaaattagcaagcatgtgtgaaatttgacaagtgataatgggttcatttgtggatggtagaaaatgaatacaattataattaaaaatgttctattttaatgaaataactatatatttagatgataaaggaaataaaatttgataaagaatcaagagaatttattcatttactgcatgtaggggagaaataagagtaaaaatgaatgactcaggtcttcagattgaatgactgtgtacatcatggtatttggactagaggggatctagtttctagagaaagtggtacttttcttttctacatgatgaatttgaggtgatggtagactctattgctgtagctgtcgaacagcaaatggaattagaagattgacacttctgagagagaggatggtagtggatatgtactttcatttaggtgacaattgacatgaaaaaagccagagcagaggcctgaatctggggttaaaacactgtatttatagagtggaagaatgaaatagagccagagtctcatgggaattatgacactcatttgtcatctgatgcagcacaggaatgagtttggataaagaagtagtttgtagttaaataaggaatacagttcaagaaagatgattatggagaaaatacagttagcttgaaatgggacataagagtagttagacaaaggacataatgaaataagttaaacaatgagtgaaatccaaagaagtggttaataggagtttggtaatgacgactttgaaagagtctgtgtagaaatttactagaatgaccacaacttaaaaaacaagaattaaaatttggatagaagagaggagctagcatatggagaaactggaacttaaatacattagatgtgtggatatccatttcacagaaaccactttggaaaattctttggcagtacctaccctacaatccagcaatttctaggatatttccaacagaaatgaatacatgtctcccaacagatacac

SEQ ID NO: 43867 - DNA, 1094 bp, Homo sapiens
ctatttagatgctggatccttcctggcttatcttttcactgttcacctgcccagccttgcatataataagcattgagttgtcttcttctaatgttagaaggaaactttgtggaagacagctttgtaaatgtctcataaaacaacaatttgagaaaactcaggttgaattctggaacacagaatggaaaagataggtacactattttctgaaatgaaatttttttaacttcaatttttttttttaatagccgcagttagattggtattcttcagggaaggtctaatatggtcaaaatacaattgtagtagcagatttcttataatacattgtaaggagcgtgggaaacaaaatctgtctctcgattcagatgtttaaatgaaggttctattataaagttaaaaatatttgaaaaattctgaatgcatagtcaccattgccatggcattaccagttttatttaatttgattcttatattaggcgaattgcagcgtttaaatttgtaatgtattgtaggaatgtgcatggtgtacctgaggtgccccttcccacaccctccctgccacacgcacataaaataaatttgaactaaaggaaaacaaatcagaaatatcctcaaagatgtcttcttacttaggaatcaattttattgttttggatatttttatagataaccctctgtgattcccccccccacattttacaattttatttacacaacactttgtttaataaaatggaattatgaaaacatcattttatttgttggcagtatatgaactagttataaatataagaaaataggataattacttaggttaagtatactgggaaatcagacacgccctccttctgctaagagtttttctcacaaatcctgctaaccttcctgcccacagctcttacctgtctcaaaggggtcaacccatggatcaggatgcatcagttacaactttcacatagatttttctccctggaacttgttgggagcatactgggtattttcaattccgatattccccaacttccctagatcactcggtggatccgaacataactgcaataacagattagatttatttttattttatttta

SEQ ID NO: 43868 - DNA, 1028 bp, Homo sapiens
aataactatttcaagagtacgtactgcatatcatgacacttttcagtctgggaaaggtaccttggctaggactgcaggattgcacagggttgggctgtgtagggggttcaaaggatttggggcctgattgaggaaagatatgaccatgagaggcattaccacaaaacaggttttattgggcagcccttgaacaggaatgcaagagcgaggaagtctctcacagcatgaagccatctggaagcttatggccatgaccaccatcgagaagaggaggagggcaaggggagctcctgggaagaggggaatcagagaggaggcttacatgtctatgtgcagtgattaagcagcactgggggtggttgtggatcaaagagctctgcatggcagcagggccttgggattttcatcgccccgggcttatttgatctattgctagtagatgtgggtggagttttaaggaatacacaaaggaggcagtctcctgtgtggctaaaaatctgtttgttggggctatttaaaaaaaaaatggatgcgtaaaaatttgagttttgttaagttctgaagggctggacctctcagggtcttatgtacattacaaagacaacccaagccacatatatactattcctatggcctgaatgttgatgtttctccacaactcctatattggaacttaaccctcaaggtgatggtattatgaggtgaggcctctcacaggtaataaggtcatgagggctctgctctcctggatgccattagcgctgtacagaagggcttgaaggagagagtttaccttccttgctcttcagctcctcctgccatgtgaggactcagtaactaggtgccatctttgaagcagagagcaagccctcatcagacactgaatgtactggtgccttggtcttgaacttgccagccttcagaactgagaaataaatttctttgtttataaatgactcagtctagggtattttgttacagcagcctgaatggactaagacaactgtattaaccctcacaacaagagg

SEQ ID NO: 43869 - DNA, 1034 bp, Homo sapiens
caggctggtcttgaactcctgaccgcaggtgatccgcccacctcggcctcccaaagtgctgagattataggcgtgagccactgtgcccggcctatttttacttattaattgaattatatgtacataaacttgcctcattagacatttggagctgggtgtggtagcatgcgcctatagcccctgctactcagaacactcaagcctaggagttagaggctgaagtgtgcctgtgaaaagccattgctttccagcatgggcaacatagtgagacccttgtctcttaaaaaaaaaaaaaagacatttgcactctttttaaaaataaatttcatagtatgattgaactataaatatgaaatttaaagtaaagaaaggaaacttattcataagttctggtcaccaattttaagtaaagagagtaaatacggtcattcagatgttaacaatattatagaaaagaatggaaaacctggattatgtttctgaaatatataagcttagaagaagaaagaagacagtggaatctcagatgacttcataatgccactctgtaatgttatcttttagtggcagttacagttctagtccttttatatatactagtacactcagaaatcaaagaactgggtggtagatgggaatgtctgcattgccctgggattccctattggtggaaaacatttacatgatactagtttttagagtcattatttgctactggagcattttaaaaattcatactaaatattactcaataattaccagtcggtgtgtataattctacaatagctgcaaacatttttgtattgaagagtttttgaataacattttctagttagtgatgtatttcataataattttgttttaatatatttaatgaggaaaggtttttaaaaaattattaaaatttcaattttactctacttgattctaattaaaaccaccccttggcaataaattctgcttcttatatatccgtattacaagaaaataattgaggaaacttaaggttgtttcttgtttatgaaggtggatga

SEQ ID NO: 43870 - DNA, 1035 bp, Homo sapiens
atacacagtatcaaatttcatcttcagaataaccttatgaggaagatatgttattgtgtttgaagataagatacagtcttcttacagtctgtaatctgttacattttgaggcgaaagccatctcacttttttttgaggagggggtaagactctattttattttattattttatttctttttcgagacagaatcttgctctgtcacccaggctggagtgaaatggtgccatctcggcccactgcaacctccacctcccaggttcaagctattcttctgccttagcctcccgagtacctggggttacaagcgcgcaccaccatgccgggctaatttttgtatttttagtagagacggggtttcaccatgttggccaggctggtcttgaactcctgacctcgaatgttctgcctgcctcggcctcccaaagtgctggggttataggcgtgagccattgcgcccagcacccatctcactctcaagtgtcaggtagaggaagttttatacccaggtatgtctgacttatgtctgtgcttttcaacaatgtgcttttagctagagctaaaaggttcattaagtcatagatgactttaacttatataaaatctttatataagtttttggctttatatatatataaatggctttatataagccattaacttatataaaatctgtttactaattttatagtattcaattttgtgaatgtattatttatttagctatctcctactgatagtttattttttatgtgggtgatatgaatactgtttatagcacatctttacacatatatgagaaaacttttgattgctttattatacttaagtcatgtaagtgaaattgtagtgtctaacagcatatgggagtcaggtggtggctcactcctgtaatctcaacattttgggaggctgaggcaggaggattgcttgaggccaggaatttaagaccagcttgtgcaatatagcaagaccctgtctcaaaaaaaaaaaaaaaaaaaattagccaagtgtggtggcatgtacctgtagtct

SEQ ID NO: 43871 - DNA, 1044 bp, Homo sapiens
ttacttttatttatttggatttgatacatgcctgtggatgttaaaagggaagtgctaaggctcgacatgtttacccagtgacagggcaatgagacacggcatcaaggggcacaaacttacataaaaacaaggcagtgagatggagctggtctcagataggacccaacagggcttccctccgggaacaaaactagtttagcagaaagagggtagaaatacactgtcaaatgggagctgaggggctggggtttaaatgaccctcagaagcatgacattgcaattgaatgtcctgggtacctccaaacaactaggaaagtatcttaataagggaacaagtcagtgttgaacatcgatcagccccagagagtaacaacacataattatagtcaagaaaagccatccattgccaactttctcttagtgccattgctgaaatcaccgtgtttgagctgctaagaagtgtcaagatgaaatcaggaggaaaaactcagagagtggccatagacctctaccacattctccatctgaagtttcttggtctgaagcagtactaacctggtaatgggattttaaatgaattttacattaagcttagacatttgatttttattccagactagatattttaattgattaactgagactgcttttagcagtaacacttttatatacaatggtgaatggaaaaattagggaacctgaaaggcataatgttgtgttcaaatatgattaatagacaagacaacaaaagggtgatttaaacagagtgtggatttatttttcctcctgtaataagatatacgtaggtaggcaactcaagagatttgcagaaatcccactctgttacttctgtgtctatctcactgggcaacctttggctgcaagggggataagaaatgtggttttagctaggccactgcttctctgaacaaaattgggcaaactctcaattacaatgtatatcccatcagttgatgtctatgttaagactttttcaggatttaatatgagttttatggaagatggtctagagaaaattcattt

SEQ ID NO: 43872 - DNA, 1024 bp, Homo sapiens
cattcgatgatctagataatagaatattctggaaggctattaatttttcagtgaatcctgtatcaattaaccattttcaaaagaatgatttagtgaaagaaaatatatggtatttaaacaattttcatttttatttgagtttggaaaattttaaaaccttcattattcttcagtaaacataagatatctttgaaaatataaatgtaaacactgtgaaagaaaaataaatgtagctggttgttttcttataagcctactaaagaaattacttaacagtctttgataattcaggtttttgaaaaaaggaagttaaaaagtggagggttttttggtgaaattattgctttttagtatctgcagtaattgttattgtgcatacatgaacacagattttatgtatttgaagattaaattgttaatcctatcttttataatatttttgaataaaaagtcaatttaacttattgccttatgtgctagcttgtttttgtttatatgtttgactctaaactacttattgcaactttattttacactcatttgtgcttttgtcttttgatcagctccatctaccagccttatgaagagctgaaagataaaacgatatcaaaaccttttagttgctatctctttgatagcaattttgctttttttttgttgggggtgggggcttgttactatataaaatcatgttatgattctgatgactcttatgtattaggcccttacagaaactctgtgaagtagacacattaaacatttatacattcttattttataaatgaggaaattcagaagaccaatgttcttatccaagactgtgtagatagcatgaggtagtggtagaattcaactttatgacttctgtctaaaatccagtttgttcccctctaaacccacattcataatttgaactattttatttccaagatgtgtctgctaaatgacttttttttctgacatttgctacgtctatatctcaggaactggctccctgcaatgattatataactaatatcattgg

SEQ ID NO: 43873 - DNA, 1070 bp, Homo sapiens
cccagtttcgagattggagagtgcagcatcaagcctcaaaattgcatgtacaaaccactgtggtacaagatgttttacaacctgttaacataacctatattttggcaagctggtggtcctagagcaaatttatatttacatattttttcctgacacactcaaactccaaaaagatcaagataaagaacagggtggtgtttctaatcagttgtttatagttttaaatacattccaatgggaacttgtaagccaaataagtaactattgttcttactagttttttttttctttcacacagatttatgagaaatatcaagatttgtatactgtggaaccaaataatgcacgccagctggtagaaattgcagccagggatattgagaaacttctgagcaacagatctaaagccctggtggtgagtttaaattggatctgctcattttattattttccttacttatctattatttaattttcatgctctattgaggggttttggtatgcgttcttcttcttagtaactgtgttcatctgatatgttcataaaaaatgagatatcatggtttaaatgcaaaccccaaaatatttctaattatgtttattttatattactattatattttaataatctgtgtttaattgattatatgtatatgtatccacatgtacatcatgatacataataataaattgaacatgtttaaatccatatgtacatcatgatacataataataattgaacatgtttacacaacataaaacccagaatattatcatcctctttagttgtatagtctcttattccatcacccttcctctctgctagaggtggccaaaatgctagatattcaagttaccattttttttctttttaaaaatagttttccctcacaaaaatgctttgctaaacaagttattctttagtttgcttactttttagcattatcaaattcatattgcactgtatgtaatcttcagctacttggttttctccatcaacattgtgtttgtatgatttatatgtatgtttgcacttagatttaattcattttattcagttaaatatttta

SEQ ID NO: 43874 - DNA, 1051 bp, Homo sapiens
tacacttacttagacaactaataacaaataaaaggtcattctctgatttaaggggtcactttccttttttctctggaggactgccatcccgcccactgcccactcccctcccctagcagttctctgaatagtctctgtgaatgggccagcacgcctctgtttaggcctcagctactcttggtgcaatacttgaaaagagcaggtgcaggtcagaagtgaatgggacagcccaagatcactgctgggaaacatgctcaagcaagtcacaaactaatctgggaatgacttcagacaaagaaaacaaaagaatgctttacagtcaaaataacccacttgacagagaactccaggatgagaagccttgggaaggactagttgcttctgtctcactttcattttagttctagtaaattttagaggtaaaggacaaaaccctggccatcagaaaatcaggaaatttccttaaattgaaaagaattcctatacgcagttatttatcataatcctttctcactggaactctgtacagtctgtaaccctgcttcaatttgaactttatttctcttactttgggattcacaatatctttgttgaggatgcttccttcaagtcacgaagattcacgtcctccctgatatgtttttttcttaatagtctcatatgtcagtgggtaaaataggtctattaggaaatatgcagtatctataaatatttttgtatttatttatacacttctatgaatataaaactataggaaataaaatctgtacaaaagtaaagactggaaaaaggcaaatgcaaataagaggccggggttgtttgaatgcaaatatgtagaccatggatgttacatagctattaaaaattgacctgagaattttattcttgagttttctaccagccaaagtaagaagggaataaatctgatgtacaatttatatatggaaatagtgtactaattgcataagggagctcaagtattttttcctggtgcttaagatgagaaagacagccctgccataaattttcaatacttgagttattgaagatt

SEQ ID NO: 43875 - DNA, 1051 bp, Homo sapiens
gatttgccttaagaaatccctaaagagcttctcaagcttcaaccctatttcaactccaggtttgctcaattacctgagagcagggagaataccaactttcccaagagacttttctctctttttttaaatttttaaatagacatatcataattatacatattgcttgggtacatgtgatattttgatacatgtacacagtgtataatgatcacgtcagaggtttttctttttactccaaagaaatacaaaggtttgaacacagatacgttattgactccactttctgttagaggaaggttaagaccttagaaaggaattgctgtctccaatcttattcctacagctaatttcactgactttgagtagagtgttctactgattgtcattcaaatgagccacacctacattgccctttctgtaaacctttgcagatttctggaatatgagctcatctttattttgcttcttctgtcctattccctgaagacctcagagaaacttccgcagactggaagtgtcttctcccctgagctcatgttgcatatgcaattttaaaaactcaagtaacaacacaaagaacacgtgagatatatttaacttatcaataaattttaacttatggagactttaaacaaacacgtcagaattttaacttcaaaacaattacatctatttatgggaatgtttattgtgtataaggcactctgctcagttattttaagtttattaaggatatataccttagttcatattattctccccataacccaggaaattaaatacagttaactgtgttttaaagatggggaaacagagactgggggtttctaatagagatggggaatttctatggtcatacatcaagtaagaatgaggcatcgaatctgtacatcagctaagtgggccagcttcctgattagaaatgtcagggggcagggagactaggagttcagttcagtagagataacacctcataccatttagcattctgtacttctaaatgctgtgttgttaacagaatatatatttaagaatggaagtgaagaactca

SEQ ID NO: 43876 - DNA, 1054 bp, Homo sapiens
tctctttgtctcacagaaaatcagttggttcttttacttctaatggtggagttcatcctgaatttgataaatctttatgaaacaagattctgggaaaacacacaagcaaacaaaaccaaaaaagcccctaaaaacttacccgaaataaaccacctgcttattgccgcttcaggaatgattcatttttctgtgtctcaaatacaaggtacaactctcaaaaaatgtctttgaagcaaacttgtactgctcttggctgttgataacctggctgtatctatccatctccatctgtctgtctagctacctatcatctatgatgatagatttcatttaatacagagaaaatttggtttttatttttccttcctttctcccttgtttcttttcttcctatttttcctttgtttcgtcttttctttctcccactttcccttcttccctcccttcatctagatttctctttcttctttttcctttttgtcatttttcttctaagctctataagatttataaagaagaatgaggaataagataaaaatcactcgattgtgatttaaaatgcaggtagacgtatcaagaaatgtgtcttttggagccctccttgacccctccccctccattttcaacctagagttaataaaaccctcctttgagtcccattctaccttttacttgcctctattggcgaacttaatatgctttatttatttgcattgcatattctcagcacagtctcaataaagttttgtttatttctcaacttgaccttgggcaaatttttctttgcctcttctcactccacctttctgttgctccctaattctcatttcaacaaagggttgttgctgctagtttctcactgatgctacactagaagtctatgaggtgtctgtttatctgtaaataaaacaatgtatgcaaattatatatatcagtaactcaaatgttattattttacacatttgtttgatgattttaaattttcgaatattaggaataatttttttacaatgttttaagagttttatcctgtcttgtttatatcataaagatg

SEQ ID NO: 43877 - DNA, 1087 bp, Homo sapiens
tttttttatgccaatgattgggactcaaagtagttaaatgagcagtctgcttgattccaattattgtgttctttatgctagaaaatatttctagcatataggctgagaaaatacatacttactataatactaaacattgaccatggtctgaagtgttgtattataaatgcaggtaggcatgcctgttagtccaacttccttcagactattaattgtacccaaatagactattaattgtgctcagctattgttcatatccatgaacagcataatattcaattcagttcctcagtcacttttagaatacacattttatcaatgaatttaaatgaaataattatagtaattgaagtgccttacatgcttatatgagacatgcgcttagagggtttttaaatatgtaactacattacgttgaattactactaatataatacaaagcgttaaaattaaaatctgaaaagcagaatgccgtggataacccctggcaagtatgcattagcttccatggcagcaaaccacatggtgtaagggaagctgtcctggaatcagactgcttgacactgaccttgtcacttacttggtgtgcaataccaggaaaatatcttttacttctctctagctcagtttactccatcatatcatacattccatcagagttggagtttttttgtgttttttttttaatttgatgttgtgtttttagtgtctagaatagtactcaacatataacaggcatttgatacatttttttgaaaagatctgcaaagtggaatgactatattatctgcccataggatgcttcaaaagtatactgtttaccagaattcttagcaaatataggagatagtagcaactaacaaatatgggaaatgctaatttttactattgaaattgtcattaggttttattattatggctgatggtaaaagaagtataaaaaaataatgaagctggtgttttagagaaaggccctccatctggggcagcacatttgtatctaagagttggttcactttagtcaaacccagaggggagagctatggctttatgtacattctcactaataaaagtttgaagttgcctt

SEQ ID NO: 43878 - DNA, 1022 bp, Homo sapiens
aacacttgctttcagcaaaccaactattttgatactgcagtgaaaaggaggactgcatactctttgttcatagtttcagtaaatcagctaatctgaaggtagctattcccttttgatggcttctgagattatttgtatatagtcaagaagcagatgtatgtaaaattgttaatccacaaagattttatttccaagaatgaagataaaaacattaatgcatgcctggggcaggttgagttctctctacgttaaagaaagtgtatatatatgtatatatatatatctgtttaaaatatatttggcctatggggctgaggctatataaaagtctccattgataactcagatctcagagtgtctgcgaaagtacaaaagtataaataattctccctgtattgaaacacatccagaattaaacaatatattcttgcaaaaggcaattaaaagttttcaaggaatggagtgtgtcatttaagtttggttcagatgttcagttagcaaatagtgagaattgcagagctttttcattttgtggaccttagtttctttccaggcatctgtgcacactggaattaaaatgcatggaaattttttttttttcttgacaaagcatcttttgcttattttctgttctattggagatttttctgacagcctgttgccaatgatgttctgtgttgcacgtaggattttacctaatgaaaccaaggcataaattatatcaaaagactagtacaaggttatctatttttttaaatgcctttccatgcagtccttactacattatatctgtcactatacacttcttccggaacagctgtctcaagaacttctatggagtttttccagactgttgagataaactagtttcctagaaaatcagagttatgtgtttcaagactctcttgaggggtccttattctgctttccagtaggtcacttaaaacgaattgaattgaactagatctttttacaaagatgctgcatctcccagataatagttacaatgtcaggtcaagaag

SEQ ID NO: 43879 - DNA, 1084 bp, Homo sapiens
gaacatctgcaataatgctttcctaaaattataagtaaatcaattttcatggtcagaaatttactagacacaagaaagagtatatatagtgggttaaaatgggaagtaggacatcacaatttcttttctttggaaggatctgaaattttttttaacgatgaaaattcaagatattttcaaattatataagacattgattatttaatgaatgaaatacttaataaaaggttttgtggagcgaagtcaatctcctgtaggtaatcttaacaatatttttggaagccttctgcatcttcagtttttcatttgaaaagttagtaacactgtcttctgaggaaagaactgatggttgacatttgtacttcatgttagatttctgaataaactttatgaaattaaaaaatgcaatatttttcataaagatgtgccatttgcttttctttcgagaaaagaattcatatgcactgtttaatcaggacaaatctcaaatctttgggggaaaatttcaaatttataaaaactgagtgcaaagactgtagtgtcaataaaggcaaattattatgcttctgtatgtaaatttctctcggaatcattagtaaatatttttgggtttttttttttgccagtttcatttttcacagaaaaagtaatgtaagaagtttttatcagctgaagaggaagagcatgccatcacacactataaaattaattatgcactaattggagttggacttcaattagaattagtagttcaaagtttttttttaaaaatatagagtgtttacatttgtgtgaagggcttaaattctattatggtaaaacaaatgatgtgtcagttaagtatcttctttcattttttgctctcctgtttaacatacattctaatataaattttcttttggattaaagtagtagttaacctgttctaagagttaacactaaaatagatgtttttcagacaaggaaattttgatatgattatttctctgggttaggtgtttcttttggaaatgtttgtctccctaaggtgtgaaacataaatacatgatatggtagcagccacataatgtgtattggttgatat

SEQ ID NO: 43880 - DNA, 1056 bp, Homo sapiens
tactttattgagatggttataattacagtttctcatcactgatcctttaccagagggttttagaaggtgctcagctactagaaatcaaatgactctaaggacccaactacttcaccttcaagacactgtcatttgcagaatgaaactataaccaatttttgtaagtccttcatgccaatgaatagattttgaagttccacaactacacttttttgtttgttttctgtttctgtctcctatgttggcaaggctggtcttgaactcctggcctcaagcaatcctcccaccttggcctcccaaagtgctgggattacaggcatgagccaccacactcagcctgcaactacacttttagccatacctctataagttatagcaatcttaagtctatttgtggattctcagttctgatatggacttgctgggaaaagaaaaactatttttaaagatattcaaatagaaggaaagccccaaaatatgtgtctaaagtattggtgttatttaggatctgttcccatgtttgtaacccatttgttactatagaaggaattctgccaaaggattttcttgttttagttttacaacaatgtcaatctttctaatttttatagcttaaaaattcaagattgcccaatagtcacattaggtttaaaataattaacatgcattgctttcattaaaacaggggttttcaaccttggctctgttgacattttggcctggaaaatcctaggaagataccctgtgcattgtaggatgtttagcaacatccctggcctctatccactaaatgccagtagcatcgttccacggtgacaaccaaaaatgtttctagacatggaccaatataccctgggaggaaaagtcacccccatttgagagccactgctttaaaagaaaagagttcaagcctgtaattccagcactgtgagaggccgaggcaggaggattgcttcagcttaggagtttgagaccagcttggacaacatagtgagaccttgtctctacaaaagataaaaagaatagagctattcaaatatttcattatttgtcatg

SEQ ID NO: 43881 - DNA, 1032 bp, Homo sapiens
aaaacaaaattaaaggaatgaataattgattccatgagagtgaagacattcacaatattcaaggataggaggatagatggtaatattaatgtgaaacataagcatacaaatgtaaaatgtatgtgaactggcagtagaaaaataagcaaggggaaatgggattcaataaaggagtaaggatttatattgattttctagaatattttcttgacaattagagtgatgatcaaaggtaggaagaacaaggatgtgaaagtcaagagaaaaacgatgagttctcagcttttttgtatgctggacatcctacagcaagtttctaaccctccttagcagtctcagctgctttgttgtaaaaatggtatgaatagtacgtaactcaaaatgttgtggaggtggttaaagaaaggcaacgcaaaaaaagctacgggatagtgtcagacacataggagaaactttgcaagtgttactttctcttttcttccatccctgaagacaatactgaagagattgagaaaaatcaaatacactaaacataaaataatattggcacaaaaacaaaaatcaaataaaatccatctgttcaaagtcatgtgttttgagatgttttgacaaaagatcaatacatcctatataatagaaaattagatgaaaataaataaaagcagctcactttttgcttaaagcataatttcaatgggatgtttgaatcttgttagcccagttattaacaccatgaaatacatttttgtcgcttccagatagtagtaattatttttaatagagtaatgaaaataaccaaaaataactgtactaaataactcttcaatgaaaaaatagcccctgatatatataggaaagtagaagctgttgaattgtattgaatacctccttcaccgaaggcaaattgattttgatgagaacaggttcagcctgtagtgtaaaaataatctagcatctggatttcatttatatacctaaaatgactcagcaaatatagaacttttctctctaaatccattttcaactccctcc

SEQ ID NO: 43882 - DNA, 1039 bp, Homo sapiens
tacaacttagtcctactgcatgccttaagatgacagtcacaattttagtatagcaagaaaaattgaagtgaaaacctcatactattgagacaactacaaaaccagtcctacatctaaattgaagaaagtagctaatcaaatgcaatcctaaaatgcctaggagtttagcaaatgcagacatatcaagggtagtcctgaaaagggtttaagtaaagtaaggggaattattaaaaagactaaattgtgttattaagcctacctaatgttagtgattatctttgagggacttattctttctagtgggtctgaaataaaggtcagtgattatgtgtttgtgtgtgtgagcgtgtgtgtgtgagagagagagagggagggggagggagagagagagagagagagagattaagactcatttcttaatgtagcttttcattccttatttagttacttggtgattcttagagaagaaagtcaatcattacaggtgcacttagaatctgattctgaagactgttctgaatgtctttccatttgttcagacactgaatcttaattttaccatttcccttttttgtgtgtaacatggtattttatcaatgaggagatgaaatggtacccatattacatccaggatatagaagctaacaagggggcatacctggagtaaaattttaaatgatagcttttgctctgaatataaaaaattccaagatatttgatataattttttatggactccagatcgtttcagtcttgtagtaaaacatacatttccatgctcagaacaccaagctactgcaggaaaagtaccgttgcctatttctaatagtgtggtatttggaagaggatgtttggaacatgcatatgatgtctctgagtttgaactgatcggaaattgttaaattgatatagtttgagctgtaggttaaatttataaactctttcaaattactttgctcacaatagatctgctgttagagtagttgctgttatccctaatttactaatgagtatgaacagtgcagctcaggggagctaa

SEQ ID NO: 43883 - DNA, 1048 bp, Homo sapiens
gtatataattttctttttatacttcgttagatttgatttgctaacattttgttgagagactgtattttttaatcattttcttatagatgtctagaaaagaaatttcaatttagaagtcaacagtgtataaatgatagttaatgtcaaggaataaaagtagagtgtggtgtttgaagccaagaaataatagtatatagattaatagtattactcccaccactaataacttacattgctgagtgttttatgccagataatattctaattggtttagaaagtatttgcttttttggttttgttttttttttttttttttaaaaagcacttctagttttttttgtttgcttgtgtttttttttttttttttttttttttttttcagtttttcagatgaggaatagttcaagtataagtcagtcaaagaatgtaccctagaactggctttccgacccagattgcctcacctaaagactcaagccctcaaccatcacacaatattaatgattggaatcccctttggtacaccgagaacagaggactggagctagtacttagggaaagaagactgtatatgggtcaggaagcggaagatcatatgaagaaataacaaatttgaggaaagatgggagagaatggggactagaatttttgtaccatttattcataataagctgatgaaacctcaatttatcttattttgttaaatcgtagcagtgaaaaggagacctagcatgactaactccattttgcttccaaccactcactccccaccaaggtgatatcttttagcttaaccgcttttgcttatctctgcagtaggcccagctaaccatggaaggaatttagtttatagtttaaagcaaggagataatagttccttcccaaaactaacccctaaggagataaggagggtatacatagaagtactaatgttgtgttaaagatttgtaggagcattgtgacctgaccaagaaaaagaagcttcacaaagcccccagaccctagacccttgctgtcacacagatgtctgtgatcatcggtaacctct

SEQ ID NO: 43884 - DNA, 1023 bp, Homo sapiens
acaactgtcattaacatatgtattaccacccataatatgcattagttctccagaacttgtttctcttacgattgaaattttgtgccatttgatcaaaatctccccatttcccacaccccctaacccgtggtaaccaccattctactctctgcttctatgagtttaatttttaaattccacatataagtgagatcatataatacttgtctttctttgcactgaataatgtttcactgtgtatgtgtgtgtattatgtatatagtcacaatttctttatccagtcatccatcagtaaatactttggttgtttccatgtcttggctattgtgaataatgctgcaatgaacatgggagtatagagatctcttcaaaatacaggtttcatttcctttgaatatatacccagaagtggaattgctgtattatgtggtagttctatttttaattttttgaggaagctccatactgttttccataatagctgtactaatttacattcctacagtgtacaagggctctgttttctttatgcccttaccaaaacatatgtcttgtcttcttataacagctattctaacaggtatgaaatgatatcttattcgtaattttgatttgcattttcctgatgattagtgatattgagaaccttttcacatacctgttggtcattcgtatgtcttctttggaagaatatctactcaggtcctttgctgagtagattttttaattggattatctggggggttttttgtttgttttgtttttgttattttgttgtgtgagttccgtatatattttggatattaatcccttataaaatatgtggtttgcaaataagcttgtaattattaaagaataaacattttattaaaaataagtgcttttctctgcttaccttttactatgatctaactatgatactttcaatatgctgcagactctcattcttatctttcttttgttgttaccttgttacctagaactcttatgtttcagcctaatttcttcatctgcaaagaccta

SEQ ID NO: 43885 - DNA, 1057 bp, Homo sapiens
cagcctctccacataattctttataaatttttaatacctatttttccttctttttcagatattttttatttttaatcatgagtacataataattatacatatttatggggtggtacatgctgtattttgatacaagcttataatgtgtaatgatcaaatcggagtaattagggtatctatcacttcaaggcttaatcatttctttgtgttaggagcattccaattctactcttttagctattttgaaatatataataaattgatgttaactgtagtcaccctattgtactaccaacatcagatattatttctaactctattttctacccattaatcatcccttcttcatatccacctcctcactgtgcttcctagcctcgtgtaaccataattctactctctatctctgatatttttcttttccaagttccaagtatgtacgatttttattatagttgacttgaatctataaattaatttcaaaacatgaaaatttttatattactgtgacttctcatctatggttatccatttagcttttcttttaatataaagcaaaatatttttacacacgttctatgtatgaaacatctataaaatatatataagtattataagtcaaaaataaaatgatttattattgagagtagtgttttttctattgcatattttaacaaatcattccccgtatgaaaaatttttattgttgaggattttacatatgtgtgtgcgtgtgtgtgtgtgtgtgtatagtataggaaatgtataagataaatggaggaaaatttcttaggaaattactaccttaaaacaatcagtatcatttcatctaatatctttggtctttttcatatataaacagaaactgcaatttcttgttcccgtttaatggtaaaatatatacattaataattttgacagtcattttgttaaaatatttattttttactcatttacaatcatcaaatatttaataggaatattattctaggtattatatggtatcaaaaaataacttctttttcttaagctttgaatctagttgatagaagcaatt

SEQ ID NO: 43886 - DNA, 1050 bp, Homo sapiens
tttaactttccctgcctattttgagggtaaacatcatataagtttttatcaacatcacgagtttattaatcagttatatttctcctcttaaaaatttcctttttatacctgttggtgattttgggggagggagtgtctgtatattatgttttagataatttaaatctttatcaatttatctatctggaaatgattttcccttatctgtcactcatttttaaatttctttatgagattcattcttatatgaatttttttatttttatgcaatcaagtattttaatttttctttatgattacttttacatttttaattttatgagtacatagtacgtgtatatatttatggggtacatgtgatattttgatataggcatacaatatataataatcacatcaggataactgggttgtctgtcagctcaagcatttctcatttatttgtgttaggaacattccaatgtcactcttttagtaattttgaaatatataattaattatagttgactgtagtcaccctgttttgctatcagatactaaatctgattcattctatctgtatttttgtactcattaactatccccacagccctgctccacccactatccttcccagcctgtggtaaccatcattctactgtctatcgccatgagttcaattgttttaatttttagttcccacatatgagtgagaatataagaaatttgtctttccgtgactggcttattttgcttaatgtcttccagttctatccatgttgttgtaagtgacagaatttcattctttttttatagatggataatattccatgctatatatgtaccacattttctttatccattcatctgttgatggacatttaggttgattccaaatattggctattgtgaatagtgctgcagtaaacatgggagtgcatatatgtcttttatttttttttaatttttttagtatttattgatcattcttgggtgtttctcggagagggggatttggcagggtcataggacaatagtggagagaaggtcagcagataaacatgtgaacaa

SEQ ID NO: 43887 - DNA, 1051 bp, Homo sapiens
aactgattgatgcccagtttgtataaatggcaatatgatccgttaacctctgacagcaagagacaattcttttaggctttaatttctgccaagtcagaaaataccttgtattggaaagagttttaaaaatggcagttgagctttcttaaaaagctggtcttacagaatttggaagcatactgagaaaaacagcctaatcagtttacctagtgaattttttgtcattctggtaatcaaattcaaaatgagtcagaattactcataatggatatttattttattgttgatagcacccttttctaagctaacttttttactatgaaaataatatttaaaagtaaatatgtttcctcatgtttcaggaagtcctggagtcataattttgcttccttagcaagatgattgtgcatggcctaaataatgtaggaattgctaggagatatttgtcactatgcaacaaatgagtcttttaagataagacccagtgatgtaactgagattttttgagatctttactctgtctgcctgggtggcttccacattttccattaaatactcaaaaatggcctagtggagatatcctgcattttttagtttgcaaacacatatcttccttttactttaatggccattacttaatacattaaaaagcatatatattcagtactcaaaagcatttacatacacacacacaaaagaaattaaaggctaaaagaattatcaataagaagaaatcaataaggataaaagaattctaccattaattagtttcaaaagaattacataatggagactggtcagcacagtggctcatgcctgtaatgccagcactctgggaggccgaagtgggcagatcacttgaggtcaggagtttgagaccagcctggccaacacggcaaaatcctgtctctactagaaatatgagaaagccggcatggtggttcatgcctgtagtcctagctactcaggaagctgaggaaggagaattgcttaaacctgggagacagaggttgcagtgaactaagttttccctactacactccagcgtgga

SEQ ID NO: 43888 - DNA, 1050 bp, Homo sapiens
tatttttaagaatgtttatttatcaaagtctttccttcttctattaaatatttagcaattacctttctaaaatatgaaattttgtaagatgttttcacctaaataaaaattgaaagcaagtggattacacaggagaaccattatgaacatttatttagatattaatcttaaacagtgtttatttcagttttcaaagttagcttataggttatacatttaagttaaagtgctcataatcacttgcaatttcattgtaaaatgaacaaatacataaatattttaagaaaaatttaagtttattcagataagtcaccatgcttcaaaagatctaagaaatgcaaatatactgaaaattgacatcctctgaaaattccacttgctatttacccaagaatccactggaggtcattactgccattaaataataactgaaaagactatgtagtgaaatgtatttttaaaaactatattcagtaaaagcctgctcaatttggagaaatagaaccacaaacacagatcacaggggccttacaaagtttatgtctgaacaaataagtcaattaagtacactttattgaaaattgccttccattaacacacaagaaagaaagcaggattttctcctgtatctgaattttaaaattaaaaaggcagataagacataaatagttatcattttaattgcaataacacagacaagtagttaatgatgataacaatggtgtaacttgtaaactaaatatttggtaactgaagcaataggcagaggaaaatagcttttctatgacacaagtcataagaagtccatatactgaagagcgtttgattaaaataaagtgactattaaccagaaaagaaacattttacataaaatgctaaaatttattataggaaaataaatcaaacccaaagaaagtttattcaatgctaatttgaaagaaaattgataagaaaactttgagggcccaagtccacaatttggtgagaccactaaattttacatataattatacacacacatatgtacatatatatgtatataatcttgct

SEQ ID NO: 43889 - DNA, 1033 bp, Homo sapiens
catcagtatcatatatcaggtttatgttggaaagtgtttttaataaaataaatttctatttttatgctctgtcatattaggtatattttctgtaagtaaaataaataaatatatatacatatgtatgtgtgtatatgtataaaattggtcaaaggcaggccagataaataaacaaacaaatatataaattgtttcctctatttcttaactaaaactgattttattattaaatgtattctcaactaaatcaattcaaggcctatgtctgtccttttcctgtgaaagtatggaaccatatggttggtagacatggaaataactgcttcttcctgaccagctaccagatgttcagagttctttgttcaattacttttttttttactagaaattataaaacatactgaatcaatctttatagctaagaataataaaaccgttttcagcaaaaattttgtatttatatagattgcctataagaatatttgatagaaatgatgtattatgcactatcttcttgacagagaaaatctggtctgcagacgtagaaaaaaacacagatggatgaaaacaattctgtaatcaagatttgatgttggaggtacccaagtaaactgacagggaaagactaaattgtggaagaacttcagatacaaatttctaagtcattttatatttttgggtatttatagtccatgtaagatacctctaactttctaggtgatttaacctacataatgtatggccctccagaccgagcatgaaaacagcttatattcctgtctttgtaatgtgtatttgtcataaccaagagtgtagatcaaaattctgagaggcactatctctaacatggaaataaacaatgtaggacaatttctatggtaattgtcatgattccgtatcttgtatcttgaccaatctggactttatatgtacataatacagtgtttctcaaacttgggtttctgattttttttaaaccctgcttttttaacttaccaaacttgaaaaaacaagcaacaaacaaacaacccta

SEQ ID NO: 43890 - DNA, 1050 bp, Homo sapiens
ggtgtatatagaggcaaattcaaatcaaatcatttgtgccacttggggaagtttgattaacgagatcctgcttggttttattaatctttccacattcttcacttctcactcttgacacctaaccattctttttggaaatcacctttattttcttcacatttagtgcagctttaataataatttaggtttgaaatttttcccactgcatttttttataaactatttacaagatctttatttctaagcatgtggtgaagatctttctaattttctaacctcttgttaacaaaatccacctggtaaagaaaataaaatattaaagtaattgagatcttttacctcaagcattttcttttggccatacttcttagattataaaaaggtataaacatgcagctttggattgtaatatcagaacaataatgactttagtaatgattctcagggtcattgataggttctttaatgctgtctttgaggcaagtgtgaatagactctaaattaccattaagaattctgtgactgctgtgattacctaagcaaaacatatttgatagattgtataaatgtttgccctgtctccttagtgaatgaatgaaatattacctgcttgaaaaaaaagtaactttttaaaactggtctcttggtcatgtttaattgcatgggtttgttgcttactttatgtactgacaaaagcacagcaaatgattcaggcaggaagcatggttgatgcccaataccacccctccttagaaagcaaggaaaagccaaatttatgtggagtcaaatggtccagtgaacctagtcccaagctatgaaactctttgatgagactcagtaagagtctttatctaaaaatagataggaagttaaaaattccagcagattcacactcaaaattaggcaaaggctgatttcacatttagcatatttacagagaacaccaaccattggagcctggaaatgcacaagaaacaaaacaattttattcctgcctaagagtgccattttcagggtttcagaacacagtgggagaccgttgattagaag

SEQ ID NO: 43891 - DNA, 1069 bp, Homo sapiens
tcaatatacaatatttaattttataaatgtaaggtttaaaatacattagaaaataaagtaagcattcagtacataatttaactatgattttgaaaaataatttgtttagttaacttaggatatttgtttcagataagaaagtgataaacaagttttatgcaagattgtttttaatgagttttaaataaaccaagttttaatttatatgagatatagttgatttggtaagtaaaaatctgttgttttattgttaaattaatcaccgttgatcacaatatatagtttaggtaggagatgatggttgtttgaatgagagtggtattgattaatagggtagcataattttgttagctacacaaagtacaatattgataatttcctaaggcctaaaatatttatttatatttggaagagcctatctcaatacaatattaaaataagttaagcagaaatgtacctaaaatattcacaaaatttagatgctagccaactcaatcactttgtctctgaaaacatagattctaagcaaaagtttgagaaagtacatacatgtacttttaaacatgtgtttaaagtagacagtgtgcctgatccgtatcataatttttttctagtaaatgtaaacctttgttgttgttaagtagagtttttctatttaaatatcatcattttatgaagtaggggactgacatacactgtttcaacataacctttttttgtactattgagtattttttgaacttcatggttatgctatatgataaaatatacagtagaggttaaaacattatttaaaatgtttttaagagatgtgaaatgtatgtgtaggaaatacactttatataacactatttaaattatctttctcaatacttagtaatttctcagaagtttctctacaatttcttgttacgtagagatttgtcagatggctttacttttacttcttggcaggactcccttgaatctttcaaatgaatgaaattctatgctgcaagttataccacagtctactttttttctcacatctctcaaacaatgagacttgggattttaccaacttcgagtg

SEQ ID NO: 43892 - DNA, 1029 bp, Homo sapiens
atgcctgttgtttgtgtgcaggaatgctagcaaattttgcatattaattttgtatcctgaaactttgctgaagttgcttatcagcttaagaaactttacagctgagatggtaggattgtctagatatagaatcatgtcatctgcaaaaaaagacaatttgacttcctctcttcttatttaaaaacctgttatttctttatgttccctgatttccctggccagaacttccaatgctatgttgactaagagtggtgagagaaggcattcttgccttgtgctggttttcaaggggaatgtttccagtttttgcccattcaatatgatattggttgtgggcttatcatatgtggctcttataattttgaggtatgttacttcaatatctagtttatagagaatttttaacgtgaagagatgttgaattttatcaaaggccttttctgtgtctattgagaaaatcatatagtttttatttttacttctgtttacgtgatgaattacatttgatttgtatatgttgaaccaaccttgcatccccctgatgaagccaagtttatcatagtggataagctttttgatggactgctggattcagtttgccagtattttattgaggatttttgtatccatattcatcagggatatttgcctgaagttttctttttttgttgtatctctgccagattttggtatcaggatgatgctggcttcataaaatgaattaggaaagattccctccttttcaattgtttggaatagtttcaggagaaatggtaccagctcctctttgtacgtctggtagcattcagctgtaaatccatctggtcctaggctgtttttggttggtaggttaaacatgcttactttctttaagctaggtttattcagatttttattctcaatattaggtatatgtcagttctgacttttgattagtaaatacaaatcagaaatacaccaaagtcagtgaacaaatttatctcacaaaattatgtgttcctttcatcatttgtatttttttttagtatg

SEQ ID NO: 43893 - DNA, 1083 bp, Homo sapiens
atttgacacgatcttttgtactagtttcagcctacaaagtgagttcttaaacattcttgctaatttaaaagtttcctggtttcagtaataatgcttgagacttaaccaacattttaaaaaatttccccacgatattaaaattacatattcatttatagtttatatgtatttgtttttcctatcaaaacttagtactctatgtttcatatgaaggcgtatattccatgagtactgaagccattttcacctatgccttctatttttaagaaatcacaattttttgttcttttgtgtattgttaaatgcatacatgtgactagaaaaatcccaaacattattgctaagaatttatattcatattttaataaatcatatctaaaatgtaagaactcagtatcaatatttctcttaccattgtataaagatgaacttctgtttttattcttgctgtcttgttcagtaacattttcaagggatcagccgtgtgtatgtatagcatgagtgatgtgagaagggtgttccttggtccatatgcccacagggatggacccaactatcaatgggtgccttatcaaggaagagtcccctatccacggccaggaactgtaagtagcttaggtgtttaaaatatgaaatgaatatatttctgccaaaggtcaaaaaacaatgcagctacagacagatattaaatgtatcctgtaatgtagaaaaaagatttcaagattataaattaaagcaagacaaagattttccatgattgaatgaaatttcacatttaaaaacatgttctttacagatgtcagttcttaaattcagtataagatataaatctaaaattattaaatcttattttaatttttgaccacacatttctaaatttttgcaaactatttttacatggtagtagagaagtgcagaaataattttcaatctcatgaaaatacattttattgtgtcttccaggtttttacataaatatttgatatttctataaccttaattttataatttacatacaaaacaagaaatacaaccttacattccttaactgttatattgttgtattattgtgtatgtatatac

SEQ ID NO: 43894 - DNA, 1074 bp, Homo sapiens
tatgaagaatagtttggtcttgggagtttttacaagcttagggtaaaatttaaaggaaccacacattttaaggaatcttgtcatctcctgaatgagtcattaaacctgcatttccaggtttcccttgcttggagaaatgtggcgtgggaaactatgttgaccaaaacttagagtaacttaaagcgttgcagcaatcataaacatgtctttagataaaatataacatgacccactggagtcttcatcagcaagccaaatgaagtttcattctattgaatatgtcaattgactcatttagtctgtgaaactgcttatgtgaatcatcttgtgccagattctgagtttctaaaggctgggtatgtagtatttttcatctttatattctcaatggctagcacagaattattcattgttgaatgattttgtgctttatttggcacaccttttaaaaattaacaaataatatgcctgttaataaaacaaaattatttttggaaataataagaatgaaaatttacaataaatcaattcattataaatgaattgtgcattataatatatagtagagaaagtgagtttagtgttaggtgctagggcaggaagatatcagtcaaggcatttaagagtgcacaaaggattgtgagagtaatactatctccataaacagtatctccttctgaaccacacctattccagaactgaatcagaaaatatccaggtcatatttgttagtctgcagctaagagataggaaacatacaataaatatgttggaaggctctaggaatcaggaaccaggctgaggaattattgcattcctttggacaaaaacccagattttccttgtcctcttatcaggtcacagtatatacagccagaaaagaaagtgaggtttctactctaaaaccaagtagtagctaaagataagtgaaagtatcccattctcagtcttattgtatctgaatgtttgtgaagatcaaatcagttctaccaaatgaagttgtaagtgtaatccttgagtaatttcaattggttctttttcattgtccatacttttaggagaatccagacttgg

SEQ ID NO: 43895 - DNA, 1043 bp, Homo sapiens
tgcattaaaatttctaattatttaacaatttgatatcaaaaactacggcttgaatgtcatgatattatttctttgaaaactttggctactgcacaactacagctgcaaagtcaaaagtgattttttcttaagttggagggctttttaaaaactgtgtgcaggcaaaatcttgctctgggtttgattttaatgatacaccaaccagattgaaccataggcattataagcctactatgaattgtctttgactgagcctcaaacatgcagcctataattggacaagagctttgtatcatttgagctccatatccattttgagtccctgcttaatctatttaatgcaaggttcttccattattgagttgacggattccgcttggctgaaggttaagtgctggaaataatgactgaacgtgcagacttagatctttagaccaacatccagttaagaatatgttaagtaaatgcaaagtggataatattctaggacgtttctaatctctctggtacagacctgggacaaataactaaatatccagaaagtatcagtttcttaataccagacattgaaaatttttgttaaagataaagatattcttaaattatttatagaaaaacattaacagacttttagtacaacctctttgatatttcttctaattcataataagccattatgattttattggtataaaatttggggtcaaagtcaaatattgggactagttctagtatcttcagctccctaagaatgaccctcttgaatattttgagaagtacattatgtttttggagccttgtcatgattctaattagtgccaagtttaaatggttcagttccatggagactgtttccaacttctctaaaaactgaaacaaagaaaagcaccattaaaaaaatctgtccttactgtcaatcattttattctctatgactgcatcaattgactaaagttttcctctccaaaagaatgcattagtccattgagaattcaaatgtgataaaagaatcgttctatacgaggtaccttcctaaattgcaa

SEQ ID NO: 43896 - DNA, 1048 bp, Homo sapiens
aaagcaaatggtgataaacttttctggaggtgatatccttgaccatgtaggattctgtatatagaacatattattccaattcagtcataattgtgagctagtaaccacctctaacctttaaacacatttgctgctaacccaggattaaatatatgaggagctttttgctttttgctgaagtctgtagtttgatgttgaatcatgtagtgataatttttaatttttgcctcattttaacttgttcgtttaaaataatgtttcattttagagcttctaataatagctaacatttttgtagcagttaccatgttcaaggaactgttttcaatgatttacatgtataacctcatttaatccttatgacaacactatatgctagattttattattattttctattttctggatgagaaaactaaagcaaaaaatcttaaatggcttgcccaatatcatgcatctggtaaatagtaaagccggggattgaatccaaaaagcttgctccaaggtctgtgctcttacataacattataaaatatccatataagatccaaaaactatatccttcaagttatttctttctataatatcaccagaacatagatcctcatttttaacagcattacatagattttggcggacagaaaactgagacagctctgtggttttattgacatcttttattacgtttggcattaccctttctccttcttcctctctagtaatttttacctacttcccaagagtgtgtttaggattaacaactgtttggaaagactgtccctttacacaaaggtactatgtaactgcaaaacagtgaattatttaccctaatgaaagttagctaattggggtggggatagtagaagatgaggaaacaaaagggaactattccactttgttgaacatagtccccagtttaatccaaagaagggtagagatgacagaaagatatttggtagtattttgcttctatttagaggaaagttattcaaaagaaagtaactaaagaaatgtctttagttctgactatataattgtgggttaaaca

SEQ ID NO: 43897 - DNA, 1027 bp, Homo sapiens
caaaggaacgggtggaattatgtaaattagctgggaaagatgccaatgtaagtatgaaactgtaacaattatctttgtaaaacttctactgatatgatagcaaatatttatattgggctttactgaattaatggtattagtgtattatttttcagactaaactaacatattctatgtgaatattaatgtggaataaaatatctctatcttaccaaaagccatgatattatttataaaatttaagaaatgtagaaacactctactttctaatgtattaattctgaatattatttttgtcacaaaaaagattagaaacacattaaagtattcaaaaataaaccatccaaaagattgtagttctaggaacatgtatttttcatttatgcatacatgtttttgtaagtgtacacaaaaccttcagttattttagcatcacaaacagaattgatacataatttcaactgagttcaaattaaacttaaaatatctataagaattcctttatgtggtgacataatggaaagaacaataagaattagttaataatgaatgacagcattctggcgtaagaactagtaactacttcctctgaaatttatgtattagtaataatgattatataaaataactcataaaagacaaatagagggtactaatgaaacttttagtttaagctgccttgaagagcagagaaaacacttaggtatgactttttgtctctggtatggtcctatctgtcttgatttctgcactgtccaagttgtcctgcatgctccctctaatcatgtaacctgatttatctccagcaatgagggctatggctctgactggctcctctcctcatccgagtgctctgattcaggacagatattctgtcttctgtcctgacttcttgcattatggtaatggggagaattgctcctttttttggcaaaataaatcacattcaaattgtaacccaagatgaaaacaggttgtaacctggggcagaaacatagacatcttgaggcttcttttgcaccatcct

SEQ ID NO: 43898 - DNA, 1077 bp, Homo sapiens
ttgtctttcttgtttataaaacaacacatggctccccattgcctaccaaatcaattgcatcaaaacaccttcagagtacacatgtggtttgtatatgaccagaggatggaagtgacagaagatggaaaataatgtaatggttcatgaattaggtaataaagacagatgaggactagagttagaggaaaatttgagtctggcactttagatttgggaaccaattttaaagtcaatgactgttaaaaaggggtagattctgtcctaccacctggagtgttttcatgattaatccagattccttatcacccctctttgacttgctgcaatgaaaaatttgaagatgatggcctggaaactgcaatttaacaccctcctctacccttactgacagttgatttatgtgtttatactaggttacaaatttttagctgaaagtgcagccagtcattgtcaaaataagagaatatcagggtctaagataagtatgaggaaaaaacagacgaaaggggttgaggaactaaaggtgttgggtcccaccagtagctgaggtgatggtaaagagagtgatgtgggtaacaaagcagttagacacaatagacacagtcagtgagaaggggagaaataagtcacaatgaggaatttgtggaaagggccagaaattctgagtttctgatcttagtgaaacagaaaaaattctgatgatatatcaggtgaaattcacctctgatatttcatgtatgttcttttctattttccctaagtgttggctggtctgagaaataaagggacagagtacaaaagacagaaattttaaagctgagtgtccagaggagacatcacatgtgggcaggttccgtgatgccccgcaagccgcaaaaccagcaagtttttattagtgattttcaaaaggggagggattgtacgaatagggtgtgagtcacagagatcacatgtgtcacaaggtaataagatatcacaaggtaaacagagtcagggtgagatcacaggaccacaggaccagggcaaaattaaaattgctaatgaagtttcaggcaggcattgtcattgataacatct

SEQ ID NO: 43899 - DNA, 1047 bp, Homo sapiens
aaacctgtttatgccattaaccgtattcttggcaccttcctctactgattaaaaaattgatgaagcgcattatatactcaggtacatatttatataattttgttaggaataatatatgtccttttaaggtatatgaacccatctgcattttcccttgcctcttgtttttagcatcttctctgaatatttctgtaaaaggctgacctttggaaatactttgtagtgtttgagatgcgtgattgctttctctaccacatattttctccataaaaggagacttatgccacatacttgctcctattttatatgagaataattgtcaggaataactgatgtccttcttagtttaaagggaattacctgaattggttttaaagaaatatattgtgaactttttaaaagatggtatgcatatgtactcagatattgaaaaatcacaggtgatgaaactattgtgggtgaagcatgattttctcctgataaggtaaactcaaataaagtgactggcctgtttggacacctctggtgtcattcactccctactacaagtgatggcagaatccagtgtaaacacaatacccttgtcatgattgggttgtaatctaactttgcagtttagcccgtgtttatcttagtcacatgaaactattacatcacgtctttctcacgtcgtatcttatgtgtctattgaaacattatctattcacaaactctcgtttaaatgatttctctactgtgaaattttctttgattctactacatctcctatccatctcactctagaagtttttttttttaccatttaattcatcttctatatttctttttttaatttacataaaaaagttttattattattattatactttaagttttagggtacatgtgcacaacgtgcaggttcgttacacatgtatacatgtgccatgttggtgtgctgcacccattaactcgtctatcgcaaggacaaaaaaccaaacactgcatgttctcactcataggtgggaattgaacaatgagaacacagggacacaggaaggggaacat

SEQ ID NO: 43900 - DNA, 1056 bp, Homo sapiens
aaaacattgccctaaaggaattgccatctatttcgggaggatgaaagtaactggtgtgggtagtgatgacccagaataatgccctccttattttggcatggggaagaagggtgtagactgtgtgcccacttacaccagttacccagccgtggtgcacctgtatgtcccaggtctagggtctgttcttccattcggaggacaggcttattgggaaaatgggcttacatgatgggtgaatgcaacccatttcttagattaagcaacctaagctttcattcaaaaacatgagtaagatgtttaaaggcatcaaaattaaaaaaaaaaatagcccagaaggtatgtccagatggagccatttttattcaacctccttggcatgtactgtactgcatccttctcaggtggcaatccatcaatccatgtctttatttggtttttacatttttcattcattaattccttattcattcacatatatttttttcctgtgtttctggagcttttattaaatgaatgctgaataatcctctatgcctactgtaagtaaagggttagcaaaaccctttcttcttttatgtaagaaattgaccagtgacaaatctagctttcacagttgagtctgaatttcatttctcatgtcttctatggttttatgtttttttttttaaaggaaaccttgtatgtgtggaatgaacctaaatggtgcattaaaggaatttctttgcctgagaaaaagttggcaacctgtgaaacggttgacttttggctgaaggtgggagccggtgtgggagcttttactgccgttttgctggtggctctgacctgctacttctggaaaaagaatcaaaagtaagtaccctctgagatgatcacaagagagctagagggcctattttgttgtgaaaattctagacttgatcattatatccaataaatagattctctcagagacacaagaattttctccttgcgaagaaatcataggaaaggccttgagaaagcaagcagaggaaacgattgttattctgacagtagaaagatcatagaacattagag

SEQ ID NO: 43901 - DNA, 1044 bp, Homo sapiens
ctgtgttctgtctttggcatacggtatgagaaaattttgacaaaaggggaagaatctagaggacagaggccaggatattttgtataaagtatgattgaaatatttttttcaggtagaaggaaagacagcaaaggatggaaaatcatgatcatctttgtgatgttttctacttgtcttacagagatttgatatctttcctttgggcactcatggcattttgtgtttcttttggagaagatgatgatgagacagtaacggtagtgttaataccacaagcagctatcatttccatatttgtgaacgtactctcttcatatgtgcatgtgtgtgtatatatatgtgtatacatattcaaacattgcctctaatttctttcaacatttgtgtaatttagacattcctgtacccagttttcagataagaaaactgaggcttaatgaggttaagtaacttccccatgatcatagctagtcatcgctagtcttaggtctggaattctaactcaaatagtctgtttcaaaatgtagtgctttgtatccccttcatgtttttcagtttttacgttatagtagctgtgaacctgtcttatcactattagactacaacctttttcagagcagtttgcctaattcttgaatctcccatggtactttgtcctgtgcatagtaggtactcagtgagaatttccttaatagggtatttcaagtatttgaagggaaattttagaaaagaagaactctggtgaacttagagaaggtaaattccagtgggatgtagtgatgttctaacaaacagagctgcccaatactggaatgacatgttttttcaattagggaactttctgctgatgctcaaagagtgcctggtagggaggatgttttaaaagggagccttcttcgaaggaggcattaggctatacaacttcttcatctctgaagaggtgaactgcggatcacagagattttgctagtggcttgatattcaaatgtcttatattttatttgccttttaatgaccttcagtgttgcaaattattccaaatgc

SEQ ID NO: 43902 - DNA, 1028 bp, Homo sapiens
cactacttcgggatttagtcaatcaaaacttctgacttaaggtgctggtcctgggcttctctctgttctaccttcagaatgtatctaggataaaaagattagtgtttgccaggcatgggaggaaggagagatgaggagtgatagccatggcgtaaggggtttcctaagacagaatacatttggaatccactagcctaggccatgccagttacatctcttacctagaaaactgtttcaaccccctaagtggtgtcgttactttcatacctccacttctgttctctgtatagcagccagtgtggtcttttaagaaatgagagttatttcaaattatctccctgcttcaaactctttaatggcttcccatttcactgaggataaaatccaatctccgttttaagatatctaaggccttacatgttttggcctctccacttctcatttcatgatactcttcttgttccccaaaactgtagtcagattagctgccattttgttcctcaaatatccattcctctttttctgggcttttgcagtggctgccccctctgccgggaatgctcttctttgggctccttctctctgtggctggcttctcctcctgttggtccatttctcctctatgctgacagctcctccccaaccatggctggtgccatctcatcttccaggtcatatcataaatacctccttccctgggcaccctatttaaagtagagctctccttcttttctctttcagagcaccctaatttgtttccaatttgtatcatagcttggtaatctgttattttaattgtcaatttttttttgtctctttaactaggatgtaagtttcccaaaggggaagatcttttctctcttattctccttcaattccctcacatttgcatttagctcagtggctggcttcattgtgttaaggttttggctctgggaagcagatggcttggcttccctgcactatcattgtgaccacgttacttgtgtttcttctgtaacatggagaatatatcttatagaattgtg

SEQ ID NO: 43903 - DNA, 1033 bp, Homo sapiens
ctatgcttatccatattccctttaaaagtaacaaaaaacctgtagtgaattttaacttttaatgctttcctgtttaccctgcctaaatcagctcccactgccagcaatgggttaaccaaatgtaccaccacaagaccacctcctaggtctctatacttgtatgctggtcaagtctcaaacttagtcttcttgaagatcagaagatcactggtaagctctagaccatgttgaagaccatgttgaaaagactcatctgaactacaaccaggcttgagaggagacagtgccatgtctgatctttagagaaactgtactttaaaccacagcagttaagctttcgtgattctaaacttttcttagtggctgaagtgaatgaaattccttattcccatgtaacactaaacagggatttatgcttaaaactcccagcctccactcaactacatactgtcataaaactcaacctcagatgatgtgtttaaaggaggtaaaaagtcatagcagcaacaatgtgtgtggcttaaggactgtggctatttaaattggtaaattaagcctcttgggggttgctcctatttctttgaagaggttgtaattaacagtgtgccttctttgcttgaactgcctatttctaagaattattctaatgacagtttaccaaatcttcgacatcctttgaatcttctgaaacaggactgcccaaggatgatccaatgatatttgattcttcctgatgatgttggagtatgggatctgtaatgagtttcaagttagtcttaaatgtatatatttattctctaatccatgtcaagaatttaaggtattctaccacagtgtagaactcaacaggactagtagcttattggatcaagaaagactgaaacaagttaattaaatgtctgtttttttccatctaaaatttatcaggcacatagtaagtattatattacagtacctgttagtgttgtcaaaggcaagacagattcagtatctataacatcagatgcctggataaagccatgtggtgaaggaa

SEQ ID NO: 43904 - DNA, 1028 bp, Homo sapiens
tagaatcacatagaaagtttagaagtaacaccaaaaatggagttctcaatcttcctccaccctctaccctgccttctccctcaagaatgtagtagggaatgtcttcatggcattgtccatccaggcttttgcttttctttttttttttttgagacggagtctcgctctgtggcccaggtgggagtgcagtggcgcaatctcggctcactgcaagctccgcctcccaggttcacgccattctcctgcctcagcctcccgagtagctgggactacaggcgcccgccaccacgcccggctaatttttttgtatttttagtagagacggggtttcaccgtgttagccaggatggtctcgaactcctgacctcgtgatccgcccgcctcggcctcccaaagtgctgggattacaagcgtgagccaccgcgcccggccggcttttgcttttctgcaaagacttttctctgttttgccttgcccctctctgggagtgttggggagcattgccgaaggattgatttgtcagctggagttcagagctgtgatgccttataaatcagtccttggtcctgccctagcagaaagtaactgggcttctactcaggaaaacgtggacctcagagatccccattgtttaccattgatatttctttgggaacaacagagcctagcctgggaggtatctgttagggtgttgcacctttgtggctggcagaccgtgacctgttggtctgcaggatcaggccacagcttctgtggtgccattgcatgcctgccctgcagcagtgaggcacattatgttcctattgataggccaggccctaagtggtaagatgagatgaatggtctctactggtgagaggcattctaaagaaaataccgttggccatttctgctttgagtctttcatttaacgaacattcattgagtgcttacagtgtgccacactgtcaagaaggaaaacaagtgtagtagttcccactaattcacagcttcacttttctaggcttcagttacctgtggtcagccat

SEQ ID NO: 43905 - DNA, 1048 bp, Homo sapiens
agggtctcacgctcttgcccaggctatagcataagggcacatcacagctcactgcagccacaacctcctgggctcaaccgatcctcctgtctcagccttcaagtagcttggactacaggcacacatgcaccaccatacccggctaagtttttgatcttgtagagacaggaccttaccctgttgcccaggctggtctcaaactcctagcttcaagcaatcctcctaccttggcctcccaaagtgctaagattataggcatgagccactgcacccagcccaaaaaagttattttagatcaccattagattgtagtggtctttcccatcaaacataacaggcttgtatccctgtggtgaacatagaaggcattgatttcagggaaattagcatacaataatgtaattcataccctttggcagctaaaaaaattaaagtgcttgaaagatggactctacattgatgtccagagagaggatttataacccatgtaagtaccaacaaaaatacttaaaaattagagtaagacttgcattgttaaagtttgtagatttggattgttgaggcttaaatactgcatagttctatattcactatgtcataatttgcattgctgctgcatcagaggagcttaaaaatatttctaccttctatggcagaataaatttagagagcatgattctactaatttctacatttaacaagttttcttaacttgttaaaggaatgttagcaagtcaacattccttcccatctcatattaccaactcactcccagcactcagtttaatgatatgttttggtaagtgcttaatagatgattcatctctaaagatgagtagagttcatcagctgtatcatatcatgaaaagcacaaaaagtcagctgaactagcttttccgcatcagtctcgggacaggatttccaggctgaacaggccacaacaaacctgtgaagcataaataatgattaatgattacacaaaaggctccaaatagtgatggtgaatacaaccaggactttatttcatctggatattcatacatgaaat

SEQ ID NO: 43906 - DNA, 1061 bp, Homo sapiens
tgtatacaaatgaaaacagatataagctatcacctcatacctattaattggaagaaaacagattaaaatgataaaacccagtgctagtaaattacaatgaaacagatatatttatatattcctgttgacaatgtaagttattaaaatgttttaagataattatttagccttttattaacaagcaacaaatgcccagcaaatccagtcattgtacatgtaagcaattgttgtcaagggagaaaaaataaatcataatcttcaacttagtaattctctactcttgcaataaatattgaagtaagtcaaatatttaagaagaaaggaagtaaattaaagcatgtaaaaaatagcaaaacatgggccaggcgcagtggctcatgcctgtaatcctgtaatcccagcactttgggaggccaaggcgggcggtcacgaggtcaggagatcaagatcatcctggctaacatggtgaaacaccgtctctactaaaaatacagaaaattagccgggcatggtggtgggtgcctgtagtcccagctactctcgaggctgaggcaggagaacagtgtgaacccgggaggtggagcttgcagtgagtggagatgggccactgcactccagcctgggcgacagagcgagactccatttcaaaaaaaaagcagaacaccataagctatcaaaattatatgtagaccaggaaggtaagtgtgcatttttatttaaatttaatattggaacataaaaataatggtatgccaaaaacataaaacccaaaattgtttatggcaaataatccttccacgaaaaaactgtatatatgaaaataaatatcaggagagagcataagctttttatttttgttcttgcatattgctgtttatttctaattattatttctaaacactgaaccaagttaaatattaggtaggatgtttttcatgaatggtcctgatacttcagctattaaatggttaaatacttaataggaaatatttctttctttcagattaacattgatgggcaggatattaggaactttaatgtaaactatctgagggaaatca

SEQ ID NO: 43907 - DNA, 1047 bp, Homo sapiens
taaatagtaattcaactcaagtcaggtctcctaagtcaagaacatgcctgtttcctctatgtcaacccatcatggcccctgcaccttgtaggtgttgggtaactgtgtgcagaatgaatatttacgtagagtacttccatactgtgtgtccaaaagtggggagaaagggagataacttttacttattgatccctaaccggctctttacagtcattggattattttctctttacatcaacactttgaggtgtagttaattctacattaaagataaagacactgagtctcagaggttaggcagtttcccaaatttgcacaactgttaagtgtaaagtgaggaccaaacttagttctttggaaacgaaacccatttttgttggtcatgcctctgtgccctactgccaacctatcaaaagttacattttaaggactgagaaatgaaagtggaatgagttttcaaatgtcttcttttcagaaactctttgaggaaagcacacatctttggaattacattttccttcacccaggcaatgatgtatttttcctatgctggatgtttccggtttggagcctacttggtggcacataaactcatgagctttgaggatgttctgttgtaagtattgggctattatttagttaagctctaaaaataaagctgggatgaacatgcttcatgtctagataggaaaccctactgtgaagcctcatgaagagattctggtgattcctaaatcggcatttctgcctctgagtcttcatgtgccaccattgaagcaccccctttcatttggaggagcagtaacttctttcctcattgctggctcacacatagttgaccttttcaaatctgtgactgagtggagtgattccattcggagattttgagaaggccttggcatttgggaagaagcctagccctgagcaaggagtctgactggctccttttaaaggactttcttacagagcaagtaaaatacagatgtgttgtactaagttctgcaagcctttggcaattccaggatatgtttactttcccttgataag

SEQ ID NO: 43908 - DNA, 1035 bp, Homo sapiens
tgtatctaaaatttactttttattgcctgcattctttcactattttccaaacattcttcaattgtcacaaatggcaatgataaagagaaaaatataaacatcacattttaaaaataagtgtaaaataactgtgaacttaaaatgtgatcatcatagaagaaagagcactgcaatagaagtactgtgagttctctggttaattttgcgaagccacgtaaagctgtgtggctttaagcaatgccataatccatttaagtcttagcttctatttctgcaaaggagaagtttgaattagtcaatcttccttccagatccataactcagtttgataaattacttagtatctttttctacagagaaaatgctcatacataataataaatatgtaatcataaaattattttcattagtctgttttatagaattcaaattaatcaccactatttactcttgtgcctcttggtgatcggtgctgtctgttacagatcgctactgaagcaatagaaaacttccgaaccgttgtttctttgactcaggagcagaagtttgaacatatgtatgctcagagtttgcaggtaccatacaggtaataaccgctgaagagtgggaggagagtgtgaataatttttcaatcatcatatttgttttcagagggattactttggctagaaggtagggagcaagtggagaaagtgctcgaaggtaaaccattgagaaacagttgtaattatgcaggagagaaagtacaagaccctgaactaaggcagggacatctctgaggtagaacctgtaagaatgggtcactgatgagaagggagggagacatgatgctgagaatgactatctgatgtccaggtaggatatgaccctataatttgctctagttgaaaatgagttatttatggaacctgaaatttgaggtacctgtgggacacagagaggatggtgcttcctgggtttacctgtctttctgctttttaccccttctccagtgcagaccttcttcctttaatacagtcatcccagtgagggctc

SEQ ID NO: 43909 - DNA, 1031 bp, Homo sapiens
ctatgtggcccccactctctctcaaatctcatctcctataaccgcctttttccaatacaccgtctactccataaacagtggctcactgcccaagagtaggggaggggaggatcagaggagccaaatcagaacacaaatctgtccagaggaagggggtggcttttacaaattcatacaaaggttctttttaggctgctggcagcctttaaggctttcttgctggtgtatgaacagattaggtatgcctttgcctcagggtctttgcacatgctgtttctgctttccctgaggtattctcatcctttccttcattcaggcctctgttcagatgtccccttagaaaggccttctgtttcccctccccagtctctaaaatagcacctcccctcacttttctgttcttcttaccctgctcaatttttcttttatttgtaccttccatctctagaatctaaacttcatgaaagcagctactttgtcttttttgttcgtacaggtccaacacttagaaatcatgcgtaggagaaagtaggcactcagaaatttttctgacaaatgaaatgatctatttatgtgtttttatattaagtttctttcttgtgtattgaatgtcacatcctgagtactaaatgcagggggtataagtataaacaaaactgaccccatcgctgccctcttggagctgagagtctcataaacagctttaaggtaataaaatcattttctgtgccacaggatgtgagttggtttgatgaccctaaaaacaccactggagcattgactaccaggctcgccaatgatgctgctcaagttaaaggggtacgtgcctcctttctactggtgtttgtcttaattggccattttggaccccagcatgaaactaattttctccttacgggtgttagttatcatcattaagaaaatgttgaataaatatctaacctacgaatatatcacatgctttttgtagcaacatgttaactatttaaacattatatactgtagagcatatagataacttataaaccatt

SEQ ID NO: 43910 - DNA, 1050 bp, Homo sapiens
aaaaaaatgaaaaaaggaattaaatgtactgttagttacaaacttttaaaatatttttaacacctagtatttatatgttgcctcgccattttaaattttaattacctatgttagaaaaagacagaagaagtatgaaaaaaaattgctgtcactatctcagtagcctgatggtttttcttcacattcctcaggtattcttttctgtattaattggggcttttagtgttggacaggcatctccaagcattgaagcatttgcaaatgcaagaggagcagcttatgaaatcttcaagataattgataatgtaagtctgagttggccatctatccacctatctaaaagattgtccagttaagtcaatttctttgtcactttatccagctctccacaaaatatcactaaaagtagttattgtaacctagtaatctcttaaaatttgattctgtttagaagccaagtattgacagctattcgaagagtgggcacaaaccagataatattaagggaaatttggaattcagaaatgttcacttcagttacccatctcgaaaagaagttaaggtacagtgataaatgattaatcaacaattaatctattgaatgaagagtttctgatgttttcttgtagagattataaaaaagtgcatgtatatttaaacctagtgaacagtcagttcctatatcctgtgtctgtgaattgccttgaagtttttttctcactcgtcctggtagatcttgaagggtctgaacctgaaggtgcagagtgggcagacggtggccctggttggaaacagtggctgtgggaagagcacaacagtccagctgatgcagaggctctatgaccccacagaggggatggtgagatgacccatgcgagctagaccctgcggtgatcagcagtcacattgcacatctttctgatgttgccctttcaattacaaatgtatgaaagtcacacttactttttattccaggtcagtgttgatggacaggatattaggaccataaatgtaaggtttctacgggaaatcattggtgtggtgagtcag

SEQ ID NO: 43911 - DNA, 1057 bp, Homo sapiens
tagaaaaaagaatcctaacatttacatggaaccacgaaaaaaacagaatagccaaagctatcctcagcaaaaagaacaaaactggagaaatcacattacctgacttcaaattatactacagagctagtaaccaaaacaccatggtacaaagaaaagagacacatagaccaatggaacagaatagagaatgcagacataaatccacaaatctacagtgaactcatttttgacaaagtttctaagaatgtatattggggaaaagaccgtctcttcaaaaaatggtggtgggagaactggatatccatatgcataaaaatgaaactaaatccctttctctcaccatatacaaaaataaaatcaatatggattaaagacttaaatctatgacctgaaactatgaaactactaaaagaagacactggaaaaactctctaggacattagattgggcaaagatttcttgagtaatacccctacaagcacagggaaccaaaacaaaaatggacaaatggatcacatcaagttaaaaaccttctggactgcagaggaaacaatcagcaaagtgaagagacaacctgcaaaatgggagaaagtatttgcaagctatccatctgacatcagattaataaccagaatatatgaggaactcaaacaactcaataggaaaaatctccaattaacaaatgggcaaaagatctgaatagacatttctcaaaagaagctatacaaatggcaaacaggtatatgaaaatatgctcaacatcattgatcatcagagaaatgcaagtcaaaactataatgcgatatcatttcaccccagttaaaatggcttttagccaaagataggcaataacaaatgctggcgaggatgtggagaaaagaaaacccttgtacactgttgtacaacttgtacatttttgagaatgtaaattagtacaaccatgatggagaacagtatgggggttcctcaaaaaatggaaaattaaactaccatatgatccagttatccctctgctggggaaatactcaaaagaaaggaaaccagtatatcgaacctg

SEQ ID NO: 43912 - DNA, 1061 bp, Homo sapiens
catagtggccctgatgtgatgtacatccttagcttataaaaataacaggattaagagattaaagtaagacaggggtaagaaattatgaaagtattatttgggaactggtaaatgtccatgaaatcttcagaatttatgttcctttgctgcggctccacctggtccctccattcaggatccctgacttcctgcaacacatactatcatttatgatccatgaatgtttcatcatattattatatgaaaacaaccctggacagagattcaagagacttgagtccttgctttgccattctcacggtgaatacacttgggaacagtatctaacttttatttgaacttcattatttcatctgtaaattaggggcttataactgggatttcttttgggtccctatcaacattaaacttttctgattccccatgtctataatagaaagcaagaagatggaataaaatattagcataatgaataatacagaattttcacaatttatgttcgtaacaattacaaataatctttactttgcattaacggaatttcttaaatttctctggttcacagttttctgtttcttacagtcagcttcttgtagatgtagccaaatgacacagttaggtgatagtttagcattttaatgatttttaagttggctagtttatgtaaataacaaatgattagaacaaataaattaattgcttatgatgtattttcaggtcagaatttgagttataaaggtcatagagatcatctaatataattatcatcattctcaagatgaggaaaagttttcttagaaacattatttggcatttgtttctacttggataaaatatagcatgcatattaaaactattttcctttgctgtgctatgcccaaatggaataacataacttagtgctaaagatgttttatgactagtttactcaaatttttattatctgtacctcttatttgatacaggtaaatttaacagattgggaagactaatatcatttggctattgattacttatagaaagttattctcaaagtcttttggaacttttacttcttatat

SEQ ID NO: 43913 - DNA, 1049 bp, Homo sapiens
ttatccttttcctgtgtgaaaagataagacaattactttcttcttaattacaggtttttggctactgatgttacaaacaataaaatattggagcatagagttgaagaacagactcaaaccaggtaggtagataataaaagtctaaagaatcaataaaattactatttattttgataaaggacattattgatattattgacagaattggaatatgaactgtagagtacggttcaaaattaagtttcctgaatttgataattgtattgtgattatataagataatattctgatgtatttatggtgaagggacatgatgtatgcagcctacttttgaatggttcagaaaaaaaattatatgtaatttgacagagaatttgataagtcatggataagtaggaactctcatattgccagtagaagtatagattgatccaagctttctggaaagcatcatggcaatttgtatgacgttttttttgttgttgttgttttgattttgacatgtagtcttctctgtcacctaggctggagtgcagtaatgcgatcttggctcattgcaacttctgcctcctgggttaaagggattctcatgcctcagtcccccacggaactgggactacaggtttgcgccaccatgccctgctaattttttgtatttttagtagagactggatttcaccatgttggccaggctggtctcaaactcctgacctcaggtaatccacctgccttggcctcccaaagtgctaggattacaggtgtgagccaccacacctggccctgtatcaagttttaaaatagcttatcccatcaatcttactatctttcctacagtaattgtaggaaggttacaaaaatatatatatgtatgtataagaatgttatagcagaatattttatagtttggaaattggcaacaacctgatatctaacaatctgaaactgattaaataaatataattaactaccgtgcaagcaataaaaatgtaaatctgtttttattgacacaatgtctataatgtgtttttaagtgttaaagcagcctacta

SEQ ID NO: 43914 - DNA, 1048 bp, Homo sapiens
gtaaagtagccacaagagatctgggacaatagacaggattaaattatgtagatatgcaagggaatcaatagaaaagaaatgtaagcctgttatgaaattcaaacataaatagtccttctctgaaagtgcagagaatatccaattttgtctttctgacaacttctttagaaatcctattaatgttactttcagaaattctatgccagactgaccttatatacaaacacaattttaaaattctttttaaagtaacagggaaaagagagagaaactatggtatcacttaataaagcaccaatatcaaagtgaaaaataagttggcattttaaacccacatttgctttattcatcaacattttttaaaggaacaactctaatgataggttattcctaatcgaagctccgggtgtcttgttaaaaatacagcaaccacagcaaattgaaagccctcaccatgttgcactgtccgatgtattcctttccacagattgcatgtgccctggggatcatttccagcctgcagcgttcagaggaccatgccacttcccatctaaataaagagtggctggaggacagttcatgtggccagtccactccataaggactctcttctatcccatgccttcctgttcacacttactggagagacttaaatgttcctttaaatcagggtttactgcactgcaatgactatggataaatggaacttctcaggcagcagggtgccaatctgtagtcttatcaatgcataaaactggaagaggggaaaaaggcatacaatggaacataaaggccaaataactgctctcttctgcttagcaatgattttgtagtggattgggaaatataaatattagttgcatgatataaactgtgatacggcctcaaagtttctctccaaaatagatatttaaagagaaataatgctgtgcttgtatatttaatgctacctacctcggtggatgaaaagtcataaatatttagatgtaatgcctctagaaccccaaccatgagtatacatatagatacttcttgaaactctcccttg

SEQ ID NO: 43915 - DNA, 1031 bp, Homo sapiens
gggttgtatttctcatcatgttagtgaccccttctgggacaccagtgaacaggaaagaaacaatcccttgactgtacccctaacaaagcttctgaaagagaaactagctgggagaaaaagaagagtcgtgcatcaaaataacataaatcttttattgaaagtcactttactaatgttacaatgggagtaacatagaaaaccatggtatcttattagcttccgaagtgaatactaataaaactgtgccagaaatttgaaccttaagttacagtgacctttaaaaacatcaagattttgtttacctacaatgtaagaacaattttataacttgaacagccataaaacaaatcacacttgctcaggaaagcagttgccatatacatttccattggtgtttgccataaccccagtaattattaaaatagcttaacgaacctgaagtgcagagtagcagagaaatgttaaaataatgcgaatctaagtatatacacatgattacctgattaccaaaagtgaaaccatgctgctattaacacctcctcatggggtggcttccactatctatagatgcacatcacctgtcaaaggtgataaccgtggaaaacactagtgccgacctactgctggctaacatgtaagctactatgtttaggtaaaacaccccgtttctgaaagaagttgtcttttgggggtgctagtttggaggggcaagtcttccagcaagttaaaaaaggagtacatgcttatctatcctgaataagcctttttttaaagcagttttgcagttagtgtaaaaaaaaaagttttccatacaaaacaaaggtgttgagtcatttttgccctttaaaaagactggttgtagaatcagagtttgattttgtgctggattagaaaagaaaagtggggtttctagtcaggcagtgatacacatatataatttagcaggaacttttgtattattactaagtattcatatcagcattttctgtattgtgttacttgttcaacttagcaccgctatatttaaagat

SEQ ID NO: 43916 - DNA, 1049 bp, Homo sapiens
tttggaaatccccacgtaatacaacagtataaactccagttgtttgtgtttgtggtaagtgtctttgaccacggccatttctagtcttggatattatttggaatttaaataattattcaaataattatttaaattatttatccattgaagttatatctgctttctctaagaagttttgatgtgagaaaccctgtggattttatattagactgcttccctaaaaaaaggaaacttttccatctatcatttactcatatcttagaaagttgtaggggttgttttacccgtgttcaaattagaaaaccaaatgtaagctgccagaaataggctgtgccgtataagtgctttgaggtctgtcatataatgctgatttttctttcagttcattcaatgtgtcatgagtgtttaaatcaagaggaagctgcatgaatgtaatcaacattccaactggagctctcctttgcttgtcctctttgccttcggtaatatgtataaacttacatcacgactttctcttaacagctgttgtaaagtttattactttatgtacaactgaagttttgttttagttttgataataaattctttggaactttaataagatctagtctgttacaccatttagaactttcctgagccattatcagtcatgccttattttcttgctaaaactctatgtaaatttaagtatgcaaaatgtttaagtcacattatttatttttcattgtgagacactaaaaactgttaatcagactacagctgttatctttcctctcctacaaagaatactccacacataaaaacttaggtaaatgacatagacgcacttgggtgaaataaaacaacaaaaaaggtaatccagtaatccacgtcaggattcaccttagaagtttagcacacgcccttcaaaacctgttgaataatttgattggcaaatactatctgtcaccaagtccctttttgtcatctatttaaacctttgttaactctccttaaaaatcttgtacattataagcttaactatataaaaagaaaattgatagaaaaag

SEQ ID NO: 43917 - DNA, 1055 bp, Homo sapiens
tagctgtggattaaaatgttcaaactagaattcacagctgtgaatttatagtggcctttttttaaaaactatttgacatggcatgtattagatggctgtctttgaactctttgcatttgttttcattatcctttgttttatgtgactttagtatcctattactctttcctaattagaggaattaatacaaacgaagaacctttcaagttcctgttatttaatctagtcctaaacaaaataagcactttttggattaggggatgttattctttactgtgtaggcagtacatttaaattgttaattgttacgcaattgagctggtaaacaaggtaggcctgcctattagcagggtttatcaaagtgcagtgagatcacagcatggcctgttattctacatcctttcagtagatgaggtgtggcagattttagaatctgactaacaaaatgggttgtatattgttagagagcagtccttttaaaatttcattgagaaagccacatttagtgatggccttagatcaatgcattaaagagaaagcatttcctgaatcatggggcctatgtgattgaatccatttgcctactctctggtggccgtactgaaccacagaaccatcctgcctatgaggtgtcagtgttttgtaatgcagatattatatggccattagtcttttaaacccaacttccaaaccaaaaagcacaggtccgaattggatgagcaggtgggatactccagctcagagcctatgggcccttcttaaccagtttaaaaggaagcagtcatacctagaggtggagttggtgagagaagttgtgttccagtcagtaagattgtaattcagcttctcttttttccctgaatttagttgttcgtctgtgataaggttgagagaaacagctggaggtagggctttccttctaggtccattatattgtatgtttctgtgagaagaaaagatgtttgaggcattctagtagaatgaacagaagagaagaaaaagagtaaaggtaaattacagcagagattctttggaaattattaaaattaacatta

SEQ ID NO: 43918 - DNA, 1034 bp, Homo sapiens
ccttaggattctccctcactagaagagcagggcaggaaagaagagagcaggccaatagtatctttagaacaactgtcagggtggccctgggtctacatttccaaacctcattccctactatcctagctccccaagacatttatgcattcttgaagagcaaagggatcagcagacgcaaaaactcaggaaacggtatcctaaaaccccatctgcagatttaaaggccgtataagtgcaataaagctcctggggaagtctcctcagtaaataagatacctatttaattatgcttaatgcttgaataaacaactgcatttgtgcagattttttttctgacccatgtgtaaacatcctgaaacaatttcctttaatgctcatttgagaagtggtgccccagaaacttgagaagaattggccacaccttgaagtcttgagcctagcactgacttcctccctgcactccttttggaagtgatgagcaatgaatcgttaggttgccatggtatttaggaactaaaagcgagctcacacagcctatttcagatgtaaacaagaaaagagaggtccttcaaggttaaatcattgttataaagtaacaggagcttgaagcagcccagtcaagatttaagtacaagcaataatgataacagttaacatttactgaatatttacttttccaggggtgtgttatattattttaccttcacacaaactatagagtagataccaatgcagatatatgaagtaaacacctgtggtggctcatattgtgtgacaacttggttaagttatggtgcccagttatttggttaaacaccagtctagaggttgttatgaaagtattctcatttttagacagggtcttgctctgtcacccaggctggagtgcagtgatgcaatcacagctcactgaggccttgacctccagggtacaacctgttctcccacctcggactcccaagtagctgggactacaggtgtgcatcaccacacacaactaacaaagtatttttttaaagatgaaattaactttt

SEQ ID NO: 43919 - DNA, 1030 bp, Homo sapiens
acttaaaaatttttcttatgatgttttgggatatacacaagttgataactattttttgagaagaatttataattcaattatgtcactgtagaagagtcagctttgtaaagattaccatcttggtaagaatgatgcactcccatcctacactgcataactccaagcctgaaatctaataattgttcggcctaacgatatctggtttagcaaaggatcactaacccttggtatgaatttaactcaatgttttatatcttcaggggctacttagattttaagctttgtccctaaacactgtaccctgttaaagaaatgttggtcattgaagaatagctgcaattctgtagttatttattgaacaggtctgatgtaaaagtccctaaataaatattaatctggctatgtgtaagtgtgaacacactgtactgcaaatcaccttttaaaaaaactgatgaatgaaaatgtatgcctcatttgagtatgaaataagattttatgtttatgtagagctttacaatgaaaaaacgccacattcacatactatttattttgatcctcaaaaactgatgaagtaaacagagcagtaatgctcaccacagttaaactgatgaggaaattgatattaaaatgcaggatgacccaccacaaattcagtgcttagtgaaggaactggtattttttaaaagcttctgaacattagaaaaagacaaagaaggctgggtgcagtggctcatgcctgtaatcccagcactttggaaagccgaggcaggcagatcggtcaggagttcgacaccaggctgaccaacatggtgaaaccctgtctctactaaaaatacaaaaactagcagctgggggtggtggagtgcacctgtaatcccagttactcaggaggctgaggcaggagaatcacttgaaccccagaggaggaggttgcagtgagcctagattgtgccactgcacttcagcctgggcgacagagcgagactccttctaaagaaaaaaaaaaaaaaggaaaaaaaagaaaagaaaa

SEQ ID NO: 43920 - DNA, 1073 bp, Homo sapiens
ggtaaagcctgagcatgcgtatttttaaagcaccaaggcaattctgataggcagccaggttgagaaccattgtcccagcaggcaagccatctggcctcacttggtgtccttggcaaataaaaggtgagccctccattgcaggacttgtaaactaataagcagttgaaaatagtattgggtttggaaccaaataacactcggaacaagctgctcaaaaaaactccaaggttgaggctagtcatttttgcgtatatgtgaaaaaaatgtgtttttgttttctggaaaatttcttgctacttcttacaaaagcaatacatgtttgctattgaaattttgaaaataaactgtaaaagagcacaagggagatttaaaaattacctgtaattccatcagccagatattaccacaacattgtttatatcctttcagactttttatataaatggaaatatattttatattcgattttgtaatatgctttttaaaattagcagtgtaccacgaggactttcccttgttaatattcttcaataaaatgatgttcaagggctacagaacatttcattccataattagctttattgtttttctattttagcttttcaatttatgaccaaaataatcgttcaatgatcctccttgaccaaaactccacatgcaccttttgaatacagatcctctttgacttacgatgggtttacatcccaataaacccattgcagattgaaaatattgtaagtcaaaaatgcacttaatagacctaacctactgaacatcctagcttagccttgcctaccttaaacatgctcagaacacttacattaacagttgggcaaaatcatctaatacaaagcctattttataaaaaagtgttggatatctcaagaactttattgaatattgtgctgaaagtgaaaaacagaatgattatatgggtactctctaggtacagtttctactgaatgtatattgctttcacatcatgataaagttgaaacaagttgaaccacaaggtggggaccatctgtacttcctcaggagtgctagagatggggtcattggattaaaaaata

SEQ ID NO: 43921 - DNA, 1020 bp, Homo sapiens
tgatgtgtttaaatttcaaggatcctcagatctctaagggtggactaactggctggcatcattgcttacaaaagtatcttgaccttcatggagcttattttgagaaataaaatttatatttttatctttatcttttaattccatttttccatgaactttttgaagtccctttatatagtttgttgtctaagaagccttatgtcttagttatcaatcctaaggataggattaatgttcttttgttgaagctaaggactattactgtcaggagaacatggctaggtagaaggccatcctacctcctcccttaaataaggactccttagcaaggctgagcttttctgcagaaaagagttctggatcttattcagggtatcaataaatttacagtcaaggtactactgtttcaatcatgtaacatcataaaaatagctttggtttaaaatgttctaaggcagttataaacatggtcaccttggccaaaccactgtaaactcttagttaagtatacatataaaatgaaaggttcacaatgagcaatgctaattctgtatttatcctcccaaatacattgtatggctagataactaaatgtatagatgggttatatggtatagttatttgtgaaacagaagaaaaaatctccaaagaagaataattatattttagaataatgaatatgtctgcaatcctattttctggtgataattacctacagaagtcagtaatctgcaaacttattcctaatttaagatagtaaaatacgttgtttgcatttttaaagcagttttacctggtctttgtagctggagttacaatctggttgggccaattctgtacaaatagagtaactcagttaaaacaaaataaaactgtttaaaaaattaaaatctaaggcctgtggtacaacacaaattttaggaaaatctcaaatgacaatgaattttagaaaaatatcacacccacctacccacacacacaccagattatcaagttctatttactctaaagctgcagaaa

SEQ ID NO: 43922 - DNA, 1056 bp, Homo sapiens
tgatttgcagataaacaacaaataattttttggcataagtgcgttcaaaatattgcaaaggtggctgggtgcggtggctcacgcctgtaatcccagcactttgggaggccgaggagggcggatcacgaggtcaggagatggagaccatcctggctaacacggtgaaaccccgtcactactaaaaataaaaaaaaaattagccgggcgtggtggcgggccctgtagtcccagctactctactcgggaggctgaggcaggagaatggcgtgaatccaggaggcggagattgcagtgagccgagatcatgccactgccctccagcctgggggacagagtgaaacgccgtctcaaaaaaataaaaaaataaagaataaaaataaaaaatattgcaaaggacgtacttatactaaaatattcatttttatctgaaattcaaattaaactgggtgtcctgtgtttttatttgctaaatctggcaactctagtaccaagccaatatgttattcacatggaccaaagtgaaaatggactcctacctcattttctatacataaataaattttaaatgaatcaaggtcttaaatggaaaaggcaaaaacttaaaatacaaggaaaaaattgcatgacctcagaatagggaataatttcctaaataagactcagaatgtaacccattttttggagaagatatataaatttgaccaccttaaaatgacatacttcttttttctcaaaaaatactccaaaaaaaaagacagctataaactgagagatgtttttgtaagacataatcaaaaagcattactattcagaatatatgaaaaatttctacaaatcagaaagatttcaatgataaaagacaacaaaaaagaaaaatgcaaaagacagaaagaggcaattttttaagagaaagcacacatggccaataattgtgaagatatgctaaacatcactaataatcaggaaaatgccaattagagacatcattttacagcatcagatggcaaacattaaaaaataattaatctgattgtgatattattacacaatgtatac

SEQ ID NO: 43923 - DNA, 1039 bp, Homo sapiens
gaagattaatcaggtaatggccacttatagaacatctcttataagtcactgaactttgacataaacccttctttgaaggaggctataactgaaaatgactctgattgataaatgtcgttgagcaagttggcttgagtagggaggaattattcctctttttagcactgagacctcctcaaaaatatttttcctggtcactatatttgtaaggtggctgtatcctacttcctcagtgatctttattccatttctccactttactgtcttcatttatcattctgtgaaactgtgtacatgtttgtttcctggtcactatctgtctttcttatcagaataaaactccatgaaattagggatgaccttcgttttcttcatcacaatatacccaatgcctagagtagtgcctagtacatggtgggaagttcaaaatgcatccagtggtatttcagacataatatttaattctataacttgaattaagaatcaatttattaagtcattatggtaagcagaaagatagaactcagggaggagagagaagatggaagagagacaatttacaatttgcatatctttcatgtttcttgactatggattaagaaagtatcaagactggactgctgagtgtagacaatctctgatcagtctggatgtctttgagaaactcgcatcaaaggacaagacaacatggaagtgatgtctttatttcaagtgagaccactgagcatgaaatatatctgtcagctcattcttatcccatctcttcctctctcctgcccccaacttccctgaacaaaaatactgaggattactgttctattcttagaaactagaacactaagttttctgccaaaataattaatctattcactcacttagtatatattatttgattacatactaagtaatggggcctcccaaagagattaagacatagttttaactttgcatgaactttatcattaatgactaacagatctctagctggtattgtgattggtgagattccaaggttattgttctcaaatgagaataatga

SEQ ID NO: 43924 - DNA, 1007 bp, Homo sapiens
tgaacatgggattttttgttttgttttgttttttggtgtcctctttgatttctttttttttcttttgtttttctttttttaactcctgatttgacacccaggctggattgcagtggcacaatcactgctgactgcagctttgacctcctgggtttaggcagtccttctgcccaagcctcccaagtagcttgtatgccaccatgctcagctaattaagaattgtttttgtagagacagggtcttgctatgttgcccaggatagtcttgaactcctaggctcaagtgatcctccttcctctgcctctaaaagtgctgagattacaggcatgagccactgtgtctggtcttaaatttctttcatcattgttttgtagttttccttgcagagattgctcacctccttggttaaatttattactaggtattttttttgtagctattgtaaatggaattgccttgtcgattttcttctcagctagatcattattggtgtatagaaatgctactgatttttgtacattaatcttgtatactgcaacttaatgaattcatttaccaaatctgagctttttggtggagtcttaaggtttttctaggtatcagatcgtatcatcagcacagagggataatttgatttcctattttctaatttggatgccttttattcatttatcttgcctgattgctctggctatggcttccaatactatcataaataagaataatgaaagtggacatccttgtctcctccctccttccctcccttccttccttccttctttccttccttcttcctccttcccatctctttcttccttccttctttccttccttcttcctccttccagcctccctcttttttgtctgcctttctttctttctttctttctttctttctttctttctttctttctttctttctttctttctttctttctttctctttctttctttctttctttctttctttccttccttccttccttccttccttcctctctctctct

SEQ ID NO: 43925 - DNA, 1045 bp, Homo sapiens
aatgactaatttgttgctctatggtacctaataacatgaaataatgtgtcaacttaaatataatgttgagtgaaaaaagccaaatgcaaaaaaggacacagtgcatgagtccatttttgtgaatattctattctttgttctgggcactggtcacgtggatgtgctgagtctgtgaaaattcatcaagttgtacactcatgatttgtgcacttttaatgtctgttaagcttaaataaaaggttaaaaaaggaatactctggttgcagaagagagaataaattgcagaggagagtggaagcagggggaccagttaggaagctattgaaattttccaggtggaagatggtggtggtggaaatggggagaagtgaatggattctagatctaatttgaattatagtacagtatttattattagatggaaacatatgaaatacctggtattcaacctcttttggccttcaaaaatgacaatttcatatggctcaacctactagaaatggattgtaaggacatccttgactcttgttattgtttctctgttaagtattataacttttggttttatatatcttttctttgtgatattaagaataaaagcttatggttttacttgagaacagatagtgagtgttagttattcctgtctattcacataactatattactttctctatgatgagttatgttgtagtttttttctattttacctatactaggattaatttatcaaaatgagagtagtttttaatgtaactgactaattaacgtactagtactatgtcttattatacttggttgtgaagattgtagtaacagtgactgtcaaaaatttgtattttagctgggtgtggtggtacgtgcctgcagtcccagttactcagcagcctgaggcaggggtattgattggttgaggccaggagttagaggccacagtgtgctatgattatgcttatgaatagctgctgcactccagcctgggcaacatagcaagaccccaactcttaaataaacctaaaaaacaaaaaacttttatcattttaaa

SEQ ID NO: 43926 - DNA, 1038 bp, Homo sapiens
ttgttctttctctacggtatgtatttctatcttatagatagttacttatcttagatttctaaatctcaaaggtcctgagggccacttacagtcatactcatctttctatgctctaccgcaccttgtccagtgacttgcaggaagtagttgttcaacaaatgtttactaaaaggaataaaagatgacatagtaggatttgaagaattaaaatgtattttcctgtgttagctatatcagtctttccagtacagatttctgcaatgatggaaatgctctatatctgggctgtgcaatacaacagctactgttggctagtgtgactggagaactaagtttctaatttatttaaatttaaatttaagtagctgcatgtggctggtggttaacgtactagacatagcagctctaaattgtaatgtatttgaactttgtcagatcctcacatcctgattatatttgggtccttccatatgctgattgttctcactatgttttttgatgaggagattgtacagccagccctaagcaaggcgataaaggagtgagctcagattttctctcacacctgcagtggaaggccctttctgctgcttgacctctggggaagggctggtgcttgcttctgaatgttttctggaaagtaggagtgacttgtctcttggagttgcaaagggttgacaggggctctagaaggtgacacagtgggggatttctcagtttctcaaggctaagtaatatattatctaggcctgtaggaaagaaaagtccgtcatgtcctcagaaaagcaaatttttccttagaagaaagaggagagcatgaagctaacatatggtaaatagatttcctcatgcataagtccgagtggcgctccactggggtaagaatctttaggctctgtctctctccttaacataggctgtgtacatcaccagcaaccattacattatgtattttttctaattgtgaaacttctaaattcctcctttgaagttgacagtttgggattaataataataataataaaaacctctctcctc

SEQ ID NO: 43927 - DNA, 1099 bp, Homo sapiens
tttttggccatttattacagtagcaatcaaaatgaatacagctttttgttcttccgaagtattctgccccttcaagctgttctttataggatagccagggtgaccttttaaaaaacaaattctaccaaaagctcaggcaacaaaaacagaaataaataaatgggactacatgaccaccttgtaaagatatctgcactcccatatcactgaagcattattcaaaatagccaagatatggaacaacctaaatgtccatttacagaaaaatggataaagaaaatgtggtatatatatatatgtgtatatattcaatgggatttttttttttttttgaggcagagtcttgctctgtcacccaggctggagtgcaacggtgtgatctcggctcactgcaacctccacctcctgggttcaagcgagtttcctgcctcagcctcctgagtagctgggattacaggtgcgtgctactacacccagctaatttttgtatttttagtagagatgaggtttcaccatattggtcaggctggtcttgaactcttgaccttgtgatctgcccacttcgggctcccaaagtgctgggaatacaggagtgagccagcacgcctggcctattcgatggaatattattcagccttaaaaagaatgaaatcctgctatttgccacaacatggatggacctggaggacattatactaagtgaaataagctagatgcagagagagaaatattgcatgatctcacttttatatgtggaatacacacacacacacacacacacacacacacacacacacacacttatataggctcaaatacacagagttagaaaatgaaacagtgattaccatgagtggaggggaggaggcggggaaatggggagatgtaggttaaaggctataaaatagcagttacgtaggatgaacaagtttagagatctaaggtacaatatgagtactaaagttaataaaattgtactgtattgatggcagcagtggcccatctggagtggctgctgccatgatgctggttgcagtgtgggaggctctgctggggctgcatgttccatggagccagcaagggctggaagcaggcagga

SEQ ID NO: 43928 - DNA, 1025 bp, Homo sapiens
attgtggcactattcacagtagcaaagacttggagccaacccaaatgtccatcaatgatagactggataaagaaaatgtggcacatatacaccatggaatactatgcagccataaaaaggatgagttcatgtcctttgtagggacatggatgaagctggaaaccatcattctcagcaaactatcgcaaggacaaaaaaccaaacaccgcatgttctcactcatagatgggaattgaacaatgagaacacatggacacaggaaggggaacatcacacaccagggcctgtggtggggtggggggagtggggagggatagcattaggagatatacctaatgctaaatgatgagttaatgggtgcagtacaccaacatggcacatgtatatctatgtaacaaacctgcatgttgtgcacatgtaccctagaatttaaatataattaaaataaaagacttgccttgtcctcagcattgtagcccacaaagacagtgcttgatgtgtgctgtatctttgagcaaaaatgcttctccatctaaaccatgtcgtttgataatattctttcatagcactctgtatttcctttcatagtaggaacacaactcctgggtggggttatttatatctcccactagactataaattctatgaggtcaagaaccatataaattttgctaaccattgaattaccagcatttcacagagtatctagcatctagtagatgctcaaaaaatgtttgctgaatggatgattgaataataatttttctcttagtactaaagcataacttagggaaaagaagtacatgctgctatttgggaagagggtctgcttaccttaccagtcagtttgcccatccagatgactctccaatccaatgtgggtcagattgtattacctgttatttaaagtacttactataactctgtgtcaagaatccactttcaagatatggtacatgtagaaaaagaacactgcctggtgtgtaatatgtatttgacaccctaaaggaagggagttatttata

SEQ ID NO: 43929 - DNA, 1002 bp, Homo sapiens
ccccagtagcagcctggagcctggtagctctgctgggcagctagatccagaagagaagtaacaacctctacagtttggctctcatgaagcctcatccctgagcacccacatccaggtaataccctatgggacaaaagaatctgaacaatagcccttgaacactggatctctgatgtagtctacccaaatgagaaggaaccagaaaaacaattttggtaatatggcaaaacaaggttctttaacacccccaaaagatcacactagctcattagcaatggatccaaatcaagaagaaatctctgaattgccagaaaaagaattcagaaggtcaattattaagctactcaaggaggcctcggagaaaagtaaataccaactcaaagaaattttaaaaatgttataggacatggatggaaaaatttccagagaaatagatagcataaataaaaagcaatcacaacttctggaaatgaaggacacacttacaaaaatgcaaaatacacagaaaatcctcagcaacagaatagaacaagtagaagaaataacttcagagctcaaaaacacggcctttgaattaacccaatccatcaaagacgaagaaaaaagttaaaaaataaacaaagcctccaggaagtttgggattatgttaaataacaaaaatctaagaataattggtgatcctggggaagaagagaaatctaaaagtttggaaaacatatttgagggaataactgaggaaaacttcccctgccttgctaaagatctagacattcaaatacaagaagctgaaagaacacctgggaaattcatcacaaaaagataatcacctaggcacataatcatcaggttatctgaagtcaagactaaggaaagaatctgaagagcgtgaggcaaaagcatcagtaacctataaaggaaaacttaccagattaacagcagatttctcagcagaaaacctacaagctagaagggattggggtcctatctttagcctcctaaaca

SEQ ID NO: 43930 - DNA, 1124 bp, Homo sapiens
gttcagctcagctgttgatatttgtgtccagtgctcagttagctcttcatgtgtttgaattctttttttcctagaggagagaacctggccagtctccaatttctgagactctaatttaggttatatatttctctgcaatgtgaatctatttcaaacttgatgtaagattgctcactagtgcattgccaaatacccgataggcacctcagtaaatatttattaatgttaatgatgagaataacctttttaaatatttgtgtttgaaatatgtactctaccaatactgcaatagggaaagctttcaggataattacattttgtatttatatccagtgatttattcctaagatctcaaattttgttagagatatgattatagtatatatattttttcagacttaaggttattggcaattgttagtcctgtttaatagatgaggagtgtaaaaagagacggggagtgatttgcaaaaagtctcactgtggattgaagtaagatatgaaagtttagatctatggttccaaatttcactaaaacgagtctagctctgggaactaaaccaatggtcaagaagttgcaatgggacattgaataactcacgtatgtggaactatcctcctgattaaaattaattttgaaaaatgaatttttctttgactctatctgtgaggtgtggcagctagagactgttttttccctattaaatataacccatgattgtttagtcctgatgattcaaatggtaatattatctatttatattactactattatttttttcaaatcagcctaataaatatagaaattgatcttttttgtttgtttgttttagagaggggatctcgctgtgttgcccaggctaatgtcaaacccctggcctcaagcgaacctcccacctcagcctcccaaaatgctgggattataggcatgagccaccaaatccagtcaatattttacttttgaatatacagattcataatttttaaaagcacagcagtggaagttacaatgattagtacttttcttaatcaaagtggaaaattgctttactcattatcttagaaataaattcagtagatattttagaaatgaagtgtccctacttacttttataactttttgc

SEQ ID NO: 43931 - DNA, 1052 bp, Homo sapiens
atgaacgcattataccatccatcaggataaattaacatgttgtgggcctttaaaaactataaagaaaataattttaatggttccaataacagctccagatgaatgctggaaaacagatattccaaactgtcaaatagcgtatgtattgcttggctgttttataaccgcaagtaaaagctgcttttgtatgaggtttccttgactgccaatggaagaactgtaacacatttattgtgaacaaaattggaatggaaatgagacgtgttacaacagaatggcacctaattccttcttgccagttgccctgaattaacataataagtcattaggacagtaaaaagttcttggttaaaagaaagaataatttaattaaatagatttacaaaaatgacaagttcatacatgtatcacttatgatatggaaactttgtttgaaaatatggttgtcttatgtgagagaatagaattataccctatataaatgtatatgttcaatggaaaaaaaatcataaacttcagaggagaatttatcggcggtatggaaaacaactgaaaagtgtttgcaacaaaggccagttctgactgctgtttactgcaggtaaggggcttcaggatgctgccctatgtttgaaggggtgactcatgtcattatttattgcggttaattgctaatgtttgtgaagagcacagtatgttgcatagcaggaccaagtaatccatggtgaccttttgtgctatcaaagctttatcaattagaagctcttgattataaattcataggatgcccagtgagtgccatcaaagaaagattatacttggcttcttatgcaatctgatttttttttttgttggctcctcttccttcaaaactgaaccctcaccagggaactatttctaaatctgcaaagtgaagcatattcaaaatgttttcagacttcaaggagtattgtggtttttataagcaattgcaggaattttataaaaatagtagttatattttcctgataaatacctttcttcttgagactcctacactggctatcttcctggtc

SEQ ID NO: 43932 - DNA, 1076 bp, Homo sapiens
tttttggccatgcagaatattttaatgtgcatatgattggacttatttatcttttctttcctggtttagaaagactttcccattctaatgttataaaataatttacccgtattttcttctagtagttttatgatgaaaaaattcaaatgtgatatatctcaacattaaataatctttttctgtctactgagaaatatttgtcttatttcttttcttttttttcatgggacagagtcttgctctgtcacccaggctggagtgcagtggcaccatctcagctccctgcaacctccacctcccgggttcaagtgattctcctgccttagcctcctgagtagctgggattacaggcgcccaccactatgcctggctaatttttgtatttttagtagagacagggtttccccatgttggccaggctggtcttgaactcctgacctcgtgatccacccgcctcggcctcccaaagtgctgggattacaggtgtgagccaccacgcctggcctatttgttttatttctggactctatctgtggtaccacattgtttccatttattcaagtgtatgtgtgtgtgtgagtgtgacctgcagtagtaacattttaaagcttttctttacatacctctgacatatttcttgctaaatttattactaggtatttttatcttactattgctattgtaaataaggtattttatcccactacattttttaactggctgtttgtatacaggaaggctgttcattttatgttaaagttttttacccattcctttttctaatctaattattatgtcagctgatacttctataacaatagcattaacaatgtaattatagtattaatagacattcttttcttaactttaacagaaatgtgtataaatgaaattgagacccccaaaaaaaaaccatacaaaggatcaagaaaacaaacatttggttctttgttttggataagcaaaattgatagaccacagagttatttcacttagggtaatggcttccagctccagtatggtagttctgtttttagttctttgagaaatctccatactgtcttcataggagttga

SEQ ID NO: 43933 - DNA, 1058 bp, Homo sapiens
aacattgccatgctttatgtctattcaaataattgtacttgttcaaacagctttacttggaataaccaaaaactggaagtaacccaatggacattggaacaacatggaattgaaaagtacattgtgatatattcaggcagtggaatattactcaccaatatgaaataatgaaatattgatacatgcaactacatgagcaaatctcaaaatatgctgaatgaaagaagcgaaagagtaaaatctttattattcagtttacataaaattctagacagtgctcactaatttgtggtgacagaaagcagatcattggttaccgagatggggtggatggatgaagaaggccatgaagaaaggactgcaaaagactacagggaaacttttgggagtgatctatatattcatcatcttgattgtggtgattgttttgtgagtcaaaatgtatcaaattatatgttttaaatatgtgcagtttagtacacttcagttatacctcagcaaagctgaaaaatccattcaactctgatttgaaatgccatcttcgtctgatgctgtttacatgtctctgagtgtgtttctaggctctcttcaagtctactaaacaaatatatttgactttatgtttctatattgacataaatagttagacagtatcttttcagtaaaagtgttgggagaactgggaagccacctgaaaaaaaatattgatagattcgtattcatacaccaggataaattccaagtggaacagtcatgagctccaaaccactcaagcccctgccttggcattacacttaatgacctatacttaagtcaggccatgacatgaactaaacactggtactaatatcagaatctttttcatagggggcttcctggaacttgacttggacctatgggctagaatttaccgaaagcagctgacccgtgctttgcttttactattccaggaatgcagataaagtctaacttccagctagacatggtggctcgtgtctgtattcctagctactcgggagcctgagatgagaggattccttgagcccaggagtttgagt

SEQ ID NO: 43934 - DNA, 1028 bp, Homo sapiens
ggggcatgttaagtttgtgtggaagaaacttccatggaggatgagttatacacaagacatgaaatttacttgtgacagatttagaagaaacgtttatagatttgttactttttgttaggaattttggcttacattttcacctatttttagtttgttattaatagaatttctgttgaacattctgtggcttattcagcctgtttaccatgatgctaatagtcctaagaaagtgcactgtctagtagtcttcacacttttttgattgtgtacattgtcaatagaaatatgcctacaatatatgtacatttgtttattgattatatatgtcttacagtacaatcatattgtttatattataaaacatatgtagaaagaatttttcaaaggctaagacaaatacaaattgtagttttaactattttcttcctccatcccattgtatcatcttggacctctctagaaagtactgatctgatttccagctgacgcattctgcccctttattccagtagaggtcagtcgagcatctggaagagaaaacaggctgttgaactatgcaaggtagagccgtcattcttcagttagaaggataattatattttaaagtttctaaattcatgcatttttggaagagtaattacagagtagtatgtggtattacggagaagtgaagaatagtgagctcagtagagtatggatcaatctgaaatgtgcttttgttgtttgatgtttatgttgtgagtaccttgcatttggctttgaacattacttgattctgtagttttgggatcttttcccaattctgtgagaatctgtagattatgtgagccacaggaatgttccctgcctgtaggcataatcaagttctagttaaaattggagtaattgaaaggacagacacaaagaggctttctttgaaattgatcttgaaagcagtatctttagcccaaagaggttagtagtgggttggaattatctatctctattttctgttttatgcttaattaggagaaggagaaaaaagaaat

SEQ ID NO: 43935 - DNA, 1893 bp, Homo sapiens
tattgaaaatctcctggaatttttaataattcatgttgttttatgtgaaaagaatgtcatctttttattatattatctgtacatttgctgttcatctaaaatgtagataatatcaccccaggctaaaaaggatgagaaagaatttaaactgattcttataactttttcttttttttagggcgtcatcgttgtattggggaaaattttgcctatgttcaaattaagacaatttggtccactatgcttcgtttatatgaatttgatctcattgatggatactttcccactgtgaattatacaactatgattcacacccctgaaaacccagttatccgttacaaacgaagatcaaaatgaaaaaggttgcaaggaacgaatatatgtgattatcactgtaagccacaaaggcattcgaagagaatgaagtgtacaaaacaactcttgtagtttactgtttttttaagtgtgtaattctaaaagccagtttatgatttaggattttgttaactgaatggttctatcaaatataatagcatttgaaacattttctaatagttatgatacttatacatgtgctttcaggaagttccttggtgaaacaattgttgaggggggatctaggtaattggcagattctaaataatataatttccagatagtaattttaagagtactcatcgctcttgccaaataagttcagggtattcaaatcttggactagtcctgcaaggtataaagaataaaaatcccagtgagatacttggaaaccacagtttattattatttatctgggcaattattgtgtgtgtgaggatggaagggtagggaataatcgaacatctaaagccttgaataagagaatactaattgttttggtatgatgatactcagaaatggagatattataggaaaaagaaatcctttggaattttaactaaaatcactgcatatgggaaattaagagatccaggaccatatttgataagagttcctaaaaataatgtaattattaatgctaaagactgctcatgtatcttgatctaattactaaataattacatatttatttacctgataaatatgtatctagttctacaaggtcacatttatgtggaagtccaaagtcaagtccttaggggataattttgttttggctcagttgttccctgcttcctttttttttttttttttttgagatggagtctcgctctgttgcccaggctggagtgcagtggtgcgatctcagctcactgcatcctctgcctcccgggttcaagcaattctctgcctcagcctcccaagtagttgggattacaggcacctgccaccatgcctggctaattttttgtatttttagtagagacgggggtttcactatgttggctaggctggtcttgaactcctgacctcgtgatccacccgccttggcctcccaaagtgctgggattacaggcatgagccaccgcacctggccttccctgcttcctctctagaatccaattagggatgtttgttactactcatattgattaaaacagttaacaaacttttttctttttaaaatgtgagatcagtgaactctggttttaagataatctgaaacaaggtccttgggagtaataaaattggtcacattctgtaaagcacattctgtttaggaatcaacttatctcaaattgtaactcggggcctaactatatgagatggctgaaaaaataccacatcgtctgttttcactaggtgatgccaaaatattttgctttatgtatattacagttctttttaaaacactggaagactcatgttaaactctaattgtgaaggcagaatctctgctaatttttcagattaaaattctctttgaaaaaatacagtctgtattcatgaattgta

SEQ ID NO: 43936 - DNA, 1032 bp, Homo sapiens
gctggtctcgaattccaggcttgaagcaatctgcccaccttggcctcccacagtgctgggattacaggcgtgagccatgccacctggccaaagaatcagattgttaacagatgggaagagcattagttctgtagcccaaattctgccccaaagaggaatcgtttctaaactagtaattatctggtttccacttgaactttactagaaatgggttgtgggttgttcagttaccttttatgatggctcattctatgtttggacagctgtcatttttagagccttatgttaaagctgaaatctgtttctttttaacatctcatttatagttggtcctaaccatagtctctgaacttatattgtatgaggtatttgagtacagatataatgtctcctccatctttttttcaatctttgtgttagtttcctagggcttctgtaactaattacaatatgggtggcttaaaacaatagaaatatattctatcacagttttggaggctggaagtgtgaaatcaaggtattggcaggaccgtgctcctccttaaggttctacaggagaatccttccttgcatcttcctagcttctggtggctcttggcaacccttggcttgtaactacattgttccaattactacccctgtcttcaacaggctttcttcttgttcatgtctctgtatcttaacatggcattcttataaggacaccagtcattggatctaagtcctaccctaagtcagggtcatctcatcttaaataattgtgtatataaagatcctatttcccaattaagatcacattctaaggttctggatggacttgaatttatggggggatatatgatcttacgttaatcttgttaaatatcacattacatgtctctaatttctttactcattcttttacctcgtaattgtgctgtttatttatgttggtgcatatagttcattcattttcataatattacattttgtgaatcatcagaatttatctactcttatgttgattcaattaggatacttcttgcttgttgc

SEQ ID NO: 43937 - DNA, 1050 bp, Homo sapiens
tgtacttccaacccaacgctggctcactggaaatcatcttgagttaaaataatttttagtttgcctattatctagccagtttttaaatatatgtacagatggttcttgatttatgtgattcaacttataattttttgactttatgatggatttatcaggatgtaaacctatcataagtcaaggagcatctgagtatcccatgtatattcatgctttattacacaatgatctgattatttgtcagcacatttttaaattctctaatgaaatgtgtggcttttgtttatagactgtggcagggtataccattcctccaggacatcaggtgtgtgtttctcccactgtcaatcaaagacttaaagactcatgggtagaacgcctggactttaatcctgatcgctacttacaggataacccagcatcaggggaaaagtttgcctatgtgccatttggagctggtaagatgattatattttagattggaaatgtttgttctgataacatatttgtctctgtcaaaatattccgaattgtgtttacaaattatctctccctttcctcatagggacatttttgcaaacttttttaggagaagaatctttataagttggagaaaaatatttcctttgtaccaaatggaattgttccataaatccttatataatgcttcactacttcctaacctgtctggttttattaggtctaatttttatagaacatccttgttttcccttacaatggtatttaaagctctttgtggattctcttttaaagaaccattggagtcagcacaccattcagggaataacagattactagcatttcacaaaaaagcaaaggcagtcttttaaaattaaagctcttctcgatcgttagtcaacatttttgctctctgaatatccgtatgagaaaatggtctttaaatttgggcaggttgtgtgtaggcttgcaaatttcatttccagtaagatcctaaaataatttagctatacccttgtttctccagtaatttctctgtccattggttctctgtactgattaaactatatt

SEQ ID NO: 43938 - DNA, 1082 bp, Homo sapiens
ctcctgatccatcagccttcattcttcactttcctctttccgctttgggtccatggcatgtcgtttctgttacactcttggcaatactgtactttaaatttcctcgaccccgcatcttttcattgtgttcagctggcagaagtcacccttggaggcagccagttattgtctccttctgcaccagattagtttcttcctgattttatgattgcctaccttaatgatatttgaacactgctccacagtcctattatgttcttgtgattgggcctacttttccactcattacagtgactaattcaaaccttcacttttctaaacttctgaatctttctacctctccatcaaagcagatgattttttctcctgtttaggagacaatgattaaaaacgttgatttaggagacaattattaaaacattcaaagaaaacttcctcattttctcaatttcaaatatgcaaacctacttgtatttatatagtaatcctattctctttcttcctatcacagtaataattatcaaacacttactttatgccagtacttagtgctttacaaagatcatctcactgaagctccacaaaaaccctttcaggtatatttgttttatagatgacaaaactgagaagcagagaggatatataatttcttcttggactcactgctagacagtggccaagccaggatttacacatggtctgatttctgagcctatacttttattaatgataacaataatggaaaacaagtcattaagatgctaagtaagccaaggtactcttctctgccctgtatataaaatttggcagcagctctgtgaagaactgctattattattattaccattttataggtgagagaaacgaaacacagagagactaagttctctgactataggaccaaagtcatacagcaagtaggtggaggagctgggatttgaacacggacagtctggctcactgcgttctaccactttgattttattacaactatattttgcctcttatcggaggctgaactctccatccctcttttgtctcaggaactttttacttttatttgttttctcagtgtattgttg

SEQ ID NO: 43939 - DNA, 1006 bp, Homo sapiens
aagggctggcgtgggcggctccgtggccccgaccggctcagtggatggcaagggcgggggcgactgcggccatgcttggcgtggctttggtggcaggcgcgctgggggctggagtagtggctgcggcggcggcactgctgctggtggcgctggctgtagcacccgccattgccttgtgttggggggcggtgctggcctccccggctgtgtatctgatcctagacggggtcgtggttgcggcatttgtggttgtagcggtctgtactgaccgcagcagtggtgcccctagtggcggtggctggattggcggctgtgggtttgaacgacccggtggtcgttggggcccttggtgggggtcctgacggagatgctgttggcagctggcccgtcatcctggaggctgccctgtgtggttcagtgttctgtgggctgtagcagtgcccctaatggtggtttatacccatattaaggaggatgtgtagagtgtggtaatggtagtgactggagtgtggtaagggccttcctctgatgctaataatgtaacagtttctcggccgggagcagtggctcacgcctgtaatcccagcacttcgggaggccgaagcgggcggatcacctgaggtcaggagttccagaccagcctgaacaacatggagaaaccccatctctactaaaatacaacaaaacaaaacaaaaattagctggatgtggtggcacacgcctgtagtcccagctgcttgggaagctgaggcccgagaatcacttgaacctaggaggcggaggttgcagtaaaccgagattgcgccactggactccagtctgggcgacagaatgagactccgtctcaaaaaaaaaaaaaatcattttcttcaatttaacagccttattaacctagctttcaatctcccaaatgttatttgattgtgccttttacagtcagcaataagtagcttttgaaaactacccttttactgacaatgcaatgtacaaacttttgaccaagtag

SEQ ID NO: 43940 - DNA, 1088 bp, Homo sapiens
tggtctcaaactccttgcctcaagtgatctgcccacctcagcctcccaaagtgctgggattacaagtgtgaactgctgcgcccagcctcaaaaatgtttactcccattcttttgatgatcccacattgaggaccacctgagaatgagcttgctgcccccactttctcatttgctgtgctttactgatatttttccctacttgcctagggagtaaattgtatgcattacaattcagcaaggaaaaaatgacagttttctaacagcgccctaaaaaatggaacaaaattgtgtagtttaaaataatatagctggatgcagtggctcatgcccattataccagcactttgggaggctgaggctggcagatcacatgagaccaggagtttgagaccatcctggctaacatggtgaaaccccttttctattaaaaatacacaaattagctgggcatagtggtgcacatctgtaatcccaactactcatgaggctgaggcataagaatcacatgaacctgggaggcagaggttgcagtgagccaagatcatgccactgcactccagcctgggtgacagaatgagactctgtttcaataatagtaataatatatcctgccaaactaagcttcataagcgaaggagaaataaaatcttttccagacaagcaagcacaaagggcattctttaccactataccagccttaccagagatcctcaagggagttctaaacatggaagtgaaagaacaatgcatgctaccgaaaaacacatttaagtacatagcccatagacctattaagcaactacacaatagaaactacagagcaacctgctaacagctttgcaataggatcaaaaccacatgtaacaatattaacctggaatgcaaatggtctaaacacccccacttaaaagtccgcagaatgaggctgggcacagtggctcatgccttgtaatcccagcactttgggaggtgggtggatcacctgaggtcaggagtttgagaccagcctggccaacatggtgaaccccatctctactaaaaatacaaaaattacctgggtgtggtggcgtgcacctgttatctcagct

SEQ ID NO: 43941 - DNA, 1037 bp, Homo sapiens
gggagaatcacttgaggccaggagttcaagaccacaccagcctaggcaacatagcaagatctccatctctacaaaaataaaaaatagccaggagtggtggtgtacatctgtagtcccagctactcaggaggctgaggtgggaggatttcttgggcacaggggtttgtggctgcagtgagctatagttgcaccattgttctccaggctgcgtgactgagcaagcccccgactctaggtaggtaggttggtaggtagatgatagattaggtagacttgcatgcatgcaaggattagatgatagaccagataggcttgaatgcgtgtgagaatagatggatagagacacagagagagataggattgagtgcatgcaagaaaatattttctcaccaaaaatccatctatgatggtatgattctcatttgatgtttgtattcataagcacgtcagaaaacctctagaattatttatggtgtttggagagggagacataggcagactgtaaaggccctaaagcagaagcatcaagcttttggggatcttcgaggccagagtatttaagacaaagaatatctttcagacatcttagggtgtagatgagaaaaacagtttcaatacattgtgctaatttctgtgataaaaggaagtaccaggttgttcaggattcattggaagggcacccacatgggtgggaaattaggaacttatgtccccattatttaaattataataatagctactactttaagtgacacttactacactattggcattatttgaagcacttttgggatattaattcatttattcctgacaacaatcactatgaggcagatactattattcccattttacagataagaaaattgaagttggtttaaattactttccaaaccaatgagtggtggagctcagattcatacctcggcagccaaactccagagtataagtcagtcagatacatcatgtatggttataataaaaacataaaataatacttgttttctatctttaaaatcttaggagccatagtttct

SEQ ID NO: 43942 - DNA, 1043 bp, Homo sapiens
tctgtacttatgtttggtgtgtaatataccaattagttttatataatatcctcataagctattctaatttttgagagaaacacaaaaagttatagattgatagtctgtataatattagacaaaatagtaagctttataaaaagttatttttggtaaatggtaaggaatttggggtggaatgtgatgagattaaaatgtagctttggtataacttcatgtgtatttcaaaatatactgaacgtcaacatgatttgaataaagaaaatgtattttctacttgaaccacataacactgttatttaaaacagttttctgcagtctataaacatttctcaacatttttttaaaagtcttagttaaaatgtaaatctgatatacagtagtgtttctcaaagtatagttcatgaactccttgcatcataattacctagatgcctcttaaaaatgaagatttcagagacccattctaaacaagggcattcactctctggaagtagcatggccttgtgaacttaaatttggttttgttttttcttttttgctgttagaataatttcagacccaataaggaatttcgattattaaagttgagaaatttcacaaaactgcctggcacacaagcacacacatacatagacacattttaagtgataatctcttgatattagaagttgcatttgttaaatacatgctgtattttttatgagttgacttaatagtttatgtatattgactttgctttgtaggaagtaaatcaccagatatcttattgtttcatttaggaaagtagtgatatagatgaagagccaacttgatgaatgtgctattcataagctagaaactacagtttttccaaactaataaactgatgaattctaaataagttcagagatatagtcatatttaaagttgtcctacagtttgcagataatttttatattactattcttcacattaacttctgcttatttttaatggtactatatgtaggccttattaaaattaagattgtatggttaagtaaagttaacaagaaagcctga

SEQ ID NO: 43943 - DNA, 1034 bp, Homo sapiens
taattgagaagtaactatactacagttgtatttttttctgtatattgaactgttttgaagccatattaatggactgttttgtggcttttgaataaagaaatttcaggtgattgatttaaaagagaaggcagtttaaggtagtatgatatcttgactctgttcagtctgtaccttgataagtagctattttagtatatcctcctatgtataaggttatattttacaatataaatgtagatagccatttttaaaagatactattagtttttccttatacttaatgtatactcacataaattacctgtgtttcattcacagaacctcactttatttattttatttatttatttagacggagtctcactgttgcccaggcaggagtgcagtagcgtgacctcgggtcactgcaacctccgcctcccagacagaacctcactttaaaaatcccctaacccattatctttctggcacattcttagtttagtatttgtggtcaatattataagaattggtatttatagaaactgaatgcttctaaacatatgtatcttaaaaatgccatgaacactttctttgtttatatgtacacaaataatacatgtttagggcaagaaaatggaagttactgctagaagagaattgttattaacaaggatatattgaatgtctgcttatatacagtattatattaggaaagtgtaggaatcattaatactgctttataaatagttctgttgttggctggtccatgtgcagtagtgtttacaactctttgatcacaatcaattacagttcttctccactcccactgcttcacttgactatccttaaaaaaatagctctgatgaatttatgaaaggtatgttagtaattttttaaattatgcttacttttataataaatatatcagtgtacttattttcagtgggatgagattgttgaagtaaacatgttaacccagttgcataaactacaatctgaaagtactatgtaaatattcaaaagaaagatactgaataaagagatagctttta

SEQ ID NO: 43944 - DNA, 1056 bp, Homo sapiens
aatttcagctcactgtaaaacctctgcctcctgggttcaagcgattatcctgccttagcctcctgagtagctgggattacaggcatgtgccaccacacctggctaatttttgtatttttagtagagacgaggtgtagccatgttgcccacgctggtctcaaactcctggcctcaggtgatccaaccacctcggcctcccaaagtgctgggattacaggcgtgagccactgcacctggctgttaaatccatttagtctaaagtgcagtttaaatccagtgtttttttgttaatttattttgatccattcagtgttgagagtggggtgttgaattccccaactattattgtattggagtctgtcattccctttagatctaataacaatggcaaaaatcgcagttatttttgcaccaacctaatataaagctttttttttttctttaacttttagcattttaaacacatcatcccaggctcttctggcctgtagtttcttctgagaaatctgttgtttgtttgatggcaatgtccttatatgtgacctgatgcatttatcttatggtttttagaatcctcttgttgtctttgagttttgacagtttgactataacatgccttgggaaagacctttttaggttagatctgcttgggtatctttgagcttcctgtatcttgatgtctgcatctcttacaagacttagggagttttcagctattatttcttcaagtaggttttctttgactttctccatttcttctccctctaaaatctcagaattcaaatgtttggtcactttatggtgtccccacatgtcacattggctttcttcattcttttttatttcttgatttctttctttttttttttttttttgtctgcctgggttaagataccttcgggtttacaaattctttattctgcttgatctagtctattgttgaagctctcagttgtgctttttatttcatttattgagttcttccattccaggattatgtacttttgttatcttatatgtcttaagtcacactgagtttctttaatgtcattttga

SEQ ID NO: 43945 - DNA, 2081 bp, Homo sapiens
acttattcattctatctaactgtatgtttgtacccgttaactgaccctctccttattcctaccctaccctacccttcccagctctggtaatcatcattcaactctctacctccttgacatcaacgtctcacgtatatgagaacatagggtatttgactttctgtgcctggctaatttcacttaacaaaatgacctccaattccattcatgttgttgcgaatgcaagatttcattcttttttatggctgaataatatttcattgtgcatatataccacgttttctttattcattcatctgttgggagacacttaggttgattccatatctttgctattgtgaatagtgctgcagtcaacatggggttgcaggatcccactgatttcctttcctttggaagaatactcagtagtgagattgctggttcatatggtagttttatttttagtttttgagaaacctctatactgttttccataatggctctactagtttatattcccactaactctgtataaaagttcccttctgtctgcatcctcaccagcatttgttatgtttttgtcattttgataatagccattctaactggggtgggatgaaatgtcactgtggttttgacttgaacttccctgatgattactcgtggtaagcattttttaatatacttcttggccatttgtatgtcttcttttgagaaatgtctgttctaatcattgcctactttataatgggatatgtttgtttgctgttgaattgtttgatttccttgtaaattttggatattagtccctagtctaatgaacagtttgaaaatactgtctcccattcaccacattgtctcttcactctgtcgattgttacgttagctgtgcagaagcttaatagtttaaatagtcccatttgtctgtttttgtttttgttgcctatgcttttgaagtcttaaccataaaatctttgcctagaccaatgtccaaaagcatttcccttatgttttcttctactagttttataggctcaggtcttacatttaggttttttatccatattgacttgatttctgtatatggtgagagatggagtctagttttattcttgtgcatgtgggtatccaatttttccaacaccatttattgaacagggtgtttttttccccaatgtttgttcttggcacctttgttgaaaatgagttggctgtaaatacatggatttatttctgggttctctgttccattgagatctgtatttacaataacatcatgctgtttggttactgtaggtttgtgtagtttattttttgaaattagatagtgtgatgcctccagctttgttctttttttctcactattggtttggctatttggaatcttttgttattccaaatgaattttagaatttttttttatttctgtaaagcatgtcattggtatttcaataaagattgcattgaattacttgattgctttgggtaatattgctgttttatttttattgattgattgattgattttgagatagagtcttgcttcatcacccaggctggagtgcggtggcgtgatctcggctcactgcaacctctacctcttgggttcaagcagttttcctgcctcggcctcccaagtagctgggattacaggcttgcaccaccatgcccagctaattttttttttcttttgtatttttagtagagacagggtttcactatgttggccaggctggtcttgaacttctgacctcaggtgatccacccacctcggcctcccagagtgctgggattacaggcatgagccaccatgcctggcctatattgctattttaacaatattaactcttccaatccatgagcatggatatctttccaattttttgtgtgctcttgaatttcttgcatcagtgttttgtagttttcattacagaggtctttcagttttttagttagatttattctcaattatttgattttttttactagctatagtaaatgagattgctttcttgatttctttttcagctggttcattatcggtgtatagaaatgccacttatttttgtatgtgaattttgtgtcctgcaactttattg

SEQ ID NO: 43946 - DNA, 1060 bp, Homo sapiens
acttcatgaatacaaggtaagctgtttaatagaaatgaaaagacattttataggctagttgaaactttgttagtgttataaatattttaaacagaggtagattaaatttatagtcctgaaattaaaaatgtatcttctagttcacaatgcttgaaattgaaagtagcaagatatttttatttttagtaatatataatcttttactgaataccttcaacatgccaaatactgtggtaaggactaaagataaaaatttgaaataatatactatccatgcccgtgaagcaattaaaacccaataacatagacagtatttttagacctcaatttttttttttaatattaacatcacaagagaaaaagtactcctgatacaatgtgccataattttattctttaggggcaatcttgattttagaaactgcttagttgatctatttggattatcaatggtacattttcctttcatatctcttttatttttaatttaccttgtttgtttttagaatctcagtacaagtgaaggtgtcagtaaagaaatgcatcaccttcagcgcatgttcttacagaattgctgggaaattcctacttatggagcagcatttttcacaggacagatatttacaaaggcaagccccagcaatcataaagtcatccctgtgtatgtaggagtgaatataaaaggacttcatctcctcaacatggaaactaaggtagattttcagctcttttttaccaatcatgtcatataatagttaaaacaacagtaccaacctacatgaagaatttagaaatggcatatatacaagactgttcattgcaactcattcattacataagaggaagggggacactaaatcactgtcagtaaggcgttaatattatattacatttctgcattagaatacccttcagccataaaaaagaataaagagtatttttgtgtagaatgatctgcaagatacatttaatgaaaaagcaaggtgctgaacaatatgtaatatgctgcctactcttgctattaaaatgggaggaaatgaggatgatttttacataaata

SEQ ID NO: 43947 - DNA, 1079 bp, Homo sapiens
ctactgtattgtatgaagcatagttaatagaaaaatgtttcagtcatacaaaaatttaggtaaaattttgctaaaaattatccatatttataaactgatgataatatttgttagacaaccaggtcagcaaactatagcttatagccatattttgccaatttttgtatacctcacaagatgattttttttacgttttttgattgttaaaaaaaataactatttcctatcagcgaaatattttgaaattcatatttcagtattcctacataaagtgttattagaacactgccatacccatttgttgatgtatcacctgtggctttctttgtgctacagtgccagagttgattagttgcaacagcgattatatagcttacaaaacttaaaatactactctctgggccttaataaaaaaatgtttgccaacctctgctcaaaacagtaacagctcatttatatacaaatatgtagcttttgcttttcccatattaagttgttcatttgtaaaaagaaattgtagcctaataaccaaattatactttttcctttaagattgaagacccactagctattcttattctctttgatgaagccagatataatttattgaagggcttttatacagctcctgatgctaagctgataacattggcaagtctgcttttgcaaatagtctatggaaattatgagagtaaaaaacacaagcaaggtttcctaaagtaagtatttaatattatgcatggtcttgtgctatgcttaagattctgtttaaccaagaaagtttaaaaatgttattagaaaatatttatacattacattggtttggaattaaataatataagacatagaatgagaaaaaatattatactaaagcattcttaaagttatactctccaattttacttttcttatatttgactatagtttgatatactttatatttttctttatctttctttatgcttaaataagttcactaaaacctgactcgaataagtagtaaaacattttataaggcagatgtacttaagaatcccaccataaaaactagttttatgttcagtctttgagagaaaaca

SEQ ID NO: 43948 - DNA, 1018 bp, Homo sapiens
gcagagcagctgtttagtttaagtaccatctcacaccagtcagaatggctatgattaaaaagtcataaaaataacagatactggcaaggttgcagagaaagggaacgcttatatactgttggtgggagtgtaaattagttcaaccattgtgaaaagcagtatggcaattcctcaaagagctaaaaacagaactcccatttgacctagcaatcccattactgtgtatatacccagaggaatataaatcattttgccataaagacacatgcacacacatggaatgttcattccagcactattcacaatagcaaagacatagaatcaatctaaaggtccatgataacagattggttaaagaaaatgtggtatgtatacatcatggaatactatgcagccagaaaaaagaacaagatcttgtctttgcaggaccatggatggagctggagaccattatttttagcaaactaatgcaggaacagaaaatgccacgtgttcccacttatacgtgggagctgaatgatgaggactcatgagcacaaaaaagggaacagcaaatactggggcctccttgagggtggaagctgggaggagggagaggagcggaaaaaataattattgggtactaggcttagtacctgggtggtgaaataatctgtacgacacacccccatgacaagaatttacctatgtaacaaacccgcacatgtaccccagagtctaaaataaaagttaaaaaaagaatagcaaaacctgagcaaaacaaatcacctgagtaaaacaaatcacctgagtaaggtgtaggatgaaagtgtctgatttggagtatagaaaagacatagtatttgtgaaggggaagaaaggaaaaacagatggaaaatcagttctaaaaatgggctgttttcccctcagatgttccatatctaaaaccaaaaccaagtttccattcctcctcccacctcaccctcttatttccacacaacaaattactttctacccttgcttcagagtgcagccttac

SEQ ID NO: 43949 - DNA, 1063 bp, Homo sapiens
ttttttttttccccctctaatgaaagaatggtaatattttcaactattacataaaaacaaaagcatggcattgtatttaatatgctttggaatgtacctatgtttcagtaccatttttagttcctaaaatattacctttggtaagttactttatgtctctaagggtctgtttctttatctatacgagatgggcttaaaaatggtaccttccctaatagtaaaagaaaaattacaagtaacgtgctttgagagcacataatgagcactcaataaatcttggcttttaagaataagtgttggccgggtgtagtggcccacacctgtaatcccagcactttggaaggccaagaagggcagatgactggaagtcaggagtttgagaccagcctgccctggtgaaactctgtctctactgaaaatacaaaaattagctgggcgtggtggcaggcacctgtaatcccagctgctcgggaggctgaggcaggagaatcgcttgagcccaggaggtggaggttgcagtgtactgagatcccaccaccgcactccagcctgggcgactgagtgagactacatctcaaaaaataaaataaaaaaataaatattgtaaaaatgtaaagattttgatgtctgaatctaaaatttattaatctgtaatattttcatttgcaaatttttgttacttgagtatgccaaggaaaagagttttatacttggataaattaattttctgtcagcttgataatcaagtttaatgtaacaggagtagtatgggtcaccttgcaatactattagttggatgcctcatttaattgacgtgaattcaaataatgatttaactattcagtaaagaacttaaatttatcttggaagtatactcttattcactaattggtacaaagaccgaggaggggacactgggctcttgactgtgatacagtgaagagactagggtttagtcctatttttgtaagacaagatattttacctcacttggtctcatttctcacctttaaaatgagggttttaattagattagtggttctcaaacttttgggtctcagga

SEQ ID NO: 43950 - DNA, 1034 bp, Homo sapiens
catatgccttgccttctttaagggtttgttgtaaagattaaaataaatacataaatatatataaatacatttatatgtatttatatgtaattacatacaacttgccttctttaagggtttgttgtaaaaattaaaagaagtatataaatatatataaatacataaaataaatacattcatatatgtatatgaaatcactttgccaactatgaagcctgattcaaatatgaaatgttgtttgtttttcccagagcacaggctgcaaagccctgcattcttttctttgatgaatttgaatccattgctcctcggcggggtcatgataatacaggagttacagaccgagtagttaaccagttgctgactcagttggatggagtagaaggcttacagggtaataattataaatacagaaatagaatgttataacaaaatgtcatcatgtcatcagattttggtaaaaaaatgttcttttttcctctaggtgtttatgtattggctgctactagtcgccctgacttgattgaccctgccctgcttaggcctggtcgactagataaatgtgtatactgtcctcctcctgatcaggtgacaatttcatatttagagtccaaaacccaacaaatgctacactctttccttgtgagctttacttctgccaggtaatggcaattgtccttagaagaccagctttcttagggaaaagctttagccactgtttgctcaaagcataaaaagattctgaattagatgcaaagcctttttttggcccagtgcaagtctgaaaactttgtaatccttctgtgttggctgattggggaaaaaaaaatgcaagaaacctaatgtattatattttcacattatcttctgttcaaagattacatacttccattatcctgtcaaaaaaaaaactctgatacagaatcaagcatgtgaatcgtaagcatgtaagcaggtttcatagagataatttttcaactcttccttgtcctgtgttgttccaactcttattctccaatttagaagcaaacaaa

SEQ ID NO: 43951 - DNA, 1106 bp, Homo sapiens
ctgtttttgtgttgtctttgtctggttttgctatccgtgtaaatctggcctcataaaatgagatgggaagtattctctcctcttcttttgtttttttggaagaggttgtataaaattgaggctgaatcttggtggttgccacaatgacaggaactatttctgtgactgaatatattgggaattcctataaagcaattattttctagggaagtggaaaatcaactttagccaaagcaatctgtaaagaagcatttgacaaactggatgcccatgtggagagagttgactgtaaagctttacgaggtatgagtatggtaacactctatataaatccctttttcattagaaagacaggaatgttatacataatgctgtcaatctaataaatacacatatcatctagtctttaacttttctgtttatcatttagtcattaaaatttctttggctttctaatgtttttgataaaatttctaaaactctccatatttaatggaggcctatttttttttctagccagaactttttgtagactacatttctggaagtgctcactgacaccactctgaaaaattagtacttagaatatactctaattggtataaatgatctctgaattgctatggaaaactgggagaatggttgcttcaggggagagaaagtaggaggctgtggacagcaatgaggagaattacagttcaccatataacacttttgtacttttaaagtccttaacatttacattattatctattcaattaaaaaatattgggaagattttactttgaacagttaatttttcccccatgggtaccgctgtcatatagttccaactaatcatgaacttgtgtatttcctgttctttgtaaatttaaactttgtaactcaccaggaagtttgaagccaaatttgtgtttcaaatatagcaactccaggatctctaggcagatgcatttgcatttgattttaaatgaatcttgatcccttactctcacttatgttttcccacatcctactttttttattttgttgtaagccatctaaaattctcaatgggatgaaactgggtataaatgaatacatgcatacaggaattatagtagcat

SEQ ID NO: 43952 - DNA, 1050 bp, Homo sapiens
aaattattaacaagaaaataagttacccataatcccagaacttagaggtgactaatgttgacagtttggatcaaatcttccagttttgtttctaatctttatttttaacataaatgaggtcctgtatacacacgtacagttttgtgtcctggtgtttttatttaatgttattatgagtgttttattttgttaaaaggtcatcattttaagttgttaattagtattctagcacaaatttgccataatttatttaattgtttactatgattgaccatttagattgtacttaatttttaggcattagaagtgataaactatattttaatcagacgttgaaaataacacatctttgtttagaaaacatcattttatttctggttgtctaggatagattcccagaattcttgggttagaggccatagataattatgaaagcagaaagattcacaagttgggagttaatacttgaattactttatttggggtgaagcattgagtgcataatacagatcatgcagtaatgggaagaagggttggaacaatggttttctggcctatgtcagacttaccttgaagcttttaagaatacagatgttctgatcaaccctcagacctattaaatcagacctaaaatcttagggaataggctttaggcatctctaattttaaaaaatttattcaggctacttggatgcacaaaagagttgagacctactgtcctagaatcatagaattttaatgacgatagagaccttaagcatctaggtcgtttctgtacttttacatgtaaggaaactggcattcctaggccagtaccattgccatgcagctaatttgccctcttgtctatagctcactctgcatcacccaacctaccgttctcactgtttcttctataaccaatctccttcccacttctgttctcttactcatgccattcttccctcagtcatttttcttccttccatacaaattccatgtctttaaaaaggaataatcctacctcctccacatagctttccaattctctgttgcccacatttgtctccc

SEQ ID NO: 43953 - DNA, 1025 bp, Homo sapiens
ggtactttgaatgcggacattggagttaaagagcagaatcagagatagcttagattctttgacctaagcaaaatgacagataagtagtgccagttactaagatggctgaggatttggagagaaaaatgaagcattttgttgtgctaatttcagatatgcctacgagacatcccaggtagagctgttaatgaggcacttatcgtcctgaggtcaaagagtaggactgaatataaagatttgggcatcattggttttaagtggaatgtaaagcatgtgactgggagagtatgtggtaaacaatggaaggaagccccagaaaagccagccagaggaagaagagccagcaaaggaaatgaagaggtctttgtgatagaagaaaaccagcagagaggtgtcatggaagctaagaagaaaatgatttttagaagagagtgctcagctgtccttttatgaaaaagcaacctatacccaaaacttagttttaaaagcccaaattacaagattttggactctgtaatattccctatgtacttcaaacatgtagtgagaaaagaatgttgaaaattagcttagtgccacagagtggtagaggcctttgagagaggggagagtagatagtgctgatagataggaaatggataggaagctctgctgttaccatccttataggtctcttcttttttgcttttcattttcttctcttgaatatcagtacactagcagcagtctctcatttggtaccacctttccaagtatctgtgtttctaaaagttctgcgttctataacaaaaataggagagtcagacttcagcaaaactccagctcccttcaatccactcacagtttaactacttctaccgggcattagtggcattttcttctaaaaatcagacatctgttttgcttaacaaagtagactttttaactatacattgatactttgtactaattagttgattttaatttaataatttaataattaatgacagcaacttcaagtagtgctgccagtctgagcagtacac

SEQ ID NO: 43954 - DNA, 1025 bp, Homo sapiens; identical to SEQ ID NO: 43953

SEQ ID NO: 43955 - DNA, 1025 bp, Homo sapiens; identical to SEQ ID NO: 43953

SEQ ID NO: 43956 - DNA, 1092 bp, Homo sapiens
ataaaaagcaaggattgcctgtataatttattataaaataaaagggattttaacaaccaacaattcccaacacctcaaaagcttgttgcattttttggtatttgaggtttttatctgaaggttaaagggcaagtgtttggtatagaagagcagtatgtgttaagaaaagaaaaatattggttcacgtagagtgcaaattagaactagaaagttttatacgattatcattttgagatgtgttaaagtaggttttcactgtaaaatgtattagtgtttctgcattgccatagggcctggttaaaactttctcttaggtttcaggaagactgtcacatacagtaagcttttttccttctgacttataatagaaaatgttttgaaagtaaaaaaaaaaaatctaatttggaaatttgacttgttagtttctgtgtttgaaatcatggttctagaaatgtagaaattgtgtatatcagatactcatctaggctgtgtgaaccagcccaagatgaccaacatccccacacctctacatctctgtcccctgtatctcttcctttctaccactaaagtgttccctgctaccatcctggcttgtccacatggtgctctccatcttcctccacatcatggaccacaggtgtgcctgtctaggcctggccaccactcccaacttgacctagccacattcatctagagatggttcctgatgctgggcacagactgtgctcatggcacccattagaaatgcctctagcatctttgtatgcatcttgatttttaaaccaagtcattgtacagagcattcagttttggctgtggtaccaagagaaaaactaatcaagaatataaaccacattccaggctgctgttttctctccatctacaggccacacttttactgtatttcttcatacttgaaattcattctgctattttcatatcagggtacagacttataagggtgcatgttccttaaaggtgcataattattcttattccgtttgcttatattgctacagaatgctctgttttggtgctttgagttctgcagacccaagaagcagtgtggaaattcactgcctgggacacagt

SEQ ID NO: 43957 - DNA, 1053 bp, Homo sapiens
tattattttgtgttattttcttccatgatatggagtacgacagaagctgtgatatctgttttttagcagatgagcagagattaagtggcctgcctgcactctgggatttatttgttaatcagttacagagccagcactaagagctggatcttctgtctcctggtctatactcctttccataacatgtggtaaagtgcttctcccttgttctgaagaaatccctacagggaacctaacactgccctgatctggaaacaacattgttacctgacaggccggtttgccagggtgaccattcttaagtgttttagggagctaggattaatctttttttcccaagaggaagtagcaataaactgtgcaccaaaaataacgctttagctgctaaattctgcttagtaggtggtttcccaaagatgatccaatgcaatgagtcatccctctgagcacttactgcacattatttctttttactaatcctcggtgcttttggttgcatgttttttaacctttagagccctcctgggaggttcagagtcttctcactatgaatataaaacagactctactacatccccccacatgtccctcttgtcctttacttcctatacttttcaaatctaagataatccatcacttaggagaacagtcaggatcatgtccaaagataaaagatcagcagtaagtttctccagagttagcagcagctccatctcattcccagtataaaaatcaaaaatgtagatggatgtaagtcaatgtgtagaacccatatcaagaaaactataaaacttgattgagatacataaaaatgactttcctagatatagagaatatttgattattagaaagatattaaatattccattttcctgaacaggaagattgaatagttgtaaggatataaaaggtttccaaattaattcataggtttatgcaactccagtcagaattccagtgggatttcctgaaatgcatttggaagagttaaactggtgaaaatagccaagaattttttgttaccaaaaaaaaaaagttatgaagagaaactcc

SEQ ID NO: 43958 - DNA, 1028 bp, Homo sapiens
tctggggtcaaggcgtggggtcagctgactcctccacaaggaggagttgggggctcctacttggtcttcccttgttttccatagttcctcacagaatccagagggcagtccccaaggctctcagagtcttactctgagccacaggaagaagtaccttacgccagctcacaggggaactccaaacagtcagcaggaagaaactcagtcactcagatgaaaatgatggtgtctcaccattcttctatgcagttttctaaggggcaagacagagacatttggctgtgagacattaattaatcgaacagaatgtactttaactgttacctttcttatctaaggctgtgtggccggctcactggttttagtcaagtaaagagcaatgacttatgcatttaatgatctcactagacataatttcctttcatattggtttgtaagacaggtgctatcctctcccatctcaggtggagctcagaaggcccatttgttctaatattcctgaaccatgtaggatcagcaatctggactgttttttaaaaatcttataaaaatctgtataatgtatgcatcttatgtaagattattttttaaatagtatgtattatgttctttcatttaacaaaaatatacatggttgttgtagagcttttaaaatacgagtaaagagtataagtctatagtatcttgttataccagaaagtaagaaaatgctcaaaaaatatgggaacataccagaaaggcacagaatttagcttgaaggagccactggacaaatataaaacaatttgggcatcaaaatacataattatagtaaaggattataacctcctgaataaaattaaaatccatgagtccatgctgatataaataaagtgggagaaaagagagctttgtcttacagtagactgacaatcaataataacagagtgaatgatggagttagaaaatcatcaatggatgatgctaaaactactgagtggaaatttcatcaagagatttacgtagtgtcaaaatggctctttacaaga

SEQ ID NO: 43959 - DNA, 1032 bp, Homo sapiens
cacaatctggaggcccacattggcagcctggggtggtgacagcttcggtcagttgttgtggagttccactggcagacaaagaagagtaggcgagtgtgctgatccaggttccttctgtatgatagaagaaacctctaaggtcctggtaatgtgtgaaccagtggaatacctgctccaataattaaagtatgagctttccttcctctttttcagggtggaccaggccttgggaaaggaattttggccttcccagactgtacacattacttaatgtgtccttctacacttattacatgcatcaggagcagatttcacaagccttcttcctatgagactaggttagtcactagggttaattattcagtagttaaaggaaatattgtgatggagggaaaaatagatttccagaagccagggagtagagggcctcagaacatcaaattgctccatgaagagagtacacagccatttttatttcagtctttgaacatgagatagtaatcgtgatttgaattctctaaacctcaaaaatattcccttcttagctgtaaatagccacttgtcccaaccccatatatccatggggagcttctgttctcccagagaaaatgcagttaattatagcaaagaaagggaccctaggtctccccttcctgccttaagagtaatctccagtatctctactcatgagataataaaatgtatcattttcagaaatttgaagaaggtaggtcaggactcaccagtgctgtttcaaaagccttttggttgtgagtgccacatctgaccactgcacagatagcactgagaaagaaaattggacccagttctctgcttttgccttccattctccctgtaagggtccacgtgaacagcaagtttggcctggtttccttaggtccctctgggcccatttcttttctttcatcatctttcctaaagctgatatgacaattccatggggaagaaacaaatagtacacttggatgaactttgcgaaacacaaagacctttcctcttatccctgattct

SEQ ID NO: 43960 - DNA, 1047 bp, Homo sapiens
tgatgcagctgcctggccttcttctcctgaattaatggtgcttgagctcaaacttgcaagtataaagtgtttatcgacactagtggatcatcctcaatatgtccttactttaaaaaatgcttgcacctggggagcctcattgtctctgtgatctttcactccacgtgacactttaagaaacaaaaattgctgtacgaaggatcaaagtaggagatttccatgcctgttagttttatttaattttaaaaaaatttaaacgaaaaagtaaaataacatagtctggttgtaaaaacacctaatgttaatacagaagtataaaatgtgaacattgtctttcctgtacttctccaaaactcccaaagatagtcccctcgatatacttccagatcttccttgttacaaatgagagagagagagagagagagagagaaagagagagagtttataaatgctaaaatacataggtacacatgtacatatgtaaatttttctcacagaaatgggcttacccgatactcttctgtacattgcttattcgctttattttatcataatatgtcagtacctagagatttaactcatttttaaacagattaataactgtcagttcatttatttcataatttaatttcttcttgatggacatttaggggttttttggtcaaaaaatacaaacaatatttactgcaaacagtgttgcagtaaaatctttgtgcttattttatggagcattcgtccaggtatttctgtacagtaaattccagaagtgaaattacagggtcaaatgacatgcaaattttttaaattgtgctagctaaaccaaattaccctgcaaaaagtttcaactaaactctgtttttagcttgaggtgggaggtaggattgagattctcaaagatgaagaaaggttgtcaagagtaaagcaagaaaagaactcttatgtaagccttgctaccttttctaccactacattaaaacaatatcaagtggaggttggccatggtgccttacatctgtaatcccagcactttggaaggccaaaacagga

SEQ ID NO: 43961 - DNA, 1052 bp, Homo sapiens
aatctgtcctgtattggaaaggttggccaattctctgtcatattattaagaggtgcatgtcttttgttcaaaaatgaaatacctaggaaatataaactcagtaaagagagtcatagggcagatggttgacaaagagccagagagtttaaatatcatctgtcactgttatctgggtttaataactgcccacactggcccacagaagtattctacaaaatgggtaagagctacatttttttatctttctcctttaattcttcatccagagtaacccatccttactccacattgaattgtattttaatactaaaaaaaaattgttataaatttggttagtggccaactagtcagcttaaaggatgagattggatggatggatggatggatggatggatggatggatggatgattggatggttgtgatagattgatttttaactatacagcaaaataaattcacagtattaactccccaggtatctattggttgccttgtaatcctagttagaactgtctgtagtttgaaagttatggggttttccaggttacagcaaagtcacataaaatgcacatttagaaaataaaacatgcggccaggcgtggtgactcacacctgtaatcccagcactttgggagcccaaggtgggtggatcacgaggtcaggagatcaagaccatcctggctaatacagtgaaaacccgtctctattaaaaatacaaaaaattagctgagcgtggtggcatgctcctgtagtcccacctactcgggaggctgaggcaggagaatcgcttgaacccaggaggtggaggttgcagtgagctgagatcgtgccactgcactccagcctgggtgacagagtgagactcagtctcaaaaaaaaaaaaaggaagaaaaaagaaaataaaacatgtttctttgaatacgaagattgtggcaagcagatagtaattcttagaagttctgagttgccagctctgccaatccatagctaagaaatgccaaatgccaccaggaagaatataacaaatagagtcactgttagaaggaaacaa

SEQ ID NO: 43962 - DNA, 1032 bp, Homo sapiens
gtaacacttggatccgcttgccattgcaggtcgtcacgctgtggtacagagcacccgaagtcttgctccagtccagctacgccacccccgtggatctctggagtgttggctgcatatttgcagaaatgtttcgtagaaagtaagaaatacattttgtttcactctgctttccttgaaaagagactgtggatctttgtgaatttgagtggcagcatggcatttctatcattaggggtcatgatggccagatccatctaccccaggctaccacttgcaagcctgtcctgaaaccgccttctcagtgcttacagtgttgttttatatgactgtagcttgcagcttctggaaactctgcctgggaaggaataccccactgttcttataagttacattgttttactggtgatgataggacatggtgaaaataacacatattttcgcatttttttagtgaagaaatatctcaaagtggactttatccataggaggagaaccaaggctgttaagtgtatgaaaacttttttgatggaattttgatagtgagaatagttgaaaaaaacaatatttaggctgaaaaagaataggcagtggggatgtcagtgctacttcagagcactttaaatgctgccgtgtacaggagagattagatatattcaggtactatagaggacagaaacaagaccaaggatacagaaattacaaaaagaaagatttttgttaaaaggggtagaaatctaatgattagacagttatctgaagagtggattggggtttgtgagaatagtgagttttcattgtgtgtctaagaagaggctggacctccacacattggtgatgtttcagtagcatttatagggttggtgcgtaggctagatgccctctaagttccctctaagagagcatgtgattcgtttgtttgattttcaggtcacaagaaatagccaaataatataataaagatctgccaggaaaataatccatatctgggtactaagttcagcctagtctaaattaaacagagaacctaatcat

SEQ ID NO: 43963 - DNA, 1050 bp, Homo sapiens
ttctgtcttggtaggttgattgcccagtaattattgatgaacttcaacattatactacaataaatgtcttctcatttgctgtacagacagccagaaagtataagtaattagaatttgttctgcactctacttttatcgtgaaaaagtaattgaaagtaaataagatatttattcagaaaagccactacctgaatgtgagcatatctgaactaataaaaatagtatagttaatacagatatatagcaagatgtcctcaccatctacatctgtaataatatatagtggtaattgactcccataatggttataccaaagccctgaaggattcttaacttttactttcatttttaatgcaaaaccaggttttcatatattttgcttgcttaaagcaagatatactagctcttatttttcttactaaattacatgcatacatatatttcaaattttattttagattatttgtgctcaaccccatacgttgtcatagagtagtgcttttcaactcgttttccaaggatcactaattctgtagaatgttaatagatgttatgtgagggggagaaagtcattcagctttgtaaatgctgaattaaatatttctttttgaacaaagctggaggcatcatgctacccaacttcaaactatactacagggctacggtaaccaaaacatcatggcactggtacaaaaacagacacatagaccaatggaacagaatagagagcccagaaataaaaccgcacacctacaactgtctgatttttaacaaacctaacaaaaacaaacaataaggaaaggattccctattcaataaacagtgctgggataactggctagccatatgcagaagattgaaactggaccccttccttatatacaaaaattatctcaaggtgaattaaagacttaaatgtaaaacccaaaactataaaaacccacaaagacaacctaggcaatacctttcaggacataggcacaggcaaagatttcatgacaaagactccaaaagcaattgcaacagaagcaaaaatggacaaacggaagt

SEQ ID NO: 43964 - DNA, 1026 bp, Homo sapiens
tctggacattaaagcctcaagtgtactgggggaaaaaaaagcacaaaaaattacagcatatatcaggaattttccagctaacgatgtgcggatgtggtagcgcgagggaaaaagagccaaactgagcttgctttgttcgctaagagaggcccccctgtaacattccttttagctgtgcatattttggcttcatttgtacagttttaactttatactgtgtgtggaggagttcagttgtaactggtggtgcctaataattctattgcaataattaaagttcatggagagctgttaggttattagttcatagaagctgcttcagaaaacggagtctaagctgaaaactttttaagtgacatgtcattactgtaaaagatggcaacaattattttctttgatttcacagcagttttttttttaagacaagattcatttatggagacaaataagaaacaacatcttaaaagctttgggtaggagtgaggggcccagactgggaatgatgagaatatggatcctgtagcctgtgaataaaacattttccaactggcttgtaaaacatgaaaatttgtgatagcataatttcatctgctacttttagattccatttaaaatgtgaaattaatatataaatgttagtaaatctattgcagaaaccaagtattgcagcttcttcacctctgatagaagtcatatgtgacttttaattcagtaatacgatgaaaaatctccaactgaacacagcctccttcttaaaagattgacatgccttggagtccccaataaaatagtaattgcaatgtacaccaattggttagagctgtgaaatatgtttcccgggggcttctctgcagtggtagagggctgtctgcctgcatggttgtcatactcagtggttacttgcagactctggagttagacctgggtttggattgtatctctgacaagtggctagttgtgggactactgtagttattaacatgtttgaatatcagtatcttacctaaaatatgggtaaaaaattat

SEQ ID NO: 43965 - DNA, 1049 bp, Homo sapiens
aaaccaatatagctttaataaaactgcataaatgttttaaaaatcaaatatgtaaaatcaagtaatttgcatatgggctttggcaaagtttttcaaaagctgcctatgcatttaaaatatgatttactagattaagatgcattttaaaagactttacaggtttatgtatattatgtaaaactacttatactgtctggccactgtagtttttacttgatatacattcaaaaatattgtattaggaaaagccacagatagcccattgtgaattgtaaagtgttaatgtcaaccgggcgcagtggctcacacctgtaatcctagcactttgggaggctgaagcaggcagatcatgaggtcaggagttcgagagcagcctggccaatatggtgaaaccccgtctctactgaaaaaatacaaaaattagccaggtgtggtggcgcattcctgtagtcccagctacaggctggggcaggagaatcgcttgaacccaggaggcggaggttgcagtgagccaagatcactccagcctgggcaacagagtgagactccatctcaaataaataaatacatacatacatacatacatacatacatacatacatacatacataggattaatgtctaaagaagagagaaactcacatgttcttatacccaaactgtccactgtcatgccttttattggcaagtagatgttaaaaatgtagcacaatatttaagattttgacaagattgaatagtccatttaaagtaagaaaagctttcaagagtgacctcagcaattttacacaagttgaaataaaatcttgtctttatcttttctttgtatttattgttctatctttatttctataacgacttcttggttttaggatgtggggctgaaaaactgcatttaaaggtcatgttgctgctactatatgcacagtacaatttgtattttccatcagcttatcatttgtaatttttgtactcctgtttttaaaggcatcaaattttttcaatagtcgattgtagttctcaagtattgttagtcccataatatttta

SEQ ID NO: 43966 - DNA, 1016 bp, Homo sapiens
ggatttttgtgtcctctttaattctttggacacgtgagctgcttgtattttagagctgtcactgcttccttttaaggaaaggagaggtggcaatattttgcttaggctttgataatatcatagtgtaagtttctgagtcaagataatgtttctcaaattctgtaacattggccatatccatttttattcactcagtccaaataatgtattttagcatttcctacagtgccttccttgcacgaggtgggcacttgagtacatggtgaatgaatgaatgaatccttacgattctccagtgcctagagaatgaactgtaactctacagcatggcatacaaagttttttgaagctcagctccaacctacctttctgtctttccatcgcttctacccaaagtggtaagcacataacataagcacatattctttatcagtttttcactattctttgaacttaattgctttcacaactccctgcttttacaaatgaatcaatgaatggatttcctactctgcattctccatgttgctgcttgtgtcattgcatcatcaattataagcatccaaaaaaatttttttaatttgttttagacacaactttcaactaatcttcccaattgcctgcgtcactccttgataataacttgagctctgagggagtaacatttacactttgaatgtgtgtctgggcagccattcataaccttcagataattattgtgcttcatccctctttatttgagatcacaaaccttgccagatctcctgacttgtgcacttagatgttctgtatgttatgcttttattttaaagctaagatcccttgggatctttggagaaaccatagtgtcccaagaaggggttgaaaatctctgcattgcagtttcccttagtcattttatctagtccatttgggtccttgagaagattaaatttatgatcctgttatctgtgtaggtctctccaaaagttgagctcagacttttatacaattactttgtagtgccggattttctg

SEQ ID NO: 43967 - DNA, 1038 bp, Homo sapiens
atgagaacaggttacagggaagttctttccattgtacatagctgataggtaaaaatcatgacatgtgaagttatataatgtctctggcaaaagtgtttcaagaatatacacctgttcggtacaatgactgttgtgactagctgaaactatatttagagtcactctgaagtcaacatttctaagtccttctcatgtgaaatgtagtgcatggtgcaacttatttttgtgaagataagggaaaaagagaccagccactcagccagcaatttcagtcctacctcactgtgcacccgggtctgacatgtcttagagcagagccaggaacatcatcagcagccctggtgagggctctgacagtcatgaagcactgtgaccagcaagctcaggaagggagcagtcttgtcttcccatttatgatgcaaaatctttaattttttttctaaacctaatcatacagcttggagggtgatattgttgccattggatttggtgctcttggaactctttatcaaccatttcattttgaaaagtggggaaactgccattcaaacaggcagtgtgaccagcttaagtctgaatttaccaaatagattgtaaatggcttggagaattctaatgtttatattctggctctggcccactatccccactcctcttttctccataccaaaaattcagtacccaagagggtatcaaactgtgttctgtggaactctcagattctacaaagggtatttagaggttccacaaatgtttaggagtccatttttaaagaatattttttaagtcttgttaaaataataaaaccaaaaacagacaactagctcatgccacattttgacacagtgaggaacactgggtcatgaactggtgcctcctggttttctttttttatgtagacctcaataaaacttttgccacattgtgcacctgaatgtcttataaaagtatcattgcttaggaaaaatgaagcattctcttgattcagtcctatctgtgtcctctcccttaaaatcacccaagtccataattgcaaca

SEQ ID NO: 43968 - DNA, 1023 bp, Homo sapiens
cacctgaaagggatgattgccaacaggaaaagaatgttggtacaggccccattgggtctgtacctcaccctggggtgaatcatggtggctataaatgaaagataatgttcataacatatttaagttaatataattttaattaagttagatttgttagaataattttcagctgcaaattacagaacactcaatgaaaagtggatccagataagggcattattatatacataactacaaggctggaggcagacagccctaaagttgatgcagctattcattgatgtcatcaaagacccagactctttccctgtttacactctggccttttatgtgtacagatgatgtttcaagatggttgctacagctcggtagcattcagtataagacgtgggtgaggaatgggagatgaggaagtacagcagagagcattctactgtgcacctcttatcaaggaggaaaatgcttcctgaaactctctagccaatttgcccatacaggactgggtgtcatgttcatccctggatcaattcctagcaaaaggaaatgtgattgccttcattggcctggaccaggtcttcatggctgacaaccagcagtatcttctatatcacacaaataattatctgttctactcttgtggaaaaccagctcctctaagcattacctcatttgaagaggaaggaagtacagagtgaggggaaaattctcaaaagagggaattgagaggaagaatgtggaaagataagaaagtattttgtccaattgcagccattagaaagcttattaaaatttcttcttctgtttttgagagctgtcgcccaggctggggtgcagtggtgcaatcacggctcactgcagcctcaacctcccaggctcaagtgatcttcccacctaggcctcccgagtagctgggtccacaggcatgagccaccatgcccaactaattttttgttttttgtagagacagggtctccctgtgttgtccaggctggtctcaaactcctggtctcaagtgatcctccc

SEQ ID NO: 43969 - DNA, 1031 bp, Homo sapiens
tatgtataacgtgccttgttcgattcttggagaatataaagatgcattgcattcctgttcctcaaggaatttgcaatctagctggatagcgcttggcagtttaaaaaacaaatcaaatctataatataaaataatcaaatgtctaggttctctccacagttctatgacagaggcagggcaggatttattctggtttttataagtgaaaacctgaggctccaaaaaattgggacttcatagacactggggactactagaggagcggggaagagctgaaaaactacctattggatactgtgctcactacctgggtgatggaatcatttacacccttagacatacaaaggtatgaaatatacctttataacaaacctgcacatatacccccgattctaaaataaaagttgacaaaagtaaaaaatgaaataaaaaatctgtactattacaaaaatgataagaaggaaggtggaacttgcttaatcaactgactagtggctgagttgaacggaacttagtaacactggagtaagagactgtactttgagaaactctgatatgatcatatgaaattaaagtagtattaggggatttggccaatagtccaattctgcatccaagtgaagactcaggcaaagtgatttgatctgtggaatacttctcttagagatgggagaggataaggtacttaagctagtcctaccccaagctgtggaacaatgtgctgaaatccatgtctcttgacccctgggcaagttgcttctgaaagagatggtaagataggaagcatccttcattgtttttgttcagtgtgtcagtgttcattatagtcatgggagttttatatttctaaaataatgagcccaaagtctcaacacatatgaacatgttttaatggctaaaaggtacgaatactgatttatatgccatgcctcttttgtccctatcccgtaatccaaacctgctctttctgattcccctggagttttatcgcattcctcctaaaaggagtcagtgagttctttttaagctaa

SEQ ID NO: 43970 - DNA, 1026 bp, Homo sapiens
aatgatcaaatatgacgtctgtacaggaaataaatcgtgtagtagtttagctggtaatccatgttctgcctcaaaacctaggaatgaatggcttattagctgttgaaaactctgtcattaagtatcattaaatcctttttttaaaaacttcctttatgccaggtaaatttttatattgcgaaaactgaattaagccaaagaaaggcttgcaaaaaccaattcagatcacactgtgactataacaagacattttcaaaaccagcattccagttgttctgtcaggtcattccatcaggtctcaaaaggtgactaggatgctgaaaaaggtttgccttccacattgtgacgtaaattcatttatttgtgttacttttgtttagaaatggcttgttacaataaggttttatcactgtgactcatagatcatgtaaagtcagcccattcccgttttactctttcttgtaattttcaaaatatggcgtagtggcaacccaaattgaaatcttgagaagctggcaaggttgatcaaagtggaatccacaaattaggattgtaaccaaaactggaggaatcatttttaacctactcaggaggccattttagagtcctgaaggtatcacttatacacaaatcagtgaaattataacatttttagagttggaaaattccttggaatatatgtagcccagcctctccccactttatgtttaaggaagtgggtcccgaagagggtggtgagttgcccaaagtcatgcagttagtactgtgctaggactgtaaccaagttcctattattctagttcggtggactttccaaaagccatataaatgtgtttttctcactcatgtagaattatttcctagaataaagacctatatttaaaacatcttattactggtttgaatgtgttactatacttgcttgtacattgctctaaaaacaatgttagtttgaactttgccctcatttgactgacctaccccagaatcagtaatgctctcttcactagaactttcattcttaac

SEQ ID NO: 43971 - DNA, 1105 bp, Homo sapiens
tgctggcaaggttgtagagaaaagggaacactatacactgttggtgggagtgtaaattagttcaaccattgtggaaatcagtgtggcggttcctcaaagagctaaaagcagaactaccattcgacccagcaatccctttactgggtgtatacccagaggaataatgaatcattctaccataaagacacatgcatgtgaatgttcattgcagcactattcataataacaaagacatggaatcaacgtaaatgcccatcagtgacagactggataaagaaaatgtggtacatatacaccatggaatactatgcagccataaaaatgaacaagatcatgtattttgcaggaacatggatagaactggaggccattatccttagcaaactgatgaaggaacagaaaaccaaatactgcatgtcctcacttgtaagtgggagctaaatgatgagaacttatgaacacaaagaagggaacaacagacactggagtctacttgagggtggaaggtaggagaagggagaggagcagaaaagataactgttcagtactgggcttaataccttggtgatgaaataatctgtacaacagactcctgtgacacaagtttacctatataaaaaatcttcacatgtacccccaaacctaaaataaaagttaaaaatcaatattacagtactttgttatcagaaagcacagatccttaaagactatattggcagtgaacttttttaaaaggctcgggttgcattatatagtatattttggaaatgtatttgtttaagagattagcatttccaattccatgacttcttcctttgtgtttttttccaggcctgtgtttcagttctgggttagaaacattttaaacctttcctaaattcagtagctctctcacaaattatatttagaaaagaaaagccccaccaaagttattcccagatcccttatccagtggaggtgggtatgcatactccgtttcttccccctctggtcttgcgcttcttgcccaattgaaatggagaattttgttaatcccatttgttattggaaagatagattgcctgtccctttaacaggatggccaaagaatgacaatcctgagccc

SEQ ID NO: 43972 - DNA, 1034 bp, Homo sapiens
tatgagagcatcacacatgaagagaaaggacttcttttttgtttcaactccaccatcactttctccacagtttcactggacttcttactttatttatcaccaagttctataattaacatatggttcatgttattgatttctcaggtttcaaagtaaaataaattgagctttcttccacatttagaatatacagtttttttaaggaactctaaacaaaggcacacattatttgtaagttggagagcagctgccagaaaacagaaaattaggaatggagtcatgagtgaaataatggagatactgttcagaggtaaccctttgtacagcaggaaattttccttagaaaagaagacagctgagtttgcttgtaaattttgctagaaacaggcctgatttagtaacatttagtgctggttaggaggctgaagacaacactttcagctttggataccaaacgagtggcctgttttatattttgtacacagtctaaatactttatagtttcaaaagatatgtgtgtaggagagagctattattaattttttaaatgatataataatatgtaaacaaatatttttcagatctggtagtagagttttctaagtgcgaaacagtagaaaatatcgcaaaggaaatgattcatgcattagactataaaaattttagactgaaaatattataaataaaactaaaaagcaaatgataaaatatttgcaaaaactatggcaaaggtttaatatccttaatatataaaaagctcttacaaaccactaagaaaaaggagattacccagtttagatatggataagaacatgaacaaatttgcaaagatgtacatatatacagaacgctggtagacatgggaaatgctcaacctcccaaataattagagaaatgaacaataaaaaaatgtaccataggggatgattaaatacattatgaaaatttatctagcaaaatgaatacatctcataggatgatttttcaaaaaatctcatattgttgaagaataattgcctaaagaaatacatata

SEQ ID NO: 43973 - DNA, 1115 bp, Homo sapiens
aatagcatgtagttagcataacagagtgatgctacagccttactcttttctctgcctttcattcagataaaatgcattagcagtttgaataattgtgtttgatgacgtagaagtgcctgtagtgcttgctgtatgtaggactatggaagaagctgaattctattatttaatgtccagttcaggaattgatctggaatgaggagaggggtacataggcatcccatatacccattaagccatcctaaatagcttgtttcaggcccagctagtagtacatcagttctgttgctgatcgtgtggtaggaatgtgtttccatatacatagttttactgtttgctctattttcaaaatttactatagtgcaagagtcacatcttgtaaacttgcccagtttaggggattcccattccacatgtaaaacattttttggttaacagattcagaagatattaactcctagagccacagtgccaggtctatatagatagaagctgaaactagattaatagcaactctaaagttggaaagaagataaacaatgaaactttcttatgaatactctcttaaaggctgtaggaataaaatgatttagtaaataagcaatgttgattttgccttcccttgtcagataatagcagccataaacttaacagtttaaatacaaaggatttctgtgctttagagttggtttgacatccctgtccttttccacttttcagcaacagctagtgggaaaggggttgtttaattgaaggcttcaggagaacacaccttgcacactggattcaacctttaaattaattgaaccctgtatctttgtattatttttaagttcttttttctccttgcttcctcttaccattgagttcttttctactctatgttttacattcctgtttgtgataaacttgtccatctgtcttcttccttctgtgctttcctccatccagtgtctctatggtcagatcaggaacctcaagtagggtctgagaggaagctgcctggctccttgggaaggatggattgatctggttctctgctgtcggctacttttgcccagtggacatgcgaatggaggagccatttaaggtgaatagattcccagccaagtcag

SEQ ID NO: 43974 - DNA, 1050 bp, Homo sapiens
gagaactaaatgttgaaagttgtccagaatgttccacactctatctgacttaagccagagctgttcgctttgcttttaaaaatacacttaactcacttatttctgagatcagaatctctttttcaagctctgtcgggtgaattgaagtgtgccttttttctaactagtcaagggaaaaatgtaagagggtttgggatatcagcagtcttcgctttttaacatttttcctgtgaattttctgaacttctttttttcagcccaccatgtaaagtatgtattgggatcttttaatttaccaaaaacattttggctttggcattcccacaatgcctgtcagcagggtatctcatttgtcacaaagtctccccatcactgacctctgcttcactgcagctccaaatggtgtgctgcattcagaggcagaataacagagtggttagaaaatcagattctggagccagacagtctgatttcaaagcccatctccactacttactgtctttgtactttaggcaaagtattaaacctctctaccactgttgctgtccattttttgtttttaaacagctttattgagatgtaatttacataccataaaatgcacctgtgtaagacttcaggtcagtatacttactgagttgcacagctatcaccatgatctaaatttaggaaattttcatcactccaagaagaaacccagtacacattatcagtccccattcctccacactctcccactgctcattgtcccaggcaaccacaaatccactttcgatttctatagatctacctgctctgaatatttcatataaatgaaataatggaatacatagtcttttgtgactggcttctttctcttagcataatccctttaaggtttatccatgtcatagcatgtatttgttcttcatttctttctattactaaatagtattccattgtatggatataccacaccttgtttatgcattcatcagttgatggacatttgggttatttacagttttgggctatcacgaatgatgccgcagtgaatatttgtttaccttc

SEQ ID NO: 43975 - DNA, 1029 bp, Homo sapiens
ttggttttcatagtttaattacaatgtgcctcattgtggatcttttggtctcatctgcatgtacttagtaaacactcaaataagtgatcataataatggtgcagaattaaatgattataatttaatggtaacagtaatgaccatgaatcatctaccagttaaacataatattgtgcttaaaaagtcaagaaaatgttcaatgcatgttaccaagaattccactaaaactttaattttaaaaaatagtttagggaattaagatgggtaagaatcaattatctaaaatattcacttacatgggacaaccagatgactaacagattattagtatatgaggtgttcctgtggttctttgcaaaagaaaacgtctgccttgaaatagataaacttgcagttacatttacaaattatctcccacagttttcattaccgttaacaccatgaaacattttccttattatctgagatacttctagaacaaagatcaaactctaaaataaaatggacttatagaaatatagcaaatcataatttaatttttataagtgtttgcacctgaacaaaacaacccaattttagatccttaagtttagaagttggtagaaataccagtttttccagcttctccaactgcagtgtgttttctaatattttaatatagtttgccattggtgatcttagaatatatttctagcatttttcttagttctcaacacaataattcccagaaattttgctctaatagatctaatttaaaaatataagatgttatattttaatttttataaggatctttatttttgaccaagctttattttggttgcttgcaccttgttacgttacaaagggtactgaattctaccatgtaggattttttttcttggtttatttaagaaacattagagtaatctgaagactttgtgagccatcgttgtttctcttttgtttcgtggtagtctgttactttgacctttttcaccaagtatcagaaaaataattttttctcatattcttttttgtagagtcact

SEQ ID NO: 43976 - DNA, 1056 bp, Homo sapiens
cttgcggtgctcctgctcacactttctttggtttcaagtgccctttctttgccacttgcttgggtaactcttgatactctgacagttaaattgtcatttcttctacaaagttttcctccacatatggatgggttgcttcttttatcatttcttaaaattccataggtatatacataagagacagaaagatgtatgtgtatgtgtgtgtgcggatttgaataagtatatgtgtatacacttatgtgtatctgtgtataccgcagacatacatacctcagcatttacagaatagttgatactttgtctacttttcccactagactctgaataacttaagaaattttattttaccctttgatttttctatacctagcatctaatctaatgcttagaaaataacaaatatttaataaacgtttgctggttaaatgcatttgttcaatgctatcgatcagatttttactgtggaaggctcactgaccagagtaggggatgagtacaaagagtctcagggcatttgggaaacaggataaaggccctttgtagaaaactggccaagggtgttgagtgcctgagctcagggaagtggcagtggatggaaaaatatttaggtggtggaattggtggttgattgaacatgtggggaaatgaaacaatctacgattatttgaaggcttctgggtttagaaaattatttggatgggggtgtgattcaccaaggggaatgaactgtgttctagacattttgaaattgagatgttcagagtattggttgaagttgtccaagagataactgggtatggagtttggagaaagtactattttggagagagaagttggagatttaccaacctctaggtactctttgaagctgtgaccataaaggagataactgtcatctgttgctgattagattgtcatagtggtggtggtacattggggaagaagagaataggtccaggagatcttgatattgaaggtccagatcaagaaggagagaggcctgtgaaggtttctaatttaaatcttggttctgcctcttgtctctgttctatg

SEQ ID NO: 43977 - DNA, 1052 bp, Homo sapiens
gagggaggggaaggaaaggagaagggaaggggagagaacgggggggaggggaggagagaagaggagacgaaaagagaggcggggtggcgcagcagctcacacctgtaatctcagcacttttggaaagctaaggcgggtggatcacttgtggtcaggagcttgagaccagtctgggcaacatggcaaaaccccatctctaccaaatgtacaaaaattagccaggcatgatggcgcacgcctgtgggcccagctactcaggaggctgaggtgggaggattgtttgagcctgggaggtgggggtgacagtgaaccgatatcacaccactgcactccaaaagaaagaaagagagaaagagagaagggagggaagaaggaaggaaggagggaaagagaatattctttctctcttgaaattaattttgggaggtgcttatgtggccaagagtggtatggtggagggagcagttcagagagatcctgggcaggacaccttaaccattccctgcctgtttcctcattttcaaaaagaagggctaaggcttgatgacctctagctttaaaattctatgtccctgtaatttcagatagagagagagagagagcacgcatgtatgtacagttatttaagaaagaaactttgaaggcaatttttccagttcatttcttagaaatttcagaaatattccattctctaaaagcttaattccagtgtttaaagaaaggaattcctgttataaataaaagttgttctctgctcccaatcaaaataaaaagagtgaaataaaatttacaattgattcaaaagtgtcgttattagctaattttgaaatttttatctattttcttttgtttatatttaaatataaataaaatattttaataatactgacttttctcacacaattcatgttagaatttcttagatggttccacatctgagaagtttcttgcttgtaaaggtaaaacagatttggaagctttataatgatttttaatccatcatttcggaagttactggatattggacaaaatgataaagtgttattttctgg

SEQ ID NO: 43978 - DNA, 1079 bp, Homo sapiens
aacaaacaaatttcaaaatgctgatagtcctgagattcagagctctgcatttcaaaaagacactagttaacaacaatttgtagaaggcaaaaaattataaaggtctgcagcataaattggaaaaaacacataagtccaaccatctagcattaacaagctcacattcatataattagcactcctaatattagtatttttcattaccatcaataggcaagaagaggaaaaccaagagtaaggatagtcttttcccacaattgtttgattgggagcgaggtgagatggctgaaatggacggagttaaagacaactggaaaatgtgagatttccttaagagtgtggctcagaactagaatccacggtgaaggttgttgaaattgttgttgatttgttttggttggctaaatttgtgaattagttgtatttggaccctgctagggaatcaggggtttaaaaaaggaagctaactagaatgaggcctaaggaatgggttagctcagtgactggttcttataagaggggatgcataccctcaagtgaaagggtctaggtaattccaggcaaccaagacctcaaatcagagctccctctaaattatgaatgcattgcctcatctctgttctcaattgtcctaatgtatatggttggtatattatgttttatatttttcttttcatgcctccatttataaaatgtcactaatctatatgaggtgatcaaatgaaacaaaccagtggagaagtgactcttaagattaattaaggtaggtaatattgagatctatgaatacggtagatggcttatataggttgaggctttacttctttttctactcatccagacttgaaccttgaagattaatttatcctacttgtcatagtttgatattaaccaagtctaatagattttccctttaaaacatttcctggtgcccattttttcccccttttcatactgtcccgggagtcaatcaatataaacctgtatgagtaacttttttctctctctcgtttgggttatgttccagttcatatgatgccttcttcccacatcacacatgtgccccaaaatggtcttga

SEQ ID NO: 43979 - DNA, 1064 bp, Homo sapiens
gtttgaggctgcagtgagccatgatcacaccacttgaccccaacctgggagacagagcaagaccctgtctcaaaaaaaaaaaaaattgaatgagaaaatttaaattaaaagtctgaagctacacatgggcctcagaaataacaaacactattacttattgattattggatattattgattacctaagagaggaggtcaaatgtgggttcacattccagttctgccacatgactatgtgtcttaaccccattatgcttcctacctctaagcttcaatgtcttcatttgtaaaattaggacacatattaagtgatgtctctgaagttaggtaccttttaagtgttttgttttgttttgttttgtttttttgagttggagtctcactctgttgctcaggccagagtgcaatggcaccatcttggctgattgcaatctccacctcccaagttcaagcgattctcctgcctcagcctcctgagtagctgggattacaggcacatagctaatttttgtatttttagtagagacagggtttcacagtgttggtcaggctgatctcgaactcctgacctcatgatcctccagccttagcctcccaaagtgctgggattacagacatgagctgctgcgcctcgcccttttaagtgtttgatacttgtcaagtacttagttgccttacttattcctctccttcagaatattttgtaggggggtggttttgttaataggattggtggcagaacttgacaaaatcttcaaattctaatattatgtgcatctctcattctcttggacaaaatgattaagtccattaggaatctctcaagtctgcctactttttctctggttaagtgtgacattatatcaggtagtagttgcaagggcaaggcataggtactacggacataggagctgttcaacaaatggttgctattagatggagttacactgtcatcttgaatgccaccttctgccatcttcaagtgctataattatttccacatttaatctcaagactgttcactcgaagccaccccagtttgttcttccttctgagagtcaaag

SEQ ID NO: 43980 - DNA, 1052 bp, Homo sapiens
aaacttcaaactctgaaacctggtgatctgaaagtagatgaaaattctgccatatttagaaaaccctcaaaccagtgcttatggaacgagtaaactcagattatcattcttacaattctgcaaaaataaaatggcattgctgtctgctttttcttgggcaccttattttaatcatttttgcattgccccgtgtgcctagcactcaattacctgttgaatagttgtatgaattaatgttgaatgtcagcttcccattagaatataggctccctgagggcaaaaatttttgttttgctcacgcattatctccagcatccagaacagttcctagtaaatatcaattgagtaaatgactgagtgaataaatagttaagccatgactcaagattactgttttcacagcaactttattgacagtaaaaatgtaaattaacactacaatttattagatattttatttttctattcactcagtattgcatttaaaactcttcaaaattatgtagtctctaataggtagtaaattggattctgacctgggaattaggagttatttaataatgtaatgattggcaagtagattggacaatgagatataccctttctaagctaattcatccactactgttttcattaaattacgaacataattttatgccaataatattgatattttagtgatattttaaatcatcatatcagtttttgcagattgaatttacatgttttgatggaagtttgtgaacatggtttaagattctctgggctgtgactgctcatttttgttttactgtaaaattagttatattaaaatatgacttctaaagagtcatattttatatttccctaaagagccttatattaatggccatagctgtccttacaagtagggatgtccatgtaatatgtatgtcatattaaaatattgacatgcattcccctaaagagccttgtataaatggctatcactgcctttataagcagtgaagcccaagtggccagtcccattatgaaccttgtcccattacttctgtttggggctaccattccaa

SEQ ID NO: 43981 - DNA, 1101 bp, Homo sapiens
ccactgcgccacgagcccccagccccgccggggggtgggtctccggcagagttggcttcgcgggtccctgcccccaccccgcacggtcgccccagctgcctccccggctggggcccccagcgccggccggagcccagcggcccccgtccgcccccagcgagcggcgcgggcggcgccctccgccgtccctccgccctccgccgctgtgcccaccccctcgccggagagagtgctggtaactccttccccagagtctgattacctgctccgcgaggccgcggacacgtgcggagagccgactgacactcgcagccccctcgggaggcccgacgcgactgggcccctcaggtgaggagctgtgcgctcgggtgggtgggctgcggggtggggggtcccgggggagatctgggggattggccggggtccgaggcagaactgtgggtggggtaagtggagggtggcggggggtgggggggacctgtgtttccttggaatcggctttggttaaccccttacgaactgagacgggattggttatgggggccagttttggggagctagaggattctccttatctgatgagagggggagatcccagcctagggacacccgcgacaccgagatcctgcttccacgtatccgtacgcacacacacccacacggaacacgcctcatacagtttctccaaacggaactggaactctactcggacactcacataataattcacatttagggtttaaaatgcactgcctctagggactccatgctggagaatgtgcttgcatttccccctcgaaaactccctctccagctcgctgaggtgtgggtgtgggctccaccttcccctccacgagataaatgttaacgcaggcttcctgcgggcgtgttatacacagaaaagtgcacgcagccggccagtgcccaggcttggagccccgcgaagacgcacgtttgctgtagtttccaagtttacttttataatttaaaatattggagttaaacacacgccccgcagtgagcagccctggtccccgcagcgcgcccgtccgtgtgcatatgggcgcatctgcgtgtgcgcacacgcgggagtcgcggtcc

SEQ ID NO: 43982 - DNA, 1021 bp, Homo sapiens
tgatgatgctacaattatttggttgcaagcaacagagtaagatgttctaacttaagcaaatacagagaagttgtcagaatctagcgtatctcatggaatctaagggcagaaatatagccaggcaactaaaagggctgtagcctgggagcagataagccaggagctctctccctctgccttttgtctttgtttttccttgcatatctgtttttacccttctctttctttacaggccatagaccatagggtctctgctccctccagttttcatagtaaatacatcctgccccaaagtttcctgagtacacatgtttctgttccaggcactcacagaaactaaatgcccatctttaagttccaattctgaatagcaggacaagaaaatctgattgatccaactgaaggcaggtagcctaccctggttcaataaactgtggccaagaaaattgagggggatgttgtcacatagtgtgaacatgtctagtgattgtgaaccctccagcaaaggactgagaaaggggtctttgtgaactgtacaggctgtctaggatattcaccagatcacctcatctgcatggctgctcccttataaggagagcagcgctgcaccctgtttccttaaccatccagtgaggttagaaatcaggctatcactatcctgctggttccacatcaggtaacaggttctcctgctctttcctgtcctaaaacaggtcaaaatttactcaaaatggtcttttactatttttttttttctcttttagccccagccttccacagagactaatctttcctttccctggccttctcatccgtatgtacaccctctcaacaatttctagatttccaaatctggtcatgctaagaatagactggatacaatttaatcactgcaatggcaattctgatcatcacaatcataataattggtgttgatcaaatgccttccagtcaaagacctgaaaataacattccaccccaaacacacacacaaacacacacatactttctgccagattta

SEQ ID NO: 43983 - DNA, 1057 bp, Homo sapiens
ttttttttctttcttttttttttttttttaaaaaaaagctcttctgtgattgagaggagaagtaattacctaggtaactactattgctataatttacattggtgtgaagtgacaaaggcttttgttacacattttttcttttctttttttttaaagtatgaatgcatattgacctgaaattttaaatttgggatcatagtgaatctgatacatatccataggcagaagctgccacacttcacatgaatctctaaatggttttgttagcttactgatagaacctatccaaaaaagtagcgtttatctaaataaacaaaggctgaggatgatcttcagtactcactagcttttttacaacttttcatagcagtacaccaccagaagagaagtggctttgtttggaatagcaattctagcattttatttggtttttacttttgtcattgtatttgggatgggtcatagtttgagggaagatcaactctttaataggaatgtgcattgatatatttctggacgataaatacaacaagaatttcactttgaataaatggaacagcatggaagaactctaaaattaaaattaagataggcaaaagcaactaaacaaaggaaagaaaaaatagcagttaatttataatgaattccttggtgaagttgtcaaatgtttgaattcaaccagtcagtaattacttattgggtaaatgttatatactcagaacctcagccacacaaaataagaagacattctttctttaagtatcttggcccttattaaactacagtttgcacagagtatcattggttaacagagtaagaatgcatttttaaatggtgattttaatatttgactgagcggaaaaatatgcccactccttgagttcttttataataaaacatgtggagagcttcatggatagtgtgtcatggatagtgtgtcagcagcaaaattcagatagtacaactctcttctgtttggaaaatacttcttcaatattttgttgtggtttttgtggtggtggagattgcataggtatctgctgcatataaagtactc

SEQ ID NO: 43984 - DNA, 1046 bp, Homo sapiens
tgcccagctaatttttgtatttttagtagagatggttttgtcatgttggccaggctggtctcaaacttctgacctcaggtgacccacctgcctcggcctgcaaaactgctgggattacaggtgtgagccatcacacccggcctctgtttttaatttcaagttctacctgttcatgctggtatataggaaagtgatggactttattatattaatcttagtatcagctctatcagctcttgcctcatgtattttgatgctttctgttttggaaggttattactgattcctgcaacgttgctgtaatcactcactagttttaggagtttttaatcaattcttttgaatcatatcatctgcaaagaaagacagtatttaatcctttcaaatctgtatactttttattttctttttgtcttttattacattagttaggacttccagtatgatgttaaaaaacagtgatgagaggcaacattcttaactttttcctgatactagtaggaaaacttcaagtttctcatttagagtaatgttagctgtaggtatcaaattgaggaaattcccctctattcctagtttactaagaattttttttttcacaaattgccattggattttgtcaaatgcatttcctgcatctgatgatgctgtcatgtgatttttcttctttagcctgttgatgtgatattaactgatttttggatgttgaactagccttgcataactggggaaagtcccagttgatcattgtgtataattccttttatacattgttgaatctgatttgctaatattttgttgaggatttttgcacctgtgtttatgagagatgctggtgtggtgtgtagtttcttttcatgtaatgttgttttctggttttggtattaaggtaatttgggtttcatagaatgagataggaagtattcttttggcttttgtcttctgagaaatattgtagagagttggcataatttctcccttaaatgtctagtagaattcaacagtgaacccatctggacctgatgctttctgctttagaagattat

SEQ ID NO: 43985 - DNA, 1216 bp, Homo sapiens
agagtatctaaaataaaaacgaaatcctgcaatttaataagaaacagatatttcactaaagaggagacacaaacgccaataaacttaagtagcttgctcttatgggtaatgaggaatattcagatggagatcacaatgaaaattttgccatcagtaaaatgcattgcaggtggatgtgggagttggcatcactactttggaaagcagtactgaatatctcatacagttgagtatccctgtaccttattatctggcagtcctacttctagcaatatgccccaaagaagtacttgcaaatgccctcctggaggcaggtacaatcatgctcatcaagcaacatttgtatagcacaacactggaaagccacaaaacaatagagacccaaaagtctatcagcaagagaatatattaatcttggtgtattcacacagtgaatgttcagagcaatagtgaacttaagcttgcccagcaatatggataagtgttttaaacacaatgttcaattaaaaaaaagtactagaagaccacctgtaatagtttgccattttggtagagctcaaaaacaggcaaactaaaccatatgctttaagcattcatgcaattataataaaactgtattttaaatgaatggatcgttaaacaccaaatccagaatgactacttctggttggggagaggtaagggcttaggctaggagagaaacacatgtactgggatggtttcataagagttcattgtgagtgcattcattatatactttatgactaacatactgtgttatgaatatgtataaaaatatagtaaaaagataaaaaaaagaaagtttaccatatctttcatataatatagtgacttatctgtaaatagctcattttcacattcatttatagtaacaggtatagtattttaaaatattctatttagtcaagaatttttgtatcttaaatatataatatttaatcatataagtctactaattcattcagtagatttttatctgaaatatttagattttaagtatctaaaatagatcagctctgttttagaaattggggaatcaaaaataaagtatgcacacgtagacactcacattttcttctgctttgacggtcttcacatcatcataataagtaaaatctgaggatattacagcagttaaatgtctcattggaagtgatagaaggactacattctgttatagctgttaaaattaagc

SEQ ID NO: 43986 - DNA, 3530 bp, Homo sapiens
cctgctggtaagtacattgttcttgagtagaagttgggtactgtaaatgccacaggggaagatcacttatgaatactagtacaaaacaaatcaggaaagaatagatctctctgcatacctagtttaaacataacttgtagcttccttccctctgttacacagcctttgaagttatgtttttagtagtaaatctgtagatacgtgaagctacaagtcaaatattttagctcagttcccccttttctggcagccatccaccgaactgcagggacaagttttcacagataaagaaacattttgtgggagtttttatttttgtgctgaaaaatgtagttcagtgatcttgctatccaaggcttttagtaagttgtgagcttggagtgagcagccttgtggttcataaggttaattaccatatttacaaatccattaatgacttaaaagaaagaactggcctgatagggtttatctctctaaaaattgcagccactagccaatcaggaatatagaaacccaaaagagatcgtagaagtgacaagagtaacggcaataatgtgttagtggagaagatgctatcagagcaaaaacaataagtggaaactaatcaaaacaattggtcattttaatgtactcatatcatatgtcttaagtaactggtaaatcatgaaatttgcttatttcacttaaattattttgcctgaattttattatgtaattgttattgcttatttaggatgcagcataatataatagattatattgtttgaattattaaatatcaagatcagagaaaattgaataaatcatttctacaagagatgcgaggaatgaatacccagaaaaagtatccaatgcatttttataagtatacgtaaaaaccgcattacatgtattgatagtgttatatagtctgacatgctttgtctagaaaacaattagtatagtatggattcttaccacttaaaaattactctgtactttgctttaaaaaaaaggaaagaagaaaaaaatctgtagcaattatgtagctggtcagttctcatgatgtattttgttggtaataacttcaagtaaaaagaaattaccaaaaagatattatggatagcttcattatttgataacagtctaaaatattaaatgtgcataattttgtctatgtagtgtttgaaaaggctgtaaacacaaatcaaaagaattttttcccattttgtcctgaaatcacttccatttaaaacaaattgttattaacagtttccttgcatgttgcttcagtttttccagaaatgtctacatagtgagacccctctttataaacagcgtaagctgaattatcaagggcgtatctcattatttgtctttctgtcacttatctttcctctttgttttcagtgtacagtattttctccaaggtacactccgatcggaatgtatacccatcagcaggtgtcctctttgttcatgttttggaaagagaatattttaagggggaatttccaccttacccaaaacctggtatgttctttgtgaggaaaaaaaagcagttaacgtactaaattttttgtttaatttgcataatatagacatatatgataaaatatcattaacattatttcaaatggtctaaatatgtgataaattgttgtaggatatttctcatttacagattagaaatttaattacagacaaaaataatttatttttgaatgttaaggaaagcatatttctggattctcagtcttgagttttatgtctctgacaagtgatctacctatattcacatggaaataattatagctgtaaacttatgattttctatattaagacctagattctcacatagtacattgatttttggaaaactatacatatgttgtagaggagaatgaaaaatggcattaggtaagagcttttaaaaagcttttacaataggagataattttatataactccataataatattatggagattaatttttccttttaagtgataccaattatgaagtcttacttaattcactattggtttaaatatgttattttgagtgatcataaatgccatcaagttaatgaagatatacaaagaatagcaagagaaaacatatcattacagctcttccttaagcagcaaataaaagtgaattttctgaaaattatattgtataagaatgtttttagcattagaattgatataactattctttttgaagattatatgatgaatactgtacctgaaaactcttccacaatatagttagccatgttcctaatagtattcaagaagatgaaatacggcttgtaaagcatttaacacagggccaggatgtgctaataaatgatgctgttattattgcttgtgattaataaatgctgtcgttagtacagttgttatggatttgtaacgtctttttcatcctatcctccagtgttttaaaattacattatttttgttttgatgagacttttataattttggaatatctttcatactcatatgatagtgtccagagtttcatgaacggaatatttcgcaaaagaatgagtacattagcatgattagggaattctcctgaaagatagttgtctcactggcagaactatatcactgttaggtgaccaaaaatatatttccaagaaaattgtatgaatctgctttctttgttgcatcagattttgaaacaaattaaacaaccaaaaggattttttttaacgtggtgccctaatttaaattcccagatgggttttgtatgtgtgtatttagttggctacaaatgtaagaaaaaaattttagacagaatgttttgattgaaactaccaaagcaacatgtgtgaaaataactgtcttatgtcttaattctctgtttcttatctaggcgagattagtaatgatcccataacatttaatacaaatttaatgggttacccagaccgacctggatggcttcgatatatccaaaggacaccatatagtgatggagtcctatatgggtccccaacagctgaaaatgtggggaagccaacaatcattgaggtaatttacacctagaaagagcaaaactatacatatatgtgtgtgtgtgtgtgtgtgtgtgtgtattgtaatttgagttttaagtgttgaaactaaagttacctgatggtggtttttaatattttgtgcatggaaacacagtagataacatttggaaatgtgccattcttctctgtttataaagtttttgtttcagcttttatattaaaaatgacagtctaaatttgtgaaaaaaatatgaccttaaaagagattattataatatgaattctatttgagaaaataattgtagacttgatagacttatttgctctgtattttgaattcaagttttatgttcattgaaatatagccatcaacagacatatacccctgctacttgccaagcattgtgataggtgcttagggatagaatgataaataataggtgaatcttgcccagtcttcttacaattcaggggttggaggactgggatgtaaacaaatacttagccaacactg

SEQ ID NO: 43987 - DNA, 1059 bp, Homo sapiens
agaggccatatgcaggtaggaaataatgttatgatctgtctcttaataaagaaatatatttggcatgcccagacaggatgacatataaagctcttttcaatgtagcatgctatgacactaagcttattgatcaccaattagcaatggtttgcaacctttttccgattgacatttaaaaaacacacacatgaaatcacacaataatcaagatgtttagttccactttggaaaaactgaaagtaagtggttttagttggggaaaatatcatgaagaaactcttctgcttttttgtagaagattcaagtaatggtttcctctcctacttcatgtaaagaaaagtggccatatctcctagagaaatgaagtttacaaagacactgtaatgccttcttagtgatggattccacagccaaggcatggactatctgtgactgaaaaaaaaacaatagctggccaatgccagatgaatggcctgcagtactttgatgttgagtgaattaaaggtgaagggcagactgctgagaaaagcttttgattcaaagccaagattcataaagttgtattgataaaacacaaggtaaatcttagtgagaaaaacaaaaacaaaaacaggttgtctaactggctggatattgatctctcttaaaatatttctctacagcaattacctggcttaataattaaatttcaatttgactgtagtaacaacatgttaaaaaaataaattagaaaggaatccataaatgtatcaggctatgcaaactttgaaatgagttcttttgatgcagagacagcaagtgagatttgcctcttgttcaattcctatgtatacagggactctgaatctcataaagagtttttagatgttaaaactataaaatatgagacgagaagtattattttttgtcagtacttaacatttttaattatcagggatgatgatacctagttgcttaggcaacaatttattttaaaagatacagcagataggtggctgtttagtactctctttgtatcctcaacataccttaaaaccttcttaatcattcttatccaaa

SEQ ID NO: 43988 - DNA, 1085 bp, Homo sapiens
tttaaaattttaattatggatatgtaatagttgtacatatataaagggtgcctgtgacattttgatacaagcatacaatgtgtcatgattaaatcggtagcctcggttttagccggttgcagtggtcccagcagtggttgtagtcctagctacttgggaagctgaggtaggatgattgattacttgagcccaggagttctagtccagcctgggcaacatagtggaccccatctctaaaaacactactactactactaataataataataatctgggttttgaattgtattcttttctcattttgaagggttggatttttcataatttagcttaagttcagatttttactgaaaattcagtttgaaaaggaaatatgccttttacttctgatttattaaggtggggagctcttttaaagttaagtttgctatactccactaactgttgctgtcttcactttcctttccttttctcatgcccaaagtattttccttacttccacatgcttggtcctacccattctaccttttcttggattgtatcttatcagttatgctcctgttctttatccttaatctcttccccccttacatcttttcctctatttagatacaaaatatgtcatccctactaaaataaccaaccttctgtccaccttgctactcttcagtctatcatttgatctttttgcttccctattctgaccagtgttcttgaaagattaactgtaatttctgcatctacatcttgaccttttgcagtttggcttctactctcaccactttatcagaactccactttcaaggagtcaccagtaacttctcacttttcaaatctagcagtcttttctaagctctcatcctctttgacctttttgcagtaagtgaggatgttgatcacactctccttcttgacatctctcttctgttggcttatgttactcttcagacttcatttttcaacctctgtgactgcttctctctttctttgctgaatcatcctctgcttttgatatgttaatgtatttattaacatgttgttttgcttttgctgtccctcttaccttttgagcattctttcttact

SEQ ID NO: 43989 - DNA, 1032 bp, Homo sapiens
ccaattcaatttgctttttgaatcctgtaaaagccaactagactgcccttatgcaggacctggaaagtatgagcaatgatgcattgattcactagccaaggacatgtagtggtgttaaatcttatgctgggttagtaggattctaaaagcaagagtgtaagaaaaaattccatagacctaaaattatcctagtaaatcctttaaatagcccataaggtataatatgtgtaattttgtatataaaactctgaacaataattcttatgcacaacatagtctgagaaccactgagctagaataaaggaaggaacaaaagagaagctgcctgggcactcaccccattctttctttatggtaactacccagttcatggagaaatggagagttctatagagtgtctgcttgcctgcaggatttacttcattatgctttaagattaagcccctataatcttcagacacattaatagatgatttggttttgtaaggattgaattagacagtatatgtgaaagtaccttgctcaggagctggtgatgggaagcagttaaatctaaatgttgcttgtcatatccacaaatacattgttctttggaacattgtagagaagaatttggccacctgtttcttgtccttctagttgggatattccactatccagcaaggtcttgcatgtttttacaaattggttgtacctgtaaatcagttggaggttggaatgggtagggttttcaggtaatagtttatatttctttgggttctgtaatggctcctctgtcttctagagttcacagttttgtatgtgaattacctgacggaattgtgtaacccatctacctagactctccatggtggagtcatgaatatgtgttttagaattttttactatgtatattttgggggtacatgtgaatatgtattttgggggagctgcctacgtgcttcctatgtaaccagcatgttgcttttggaacatagccatcaggaaaaaccctgggggtggagtattttgccacaagagactattagcatt

SEQ ID NO: 43990 - DNA, 1086 bp, Homo sapiens
tctagaacaacaaacattttcaaaaccaaaaccaaaaccaaattaatagataagaactttaaacatattttggatatttaatatctatgtgaattttggattttctcagatatttatttctggtgttgactatttctgcccattttgcacagggttgcatatacagcaaagaggagttaatgtgtattatttattttatcaaataataactgggcttcgtatttagacattttatctatttttatgagaatttgctgtagatctacgaagctgttgatttaacacctatatttaacttctagtatgttaagaaaattgtatttcaaaacaaagtgggattttcacttgttagataataactagactttctctttggacattttacccatttaatgaaaatttgccatgtatttataaagctgttgaatttaccttatgtatttagcttaagttctagggttttagaaaacgatttcaaaacaaactggaattttcacttgtaaaatagtaattgtactttctatttggacattttatccctttttaatgacaatttgctatagatctatgcatctgctgacttaccacatatatttggcttaatttctaatatagagaaaatatatttctaagcaaagtaaaattttcagttgtcaaataataactggactttctatttggacaccttattcatttttaatgacaattgctatggatttacgaacctgctgacttaccacctgtatttggcttaagttctggtatggtacggaaaatttatttctaagcaaagtacaatttccagttgtcaaagagtaagtggactttgtattgaacattttatccatttttacaacagtttgccataaatctaaaagctgttgatttgcttcatgtattttacttatcctatagtatggtggataaattgcatttctaagcaaagtggcattttcacttgtctcacagacattgaaaataagggacaacaccagaaaaaactggttagcgacaacctcaaggaaataaagataacatgtatccagtttctaacactagttttccactggtgaaaatcatgcagta

SEQ ID NO: 43991 - DNA, 1050 bp, Homo sapiens
ccctgaataggttctccgcatccagaacattctatctgagaagcctacagtgactacagtttatgccaacaatgggtctgttctccaaggaagttctgtagcctcagtgtatgatgggaagctgctcataggcactttataccacagagccttgtattgtgaactctaaattgtacttttggcatgaaagtgcgataacttaacaattaattttctatgaattgctaattctgagggaatttaaccagcaacattgacccagaaatgtatggcatgtgtagttaattttattccagtaaggaacggcccttttagttcttagagcacttttaacaaaaaaggaaaatgaacaggttctttaaaatgccaagcaagggacagaaaagaaagctgctttcgaataaagtgaatacattttgcacaaagtaagcctcacctttgccttccaactgccagaacatggattccactgaaatagagtgaattatatttccttaaaatgtgagtgacctcacttctggcactgtgactactatggctgtttagaactactgataacgtattttgatgttttgtacttacatctttgtttaccattaaaaagttggagttatattaaagactaactaaaatcccagttttgtctgtgtttaattctgaaggcatatggctaggagaaatgggaaagcagctgcttccttatggagtttggataggcaagcatggccatattaatttctcttgtggaaagctgaaagtgaatggactcttaatttgaaacaacaacaacaaaaatcaatgaaatattgcaactcaaattcccagttcctaaggaggtttccatcagctctcttccttaatgggagtccactttagagacaaagaggaaataagggttgggacaggaaggtcttgccacctcctcattgaacagaactgtgaactaaagccaggagaatgaagtcagtcgtccgtgaccacatggttaagcagcagcaatgctaggatcagggccgcgtgcccagctcacagagggagagtttttctgct

SEQ ID NO: 43992 - DNA, 1040 bp, Homo sapiens
tgcccaggctgatgtgcagtagtgcaatcatagctcactgcagcctgaactcctaaactcctgcgctcaagaggtccttccacctcagccttccgagcagctaggactacaagtgctcaccataacactcagctaatttttttttttttttttttttttttttttgtagagacagagtcttgctatgttgcccaggctggtctcaaactgctggcctcaagcagtcctcccacgtcagcctcccaaagtgctggaattataggcatgagccaccaggcctgacctaaagctgtagtaatttaaaaagtgttatattggcacaggaatagacatgagacattaaaataacaaaacagagagtccctaaatagaccaatatgtaaatgtcagagatctagcacatgataaaggtgatattttgaatcagtgggagaaggatggactgtatgccaggcactgttccaggcactgggatctagcagtgaacaaatttccacagtcagtatgtagatgtcacttttctccaccctcagctctccctggaatcacctagtccaccaaccttctgattactctctgaagagaataaatccctgatcttcttttcagttattttcaggctttcagtattccacctccccgttattattttttctgttatcttttctctgttttttgagtttttgtggctttatgccactactttaaccacaatctctatttatccttcatgtacagttcccatgttagtccataaaaatacttaagcttttgtatttaacatttttcaccgttttggaaagggtctaaaattcccaggactccacagctttgcaccagataagcctggaggaatactaatgatggatctaaaagaagaaaaaccaagggcacgggaattaagaatcagtcgtgggtttgatttggcctcattcaatccacatggcatcagcactttcatagacaacggtaagagccaatgggctaccaacatttagtaacgtgtgatggttcacaaatgactgtgaaaaatagatttg

SEQ ID NO: 43993 - DNA, 1033 bp, Homo sapiens
tccaaacacataaatctacagccattttagcttgggggcatgttatagttacaaagatcttatagccatatcaatagaactttttctgctttttttctgttaccctcctttgctcatttgactttttttaaaatttagaaacattcccagtttgctgctgtttttcatttacttggcattgtctctaataaaacctagagtgtactctcttctaaataaagaggtcctacattgtggaggttgttcattcttcttcctagcattttagctcatctaacccaacctattttacagttatgggttgagggtcacctcaaaactaatgtcacacttcatgaagaattggatgacatagaataaaatataaaaaatgtaaacaatgtgagtgtgcttaacaccactgaactgtacacttaaaaatggtgaaagtgatgaatgttgtatgtattttatcataattaaaaataaatttttaaaaagagaaaaaatacttaaataaataaggagtgcgaacataaccatgactagttatcaccatctgatagtgcttcctttgcatgtaaatcatgcttttgttttggggacattcataaagaatagggattaactgaagtggcactgccatgtaacaatagcataattccagtttgttctacttaccaggcttgccctccatgaaaatatacaattgtagataatcttttttaattggagagatttcctcttatgtccaattttatacataaagtaagacttttttattgtgtgcctaaatttgtgtaaatatgactgcatcgtattagtaaactgaattaggtagtgcattcacataaaatttaacatcaccaagaaggctttaccttaagaatgtaatgatgaatcaccattttagatagactgataggtaatttattaactgatttaaaagagaaaagacctatatcatctcagtgagtaccaaaaagcatttaataaaattcaatactcattcctaaagttccaagcaaactagaaagataaggaaaattcccac

SEQ ID NO: 43994 - DNA, 1027 bp, Homo sapiens
agccaaagggaactttttgcccattttattgcttgtatgtctttcacagtcacagtctgacatgcctgcccaccattgcaaggcggcttttattgcatgtctaaagcaggctgtcttgctaaactctttctaaaccaggaagtaaaacaaaatcggtggtgtgaacacagtgggtttctaagcatttttcttgtttccttccattatgttggaggataaattcctggcccaaagttaaaataattcctacaaatgaacaggaatttcagtatgacttatccagtgaagcactggatataaagtgagctttttgcatgcagaattgtgatgtattttataaaacctcttgagattaatgtttgaggagctaggtaaagatggaagagatactccttcagtaatataaatggaagcgtgtagtatgcagatttacaccccccttccaactcactgtaactttaaagctgtctgttagaaggatgaaatgtagttgtgagccagaccatgttggtttggacagaaattcttacagaattattaagccttaaaaaaagcaaaggagatttatgcatctgcatttgaccaatttggtttggaataagttcataatggaaaagtaataaaaccataagagacagtgtcttctgagtacagtctcgcttttaaaaaatctaaacatgcactgccctattttggatacagtgactgtagaaaaatttcccattggtaactttgggagggttttctgttgttgttgttgttcctttttcattgattatcagccagtataaattttaagctttctgtcaaatatttttctggagatgtcagtcttagggaaaagaaatcctaaagtgttatctgtaggagtctccttctcccaatttcaccccctccccgaaacctccacctcccaccccccaacacacatagtgttttttagatatcagtaaagtctttttctggtgtaactggagaggttggggtttggagagtagggggtggttgaatgtgtgagagaaagcac

SEQ ID NO: 43995 - DNA, 1054 bp, Homo sapiens
attcttcattcttgcataattcatggggataaaataaactttaaaattctggcaccaaaataaaatgattgaaatttccatgactgttttgcattacttaagaacacatgcatcttgaaacaaaccatagttaatctgtgaactgcactcatgtccatccatgtccaccaaaacttttaatgattgcaaaatggataggtttgagtctttattttcttggccaatttctgcacgttttcatttagagcattaagctataaaaatatcagaagacatgtatttggttataggaagccacataagaatgagcagaagatttcaacagatcatttgttgggttagccaatctccagaaatctacagtgagctaactttagtgagcacagggcattgtaatctgagactgaggcgacacacactggatctaaggtgggtgagagaattgttagagacttgagagtgctacagtaacaactgatgaccttagaaaattggaaaaatatgacaaaaagatagacgtgtaggtatcctagagaagaggttaatgaatgaattagttccacacctcaaaaatgataatttataaccagctactgttgctgagactaaaacaagggagatagattaaacctcagtaggagggaaatagtttagatagaagaaaagataaccaggatcctgaacgttctcatgtactatggtgaaaaactgcaggagtatctgatcgttttccccaattctctttacttctagaaagccccagaatagaggagttgaggaactgatttttttccagaccataatcataatcacttattttatgttttaacactttgtctcccaaaggcatcctgagccatagctaagataacagacagtgcttgaaattttgagtgtaaataatttaacctagataaactggcatttaaatcttcatttctgcatttgtccctggctatttccccagctccactgtacagccaccttggggtagcagcccaaagagcctgtcagaactgggttgtaatgaaggctttgaaaggcgatagtgtag

SEQ ID NO: 43996 - DNA, 1051 bp, Homo sapiens
aagatgagtaagttctagaaatctcctgcacaacattgtgctgatagttaacgatattattttgtacacttaaaaatctattaagggtagatctcatgttaagtgtttttttccaccaaaaaaaaaagattttattttcattttttgaaagaggtgaggtaattggtcgtgtagatatggggatggaggaggggagactgtcgcaggcagaaaataatagccatttcccgggttctaagcgcggagtctgtttgatacatttgaggaacgttttagggagagagactataaacaaatacaaaaaatatgatgtcagaatatcctgtttgtatgtaaagcaggctaagtgggtagaaagcatggaagctatctgagcagatctagaggagtgaccaaagatgcattaatactgaactggcatgatatgggctttgtattccatgaagggttggagctgtgggggtctggaagtgatggccactttggaagtgccacaaacagtggaggctgggaataacagaggcctggactggagtcatatctcgggaccccacctgggccattccttttttttttctttcttggtttctttcttttttttttttcttttgaaacaaggtctgtcacccaggctggagtgatctgggttcactgcagcctcaacatgcctgactcaagtgatccttccaccttagcgtcctgagtagctgggactacaggtggcgctaccatgtccagctaactttatttttattttcgtaaaggtgagtttaactatgttgcccagactaatctcaaactcctaggctcaagcaatcctcccgccttggcttcccaagatgctaggattacaggcatgagccactgcacactgggctgttcctgagagctaatctgtatgacttggctcccgattggccatgggtgagaggaagggggccaaaggaaaggaagaagaaccaggtggtagctactggtcttgttctgttcccaagatatgtggttttacataatctcatgagagaagtaaggtaaccatcatttttatttt

SEQ ID NO: 43997 - DNA, 1026 bp, Homo sapiens
gcatttctaatatcttttcgtaagcagagatggttaaggcattgaataatccggccctgactatgacagtatgctcagtggcaaaggagaaaacactttagtttgattcctagccatagcattacaaggattcaaagcctttcacctcctgtccatttctatgttagtttcccctcaaaacactccccattctcctgttacaataccagcttcagtgtaattttatagctcatttcttatgtacctagattcctttcttttttcagatggcatatttgcctctgatatctggggaatgcttatcattggaattattaaatgtacaagctgacacaacaaaccaccaatttgttattttgatgaaaatatttttgtattttcagcagatggctaaaaaatgttgcctttgttatacagtctttgttttgacaaagacaaaaaagagagagaaagaaagctctggatcatttttccagtgaaacttaatctaaaaccaaacaatttagcacgtgacttctgagtgtgttccatgtgtttctagagcccatttccctggcaacctccacactctcccagctgtagaggtcaacacaatagacttgtcacaggttttaagtcgggtaaccacttttaatttggagaaattattacccggggagaaaataggctggtcctatacttcaaagaaaaaaatagaaatcaagatgcacacggcctcctgaattggaccgacttaatggtgctgtgtgcctcataagcagctgttcaaataagtagctgcccagaggaaatgtatattcaaatgcttcttgtcatttgcttctccttgcttcacacctaaaagccagatgcaagctcttccagggctaacaaatagatgccttctggtggctcattatggtaattactggccatatattactgccatgtgaaaagggttgtaaggcaggccagcccaggggcatttacaagtggtttatttgtgttgagctattaagaatccgccagttatcagatcaaccactg

SEQ ID NO: 43998 - DNA, 1043 bp, Homo sapiens
tgttacaccaggagctaaggcgtgcttctctgttcaagaaacgaaggctgaataaactgatactactgttttcggctatagcttgcataaaatataagttgtagcaagaagcagcagcaaaagtcaatcagaacattcaggtctggaaagagcttcttgctgcctgagtgcatggatcgttgtattcacagttcatcttgaagctggagctaatttaggacctggttctacttctgggctgaggaactttatctagaaaactgcttagagcagagtgagaccaaagaccaaaaccacaaaacaataaaaacactttctattcaaggtgaaactacaaaccgaaatttaagagcatattaggaaatttaatgttaagaatgaaactaagaaaacaaagtataaggagataaatagataaattcacacatggcaaaatgtaaacaatggaacaatctctatatgactttaaaataagaatatttaagatcctcaagtagatacagataagaatgttacccagcaagagaattttgaaaatacagtagatggatatgaataaaaaaccaagcaatctcacttctgcacatatatccaaaggaattgaaattcgtatgttgaagagatgtcttcactcccatgttcactgcagctctattcacaatagccaagatatagaaactatggaagtgcccattgatggacaaatggatttttaaaatgtggtatagatacaaaatggagtactattcatcctttaaaaagcaggaaagtctgtcatttgtggcaacatggataaacctagaggacattatgctaagtgaaataagcgaggcatagtgagacaaatagtgtatgacatcacttatatgtcaaatctataaatgtcaaactcaaagaagtagataatagaacagtggttaccagaggctgggtgggagtggaacaggcagagaaaggagagacattggctaaatggtacaaagtttcagctggacaggtcttcctgttctggtgatttattgcagaacatggtgactatagtt

SEQ ID NO: 43999 - DNA, 1027 bp, Homo sapiens
gcactctttctcagagaagcttatagaaaaacaaattaattggtcatttttaatattgaaaaacaccagtgtgacttcaaaaattcagatcagtaaagaaattaaaagaccatatgccagggatgttcagccttttttcatgacataaaatgcattttccaagcatttctgatcttccaagtgagtgcatagatcaaacacagaaaaaagagagcattgagatttagttttaactgagcactcacactgtgctcaggactgggctggcactgagcactacacttcaaaggtacaagaggaatattagcaaaacaccaccctggcagtccctgggccctgcagcctggagagttgcaggccactgaatcacacatcccatcctctaatttcacttgggattcatcggcctaagtaacctaattgagtgtcataattgatttgggagactcatttccttccctggaaatcattaaaggtggctgcgtcatgcttaaaatagcactttttctaaaggaatcccctggactcgttcatgaggaagaaagaccctgtcagcaggtggcttctcagtcctgccggtccatgacctgcccagacctgccctctgcacaaaggttgctagtggctcctcgggcctccccaccaggcgcctttcagagtacacaaaaagggcatactgccattcctaatggaggcagccaccctgggcaaagggctggccactggcgttgttgtggtcatcaccccaattagcaagacacactctgtgccactaaagaatttttagcaggaaattcttttgtgagtgactcaacttccctgcatgaaatacctagatattgtgacttctttttcgaagccaatgttaaattcctaattaaactcttacctttgaggttttccaaccgagaaaacccactagaggtggccctaaggaatttgcaattccttctgttggatttcaccagtgagaggtgaagctgggaatagccacactgctgagaatacctttgtagtcacaggaggt

SEQ ID NO: 44000 - DNA, 1155 bp, Homo sapiens
tgaatagtcagttttttaaaaaattatttttatttcactttaagttctgggatacatgtgcagaatgtgcaggtttgttatgtagatatacatgtgccatggtggtttgctgcacctatcaacccgtcatctaggttttaagacccgcatgcattaggtatttctcctaatgctctgcctccccttgcctcccaccccctgacaggccccagcgtgtgatgttcacctccatgtgtccatgtgttctcattgttcaactcccacttatgagtgagagcatgcggtgtttggttttctgttcctgtgttagtttgctaagaatgatggcttccagcttcatccatgtccctacaaaagacatgaactcattttttctggctgcatagtattccatggtatatatgtcccacgttttctttatccagtctgtcattgatggtcatttgggttggttccaagtgtttgctattgtaaatagtgctgcagtgaacatgtgtgtatatgtgtgtttatagtagaatgatttataatcctttgggtatatgcccagtaatgggattgctgggtcaaatggcatttctggttctagatccttgaggaatcgccatagtgtctgccacaatggttgaactaatttacactcccagcaacagcgtaaaagcattgtgattgctccacagccttgccagcatctgttgtttgctgacttttttttttttttttttttttgagacggagttttgctcttgttgcctaggctggagtgcaatggcatgatcttggctcaccacaacctctacctcccgggttcaagccattctcctgcctcagcctccagagtagctgggattacaggcatgccccaccacgcccagctaatttttgtatttttagtaaagatggggtttctccatgttggtcagggtagtcttgaactcccgacctcaggtgatctgcccgcctcggcctcccaaagtgctgggattacaggcatgaggcaccacgcccggccccctgactttttaataatcgcctttgactagtcagttctagtcccaagatatacaatgttacttttgccatataaaagtcaattgttttgtgggtctttctctcttctctattttattcctttggtctaatttatttctggtt

SEQ ID NO: 44001 - DNA, 1033 bp, Homo sapiens
tttttgaactgtgtaaagtaagacatattgtcttcatctcctgtgattctaaacatgaacactttgtgtaattgcatacaacttttattctttctggtctttttacaaaggtagtaaaatagaagcatatttgctatttcttatccttaggaatttaattctgtcaatgttaattttctaccaatatcaaataactcagcagaaattagaatcatagagtgctgggacctaatagattggtgattctcaaactggaatggagattggggttgtgagaatgtactgtgtcatattcatgtataaatctacctgatttcatttatttattgaggtaaaattcatgtaacataaaattaagcatttgaaagtgtacagttcagtggcttctagtacatcctcaatattgtgcaaccatcatctctatttagttccagtattttcagcatcccaaaaggaaacacagtacttgttaagcagtcattccacgttctttcttgccctaatccctggccgctgctgatctgctttctatctctaagtatttgcctgttttggaagcttcatataaatgaaatcatacaatattgtgaccttgcgtgcgtaccttttttcacttagcataatgttttcaaggttcattcatgttgtaccatgcatcagtacttcattcctttttatggctgaataatattcatatacatgttccatattgtatattccaatttataataatactatatggatatgccacgttttatacattcatcagttgatggacattcagactgtttccaccttttagctattgtggatagtgctgctatgaacgtacgtgtacatatatttgagtacctgttttcaattcttttgaaaagaaattttatatatatatatatacacacacacacacacacacacacacacacaagtggaattgttgggtcatacgttaattctatatttaactttttgaggagctgccaagctgttttctacagcagttgaacaatttatgttctcactagcgttcgta

SEQ ID NO: 44002 - DNA, 1064 bp, Homo sapiens
acatgtatgtatagtatagagaatttgtaagtgttggacatactattttggggcattataccctatcacataagctttttatgtaatatagttaagtacataatccaggttaatacactgtttaaaatatccatccaaaatagattctggtttgtcagtgttagcactatttttcttaacagtgctcatattaattttaactgcttaataagttgtaatagaaaggttatttctcagattcctcatctatgataattggaagggtggtatgctattacgtagacattagtgcttcttactgcttaagataatggtattaaggctacaaagtttatctagatttatcagataattaacgaagaatttggccagctctttcgtctttgtttactcagtagtgtcataactatgaagtactgtatagtaatacgaaagaactatagaggtattgttatgaatcttttttatatgttctacctaaaatgttgctcacagtattctttttccccctcttcatgagccagttcctttttcctgggactttatctctactttttcctttcctttcccagccattaaaatagggtgagatggttattagacgagggagagatgctttatctttgttgtaaatgatcatcagagtttaactttataaactaaaaaaattgtaccattcttaaatatttttcccctctctaagttaaaagaagtaaagtcaacttgaagacatcacttaataactattgaaataacattttgaatcaaatcataattagatgaaaaattttgtttcttaaaagatagttgctttaaaagataaggctctacagtatttttcaaagacttacaaggttagcagaaaagtgtaaaatattattttatatttctggcttgaatcttttgacacatgattatttcctttttagggaccaatgcagatggaagcgacctacttaacagtttaggaagctggttatttggaagtggttcaagctgagtagaatctgcttgttgtcttagaaccttgaaacagttctgttgtgattttgagttatgtcacc

SEQ ID NO: 44003 - DNA, 1053 bp, Homo sapiens
cttgggaagggatagtgagaggtgtgaaccaggatattaaacactgaaaaactctttgaaaaactatttggttagctatttcattggttctatggaatgagcaagcagtaagcaattgtggtttaagtagtgtttaatgttactacttgtttgttaaacattactcattgaaagatgtgatgaactgcgaaaacattgagaggaaaataagtttcaaaaactgtatacagttgaccctttaacaacatggtttgaagtgtgagggtccatttatacacagatttttttcaactaaatgggaaaaggaagtacgatattcacaggatatggaacccacctgtagagagggctgactaccacttggctaaccatgggacctgaatatacatagatttgggtatacttgggctgtcctggaacaagtaccccgagtataccgagggatgagtgtactcttcttcataagtatttaaaatttaccaaatatccttaatcctttgtctggttgtgtactctggtgtacatgtaatgtttggtggaaattgtattgtttatattctaggacatgtttctctactcacctctctcatcccacaaattgcctttccagtgattagcatgtatgtaataaaggatttattcatttgacatgtatttgttgagtgtttcctataaatctggtactgaaaagtacagagagaatggtattagctgccatttatcagtactaagtgctttacatacacagtgtcattgagtcttcatagctctttgaggtataagttttatacctagggatcagaaaaatttaatttacccaaggtcacagttaattagaggctgtcttgaagcaaatttgacttctatagatatttgtctttgaacttagtaagtagtagttaagggagagaagaatcagtggttttaacaccaagctagagtgctttagtattttggaagtgtttatcctggggtgggactcaaagcccttttctccctaccaccaattaaaccatagcaacattgcctttgtttctcttacctgttgggctt

SEQ ID NO: 44004 - DNA, 1028 bp, Homo sapiens
tcagattgtcccatatttgaacatgcagaactccttcaggctgtcttctgtgtccttttgccatgtctccattattctttgtgcatttcctagcattctggcacaaggtgtattccaaactaattttatatgtgaaatcagccgttgctccaatgtgatttctttttagtggagaatggtatttagaatgcagggtcttcactttgcttatgtttattgcatttgggatattcctgctcccagaccctctaagtggaaggaactagggatgtacaggagtgtgtgtgtgtgtgtatgtataaaaccatgggttcacacagatgtctccaattgcagttcaacaccactggattcattctagttttttccctttctacatttgttattcccttctccaatagtgagaaacctggcttccattatcttcaatgtattgtctatttggtcatcccccttcctaaccaatctttgctgcccccaacaggtgcccttcttgcccaacttgggctccacattttatgccaggccaccctcccatcctctagtgtgggtgacttcgttctgtccaggctctgacacaccagccacaccatgctgcccctctccaggaatgccctccttgctctacttgggcttagacacctcatcttagacctggcatatcttaaattttgacagatactctcaaattgcctttgagaagggttatgccaatttatgttttcatctacagttcaccttttccctcataagcttgctacactagatagtaaacatgttagtcattactgacctcatgaatgaaaaataaaattgtatcattttgatttggattgatttttttaagtaagattaaccattatgtttttctctgagctgttaccatcttaatcctcaatttcattatctgtaatatatggctaataatatttattagagtcatgaaagaattacattattgtaatggttggcctgggctaccataacaaaatagcatagactgggtggcttaaacatcagagatttat

SEQ ID NO: 44005 - DNA, 1048 bp, Homo sapiens
acagcaggatttgtatttagcggtttatttagatccctaagaaaaaaggcttatgtgacatagattcataagacacaaatgtgtccttggctgaccatactaggcttcactcccaaaggagaaaaagaatggtcggcgcatctcagattaacaccaaccaactgtgcaatatttcattttagaaagcgtttccttgtattatccatgattaaataaaaagagacctagtgtatttgattgcttctgtggcaaggcttgagaattacaaacctaggtttccctctgggaatgatcattggatttttaaaattaagtaagtggaaggagattaagatttatttccatcatttcaaatcatgatctgcacctttggaaacaaaaaggaagttggaaagtgggaaggtgaggtaggtgtgcaagaatggggagaaagatgctgcaagccaaataagactgtataatttctgagaaaattaaatgaacaatagagtttgaaggataagtgggtaatgaggaatatgagataataagatattaaaaaatagcaaattacttgggaaagtgaggatgaatgatggtagatagttaagggatttgggatggcaaggaagggaagagatgactagggtgggaaacaaaacatgattaatggctgtaaaagggcaagtttggactctcgatggcatatcttcccaaactttggagaatgtgcagaacttagtaataaagaaggaaaagattaaaagagttcatggttaacatgaaattgtgaggacaacagaggaagcaataaatgtcattagtcctcaggaatgaaagcatttctagagaaacgtactagtctatgttcttcatttatgagcagaatagttttcatctactttttaataaaaggttaatgtataaaatgaatgctattaaaggaaagaaaagctaagcattatcaggaaagttgaagaaaagattgcacctagaacaactgaagtaaaccagcaaacctattttacagccttttctataaaattttgaaattcatcatcttaatgaa

SEQ ID NO: 44006 - DNA, 1030 bp, Homo sapiens
tgtcccttttacctactctgaactcttctttttctttttcttttctttcagacagagtcttgctctattgcccaggctgcaactggtgtgatctcggctcactacaacctctgcctcctgggttcaagcgattctcctgcctcaagctcccaagtagctgggattacaagcatgcaccaccatgcctggctaatttttgtatttttagtggagacggggtttcgccacattggccagggtggtcttgaactcctgacctcaagtgatccacctgccttggcctcccaaagtgctgggattataagcatgagccactgcacccagccttatactgaactttcaatgggttcaattccactaggagcataaaggccactgcatatgagttgtggaaagaagagattagaagaaggaagaacttgagatgagttcctcccttcaacattctgtctcctcctacctagcatcttctttcttttagtctttctagaatgtccatctgtttttggccattgcggagagagaagctgagctttaaaggagtaggagcttcaaaggcgtaggagcttcaaaattcttgtttcttcatgtttgatcacccttctaaacctgtcttctgttccttctgctattcttttttcttagagcataggaaaggggagcttttaaattaatacttaaagcatggaaaaaaagaacttgagaagaaagtaaaacaagggagatgaggctagtaaagtaaggaaaatgaagaggaagaggaggaagggttagcttctaaattccaagtcaaattgatatggaacaggcaagccgcttgtcttacttaaacttcagaaaaggatctgctgaaacttgatagaaatggaaagggaaatccttggggtggggaacctccaaacattagtaatgatattgaacaactcaaagtattgaggaaatctgcaggctacatgcctgaagattacccatgcagatagaccaaaaggattagaattatctgttgatattagtaatatttattgacatc

SEQ ID NO: 44007 - DNA, 1029 bp, Homo sapiens
tccagcccaggcaacagggcgagacactgtctcaaaaaaaaaaaaaaaaaaaaaaaaaaaaagacaacaattcacacatttcattgctcaactttttatccagctgtggtaattagcatatttggtctttgtcaaaaaataatcactcatttttcttttgggggagaaaaagacttactgaacatctattaaaacatactactgtcccattaattttacaaagataagtagaacattgtttttgttctcaatgaacttaccatcaactagtggcaaaaaggtgtacataagtaactataatacaatgtagataacattaagtaccaaaagagactgtaatcccagcactttgggaggccaaggcaggaggatcacgaggtcaggagatagagaccatcctggctaacacagtgaaaccccatctctacttaaaaatacaaaaaaattgccaggtgtgatggcaggcgctagtcagtagagcatgagactcttaatctcagggtcgtgggttcgagccccacatcgggcgccagatatcgggggaaattcacccccgatatttcatgtaggttcttttctattttccctaagtgttggccagtctgagaaataaagggaaagagtacaaaagagagaaattttaaagctgggtgtccggggaagacatcacatgttggcaggttccgtgatgccccctgagctgtaaaaccagcaagtttttattagtgattttcaaaaggggagggagtgtacgaatagggtgtgggtcacagagatcacatgcttcacaaggtaataagatatcacaagataaatggaggcagggcgagatcacaggaccacagaactggggtgaaattaaaattgctaatgaagtttccggcacgcattgtcattgataacatcttatcaggagacagtgtttgagagcagacaaccggtctgaccaaaatttattaggtgggaatttcctcgtcctaataagcctgggagtgctatgggagaccggggcttatttcatccctcagc

SEQ ID NO: 44008 - DNA, 1016 bp, Homo sapiens
tctgataggatgtccctatcagagagattcagagtctctgtaaacaattatctcttttgtaagaattacgtaagaattaagtagcatgaaggattataaagtagcatctagaatcgagagagagaggagacttactactaatcatcactgattttcatttatcagatttttgggcacctgctgggtgccagatcttgttaggcacaaatgactaaaacagagccaccaagtattaaaaatatgcatatgagtgttctttaaaaggcactgcagctatccatattatgaatactttagcattttctaagtgatgggtgattcaaagggtctcatacaagttacagtcacgtcttaacattttctgtttcgtgaaatgagactaaacacaagtatttcctgccattttaagccattttgctcttatatgcttattcttacaggttgatgatgcaatgatggcaaatgcagcccagaaatttcccttcaatactcctaaaaccaaagaaggatattactaccgtcaagtctttgaacgccattacccaggccgggctgactggctgagccattactggatgcccaagtggatcaatgccactgacccttctgcccgcacgctgacccactacaagtcagctgtcaaagcttaggtggtctttatgctgtaatgtgaaagcaaatatttcttcgtgttggatggggactgtgggtagataggggaacaatgagagtcaactcaggctaacttgggtgtgaaaaaaataaaagtcctaaatctaaaccattgctgtagtcatttatgttcatgcagtctcttcataagaggtaactagaactgttttgctgtatcacagtaaagtggagggtaagctaggaaaagggaaaatgatcagatgtctgcaagaactcacagccctctcctggcagagctgctttagatgacatttgcatcttgtgcccgtgtggcttccttccagtccttgcctcatcttagggacgtcatcaaaggactacac

SEQ ID NO: 44009 - DNA, 1079 bp, Homo sapiens
tactccaacttgagttacactatagctatgttattggtgttaagagtgagtcagtgaatgttctttagaattctgtgtagtgatttttaaccaattcaaatactactattatcacagtttatatatttttctcttgttgaagttgatttcagtttataaaacttggcggattttaaatagtaaaactatgatcttggtgtttatcaggaatatacatcttctgtccctgtcttatgcaaggcacataactaggacacttccacttcctcttttgcatgtagggggcttggactccagcttggttgctgccactctgttgaagcagctgaaagaagcccaagtacagtatcctctccagacatttgcaattggcatggaagacagccccgatttactggctgctagaaaggtaaggtgctgtctctgtcccttgtgtagtgtagttagagtagacttgttattagaatgaaaatggagtcaataatgggtgattctactgctgctgtattgactgggtcaattgttttaaattgattgtattaaaatagaatgaaatggctgttggatatgcactgtgttgtacactgtcctctgtgtacttttatctgttatgacccatgcaattctcacaaagaccctatgatgataagtatgctcttttgaaagtaaaggtgtctgggcatggtggcctacacctgtaatcccagcactttacgaggctgagggaggtagattacctgaggtcaggagtttgaaaccagcctgagcaacataatgaaactccatctctacaaaaaaatacaaaaactagccaggcttggtgacgcatgcctgtagtcttagccttatgggagcctgggtgacagagtgagaccttgtctcaaaaaaaaaagaaagtaaaggcataagtcaggtgcagtggcacacacctatagtcccagatacttgggaggctgtggggggaggtctgagctcaggagttcaagtccaggctgggcaacgtagcaagaccccatcttgaaaaattaaaaaaacgggttttttgttcgtttttttttttttttttttttaaacgtaaa

SEQ ID NO: 44010 - DNA, 1053 bp, Homo sapiens
ttttggtaaaaataaagtttaccactacaataaaatacagccagaggtgtactgggagtagaaggagactgaatgaaagaaaggaggaatggggtaaaggctggggcaaagagcaggccctctccctgcaggggagtatcagggcctgcagccaagtcaaatgacagcatgacgtcaggaggcaagatttgagggcttttatttaaggtgcagcattggagtttggttttaggagagtaggaagtaatacatccgttacccaaaggacccttctcctttttaaataagttacctgcaaagtttaggccaaagaggtgggtaaggtagatttgggaagctgttgcttactaatatcaccgaatgctttatggtcactaacccttcaggcagttcagcccagaagagtcagcagaagactgtttacaggcccccacctgctagttacagatcatccctgatagagcagagaggggtgaccaggtagtgactttgtagtcactggaggcaaagcccatttttggacagttcagtgaggacttatagacaaaagattcacaaattatggagtgagttggatggagtgtgaagcatatttatgggtcatgcacatacataataggtttactttttgaaatttgaaagcatgttttaagcttatctaggatttccacctgatttaaacctcttctttctctaatgtcagccaaaaacccgagtacaaagaagaaagaggaatacatcaaggacttttcatcctcatagtttgccattaatggctcatagtttgccgttgatggtggagagtgtcagaattggggagtagcctaatcaaaccttcttactctgcatgcagtggcagacagtccctttgctgttcttttggggaatgcagactaataaagcgccaccgtcattttatctatcagtaaggagtagctttaatgctgctgcagtggtggaagcactgggcattgtcatccacccctggggaccagcagctttgttttggatcatgtatctgttattgtgatggagccatttatttttcaggga

SEQ ID NO: 44011 - DNA, 2174 bp, Homo sapiens
tttcaccttcaactgcccccctcctcacctggaccgctcaccctcctcctcccctctcaccccgccatccccaccagtccccacctgtctctgtagactgcaagactcatcaagtgacttgctgagcaaaccctgccgagaagaggtctgtttagggacacaggcgaccaagtacagaaaaaggcaaaagaactagcatgcctttttcaatggctgtcattttgcagggctggcttcagatgattgttatagctttaaataaaaaggacagttttcatctcggcccgtggcctacattatttctttactgtccattgccctgggcgcttgactaataatttaacagcagtttttttttttaaattttaaatcatgattcatagcattgctgtaagagtaattagaggtaaagtagggcttgaacctgtctgtagttggttacttactgagatcttaatataaaagtaaagggagagggtgaagttgtaagtagcactaagtggaatagaaattaaatgcactgaaactgccatgtccagttcggtaggcgctagccacctgtaactgttgagcacttgaagtgctggctagtcctaactgagatgtattgtgttaaatacactggattttgtcgttggagtaggaagaacagtgtaaaatatctgctcgataatattttatattgattacatatatgttaaaatgttactatttgggacatactgagttaagtttatttaaaattaatttcacctttttcttttaatggggctactagtatatttaaaattacatatgtggcttacatatatatttattggacagcactgttctagaagtttaggaagaaataagaaaaatattgagaacaggtagcggcagtaggaactttgccctcctataagactgattccaataaaaataataggttatagttttaattggctttttcctactagaaaaaataagtgtactttacatgcctctttgttctccctttttcccctccagtttagtggttagaatgtatttattatagcaggattaatacagggattcactaagcagcgttaagaagacttaggtaactgattccctgatgaccatacttgattttcaaagcactttcctaacccgttttaaattgatatagagtcaaaggcagatggcttattagtagtcatctcatttaaatcttatggaatttttccagtaaatctcaaataatttgttataggctatttgggctatttggtcaagtgcatggaagagacagcataggacatgtggtacttcatttccaaattgcttgagatgattttcattctaaccatatattatttggttctggttttccggaaaagccagctaaacctttggttcttttagatataaatgaaatatcatcaaagaatagctcaaagtgacttatgcaacttgaatgtatattttttccttagggtgtttatcccaaactatttgggcatttgctgcaattcgcagtttttttaaaaaaaacaccaaaatagttatttttcaagttagagatgttttaattaaaacatcttgtttttggtgtatccattgacattctcaaaacggaatgtatctggacctctgtgtacaatcttcgtagcactcagacactgaacagaaaggcagtcatcactgccaaacagggcccaaatgccacacatggtgcaatgtgtcattttgagctggcagcagccaaataaaacagccctttatttcacagttgagaatttgaaattggaaagtaattaacgtatgtaagggtgatttatttgcttccgggcttatagggatgagctaagttttttattagggatgttgttggtgtatatgtctcacctactttgcttccttactgaacaatgcaactttgagacagaaatatttgagaacatttttgtcagtgaggacattttgatagtgaatattttgtatcttctattaacttgaaatgttttatttgttataaagccaggatatctgatatcaaattaaattgttttttttttccctttagattttcttcaatcacatctgaataaatcacttgaaggtaacctagatgtaatatagtgaaatgcttgaaagagctgcgtatcttttacacttacagcagtatgattttctgttgtacccattat

SEQ ID NO: 44012 - DNA, 1022 bp, Homo sapiens
attatgattattttttccattttattgatgaggaaaccaacacatagaaaggtaaaggaacttgccaaaggtgacggtcacacagccaaagagctgtagaagcagcacaggaataccagcaaactcacagccaagctctgcttttcaccttcacatcatacagtcctcagactaaaaccctaactctgaccttccaaatcaaaaatcatactcaaggccgggtgcggcggctcatgcctatcatctcagcactttgggaggccgaggcaggtggatcacctgaggtcaggagttccagaccaaccaggccaacatggtgaaaccccatctctactaaaaatacaaaacttagccaggcgtggtggtgggtgtctgtaatcccagcattttgggaggctgatgcatgaaaatcacttgaacccaggaggcagaagttgcagcgatccatgatcatgccactgcactccagcctgggcaagagagtaagactctgtctcaaaaaaaaaaaaattgcctaataatagcttggaagtgcacatgtcttctgtgaaggttgatggactacaattagcttcaaaacacaaataagtaactgtgtttaaatgaggccttctgtgtaatatctagggaaaatcaatgtggctattcaaatttgtttccccttccaagcacagagaagttgctcatgactctgtgatccgttttgtccaatgaaccatgagcagcagcagcaacttgagtcacctccaggtggaagtgttaagaggctctatgatccaccacattccgtttcccctgaagggtgatcaaggacacatgcagagatggggcttttgtcagcctggatccctgagtgaacacaatgaacagaccaccacacaatgccctaacacagcccagacatgcaacgtgaccaagaataagcctcactgtggccaggcatggtggctcatgcctgtcatcccagaactttgggaggccaaggcgggtggatcatttgaggtcaggagttcaagaccagc

SEQ ID NO: 44013 - DNA, 1053 bp, Homo sapiens
cttggttgttgctaccttttggttattatatatattacatgattccatttatgtgaaaggcccagaataggcaaatctatagaggcagaaagcaggtaagtggttgccaggagctgggggaaaggggaggggatggagagtgcttgatggatacagggttattttttgggggggcggggggtgttaatgaaaatgttttggaactagacagagatgatgattgcttaacattgtgaatgtatttaatgatactgaagtgtatggtttcatacagggacttgtatgttatgtgaattttgcctcattaaaaaaatactgctaggagcaatggctcatgcctgtaatcccagcactgtgtgaggccaaggtgggcagatcacctgaggctgggagttcgagacctgcctgggcagcatggtgaaaccctatctctattaaaaatacaaaaagttagccaggcgtggcggtgcacacctgtaaccccagctacttgggaggctgaggtaggaaaatgggttgaacccgggagacagaggtagcagtgagctgagatcgcaccactgcacttcagcctgggtgacagaacaagattccatctcaaaacaaaacaaaacaaaacaaaaacacacacacacacacacaaaaaccaaaaatactgatgcccatgtttcatccccaagggattctgtaataattgatctgggctgcagagcccgggcactggggttttaaaatctccccaggtgattctgatgtgcagctgtgtttgagaatctccttctggaatgaacttgttcatgttttacttctgttgttttctagcctgccaatgtctttctgtttcccttcacatctttggggggtaatttttacaatgcagtcttaacaaccagctgcctcaaaatgcactgggatccctcgtaaccaggtagctccccatctccaattctgacctgccaagtcagaatcttgtgcgtggggcccaggactgtacatattgaaacaggcagtgacctgggaactatttctgaacacccctaggtttcccctgtg

SEQ ID NO: 44014 - DNA, 1059 bp, Homo sapiens
agcacaattgaatgcacactttccaagtttttggtcatacagattaatattccagtggccaaagctagacacaattcaaaactcaacattagggactggagaaatatactccgattcttcagtgggaggaactgcagagacaaatgacagagtcttggatacagggaggacatgcatccattaatgtaccttaatcaatcgcaaccctctaaccaccaatacaattaagtaagtattggttgaatgcacttgtgcctgaatgcttctggctgcagcccaggcaatgggggcctgactggggagggaccatagcagggactcgatgtcctgcaggtctgcatgtaattgtgcacggccgactccacattggtcatggatgacttgctttatcctgcgtccccaaggggcaacgattggctgattatatttctgaacaattttgacaaagttgttttcaggagcccaggaagcaaatcagttgtagatttgaattttgcagggggtcagaattgttgaatatatatatagacttttacatgctgataattatttccacatcacaaagatggccggctattaggaggctgctgttcaattcctttgccctgtgaactcatgagctgtgtctatgtggggggcactcagttgttagagctgttttccttcataataacatcagccaacgttctaaataaattcaggaaattaaatagtcttccccagacaggtactttgcccttctaaagtgaattacacattctaaaataaaacacagtcacattaaaaaaccaaaaggtctttgtgtcaggttggtctggcttcagcaaagataatattagcctccagagtagaagatccgtggaatccacagtattgcatttggcagccccacgtcttgttttcttttcttttttttttgtttttaactaaaggagttggcaattttattttcacatttccctatacaaatgaaaactgcatcttttttggccccacttctcccctccaaaactattctctttgatagggcaagggggcaagtcttccttatgctgttaa

SEQ ID NO: 44015 - DNA, 1070 bp, Homo sapiens
atggcctgcaaagctgaactatttaccatctggctctcaagaaaagggaaaaaaatgcttatctttgtaccccgacagtcttagattaagagtactttgtaccaccctgacgtcccaggcagccatgagtccagccacccctgaaatgtacacaagtctgggctagggttgcagcaggtgagtcccaattttgcagatctttggcatcaggggcacaacccaggattttgagtggggtttcctcaccactgtggctgggcactgggctagtgtgctttctgatttttgtatggggaagagaaaggagggaggaaatggcaacttgttgccctgttctaacattttcctaagatgggtctccaggcaagggcttgggatctcaccttacacagcttacaaaacccagtgaggccggctgtcttggcgctgccactctgagggatggagcccccaaattactaggaagggagaaaaaagaatggtttctgcaagcacaagaagtggcgttattgaaattaacatttcccccaagttttataatgtctaggcatgcatatttaagtgtctgtctcaaaagctcttgctaataaccagatggtgcatttaatttcctttttttgttctctgagcaacatgcagcttcctacacagccctccttgcaggcaactgcactgaggtgacagtcctcctgactgccagcacagatccccagggcctctgagagccctgtattctgggggcagcctttcccccttctatttggccccagctggaagggggcaggttacccacagtgcagcacagggctcctgccttagcttagcttagctcctgcctaagcacagggctcctgccttctctagggagtctggctccctctgaccctctagacctcaccagctgaggatcagagccccggggcaggagccagggccggggggcattggggggtggtttgagagtacagctctggaggggggcaggacgggcccaggaaaagctgctcaggggagactgccaagagatggcagagttaggacaagagggccaggcatggtggctcacacct

SEQ ID NO: 44016 - DNA, 1050 bp, Homo sapiens
gaaggtacagggagggaaatctcaaaaaccaacaacctgtgtattcccagactattaatcatagaaaatcacttcaactggattacggtcttgtacctggcagaaaggctgttatgaacattggaattggatttttacacttgatatgacacttccttgagtcagatcagattcgtgtttgatagactcttgccaaaaaattgctccagggtctgtgcagtagctaaagcctttttgttgttgttgttgttttaaaagtagcattaaatgttttcatgaagaccttcccagtcgtgattttattgggaatatggtctttagctctggtcctgaataactcacactgaggaaacctctaacaagtgttgtattggaagatgtctgatggatggttggttttaataacaaatctcttccctttttctgtcccctgtgttctattctcttttctctacacattattctgggaggattcacctattcccaaagtcctttcctctttatttccatttcagagctctctgtataactccaggctgacgaatccaacggcccagtttttatctccacttggctgtctttcttgcattgacctcatcttaccttgcctctcctgatttcctcttctgcctgggctcatcacatcagattcacaccaccatccacccagcttccaaaacacctgggcctcctccttcattcctccctctgtctcagtcaagttagtctactgtctcctctccatcctcactgccacagccttggtctagccaaccatcttgtctcacttggcgtattgcagcctcctacctggtctactcacctcccactctcctccagtcagactgctctttttatagcacaaagtggatcattactcccctgcataaaaacatctactgtctccctttgtctacaggataaacacgacaaataacctttaagatttggctccaacttacctctatattagtcaatttttataattatataaacatctctcagctcctcaccctctcacgtctcgatttgtgcacatgctcttccctc

SEQ ID NO: 44017 - DNA, 1061 bp, Homo sapiens
atcattgctaaaaatagtgttcagattattaatattactgttaattattaggagctaatatgacagttttctaatgaataagatcaatatcactctttaagaccaggcgtcattaatcattaatattcatcatttattgttatcgtgagtataactctttaatacgaattatcattattatcggtattgattttaagaattatatgatcagttattaatattgataattatcagtatcaattaataattgagattattaattgcggtaagtaacattgcgccattccacccctccctcggcaacccgtttacgacccaaaacagggatccaaacgcccctgagagagcagcggtatactgggagagaggaggatggtcacgtggtggagagacgtgtttttgtgtaccagcccttcacctttgccgaccttctcaactgggaaaacaataccccgtcctagagcgaaaagccgcaagcactaattgatttgctccaaactgttatccagacccacaaccccacctgggctgatcgccaccggttgctcatgttactctttaagagagatgaaaggcaaaaggcggagagggctccacgtagcaactaagtggctagaggaacatacaccagctgattatcaaaaaccccaagagtatggaaggacccagttaccaggaacccacccccagttggacccacacgaaagagaggatatgcaaaggctaaactgagacagggaagctctcttggaaggattcaagaggggagctcagaaggccacaaacgttaacaaggtctctgaggtcattcagggaaaagaagaaagtccagcacaattctaccagagactgtgtgaggcctatggtatgtatactccccttgatcctgataaccctgaaaatcagcgcatgattcacatggctttagtccgtcaaagcgcggaagacgttagaagaaaactgcagaagcaggctgggcttgcagggatgaatacatcacattgatgagaaatagctaagcaggtgtttgtaaacagggatgcagtaagccgcgagggaaa

SEQ ID NO: 44018 - DNA, 1035 bp, Homo sapiens
agccaggagttccagaccagcctgggcaacaaagcaagacccccgactctaccaaaaaaaaaaaaaaaaaaaaaaaaaaaatcgaaaaatgagccaggtgtggtggcacgcacctgtatttccagctactcaggaggctgaggccagaggatcgcttgtgattgaggctgcaggtgagctgtaattgggccactgcactacagcctgggtgacagagaccccatctccagaaaaagaaaaaaaaaaaaaactcgtcagttcaaatgcttgggaactggctggatttaattttcagggagctatgtgtctgcagatgtgcaaacctttatttcttacaagcattggtgtattacagattagctctaggaaagaaatatggagacttgagttttcataaaaattacctggtgctacttcagatgtgacttattgactatcgaaattgccttctgactgttgggcagtatttgcacaatgatgagataattcctgttattattttaaatagagacgaggtctcacggtgttgcccaggctggtcttgaactcctgagctcaggtgatcctctcacctcggcctctcaaagtgctaggattacaattcctgtttttctaaaaccggtttttctttggttttgtcattagcatgtgcgacacaagaggtcgacactgaacttagcgttttcaatagctaagatgaaatgtttctattcatgatgtgcttctgtttcctcatgtttcaggaggaaaataagattttattttatcatccaaatgaggtagaaaagaagaagaggccgggctcggtggctcaagcctgtaatcccagcactttgggaggctgaggcgggcggatcacgaggtcaggagatcgagaccatcctggctaacacaatgaaaccccgtcaatactaaaaatacaaaaaaattagccgggcgtggtggcgggcgcctgtagtcccagctactcgggaggctgaggcaggagaatggcgtgaacccgggaggcggagcttgcagtgagcggagatcgca

SEQ ID NO: 44019 - DNA, 1006 bp, Homo sapiens
ccaggacgacatccacctttaaggccccagcgtccaagcccgagaccgcggctcctgtgagtaaagccgcagcagggcgtcctgggtcctggactcgccatccccgactgggaggcgcaggtcctgtggtgaccgccttgctctgctctgtccccagggggagagtggtgtccccggggaggagggaggaggggacttgctgcctttgatcctctagattcccttctttgtcatgcagcctttcacctccttgacttcagcccttctttcatgtggactctatcttgtcagtgagagtttacacacagtcgcctctagtttgctagattttattaggtttcttatctttcctgcctggctgcagtcttctagccattgaatcaccattttctttcattttcttattttctgaagagaggcttacattaaaagtggtaacttcatctttcttcagaaagtctttactcccaggcactgtggatgttatctttaaccctaaaccttctaggcacggcgtttagggttaacgataaccctgaaagataaccctaacgtgcctctgggggcccagcatggaggtcctgggctcccggaaccagttcatccattcccgccaccgcacagaggccctggtgtgggctctccagctagaggagaacaaggccggactctgcctgcctcttcagaacttctgttctagtgataggaagcagacaataaaaaataaacaaaaacactgacactagaagccatgcagagaataacacaaggtgaggtgatggcgtggtggggagcagcgcggctggacatcactcccgggctgggttggctgaggttagtgcgccctggtgtgagacctgtgggtgaaggggaggaggctgggtggtggtgtctgcacccctcgctccaggagctgtcttgctttggggcgaaggagccaggcccctataccttgtgtccggggccttagttcagctgtgagtggtgcccaggtgtggagtgtctt

SEQ ID NO: 44020 - DNA, 1322 bp, Homo sapiens
gtctgccctgagctctcaccaggttgttcagggaggttgccgtccacatgtctactgctgatagggtcttttctccctctttgccggtaggaggggttggttcccgtcgtcgtacacgaagttgctggaagaaaatgagacagaagcagtgaccgtgcccacgccaaggtagccctgaacgtggctgagctctcccggtgacagaaacccctgccttgtcgtttctgtaacacaccaccatctagctgtgtcgcaggccctgccctaagcctcagctctcgtggactagtcagagatgagaccgcggctcacagtgctgtctgccgtgatttctgttgtccccgagctttgctgctgtgaggagacccagcccaggccacctactcctcgcagtcctgcagccctctgaaactccctccctgtgccctgcccctcctggtcgctaaacccaagccatgtgttttccgtccttatcttacacttatcttaccgttcttatcttacagcccttaacgctgttgtatgctttttctggaatgttctctggccccggctgcttgacctgtgctctgtttgtcttctgcctcaccagctctttgcacccctcttctgcccatcaattaaacatcagtgttcttgggagtcaccctgggtccatccttcctgcctgtgctgggccatctcatccactcccatggcttgaaatacactgatgggctttgctgagcacctccatgccgaaaacccccaaatccgtattccagatcagatactaacagtagttattgcctagagactgtccaaaggactttgcattgattttttcacttaattctcacagcagacccatgaggtgggcccccactttaaaaaatgaggaaactggccgggcacggtggcttgtgcctgtaatcccagcactttgggagatggaggcaggaggattacttgaggccacaagttcaggaccagcctgcgcaacatagcaagatccccatctctacaaaaaaaataaacaattagccagggcatagtggcatatgcccattgtcccatctactctggaggctgaggcgggaggatcgaagttcacagaacccccataacccatccagctagccaggtagaaggcctccaggtccgacgttgcattccccagggtctgatgctgtctgcaatcttcatccctagcagaagagctaaaatgccattgtgctggggaacaaaaactgagtaacacttttaggatgttaaaatttcaagtgtttacattttttttttttttaactcttagctcattgctcactccagcttttgctagt

SEQ ID NO: 44021 - DNA, 1028 bp, Homo sapiens
aaactacattatagatttgtcttgctgatactcagaatccaatctgacagtctttggtctaaaaattagagcagaagccaggaacggtggctcagcctgggtgcagtggctcacacctgtaatcctagcactttgggaggccgaggtgggtggacctgaggccaggagtttgagaccagctaggccaacatggcaaaaccccatctctactaaaaatacaaaagttagctgggcatggtggcgtacacctgtaatcccagctacttgggaggctgaggcatgagaatcatttgaacctgggaggcggaggttgcagtgagccatgattacaccactgcactccagcctggatgacagagcaagactctgtctttataaaaaaaaaaaaaaaaaaaaaaaaatcagaaaaaaatttctgaaacatttttgaaatgttactaattcacaacaatattacaaatatattcctaagatctggataaaagaattcataccacagtagggaaagagctgagctgagccacagcagttataattgaccaaaatcacttatcttttagttacaggttagactcactttaaagagattaaaattcttccacaaaaatagcaaagaaacaagaggagattttatttactgaacactgtacctgctatatgccaggcacagttctaagcacattataaatgtaatattaactcctataatcatcatgacagcactgtgaggcccatgcttgttatttccgttttatagatgaggagactgaggtacaaaggcagtaacttgctgaggtcgcgtatctggtcagtggctggttcattggaccccaggctacctaccaggtatatgacctagtctgccaacttaattttctatatgtccaaaagatgtgcttttttaaaaaataaaaaattttttttagagatgggggtctttctgtgttgcccaggctggtctcgaactcctgggctgaagcagtcctcccacctcagcctcccagagtgctaagattacagacatgagc

SEQ ID NO: 44022 - DNA, 1043 bp, Homo sapiens
ccagatgtaccttaactgcaggggtgagcaaactacagccagggatgaccagggcctgcttgtaaagaaagttgtttgtttgttttttggaacggagtcttgctctgtcgtcaggctggagtgccagtggcgcgatctcagctcactgcaacctccacctaccgggttcaagtgattctcttgcctcagcctccctatagctgggactacaggtacccaccacacccagctgatttttttgtatttttagtagagatggggtttcaccatattggccaggatggtctcgatctcttgacctcatgatccgtccgcctcggcctcccaaagtgctgggattacaggcgtgagcctttgtgccggccaggaaagttttattggaacacagctgtgcccatttgttcctgtctggggttacattcaggatacagtagcagggctgagtggctgcagcagagacgtttggcccacaaggcctaaagtttttgcaatttggcccttacccagacagtagaagatctcttgtgtcatacagttgcttgcttcaattgggataatcttgtgagggatttggtatccttttctccaaagaaaaagcacttctttactaccagctagctaagtgtctggatttaaggtgcattaacgacataatcctaacaaccacagtagcatgggatactcaagtcctaacctcttcgtcttgttgggcagagcaaacaaaccgtcaacccaaatccagagatcagtagtcagggtttggccagtaacatattttaatccaactgtttatttttatttatttatttattttgagacagagtctggctctgttgcccaggctggagtgcagtggcgtgatcttggctcactgcaagctccacctcctgggctcaagcaattctcccacgtcagcctcccaagtagctgggactactggcgcctgccaccacacccagctagtgtgtgtgtgtgtctgtgtgtgtgtgtgtgtgtgtgtgtgtgtgtgtgtgtgtattttttttttccagtagagacagggt

SEQ ID NO: 44023 - DNA, 1440 bp, Homo sapiens
taaaaatcctaccaggagtggtgtaaatagggcttaccaccttctcatggcttaggatagggcgagcatcttttctatgctttagcaaattgccatactccttgccaaatttggatcagcttccaacatttcatccttgcaattacaatgttgtgaagtatcttcaagagttcctttaaggtgaagttttgttttgttttgttgttgttgttgttgttgttgttgttttgctggcatcgctttccctgaaacatcttcatccttttcatcacagccacttggctcaattatgttggtaagttttggcctcactcagttcctgtggccgttcatccagtgccacaaaggccaacagtgtcagcatttccagtcagctgtttcttctctaattccatctacgtttgactcagtgttgctacttttcccatttcatttctgtgtcttcagttttgttagcagtttctcttgtagttactcatttttgtaacatcgcctgggttatcactgggagacaaggaggcaacgcagctacacactcggctgtctgtggggatgctctgctgtccttgcaccaatagcagactgtcttaattactgcaactgtctaatcttggtatctagtcgcataagtcctctagctttgtgtttatttgagagtaccttggatattctaggacctctgcatttgtttatatcttagaatcagcttgtcaatttccactttaaaaaattcacttggaattttgattggaatacattgaatttacgggtggatttaggtggagttgacatcttagcaatattggattttctaatccatgaaaatggtagatgctttcatttatttgagatttctttcgtttctgtagcactactttgtattttttattgtggaagtctcctccttttttatagactcattctttatgtgttttgtcctattgtaaatggtatttttaaatttttatttcctaactgctggttccattgaattgtttagtgcctgtctttcgttactggaagtcctatttagttcttttctgaaatctgcaaattaattttttgttgtatttatttttatagcagcttgagatacagtttacccatttaaagtatacagttcactggtttttagtatattcacaaagttgtgtgattatcaccacaattaactttaggatattttcatcaccgcaaaaagaaaccctcacccattagcagttgcttcccatttaactccaaccgtatccaaccattcatttgctgtacatctttaacacttgttattgtctcttttttttttttagtatagccatcctataaatgattttacacatcctgtagtgtgaagtgggctctcattttggctttcgttcacatctccctagtgactaacgacattgagcatcttttcatgttcttactagccatttgcatatc

SEQ ID NO: 44024 - DNA, 1239 bp, Homo sapiens
acactgataggcctcagccaagtctaatacagcatggggacaagtttaaggtagataaacagaaaactaagcaaaggtggcggggcggaaagaaacaattgtccatcccaggaaaaacagccaggctttactgagaaagggaaccatcagccttagtgcaaagtcataatgaacactgactatagtttcatcagcaaattgccatctaattgcatagaaagtccattggaaaggaagagtgagaggtatagagacctgaggcctcatctgctgtcgtaggaagctgcagttactccccaaaatcaagaaatcaagaatatttaaaaaaaaaaagaatattcaaaactgcagcaataaatacaaaaataggagcatagttgaaagtgctctcgggcataagaccagggctatggaaaggtcgaggcatgggttgtttttcattgttatcacagtttgattaaaaacaagagtcgtcctattctctctctcctcctgattcatttattctgaagggtatgtgtgtaaagcacctgcctctttgaatgttgggtagttgttcattcttttttgcatctggtcgtctatataaatggagcatgcatttggggaaggggtcggtgagacttgaatggtctctttggggtgattaatatcatgaagcttattgttcctagatggaacaaacacataacaatcgccacgtgttgtgagtcgtgaagtctgagtaccgtaggaatgacttattgtctgtacttcaaagttagggtattttaaaatttagacccacgtcctaaatagttatttgtcttatacttgtcctagcatttgtctttatgactttctgctgatacaggaataacacgtgttgaaatgaaacctggacactggctgcaccatgaaatccatgagagggaaactgtgccttctaatccttagctgtgtgcacagggtctggcccatggtagttactccacacaactttggtgaataaaccaatcagtgggaaaatgccagggaggcagggcgcagtggctcgtgcctgtaatcccagcattttgggaggccaaggtacgcggataacctgaggtcaggagttcgagaccagcctggccaacatggtgaaaccccgcctctactaaaaatataaaaattagctgggtgtggtggtgggctcctgtaatcccagctactcgggaggcaggggcaggagaattgcttgaacctagtaggcggaggttg

SEQ ID NO: 44025 - DNA, 1034 bp, Homo sapiens
tcagggggctgaggcaggagaatggcgtgaacccaggaggcggagcttgcagtgagccgagatcgcgccactgcactccctgggcgacagtgcgagactctgtctcaaaaaaaaagccaaaatttctgggagggaacatttctgtagctgaacctacgtacagtaataaagaagtatatatgttgaacttttcaagcttaaaaactcagtattgactacaaactgtagttgcaaatctttttttttttttttttttgagacggagccttactctgttgccaggctggagtgcagtggcgcaatctcagctcactgcaaccccgcgtcccgggttcaaggaattctcttgtctcagcctcctgaatagctaggactacaagcacccgccaccatgcctggctaatttttgtgtttttagtagagatggggtttcgccacattagccaggatggtctcgatctcttgaccttgtgagccactgcgcccagcctagtctcaagtcttagttgaacttttttttttccccctctggtagaatcatttggatagggatttgtgtatggtgttaactgtggaagttctcattcatttgttgttcttcgtattttaagatgttagggttatatgtgaacattttaagaattatatcaggaaattggttgggtatgatggctcatgcctgtaatcccagcactttgggaggctgaggcggatgaatcacttgcggtcaggagttcaaaaccagcctgggcaacacggtgaaacaccatctctactaaaaaaacaaaaattagctgggtgtggtagcaggcatctgtaatcccagttacttgggaggcggaggcacaagagttgcgtgaacccaggaggtggaggttgcagtgagccgagatggcaccattgcactccagcctgggcgacagagcaaagctctagctcaaaaaaaaaaaaaaaaaaaaaaaaaattaggaaatcaaatgagactttcctcctattgtatttggagaaggaatatccgcaggaaagaacagatc

SEQ ID NO: 44026 - DNA, 1063 bp, Homo sapiens
atcatgacccgagaggtgcagacaaatgacttgaaagaagtggtcaataaattgattccagacagcattggaaaagacatagaaaaggcttgccagtctatttatcctctccatgatgtcttcgttagaaaagtaaaaatgctgaagaagcccaagtttgaattgggaaagctcatggagcttcatggtgaaggcagtagttctggaaaagccactggggacgagacaggtgctaaagttgaacgagctgatggatatgaaccaccagtccaagaatctgtttaaagttcagacttcaaatagtggcaaataaagagtgctatttgtgaaaaaaaaaacaacaaaaaaaagaaatgttgattcctggctgggtgtgggggctcctgcctataatcccagcactttgggaggctgaagcaggcagcttgcttgaggtcaggagttcgagaccagcctggacaacatagtgaaaccccatgtctacgaaaaaaacaaaaaaattaactgggcatgggggcgtgtggctgtaatcccagctactctggaggctgaatcgcttgagtccgggaggtcgaggctgcagtgagcagagattgcgccactgcactccagcctgggcaacacagcaagaacctgtctcaaaagaaaaagaaatgatttccccttactggtatctgagaaataaaagtaaagaatttaaactgtttttaaatcatttggagtttttgaacaattcctcagatcgcaaaggccgcaattttattttatttgagacagaatctcgctctgtcacccaggctggagtgcagttggcacagtcttggctcactgcagcctccgcctcctgggttcaaataatcctcccacctctgcctcctgagtagctgggattacaggtccctgccaccatgcctggctaatttttgtatttttagtagagatggggtttcaccatgttggccaggctggtcttgaattcctggcctcaagtgatctgcccacttcagcctcccagagtgctggaattataggcatgaaccactgcacccacccagctgcgatt

SEQ ID NO: 44027 - DNA, 1042 bp, Homo sapiens
aaaaacctcaggtgacaaatcaggaaagtcacaatgataattcctcatacttaggggccaggattttttggataaaacttgaatggtttgttttttgttttttttttttaatttcttagggtctctgttgtccaggctggagtgcagtggtgtgatcatggctcactgcagcctcaacgtcccaggctaaagcgttcctcctgcctcagcctcccaagtagctgggactacaggcacgtgccgccaagtctgactaatttttatgtttttcatagagacagggtttcactatgctgcccaggctggtcttgaactcctgggctcaagccgtctgcctgcatcggtctcccaaagtgctgggattacagatgtgagccactgcatctggcccagttgtgattatttaatggactaaatggtatgtctcatcatagcatgggcttatgttacactttgagcagcttaagatacaggacatcagttatgtctgacagtacaatatgtgactgaacaataaatgcaggaacaatatgcctgtaaaccaaaaagtttaaacatgcaaaacatgggtttgttttgttttgtttttgagagggagtctcgccctgtcactcaggctggagtgcagtggtgcgatctcggctcactgcaacctccacttcccgggttgaagcgattctcctgccttggcctcccgagtagccgggattacaggcatctgcttagagactcagtcttactcttatgccctctgagaaggcttcttcagctaaccagtgcatcctttgtgtcatccccgatggttgtatgtacttgataatgccctattctttcatttgatgtgctttagtctgtaaataaggatgataatagctcctagggttgctgtgaagattaaacgcagtcatacatgaaagctcttagaatagcatctggcgcatcgtaggtattcaattagggctaactgttagtaggcatagcgtgtgtttactagactgtcactccccacccccaccaagagcattgattttcatctgtttat

SEQ ID NO: 44028 - DNA, 1013 bp, Homo sapiens
gtgtgaagcacctgtcctttgctaggctcctggcgccctccgatgatacttttcatagagtgcttaattctaagtaaacatcagccatccaggtgaatgtggattgtgttggcttaactatttttatttatttatttttgagacagggtcttgctttgttgctcaggctggagtgcagtggtgcaatcgcagctctctgcaacctccacctcccactttcgagcaattctcccacctcagcctcccgagtagctgggactacagccgccacgcctggcaaatttttgcattttttgatagaagcagggtttcaccatgttggccaggatagttgttaaccaggttgagaaactgagtcctagagtctcttagtgaccggctgccacatcccacttaccatgcctttgtttgtatggtaatttagtttccagtgaccaaagatgcacaaaccgaatacattttcataatgtggcgatctaaggtgtcactggaattttctgtcattctgttaattcatcatcattggcatgttttgaacaaactctcttaataaaatgaggctaggagcggtggctcatgcctgtaatcccagcactttggggggtcaagataggtggattgcttgagcccaggagttcgaggccagcctgggtaatgtagtgagaccctacctctacaaagatacaaaaattagccgggtgtggtggtacgtgcctggggtcccagctcctcagtaggctgaggtgggaggatcacttgaggccaggaggcagaggttgcagtactgaaatggtgccactgtactctggcctgggcaacagagtgagaccccatctcaagaaaaaatgattattttttgactaaaaactgtgtggaatgttgaagaaaataaaaatccaatttgttttaattccatgcacattaggtttcccttggaggtctgtgcaagacaagaattaatacccaaaactgaaatagtgtcacaaatgtaaatcaaaagctacaggcatgta

SEQ ID NO: 44029 - DNA, 1112 bp, Homo sapiens
cttccctgtctctctttcccgccccgctgtacctctccctctgcccctccgctccccgttcactctccctcctcccctgcccctcgacactgtccctcccctcctcctggttcttccttctcccccgtgtgtctccccctcctcccctgtcccttcttctccccagtctatccccctccctccccctccccctccccctcctcttggttcttcctccttccccgtgtgtctccccctcctctcctggcccttctccgcctcccctgtcccttctcctccccgtcccttctcctcttccctgaccctcagagctctggagaccaccccccatcccctgaccagctacacattttacaactagtgcacttaagttggggaggggtctgttgtgcgtcggtggggcccacgtcctcctcccaacttcttggaatcagtgacccgtgctgtcctggctgccgggcttaagccctccgggaccaaagacacaagctcgagtttcctctaagaaaagaaagcgcccaagaatgtgggggtgaaactcccctgtaattaggatcgccaggtgagccgagctctgggcgttctcccgggaaacgccctcctccttagacccttcctctcccacctttcagttgaacttggcttttatatatgggttatttggtgaggttcttgaagtcaaagaacaaccgaggttttaatgaaattgacctaaccttaaggaatgcgttgatagccggtctcttaacttgcatgtattaggagagaatttttccagacacagacagagacttaggattagtggcctgtttagtttacatacttacaaatgaattccaggtgaaataagatatctgttaatcatctgctattaatagaacacaaaacaacttttgttttaattcagcctaggcgcttcgaacccttgaaactttaacgttctctaagttcatgtataggcatgtttaaggttataaataaatggttggtcggttggttggttggtgtgttttatcttttttctgtccctggtgcttgaatcaggaagtttagtcattttgatagacttttttaaacctaaaattttagtttctgggttttcaaggtctgaa

SEQ ID NO: 44030 - DNA, 1827 bp, Homo sapiens
actcccaggttcaagcgattctcctgtctcagcctcccgtgtagctgggattacaggcgcccgccaccaggcccagctaattttttgtatttttagtagagatgggggggtttcaccatgttggccaggctggtcttgaacttctgacctcaagtgatccgctcactttggcctcccaaagtactgggattacaggcggagccaccgcgcccggctgggttgctggagtttgaattgcgttaaatttaaagcacgaaaaatttcttaagtgcctcgttactgaatctacatctataaacacgtagcggcttctgcttcaagtgctgagtgtgagggaatagcaggctgatcacatgtgttctgtgctgtgcttaagccaccttatgtcttacttaaaatctttttgccttttgactcagtgggaaatcaaatgtgatttttcactttagatataaagagaggctcagaactctcttagcattcagactttctaatgtcttgattttggttgcgatgcacaagttgtttatagtgtgcattgaaattaatttatacagagaagaatcaaccctagtgagttttgtccttaagtccttggtgattcactgaaaacagacacgtgtttccctgaaggttagtgtttcctggcatcgtgtttgttttgttgttgtctcagagggagaaactgagaaaaaagatgatggaatatactagatgccgaagaaacattctgatgaggagccagataaaacttgaattggaatggatgcgtgttcttaaccgggctccattatcaatgacctttcataactttaagaataagaatgttcttctctctgaaactgtgatgttgctcttcaggagtcttaccgccagataatgaagatgcgaccgaaagacttgaaaaaacggctgatggtgaaattccgtggggaagaaggtttggattacggtggtgtggccaggtgagctgcttgttcattcaccttctctgctgtgtggatctcagtcttttcaagagaagtcatttgcccttctccagtgctcatcaccaagcactcctgggcagggctgatgtctccttggagcagtcgggccatcatgcactggcttcagccaccctgcggagaataggaattcctccgagcatgctcgtgccagcctcttgccataacctaccagaatatccgtgattgtcaccactaattgacttcttgtaaagctagaattaaacttttaaattcactcccttcttttgaaacatgaggagcatgctcctgaaatttaacacaggaggcagccttgctctcctctgtagaggatttgctgcagggagcagggcagggattgcatttgtgcatgtaaattgcatttgtgtcaaaggaattttgtaaaatgttaaaattttggtcaaaataattcaagaaaatgatattaaaaaacagaatagaatgatgaaaaactgctatttcatgtcctgcttcttttcagcttcaagacaattttttttttttggtcttttttgagacggggtcttgctctgttgcccaggctggagtgcagtggcacaatcatagctcactgcagcctcaacctcctgggctcaagcgatcctcctacctcagcctcccaagtagctggaactacaggtgtgtgccaccaggcctggctaatttttaaaaagttttttgtagagatgaggtcttactatgttgcccaggctggtctcaaactcctgggctcaagccactctcccatcttggcctcccaaagtgctgagattgcaggtgtgaaccgctgtgcttggctaagacaactgcttcttaa

SEQ ID NO: 44031 - DNA, 1035 bp, Homo sapiens
atcttggctcactgcaacctctgcctcccgggtttaagtgattctcctgcctcagcttctggagtagctgggattagaggcatgcgctaccacacacagctaatttttgtattttagtagagatggagtttctccatgttggccaggctggtcttgaactcctgacctcaggtgatctgcccacctcagcctcccaaagtactgggattacaggcgtgagccaccatgcccagcctgtgctaagttcttaacgtgcattttatcattttttgttcacactaccctgatgatggccccatatttttttttaccaccttccccttgcttactattttccaacatatcaaagtttacatttacaaaattgtattacttatcagaataaaaaattgcatagcttcttctgtcattagcggtacctgtaaggataaatacttcaggtctttatttgagttggtttttatgtgatcatatgcagtataagagaatatcggtaggctgggtgcagtggccctatctctacaaaaataagaacatttagccaggcatggtggcgtgtgcctataatcctagctactgggagggctgaggcaagaggattgcttgaatcacccaggagttcgaggctgcaatgagctatgatcatgcccctgcactccagcctgggcaagagagcaagaccttatctcttaaaaaaaaaaaaagtatattgatcaacccatctgaatgtgtttaagatttttagtttaaagcattttgtatttgttatagctgatcttcagtttgaggagaaaacactttttagatggttgtccattttttgtttcatatgatactagatttgaaagtcaaatcttcggcaaagctaatttttagagtctttttgttcgggtgtaaatatagattagctattatggaaatctcgtctttaatgctaacctgagtaatttttctttgtttttagtgttatgtgccaagaaccttgcaaagaaagacttcttcagtaagtaaacacttatttttttccctcttata

SEQ ID NO: 44032 - DNA, 1047 bp, Homo sapiens
ttcagtggagctaggcattaagaagaatgcaaataaagaaagggtttaatttcaggctctgcaaagagctatgatgatgccgcattaatgtagagtgggatgggggtgcagcagagatgccttcacccatgaattaggaaaaaaatccatctgtctgtgtgtccatgtccctcatcctatgagaataagaagagaatagtgtttctagaagagctttctggactagaaaggatcacacagatagtattaatgtttggtgctggcagggaacccgtggggacaggcagcaggtggcacatccccacctcgtccttggggctcagttgtgtctcacagaagagacagtttttgccacaacagctctgcctaaccctgccacgtttggggtatgatctgaattctgtcacacttctgatggcaaatagttcacatgattttgtcatttatttttaatttagtgcaattgtagaagatgaactgtaacatccatattttaagcaaacaggtgttttgaaaacttacctcaggactgtcactttaccagagatctgttcccacctccaaagccaataggcatggccggtgggtgctaaagtgtgttttgttaacttagacagttttccccgcaggaagaaatcatttgatcatttaatggtgtctgaatagtggaaacatgtgtgagtcttgtgtatgcataaacttactgagcaagattggaaagaagtgtttgtttcagttgcagataatggaatggagttcagttctcctgtatgggcttaacatttttggcatttgaatctgttgatataactgaaatgtgactttttttccttcaatgcaaatttgaagatatcctaaatttgtatcagaattgacagatcagtggctctggtacagtggccttggaagtggcacagcacttggggaggctgaggcgggaggattgcttaagctcagtttgataccagcctgggcaacatagtaagaccttgtccctacaagaaattgaaaaattagtcaggggtggtggtgcatgccctgtagtcc

SEQ ID NO: 44033 - DNA, 1025 bp, Homo sapiens
ggtgtgggggcccacgcctgtaatcccagcacttcggtaggctgtggctggaggatcgcttgagcccaggatttgagaccaggctgggcaacattgcgagaccccatcgctataaaaaataaaaaattagccaggataaggtaatgacctgcaggacacatgaagaaggtgactggggaactggccatgctctatttcctgacctgggtgctaattatatacgtgtgttcagtttgtgagaattcagtgagctgtacactcagatatttataaatcaatcataaacatcaatagacagaatagaaagtccaaatatagacccatgtcaactgatgttcttcaaaggtgccaagacaattcgatgatggggaaaaaaagatagccttgtctagactggaaaataggaaatccagccagaatgaatgggatatccttatgaaaaaagaataataataagtctcaacccttacctcacatcatacacaaaaattgacctgtgtgtgatactctgagctgttgttacacatgacactgatgacacctaatgtgtgggttttttttttttttccccacatcaatcccaattctgatgctaactggctattctacagttcgattcaatcccaacgcttaattccccagaattagcaaagaccccacaggttaagggctcagtcccacaagactactcctaccttatccatgagttgcaaatcaaaggttgtcacctatatttctgactaataaataaatcgggggttccctttgcaggttcagtaatttgctagaggcctgtaatcctgtaatcccagcactttgggaggctgaagcaggcagatcacttgaggccaggagttcaagcccagcctgagcaacagactgagattccagctgtacaaaaaattaaacaaaatgagccaggcttggtggcgcatgcctgtagtcccagctacttggggaggctgaggtgggaggatcgcttgaacctgggaggttgaggctgcagtgagctgtgattgtgccac

SEQ ID NO: 44034 - DNA, 1031 bp, Homo sapiens
cagcctgggggatggggaggagggtgcaggggagggggggttgaggacccctgttttaaggattccttttgtgagtagagctgtgtatatgtttatcttaaatatctattctgtcattactattggtatagcaaagaagaggcagtccacagcatgtgttcagtctgtcagtctcaaacctaattatctgtcaattttattcaagttggaagtgtgaaattaagctctcaattcggtgccactttttttttttttttttcgcccaggctggagtgcactggtatgatctcagctcaacgcaacctctgcctcccaggttcaagtgattctcctgcctcagcctcccgtgtagctgggattacaggcacccactaccacgcctggctaatttttttgtatttctagtagagacggggtttcaccatatttggccaggctggtcttgaactcctgacctcaggtgatccacctgcctcggcctcccaaagtgctgggattataggagtgagtgactgtgcccggcactggtgccactattttttttttaaataaagacatgaaaagccacaagatttcagataacgaagcaaataaccgagtaatagaatgagccctttcaggattctgtaaaagctgttttatttgtgaattaatttttgaaaaattttaccctgagtcttcaaaactttgtatttttctgtggttactgacattagtgacatttctttttgatttgtccctgtcttctgtaacatatttatattatacatcaacctggaaaaatttcatattcagccctttagagttgcctgatggtggaaatcacaaatgacatattaataatctgaacaaagaatagaaagtgaaccagacatagcaccagtgcctgtgcttagaagtggattaagaggccaggcgcagtggctcacacctgtaatcccagcactttgggaggctgaggcaggtggatcatgaggtcaagagatcaagaacatcctggccaacatgttgaaaccccatctctactaaaa

SEQ ID NO: 44035 - DNA, 1057 bp, Homo sapiens
tcaaaacttactacaaagctaaagtaattacgacagaatggtactgacagtagcgtagatatagaggtcaatagaatagacttcggaatccagaaataagtcctcatatttatggtcagttgattttcaacagtgatgacaagataatttgacaggggaaataatagtcttttcaacaaatggtcctggaacaagtggatatacacatgtaaaagaatgaaattgagctcctacctcaagaactcctaggagaaaacaggaataaatcttcaatactttggtctagacatggaatcttagatatgacaaacaaagcacaggcaacaaaaggaaaacagattaattggatttcatcaaaattcaaagcttctgtgcttcaaaggactcttgaagaaaaagaaaactcacagcatgggagaaaatgtttgcaaattatgtttgaaaagggtcttgtctctaaaatatataaagaacccttacaactccacaatgaaaaacaaataactcagtttaatacatgggtaaaggatctgaacagacatttctccaaagaaggctaccaacatggccaataagcccatgaaaagatgctcagcatcaaagtctcagagacatgccaatcaaaaccgtggtgagataccccgtagactcactagatggctaaaattaaaaaatgcgatcaggccaggtgtggtggctcatgcctgtaatcccagcactttgggaggccaaggcaggtggatcacctgaggttaggagttcgagaccagcctggccaacacggcaaaaccccatctctactaaaaatacaaaaattagctgggcgtggtggcaggcgcctgtaatcccagctactcgggaggctgaggcaggagaatagcttgaacctgggaggcagagatcgcagtgagcctagattgcaccactgcactccagcctgggtgacagagcaagactgtctccaaaaagaacaaaaacagaagtgagatcataataagcggtggctagaatgtggtgaaattggaacttttatgtattgctgttgggaatgtaaaat

SEQ ID NO: 44036 - DNA, 1060 bp, Homo sapiens
ccgcctcagcctcccatagtgctaggattacaggcgtgagccagcgcacccagcctttttttgtgtgtgtgtttttagtagagatagggtttcaccatgttggccaggctgatctcaaactcctgacctcaggtgatccacccacctcagcctcccaaagtgctgggattacaggcatgagcctgatttacaggcactgatttctgacaatacatccttactatatatccaaaacttacctgccctttgaaacccagcctgtctcacctctacaaaaacaaacaaactaccttcctaaccattcctacgatactattctatttctgtgaattcttaaaatctgcttgaacagcccattttgacatttgattctctgtgtcagtgtttattgtcttagatttaccccctgcatgcagaagtgactgcatagtcactacttttagtgagtttgaaatctgtttggagagctatgtaagtaccaatggaaaaaaaaaaagaagtaggtaactttacaggacagtaaaggacagattgaagaagggggacgggggacttgaactaggcctggaagcgcaggggtaaaggaggtggagcatgttggttgccaggggaccctgagcaaaggagcacttaaaaaaatgcatgaggggaaaggtcatcagtgacgtcagtagttcgatccaaggggagtttgtactctttttaatttttttttttttttgagacagagtcttgctctgttgcccaggctgcagtgcagtggcacgatctcggctcactgcagcctccacctaagaagttcaagtgattctcctgcctcagcctcccgagtagctgggattacaggcgcctgccaccatgcttggctaattttttgtatttttagttgagatggggttttgctatgttggccaggctggtctcgaactcctgacctcaggtgatccacctgcctcggcctcccaaagtgctgggattacagatgtgagccactgctcccggccaaatactttttttttttaaagaaattttcatttagtaaataatgctgagctcagag

SEQ ID NO: 44037 - DNA, 1035 bp, Homo sapiens
tatcatttttctacttgttattctgcacatatttgttggtagactacaacgtagcaatttcagaggaatgcttcatggtgttcttgtggagtgattatttcttacatctggttcaagtttcatgggtatgcattgcatgaattttaccaaattgtgtgtgtgtgtttcagatccgcataaataaatcagtagtcaaaagtaagggtagtgtttttgggaatatatttttcttacttttgtgggtccccaagaagtcagtccactgattttatgtatatatgcactcactactactgtacatctggagtagaggctggcaagcttctgaaatgctcagatagtaaatattttatgctttgcaggccatgtggcctctattacaactactcaactctgctgttgttgtagccatggatactgagtaaactgattagtgtggctgtgttccaataaaactttatttacaaacacaggcagtagcttgccaaccccctaactagagcgtagctgtcactttgagacctgagtaacttctctgtaggattacacccttgcaagaattctgcccgcagcatttccgagtttgcattataaccttgtgggcagggcagtgaaagtactgttatataggaaagttaccgtctcctaggaattttgttttaagaaaaagattctaatactaaagtatgacatttgttgaatattttttattggcagtaggaaaggaaaattgaaattacatacaggaactccaaaagcttgctcgtgctcatttttcttctattacagattgaacatttaatgataaatgtgggtggggggatttaatatttcagaacagaaggcagagattaattttattttgccccctaaaatgtaatacattttctctctcttcttgccccctgccctgccctttcccactcctcctctctgtccctttgctgggatagggaaattgactgtaaggggattatgggtctatgtgggagggagagataagagggtctcagcaaaatgccaccttccaaccct

SEQ ID NO: 44038 - DNA, 1026 bp, Homo sapiens
ttttccagtttgcctccttggggttgcattttggcagagaaggctttaacaccccaatgttcttaacttcagtagttgttgattgaacaactacttttggcaataacctttttctgtactatagaggatatcaaataaaaagggagaattgaccagatgtagtccctgctttgtagaattttacattgggaagggaaagatggaatggtgaagagaatcacagaagtatggagagaggcagattgattccagctggagggatttgaggaaggtttgtgtaggatgtggcatgtgaacttggcctggcatgattggttggaaataggcaaagggatgacggattgggagggcattttaagtaatgcaaatagattgagcaaaggcttggaagtagaatagcacttggcaaaatgtgttgggagaaggggaatgatagtcactctgtggactggaattgtagtcttagtgggataggcgatatagagagtcttcatccaactgtgtgataaatatcctctggccgtttaggcccctctgtgacacacacagccaaaatttaatatatgagtagaatgcaaaaatctgtcattataagagaaaaatcaagaaacagtatatatggtggtaaagaacatagatttgaagctagattgcctgggttcaaatctttaatagctgtgttatcttgggcaaagctactcagtctctctgatgcctcagttttctcacctataacatgggataagactagtccctatgatagattaatttcaagaattagattagaagattaacatgaaaagggtttacaacagtacctggcatatagtatagagtagtgtgtaattgttagtaattagtagtagtggttgttgttttagtgtttgtgtttgggtataatgtgtaattgattttttttccttcgagaaagattagcctttctgtagcttatgtattctatataattttgcattagtgaaagtatagcatctcaagctcgtaagtgcatgaagactctcacagtgg

SEQ ID NO: 44039 - DNA, 1029 bp, Homo sapiens
ttttatgcattgaaatactctcagatatcctggtgtttttatatcttttggagcatgactgcatattgtgaagtaagaaaaactctaattccaaacagagaggaacaaagagactttccttgatagcatgtggaaatatgaggttgtttttaaaattgtagcttgtgggatgtaagggtgacttgtgttttggcattcagatggtgcaactgtgagtgaaatagttgtggtaatagctgttgatgatgttggttgatgaattacaggtgtctcaattgattcaaaatagttaagtctctcaagaaagattaagaaaattgttaagactgttgactttgtcaatttgtaccagctaagaacctcacttatgtgaggcaggcaaaacttttgtttcaaaaaccatataacacagttgctgtgataagatggaataagtggtcagtttttagctccctttgcatttacattttccttagggtctgcctcaagtttaggaagatacagttaaggcagttctttgagatgaattattggaaggtgtaggatgggttagaacaaatgctgttgcaaaacttgaattgcaattatactttaagaagaatcacattctgccaaatagaggtttttgtcattgattttgtgatttgatcacatttgtgttgccttttagaacaactttcttttttcaaatccatttttttttccttttaatcttcttggcccacccaactgactttagacatgaaatctttcatatgctttatttctatctccatttttacagtagttgtgatttatcaaactaggatttttaacttcaagtccatctgtcagagtttaaaacctctagtcttgcagttacaaaagtcctttctgaatgttgggtttttctttctcttccacacattttcattttctcggttcagtcacaatgtcaggttctagtgtggaaaattgggtgaaagaaaggttttggaggctgtgttatttatgaaatatttcctcatggattaagaaagaaaaaaagac

SEQ ID NO: 44040 - DNA, 1068 bp, Homo sapiens
ccttctaggcttaagcaatcctcccacttcagcctcctgagtaggtgggactacagatgtgccaccacacccggctaatttttaaacttttttgtagagatggggtttcactatgtggcccaggctggtcttgaactcctgggctcaagcattcctcctgccttggcctcccagagtgttgggtttatgggcatgagccattgcacctggcccaggaggattcttccatcactttggtcttgcccagcctcagccttcacaaacaaaatggggatatcagttcaagcaacttctcaggggtatgaagaggatacagagaaatgatgttggaggcctttggggacagtggaaggaaaatgcaagcaccacacatgctcacggctacagagatggccgtggcagagcagggaggactggagatggaattgggccccttccagggctgggttttctaccaatgggcctgggactttgatcaaatctctaaatgtctgccaaactgagttttctaccctgtacgatgcacgtgaaaatcgagtgtcttacagggcggctgtgagagtaaaatcagggaaggaataggaaaagctttgcaaaccagaaggaccccagcagtgaattcactgcaggacatttagtcaggcgccctacagaaatgacatcgtttattctttcttgctgtgtttccctggacaggtgaggaaaacaaggcttggagtgggtaagttgccaagtttgtatggcagagcccagccctgactccaggggatgctgttctcaccccatctcgtggccaccatccctggactttccctgcaggtgggtcctgtagctgtgtgtgcccagcctgctgctgtgtgcaaataagaatttgatggaggctgggcacaggggcttacacctgtaatcccagcactttgggaggccgaaataggaggatcacttggggctgggagtttgagacaagcctgggcaacatagtaagaccctgtctctacaaaaaattagccaggcatggtggtgtagtcccagctactcgggaggctgaggtgggaggatcacctgtgt

SEQ ID NO: 44041 - DNA, 1048 bp, Homo sapiens
accccgagcagccgttctgtgggctcttcccaggctgatgaagatgctccagagagctatacccactgtgagacttgggctgagcactacgtgggctggggtggagcaggagtttgtcctcatccagatgggctgttgagagatggcaggagtggccctcaggggctccacaggacctgaactccaacaaccagcttcttgccctgttctagcaaaagcgcaaaggcgttgaagggctcatcgacatcgagaaccccaaccgggtggcacagacaaccaaaaaggtcacacaactggatctggacgggccaaaggagctttcgaggagagaacggtaacatcactggctgggccttgtgtcacggggaatacaggccagcagttggcctgtgggatgctaaggtccccagctggctgggagctgtggctgtttatttctgtctcattccccaatggccctccagtagcctttaaaaagccacacagaatttgttttcaccaattgatacatgatatcaggggaaataggacaacaggctcagacctgagcataacacttgaggtaatggtgcaggatacagagggttgccctccattcccctcttccagagcaccacaccctggggagacttcccttaccccactgatctgaccattcctgacctgcatccatctgtaatgtcgtggccatggggactggaagggggctgcgagcctgtgccggccagaaggcagtccagcccagcgcagctcagccagctgtcccaggcctctgcaagtcctgtgtgaaaatgaagctgtaaatatcttcctcaagagtcgtatgaggatcaagatcatgtactgaagtgcctggcacaggatcagtccttgactggtgccctgacttttggcagccaccaggtgacctcaagggccttacaagaggttgaagcctgctagtttctctcctgactgggaatttaggataatggctgaggggtgtgtctgtgaaagcctcgtggggaaggccatgagcttgggtgtgattgcagctgctaaggaccct

SEQ ID NO: 44042 - DNA, 1005 bp, Homo sapiens
aaaaaaaaaaaaagtgcccctggctgtgacagaacatcgtgtaaaaagcccttatagtgacggcagggatgtaagtggtacatgtttctgtggttgcatctgagtccactatgcttggattgtaagggaccaggggatgtagcaagtcattgcagtgcaccgtccgccatgttctcccctccggtcttctgtgtaggagccagcatttagtacacagtttggtgatgcatcagatggtcacgagttgcttcctgcgtgcctttgaacacatgagggtggcggaggtgtcggtttgggtggtgctgggtgaggggtaggtgaggcctccgatgagagtactccaagcaggacacagccctctgggggtcagagcagtcaaggcagctgcttccgctcacctaaactgcgggtctctgcaggaagaaagggaggccacaaaggccgggcgaggcagtatacaagccctgaggagatcgacgcgcagctgcaggctgagaagcagaaggccagggtgagtacgtgcctgtccaggccacgccagtggcccagggtggcgctttgccaatttggttcatagagaggccaggcaaggactacccattcgcagggacaagccagcacgtgggggtcgggcgggcagtgagccccaggtgtgagtctcagaacaaccaatgacagtcagggcgtgggcatcctctgcctggatgggttagaaagaactgtggctgctctgcagcagctgctttagtggggccctgttcttggtcttgtgcacctactttcaggaggatctccctcctgcaggacctgtccattcacagctcgagctcccagcacccctgcttgtctgctgcagccacacaggatgatttgccacactgcacatgacatatgccctgccttcccacacccccagcatcagcatgctctccatccctggagacgttgtttagcctctcctcctctgtgactcatgcctcacctccagccagagctgatttagta

SEQ ID NO: 44043 - DNA, 1186 bp, Homo sapiens
tgcagcctccaactccttggctcaagagttcctcctgcctcagcctcgccagtagctgtgagcacaggtgtgtagcaccatatctggctaatttttaagttttttgtagaggtgggattgtgctgctttgtctaggctggtctctaacccctggccatccgcctcagcctcccaaagtgctgggattacaggtcacagcccagccaccgcatctgctcctctgaagggggccagcccctccacacctgtgggcgtttctcgtcaggtgggacgagagactgagaaaagaaataagacacagagacaaagtatagagaaagaacagtggtcccctgggaccggtgctcagcatacgctcagcatcccgcatacggaggacctgcgcatacggaggacctgcgctgcgcaggcactggtctcttgagttccctcagtatttattgatcactatctctaccatctcggagagggggatgtggcaggacgatagggtaatggggagagggtcagcaggaaaatatgtgagcaaaggtctctgtgtcataaataagtttaaggaagggtgctgtgctttgatgtgcacctacacaacatctcgtgcatcaaagagcagtattgtctccagcaggtcccacctccagccctgaggcggttttcgcctatctcagtaaatagaacacacaatctggttttacacccaagacattccattcccagggacgagcaggagacagatgccttcctcttatctcaactgcaaagaggccttcctctttcactaaccctcctcagcacagaccctttatgggcgtcgggctgggggacaggctgggagacagtcaggtctttcccttcccacgaggccatatctcaggctatcacatggggagaaaccttggacaatacctggctttcctgggcagaggtccctgcggccttccgcagtgtattgtgtccctgggtactcgagattggagaatggcgatgacttttatcaagcctactgccttcaagcacttttttaacaaagcacaccctgcacagccctaaatccattaaaccttgagtcaacacagctcatgtctctgcaagcacagggttggggctagggttacagtttaacagcatctcaaggcagaagaatttctcttagtacagaacaaaatggagtttcttgtgtctactt

SEQ ID NO: 44044 - DNA, 1186 bp, Homo sapiens; identical to SEQ ID NO: 44043

SEQ ID NO: 44045 - DNA, 1186 bp, Homo sapiens; identical to SEQ ID NO: 44043

SEQ ID NO: 44046 - DNA, 1186 bp, Homo sapiens; identical to SEQ ID NO: 44043

SEQ ID NO: 44047 - DNA, 1062 bp, Homo sapiens
catcagaaacagtttcctctacaagtaaccattttagaattgctgaaaaaccaatgacagcatctctgaagcccacttaacatgcctccccttgctaaatcacaaaagattccttggcttcttggaagcaagcagattttgctaggacacagctgaggttatagaacttatggctgtcacagggaggtcactccatttgcatctcaaaaagtctgaaagtggccaggtgcggtgactcacgtctgtaatcctagcactttgggaggctgaggcgggtggatcacttgacatcaggagttcaagaccagcctggccaatatggtgaaaccccatctctactaaaaatgcaaaaattagtcagacatggtggcacgtgcctgtaatcccagctacctgggaggctgaggcaggagaatcacttgaacccagaggcagaggttgcagtgagccaagatcgcgtcactgtgctccagcctgggtaacagagcaagactctgtctcaaaaaaaaagaaaaaaaaaattctgaaagtacttctggtctctctctttagaggttagagttgcttctgctcagaaatacacagttctgggaactgagtctcatgtggataggatgagtatgccttatgggcaaagtgacagttcttcccaaaactcagatggggatgaagaggagggatgggtgaggaagggctgtggcctcactaggctttaactgaacaggatatggacaagcagcgagtgtggagggtgcctaccgactctgaagccctggctggagcaacacccatggctaggtgtgtcccgggcctcaggaacaggtatgtgggcccctcgccactgtacctcccctcacaggcttgtggatgtgtcagatggcagaagggtgggaggaaaagagctgccctgcgtgggtggttccatggtctcaagctagtgccatcaagacaggaaaaggccggctgggcacagtggcttatgcccgtaatcccagcactttgggaggccgaggcaggtggatcatttaaggtcaggagttcaagaccagcctggccaacatg

SEQ ID NO: 44048 - DNA, 1056 bp, Homo sapiens
aagggaggactggcttcttgcccggggcccagcccaccctggcacctaccgtgcttgcagaagccacggtcataccaaggacagtccttgatcttggactcggggtcgatgtgcaggaagggacattccttgttgctgcactcccctgcagggaaactcagacgtgagaccactgggaaggccggggccaggcccaccttggcttcatccaaggaaaagaggttctggtgtccagttttggcctgacgagccctgagagccagggaagagtgtttctgagccccagcttcctgtgcagcggagctgtgatggaaatgcacccattgagaccaggaagttccattctgattggctcttcacatctaagagctgggacaagggtaggggaagcacttgtggacctggccctctccaaagcagcggaccccagggaccaccagcaccaagaaccgccttcctgagtagttgcccgcttccaggctcaccttctccaatccatgtttacaactgtgctcaaaatccagaggaaatgcaaactccttccccaggcccctccgcaggctcagcctctgccaccccccagccacatgggtccccctgtaccaggaccagccccttcttagtcttccgcttccagctcaggaatcccctcatccttgaccactcagcctagagaaggttctggtcacggtttccttccttcaaagcacttgtcacaagcaatttcttctctgttcgtctcatggcctatcagctacctctttccctggaccacaagagtgaaggcttcacagggcaaggacctcttcaccattgtccctccagtgcctggaaagggggccctcaacccaatgtctgtggtgcaggtgacagaagctgcagacagtgcgtcctgcaccagggctgtcagcaaggaaggagcgaccctcaggccacttgtatagcggtgccttaagagcctgcccaggagagccagctgctgcctctggggacagatgggaggccactgccccatcccagtgctgccccagtgctgctatgggcaaggcatcgggg

SEQ ID NO: 44049 - DNA, 1029 bp, Homo sapiens
gaccccacgttgtgtgtgtgactttggtcacgtggcccaacctctctgagtctatcccccctcccctcctttaaggtaaagacatgaagtgcttgttgtgaagattaaataagctaataatgtcaagtaaatgttagctttgcagtaatctttcctgtccgccacgttactgcttttttcgagacccttttctggagttactcccagcaagctgttactcagacgtcctgttggttaataaagctgtccctgcagcagttctgctattgtatagactcagtcttaaaatagtgggcttgatgtgacatatttcttcataatattgtgtatgtgcagcctctgtgtaattgcattatgcacctttattgcatagttgaagcagtggcaggaaaggatgccatatgtgttactgggagattattcagtgggtattttttctcactcttccgtttcagtaccagtgaaggacaagaaacttctggaggtcaaactgggggagctgccaagctggatcttgatgcgggacttcagtcctagtggcattttcggagcgtttcaaagaggtcagagccttgtggatgtctgtaaatgaaagcaaatctctgggtcttcagatctcttttttgccatgaattaatttgggcaatgaaggccttgttgtctgaaagcagtaagttatgtagaggatgacagggagggatgctaggccttggacttctgtggttgattggccctttcaaaggctggctctgagatattacagccaagaacatgtttcctgttgcttggaatcagtatgtctgcctctgtcttagagaaatcctaagacttctttaagaggaaaatgaattggaaccgtagtgggcattagtctataatatgatgctctcctccctgccagaacttcaggacaaatatttgaaatggcctatcttggcctggtgtggtggcttatgcctgtaatcccggcacttcgggaggccaaggctggaggattgcttgagccgagtttagaccagcctaggcaat

SEQ ID NO: 44050 - DNA, 1107 bp, Homo sapiens
tgtccaggcacctcgcccttcgcttcatggccttctagtagttccagggtgttcgcagttgtgacctgcttcccgtgagcctctgctctacgcccctggatggggcgtgcattccctacccagcagccctcgcgcggtccggcacagcggacaccaggactccaaaatggcgtcagttggtgagtgtccggccccaggtaaggctgtttggactccgtggtggaagcaggagccagggtccagggtccagagccacactgggagagaaggaagctgcggagctgcctgccctttgctcaggcacttcgccacgacctcacttgaggcgcgccagaccccgctccgcctgcccaggcgcgccttcctgctgcccagggcctgcgccaaccgggttaggcgtggagggtgaaggcatctggggcacgcgcttctgggcctgggaatgcgccgccttgggccactgttcctctttccgctaagaaatagccgcttccctctcccgctgcgacccagttgctttgcacttgaatgttaggcgcagcttttgcccttttttcccaaggcttaagctcagatgaagctccaggaggagctcaggactaggactgtacctgataccatgtaaggttcgatgcatatatgttgaatcagagaggcgaggtgacctgttcaaggtcacaactcgtgcgagggctgagctggtattcaaacctgaggattcgtggtaaatgaactttattctctaggacggccttatgactagcaggcttttccgagacacccatgtgtaaatcgctacattcatcccgctgtgcacactgatgatttttgtttgtttgtttttgaatagttagccctagatgctccatagtagccttgtcagagagtccttgttgggaaagtcgattccattttacagatgagggaaataactgttcgggatgtggtgtggcctctctgaggtcacacagcctgatagtggcagagttttgattaacacatgtgtgtcttagctcagtttctggtttttttttatcattttttttttgagatggcgtttcgctcttgtcgcccagggtggagtgcaatggtgtgatctcggctcac

SEQ ID NO: 44051 - DNA, 1026 bp, Homo sapiens
ggcatcgtgatagtgaaggtggaggaggaagatgaagaagaccattttcaaaaggaaagaaacaaagtagagtcatcgccacaagttctcagtcgctctacaactatgaatgagagagccttattgtcatcgtatttagttgcatatagagtggcaaaagagaaaatggctcacacagcggctgaaaaaattatccttccagcatgtatggacatggtacggacaatttttgatgacaaatcagctgataaactaagaactatacctcttagtgataatacaatatctcgtcgaatctgtacgattgcaaaacatttggaagcaatgcttattacacggctgcagtccggtatagactttgcaatccaactcgatgagagcactgatattgcaagttgtcccacactcttggtttatgtcagatatgtgtggcaagatgattttgtagaggatctcttatgttgtttaaatttaaattcacatataactggattagatttatttactgaattagaaaactgccttcttggtcagtataaattaaactggaaacattgtaaaggaatttcaagtgatggaacagcaaatatgaccggaaaacacagcagacttactgaaaaattgttagaagcaacccacaacaatgctgtttggaatcactgttttattcatcgagaagctttggtatccaaagaaatttcaccaagtctgatggatgtattgaaaaatgcagtgaaaactgttaattttattaaaggaagctcactgaatagccgacttctcgaaatattttgttcagagattggagtgaaccacacccacttattgtttcatacagaagttcgttggctttctcaaggaaaagtattgagcagagtatatgaactcaggaacgagatttacatttttctcgttgaaaagcaatctcatttggcaaatatttttgaagacgacatttgggtaacaaaattggcatatttaagtgatatttttggcattcttaatgaattaagcctgaaaatgcag

SEQ ID NO: 44052 - DNA, 1050 bp, Homo sapiens
actttgggaagcctaggcaggcgaatcgtttgaggccaggagttctgagatcagccttgccaacctagagaaaccctgtctctactagaaatacagaaaattagacgtggcggcacacgcctgtaatcccagctgcttgggaggctgaggcaggggaatcgcttgaacccgggaggcggaggttgcagtgagccaggatcgcgtcactgcactccagcctgggagacagagagagagagtgagactctgtctcaaaaacaaaaaaagagaatgtttgaagcctactgaataaagaagtgatttggatataataggaaaagctcatttacacttcaccctttcctttcaagactttaggaaggggtctttttgtttctttggttggtttttttgtttttgagacagagtcgcccaggctggagtgcagtggtgcgatctcggctcactgcaacctccagcgcccgagttcaagcttctcctgcctcagcttcctgagtagctggaattacaggcgcctgccaccatgcccggctaatttttgtacttttagtagagacggggtttcgccatgttggccaggctgggaaaatgaactcctgacctcaggtgatccgcccgcctcggcctcccaaagtgctgcaattacaggggtcagccaccacgccctgccaggaagggttttaaatgagcaatttcggacatggggggttttcagttgtgggaggtatctatgcttgacatcgagggataaaggagagaagggaatttgtggacggtgcagcggaccattggggactggtaccagttctgccattgatgttcttggatgaaacacatagacccaccaagtctcaaatgtgtcctaagtaaagtaaaatagattatctcaaggtctcttccaattttggaatctgccgatagactgaatttaacattcagctaagcaaaacctatggccccacattcatttccatttgtgccaccaacatacagaaagttacttgcattattgagagaggctaagtgacacagtaccaaagaaaaggggtt

SEQ ID NO: 44053 - DNA, 1080 bp, Homo sapiens
tgtgtctgagaggtggaagaaacctggagccggtgaatgagacataggatttattgaggacttatatgctgggtggtccaggagcagtgggctggacacgaaaaccagttgctactgtttgtaaaaagcatgcagattatatagcattttcacttagcaacctgctcctaacaacctccatttaacccgaatcaaagggccttgatcctctgtacagcctgcattccaagaatgggccagaggttcagatgttcagatgtccttcctagaaaaggagcagatctctgagttggccactcccacatttcttagcttggaagtgtgaacccacattctacttggaccatagggtcattgttagggtatgcttgagttattgctgtcaggtgcatctgccatacgataccataaaccttaaaccactaaaataaaagagatgtagctagtcaataaaaggaaataaagtggaattataaaaaaagattaataaaaaataaggcagaaaaagaagaaaacatataggacaaatagaaaacagcaaaataatagacacaaatctaatcatactaataatcacattaactataaatggtctgcatgcgctaatcaaaaggcagaagttggttggattggctaaaaaaaaaaaataagacccaattttttactggaaaagaaacacattaaatatgaagaaccatatacgtttaaagcaaaagaatggaaaaagatatgttaatagatctggagtgggtatattagtatcaaagtagatttctgagcaaaggatattaccagagataaagaatgttatatcctaatgataaagtggtcagttcgtcaagagaatgtaagttctaaacatttctgcacttaacagtgcttcaaacatattaagcaaaaactaatagagctgcaagaagaaatacacaaattcacaattacgtttgcagttttcagtaccttttaataatttttagaataattaggcaataaatcagcagggatatagtagacttgaataatattatcaatcaacttgatcccattatttatagaacactctacccaacagctatatac

SEQ ID NO: 44054 - DNA, 1481 bp, Homo sapiens
tcagatgtgggtaatttaaagggggcatttttacaagaaacaaaaaaaactcggtttgttcggaggcaagttttaaatcagggttcattttttaatattgatgaatccttcaataattgtatgtttactgctgcccttcgcgagccagcctgagaagcgcgggctcgacatccccgcgcgcccccgccgcccgcccccaaggccggcgacgctggagcacatgtcctgaggcccaggaccgtggtcggccgctttcgcacattcgtggccagcagagggcgcagccggccagcccccgcagcgaaagatccccgagtgccgcgtcagcgatcgcgctccttgccctcgccgcctgccagccgccctgagtcagcaaaccacagagaggcgaggacctcccattttcctagacagaacaagtgggcgttgggggtacgggtgagtggcaagaacaaccgacccggaagcgaaacgagggggaacttccgttctttgttctgtccccggtgtgtgggtctgtgacagggtccaacagggcctggtccgtgtccggtcccccaaatctgtcgtccctgcccccagggtgagtccacgcgtccccgggtctcgcggtgagacggaggctgtggtcgccggggaagggggtggtgtctgtgccactgcggcccgcagggtcccccggccggcccggagcagggttcggggaggcgcccctccgtcccctgcagcccgtcctctactccgcttccccagggatccccctagcctagcgggatcctgcgtaggggttagtaatggggctccggttctggttttgtgactttaacggcgacccagctggagcgtttaaaagtttcagcagagcggtaggggcgcctctctcttgaaagcagctaatgacagcgaccctaacttggtatttctcccagacgtttttatttgatgttaacacagttattcgcgcccgtggcaggagaggaagtttatttttacgcagctgggtccaaggatcagagaaattctgctaagcgtacgcagttagcacgagggctgggagtgggtgcagacgccgattccaggggtaatcctgctggagcccagtgcatcgcgtgatacacctggctcaggctccgttttcagttgtattagattcctggtttgatcctctctccggaagtgggattgaatccacatcggtgtttacactctgaagggcttttgtaaactccaggagaagatagcagagtgatgaacctgaaaccgatgggctaattagaggaacgagcgtattattttctccagaaaagacatctgtggagagtgggcatcatttgattatacgtgtttgatggacagtcgggtggaaggagaagattctgttattgaagctctttttttaaaaaaattaatttttatttatttttgagactgtctctggagtgcagtggcgcgatctcggctcactgcaacctccgcctccc

SEQ ID NO: 44055 - DNA, 1052 bp, Homo sapiens
ggactaagcggtccctgctgtttggagatacttaagatggggctccactttttgagccccccgactcccttatttggtcttatactgcctgtgtgcaagtcaggctctggggatatggcgccagtatgaaatgcagggtctcttggtttttccccttttctagcagacaggtcattacttagttcccaactcccactctaaagctctggttagcgggtgatgaaaatcagcacaagtgatcacatacagcaatcccaacctttagaccacttcctagctgcctctccaaaatatgtagtaaacggtcattgagaaactctccctcctggtaattcacagtgcccacaggatcaaggcttggacttctttctaataaaaatctgcttactatcccttcttttttgcgtatgtgaaaaacaagttaatttagctcaggaaagtagtcaattatcatgtttataaggttgggtgggctaggtaagatgatgtagagggtgacattaaagtgtagaacagagaccacttaggtggaagcaggcagccttggactttgctaaagaccagtccatgtgactgacatggggtcacttcaaatggtagtgcctccctcactgaagagcatcagaagggcttctgagcaaggccagaatgagcctcgatgaacatccaagttgaccaaccagtgtggtgcctaacagaggacagagccaccagcaggggtgctcaggggctgctccccttttattaatgacagcggtttctctcaaggaagtgtagtgccctcccctttgggatagttgcctgacccctgtccatcagcccttcaagtaccctcatcagaaaaagagcccgcgcattctcctgccgatgccttgtcggtcgtagaggacattgaacttgttcacaaactggttcatggtgttgcacgttttggtgatggtgccgaggtaggccatgagccccacgtcgttgcattgctgggagggaacagaaaggaccagttcctcgggatccctcgtggcatgcccggggaacaacagtccccagtcctg

SEQ ID NO: 44056 - DNA, 1123 bp, Homo sapiens
tgccgtacaagagctgctgcctcagtacaaggagagggaagtgagtggttagagaacaatggcaaacaaagggcgaggcgtttaagcttctgtagagaggctgctcagatactgatgttttctgagcaggcagaaaggaggggcacttctgcctggtgttctctgtgctctcctttccccatcctgttgctcttttttttttttttttttgttcttctcctttaggtggtaaataaagatgtcctggacgtttacattgagcatcggctaatgatggagcagcggagtcgggaccctgggatggtccgaagcccccagaaccagtaccctgctgaactcatgcgcagattgtgagtggtctctgtcgggaaagatgtagggattggttctccaggatcttgtttgtgactgttttctccccttagtgagctgtattttcaaggccctagcagcaacaagcctcgtgtgatccgggaagtgcgggctgactctgtggggaagttggtaactgtgcgtggaatcgtcactcgtgtctctgaagtcaaacccaagatggtggtggccacttacacttgtgaccagtgtggggcagagacctaccagccggtacgtgtggagcaagaagcaggaaagcacttacccattagttgttttgtagagattaatttgatcctgtgatgcctattgttttatttggttgtaaaagttgcctgtgtgttcgcctttcattcttgggtatgtagtggtctttctacctattttctgggtgtttgttgttgacccagagtaagttcagagggttcttgacacttacaagatgtctgccatgaagagaaaatgtgattcaaaggaccgacccaatggggctcttttccttctgagttcctttggtgtttctgttctcacatcctagatccagtctcccactttcatgcctctgatcatgtgcccaagccaggagtgccaaaccaaccgctcaggagggcggctgtatctgcagacacggggctccagattcatcaaattccaggagatgaagatgcaagaacatgtgagtttggggtacgtggccctgggcaggtggatcgggagtccacttgaatcctgtagtcacttgtggaat

SEQ ID NO: 44057 - DNA, 1081 bp, Homo sapiens
gagctgggtggacgagaagacgccctggacgactcgttatggctccatcgcaggcttggctgagctgggacacgatgttaggcctctgggaggaagaaatgggggaggggacacagtcatgaggttatagagggcactgtacccccatctgggagaccctggtgaccctccggcttttgcttgtccttttcccttctaacaggttatcaagactctgattctgccccggctgcagcaggaaggggagcggatccgcagtgtgctggacggccctgtgctgagcaacattgaccggattggagcagaccatgtgcagagcctcctgctggtgactgaagcccctgtccccacacctgcccactgagacacaggcagtgtttagcaagcatatggcatattttattcacttactcccatctttgcctcatgttttcagaggacattgcagagtctgatactattttacagatggaaagactgagattagactgagtaagaaataagggggctgggcatgatggcttctgcctgtaatcccagcactctgggagcctaggagtatgaggccagcctggacaacgtagcgagatcccacctgcaaaaaaaaaaaccaaaaagccgggagtggtgacgtgtctgtggtcccagctactagggaggccgaggtgggaggattgcttgaacccaggagttcaaggctacagagagctatgatcgtgccactgcactccagcctgggttacagagggagaccaccgccccccaaaaaagaagggtttaacacgctcagcctgtggcatttggaccatccttccccaatgctcctgttactctgtggtcttctctgtacaaggcaaatgcgctcttgattaaccatcctgccacagtatttagcaagttcattcacacattagtgcccatgttttctttttcttttctttttttttttttgagatggagtctcactctgtaacccaggctggagtgcagtggtgcgatctcaggctcactgcaacctctgcctctcaggttcaagcaattctcatgcctcagcctcccaagtagctgggaccacaggcac

SEQ ID NO: 44058 - DNA, 1083 bp, Homo sapiens
tgttgcccaggctggagtgcaatgacacagatctttgctcactgcaacctccgcctcccgggttcgagtgattcttctgcctcagcctcccgagtagctgtgattacaggtgcccgccaccatgcccatctaatttttttatttttagtagagatagggtttcaccatgttggccaggctggtcttgaactcctgccctcaagtgatccgcccaccttcgtctcccaaagtgctaggattacaggcgtgagccactgtgcctggcctgagatggggttttgctatgttgcccagggtggtcaggaattcctaagcccaagcagtcttcccacctcaccctcccaaagtgcacagattacaggcatgagctgagccactgcacctgcccattataaggatttcaggttttactttatggcaagtggagagccattatgagggtttgagcaaagaaatgacaatctgctttacagtttgacagaagcattttggctgcaacgttaggaatagatgtagagaaaggcaagggtagactccggttgacattgttaggaggtttttggagttacccagtggatagatgatggtgacctgggccaagcagtgggagcagaggagtcaggttggactacctggtggattgattgatttttgagacagagtctcgctctgtcgccaggctggagtccagtggcacgatcttggctcactgcaacctccacttcccaggttcaagtgattctcttgcctcagcctcccgagtagctgggactacaggtgcgtgccaccacgccaagctagtttttgtatttttagtagagatgggatttcaccatgttggccaggatggtctccatctcttgacctggtgatccgtccgcctcggcctcccaaagtgctgggattacaggtgtgagccaacgcgcccgaccggatttatttttttaccttttttttttttttgagacagagtccatctgtcactgaggctggagtgcaatggcgcaatctcaactcactgcaaactctactgccgaggctcaagtgattctcctgcctcagcctcccaagtagctgggatta

SEQ ID NO: 44059 - DNA, 1032 bp, Homo sapiens
aacgccttatattggaaaatctaggattttcgcagctattgaggagaagtcaatgcctggcttcaaagcttcaacggacagcctgactcctcgttaggggctaatgcagttgctgactttaagttgaagccaatactcatttaccattttaaaaatcctaaggcccttaagaattatgctaaatctactcttcctatgctctataaatgaaacaacaaagcctaactgatatcacatctgttcacagtatggtttcctgaatattttaagcacatgggtgaggcctactgctcagaaaaaaagattcctttcaaaatattaccgctcaatgacaatgcacctggtcacccaagagctctggtgaagatgtacaaggagatccatgttgcttttttcatgcccactaacacaacatccattttgcagcccatgaaacaaggagtaatttcaacttcaagtcttattatttcagaaatacatttcataaggctatagctgccacagtgattcctctgatgatttgggcaaagtccatttaaaacctcctggggttaggcatggtggctcatgcctactatcccaactttttgggaggctgaggtgggaggactgattaagcccaggagttcaagactagcctgggcaacacagtgagaccctgtctctacagaaacaaaacaaaaactagccagatgtggtatgcaatctgtagtaccagatacttggaaggataaggcaggaacatcacttgagcacaggaggttggggctgcagtgagccatgactgcaccagtacattccggtctaggcaacagagcgagaccctgtcttcaaaacaaaaaacaaaaccagaaaaactcaaccccccgtccgggaaggattcaccattttatcttattttattttatttatttttgagatggagtcttgctccatagcacaggctagagtgtggtggcgcaatcttggctcactgcaacctctgcctcctgggttcaagcaattctcctgcttcagcctcccaagtagctg

SEQ ID NO: 44060 - DNA, 1038 bp, Homo sapiens
gccattgcactccagcctgggcaacaagagtgaaactctgtctcaaaaaaaaaaaaaaaaaaaagaaaaagaaaagaaaaaggaaattggtaaaaattaaggaggtctaactaaagtatggacttcagttaattacaatgtattaacttcagttcattaacggtaacaaatatactataccagtgcaagatgttaataaaagggggaaatggtacaggatatatgagaatcctactgtcttaacaatttttctgtaaatttaaaaacattgtaagatgaagagtctatttttagagcactgagtaaattgcatggaactaaacacacacacacaattacatgtaaaactgatagaacctgggtaagttcagtggatggtattgaaggcaatttcctggttgtgagattgtactctagttttgcaagctgttaccgttgggggaaattgcatgaagggcacgagggctctctgggtaataatctcttacaattgcaagtgaatctacaattatcttaagataacaagccttattttatttatttattttatagagacaaggtttcactgtattggccaaacttgtcacaaactcctggcctcgagcgatcctcccaccttggcctcccaaagtgcagagattacagacatgagctatagtacctggccaaaaagcttaattttaaaacattgaaaagagaacaggatcttttggaaagctgaagaaataaagtctaggcttaaagttctaggacccttacccagcaccgtggggcagaactggcctgataagaaaatgaagctgtgggccaggcacagtggctgacgcctgtaatcccagcactttgggaggctgaggtgggtggatcacttaaggtcaggagttcgagaccagcctagccaacatggtgaacccccatctctactatacaaaaattagctgggtgtggtggtgggcgcctgtagtcccagctacttgggaggctaaggcatgagaatcacttgaatccaggaagcggagattgcagtgagccaggatc

SEQ ID NO: 44061 - DNA, 1057 bp, Homo sapiens
ctcttctcctggtgtaagacaaaacaaaaacaaaagacgttggagtagagatcagaaaagggtgggtttgagatgtttgggagggttgagtgggcattttgacaacttagcttctccttgggtggtatttagcagacgcccttgtggtttaaactgtagctttagatataaaatccactcttggccgggtgcggtggctcacgcctgtaatctcagcactctgggaggctgaggcagtcagatcacaagatcaagatcagcagattgagaccatcctggctaacacggtgaaaccccgtctctactaaaataataaaaaaaaattagctgggcatagtggtgggcgcctgtagtcccagctactggggaggctgaggcagaagaatggcatgaacccaggaggcggagcttgcagtgagccaaggtcgtgccactgcactccagcctgggcgacagagcgagactccgtctcaaaaaaaaaaaaaagaaaatccacttctaatgctacctggggccctgctgcttgatggagaaactgaagaacataaaggatcttgtttgagggtttttgttgttgttgttgttgtatatttgtttgttttgaggcagggttttgccctttcacccaggctggagtgtggtggcacaatcacagctcactgcagtctcgaactcctgggctcagatgatcctcctgcctcagcctcccaagtagctgggaccacaggcgtgcactgccatgcctggctaaattttgtattttttttagggacaagttttgccatgttgcccaggctggtcttaaactcctaggctcaatctagcctcccacctcagcctcccaaagtgctggaattataggcatgacccactacacactacacctagtttttgttatttatttattttttagaggcagagtctcactctgttgctcggccaggctggagttgagtggtgccatcatagctcactgcagtcttaaactcctgggctcaaatgatcctccagtctcagcctcccaagtagctggaaccataggtgcacatcacaatgc

SEQ ID NO: 44062 - DNA, 1098 bp, Homo sapiens
aaaatctcagctgtgcacagtggctcatgcttgcaatcccatctctttgggtggccaagggaggaagactgcctgaggccagcagttcaagaccagtgtaggcaacatagcaagaccccatctcaaacaaaacaaaacaaaacagaacaaaattagccaggtgtcgtggctggcacctgtgttccaacaacttgagagactgaggtggcaggaggattgcttgagcctaggagttaggggctgcagtgagctgtgatcgtgacaccgcactccagtctgggcaacacagcaagaccttgtgtcaaaaaaatttttttaattaaatataaaagagtttcatgacattcagagaccatccaaagaacctgtgggttccggccaggcacagtggctcacgcctgtaatcccagcgctttgggaggccatagcaggtggatcgcttgaggtcaggagtttaagagcagcctggccaacatggtgaaaccccatctcttctaaaaatacaaaaaattagtcaggcatggtggtgggtgcctgtaatcccagccactcaggaggcgggggcagcagaatggcttaaacttgggaggcggaggttgcagtgagccaaggtcgcaccattgcactccagcctgggcaacaagagcaaaactacatctcaaaaaaaaaaaaaaaacaaacaaaaagaacctgtggatgagttcccacatggcttcctaacgggctgcggctctcctaggagtctctcgctcatgggaaaggcacaaactgaatgtggaaggaaatcccattgctgtggaagtcccattgttaggaagctctgcttttctggagttcaaatttgcattcatgacgctttaaaccgtcagagctgggtgtgtcctcctacaacaaatcactttactctctctctctcctagttaacaggctttcaaatattagaacatccatgttctgacctcattaaaattgctcttttgtggaatgaaaagctctgatttaacccgtctttaagcctggtatgcatattcctctctgttccggccaccttgtctagacacactacactgaggcagtgcccatcttagatgatgttga

SEQ ID NO: 44063 - DNA, 1045 bp, Homo sapiens
cctcttgagtagttgggagtagagatgcctcccacatcgcctggctaatttttgtatttttgtggagaggggatatctcgccacgttgccgaggcttgaagccagatcaagcaattgggttccttggatttccgaaatagaccccaatattctgcctttaccccggaggatgcagatgtaccttctctcaggccgatgacctcaggcctccacggtccctggagctctaggaaaggtgggcgcgatctcgcgcccacacccagtgctctgggtcataagcctggatctggaaaaacaaatgcgctttgagaagacggggactccccaggatacccctctctcccctcgtccagcctccagcccacccgattcctccccacatcctccacctccccaggccccacccacctcctccaactcctccggggaaacccaagccctgcagcgcatggaacagaagaactggaaccgacgcttctggaacaaggctatctgagagcagttcttcctggccctcgggttcatgggacggcataactggaaccaatgcttagggcgcaagggtatgtgagagtgggtcttcccgtacaggaagtagaagatcttttgtttgggggcctcgtcgtcctcctccatgtcattggccagatagctgaggacagaaatcaggttgctgctcaggggcaccaccaggagagacctccggctgaggtcagcttcccagagaggaaggtaagggaccgtccctagctcaggactggcacccaccctgcagagagccacgccttcctcaggagggctctgctggacagagacctgatcaagggcatctcccactccttcaggatggagacaaaaacccaactggtgaccaagagtggtggcttaggcctggaatcccagcacactgggaggccgaagcaggaggatcacttgaggccaggagtttgagacaggcctgggcaacatagcaagacccttgtctctattaaaaatataaaaaatacgccagacgtggtggctcatgcctgtaatcccagcactt

SEQ ID NO: 44064 - DNA, 1111 bp, Homo sapiens
aataaataaatatatttaataaatatttaaataaataaatatatttaataaatatttaaataaataaaataatatttaaataattctttgcccatctttttcgaaataaatcaataaaatagatagtatatattagacatgttagtatatatatctaagacatgttaaaaatcacaactgaattctcacaattcagtcacaaacctaaacagcaaataaaaatttctatgaccagaatttgggggaactaccaatagctataaatagaagagattattatggaagtatcatagataaaaagagtgctcgcttcaggagcacatataataatacagagaaaaatttaaagataataaaagatttaggataaaaagaattctcacttaaaaatgaaaagaaaattatctttatgtatatataacaactataactctcatcaaaaaactctacaggaacagcatgttttcaaaagtacaacaatttccaaactatttgaaataaacctattaatgattcaatggccaacattttccaaacaaaccaataaaatgcatagtgtgcatgaagctatctgttacagtctgtggcactcatatttcacaaagaattctgtgccaatctgagcccctgcactgtgccttcaaatgctcctggactgtggcaaccaagtccgtaagaaacaggacctccaggttccgccccagggaggttggcattcagcaatataaaaagggaggtggtgccgcaggaaagggtggaactggaaacactcctggtttcttacttttctccaaggactcctagaagtaccccaccccacccctgctccttggaggacaacgtgatcactgtattcagctctgtcaagaatggtccaggttcttctagatgatctgcacaaatggctcctctcctccttcctgatgtctgccattagcactggaataaagttcctgctgaaaatccacatctcccctgggtccggtgttctggaagtgagagagacaatgtcacacctcaaggagacagctctctagacaggaaggttattcacgtcccatgtcaagtctagctagagttcagagcaattgagaagtgcgattttatctcc

SEQ ID NO: 44065 - DNA, 1028 bp, Homo sapiens
atcctgattttagttggattaaagaaggaagagcatatttttaagtctcttatttcatttttttcctctcacaggtcaatgtctggtctgggtccagtgttccttcccaaactgtgggaaatggaggcggctgtgtgggaacattgacccctcagttctcccagataattggtcctgtgatcagaacacaggtagaaaagactggaaatgttttcattcatgttttattgttcctccctttctttctctgcacttatcctttagattaaatactacgtaaatatagttagcactcagtgtccttgtagtgcttgggagagaggaaggatctgcctctcatatggagatgaatctgggcagaaaaggctggaggaagatgccctgtaaagtgatcttgttggggaggggcctggaatctaaatacatgagcattggtctgcccctgtcaatcctgattaaaatattggtattgggttggtggatagggagggatataggatatatcggggaaaacagacgagagagatctggtgcgcttagaattctaggctgtttggaactagttggaagagatgatgatgatcttgtccagcccaattattttacagatgagaaaacagagtctcagagaaattattcttatggtgctccatagacaggagcacagtcagacacgcgggcatgcaagcaggagtgtggaatctcttcctggagtatgaggaggcaccattcctactgcctccagctgcatttcagctggttccagctgcatttcagctggttccagctgcatttcctccatgggtctttattcttcctctgtgctgatctcccaggtgcccctttggtcccacctgctgcatataccaatttccttcttgttctctccccagctctcatccagctctttctcttaaagagtctcttcctgtcccttcattccttctctctttcagcagatgtgcagtataatcgctgtgatattcctgaggagacctggacagggcttgagagtgatgtggcctatg

SEQ ID NO: 44066 - DNA, 1039 bp, Homo sapiens
acaattgcctgagatgcctgaacccagccttggggaatctcacagccctcacctacctcaacctcaggtagggaggccgagccagggccacgtgggagcgtgtgcttctcagtctcaagtactactgagtgacccacccagtgaccccgagaggatggcagtgctgggatgccatgcctggggagccagtccgctgcctttctcccttccacagccgaaaccagctgtcgctgctgccaccctacatctgccagctgcccctgagggtcctcatcgtcagcaacaacaagctgggagccctgccccctgacatcggcaccctgggaagcctgcgacagcttgtgaggatggggacgggaccaggaaagggacccctgagccaggcagcgggaccttctagggggaggttggggagggcctggagcaaagacagagatgggagggtgggttctgctgggcctggtctcatggccccttcccactgccttcctgataccaggacgtgagcagcaacgagctccaatccctgccctcggaactgtgtggcctctcttccctgcgggacctcaatgtccggaggaaccagctcagtacgctgcccgaaggtgagaagaatgaagaactggagaggaggtgtttgtatgtgcgtcccagttggctcaggctgcggtaacgaaaacactgcagaccgggtagcttatacatggcaggcattcatttttcacagttctggaagctgaagttcaggatctgggtgcttccatggtcagcttctggcagggtgcttttcctggctgcagactgccggctccttgtggtactctccgatggcggagagcagagacagccctctggggcctctttgataaaggagcacaaatctcactgatgagggctccaccctcatgatctcaattacttccctaaggcctcgcttcctaatcccatcactttgggggttaggatttcagcagaggactttttgggtgacacatttcagtccataacagtgtatgtgctttgaagaagttacaggcca

SEQ ID NO: 44067 - DNA, 1022 bp, Homo sapiens
cagtcccagcctctcctgtgatggcaacagctcttgtggccctcacctcacctgtctccctttgccacctaaacaagcctccccatccgcttttctggggtgcctttgtttgagccactctgatcttctgccatctgtagcagcttgggggcctgggcactgcccccctgaaccagtgggtgtctgaggctgggccactgtggggcgggccagacaagagtgggggcggcagcagcggcctggggctctgggaggacacccccaagagcggcgggagcctggtccgtggcctcggcctgaagaacagccggagcagcccatctctcaggtgggcgtggcacctggaggctccgggatggccctgagggggaaggtggcagacccccccaacccctgccagctgatttccaaccctgactcaccctcccccttcagtgactcatacagccacctatcgggtcggcccattcgcaaaaagacggaggaagaagagaagctgctgaagctgctgcagggcattcccaggccccaggacggcttcacccagtggtgcgagcagatgctgcacacgctgagcgccacgggcagcctggacggtgggcgagcggctcccaggaggtgggcgggacctgggtctccagacccggccagggggccctgacagccttcgctcatcctgcagtgcccatggctgtagcgatcctcaaggaggtggaatccccctatgatgtccacgattatatccgttcctgcctgggggacacgctggaagccaaagaatttgccaaacaattcctggagcggagggccaagcagaaagccagccagcagcggcagcagcagcaggtgaggcagccggcaccagcagctggggtgggcttgcctggtgcctcctgaccttcaccctcctctccgctgccttaggaggcatggctgagcagcgcctcgctgcagacggccttccaggccaaccacagcaccaaactcggccccggggagggcagcaaggccaagaggcgggc

SEQ ID NO: 44068 - DNA, 1083 bp, Homo sapiens
tgtggcccaccatctccactgtcccatttgcagccgccagctcccacagtgcgcgctccgagaaaaggcagctctgggggacctgacaccgccaccaccgccgccgccacagcagcagcagcagcagctcacggcattcctgcagcagctccaggcgctcaaaccccccaggtgcgtggtgcgtgcgagccctcaggatacagggtgggggggggatgggggcagaccagagatggatttggggtcctaagaatccacaatttgctcctcagaggcggggaccagaacctgctcccgacgatgagccggtccttgtcggtgccagattcgggccgcctctgggacgtacatacctcagcctcatcacagtcaggtgtgtggcctgactggtccccacccccaaggcagtctccgggtgaaatggggtctggggtctgctccccacccccacacgcccctagctgccattctggctggggagcccactgctgcggctggactagatcagtgggcccaagtgcccacctgcagccgcctctgcccccctgccccctgcaggtggtgaggccagtctttgggacataccaattaactcttcgactcagggtccaattctagaacaactccagctgcaacataaagtgagtgggcatcctggggctgaggccctgggaatgaagggtggaccgaggcaggccccaggctgtcccctgcagctctcccctctgatgggccactggtctcagttccaggagcgcagagaagtggagctcagggcgaagcgggaggaagaggaacgcaagcgtcgagaggagaagcgccgccagcagcagcaggaggagcagaagcggcggcaggaggaggaagagctgtttcggcgcaagcacgtgggtgctcccaagcctcagctggctgggtggacaaccctcgccaggtcccctcaccatgtccccctcttaggtgcggcagcaggagctattgctgaagttgctacagcagcagcaggcggtccctgtgccccccgcacccagctccccgcccccactctgggctggcctggccaagcaggggctgtccatgaag

SEQ ID NO: 44069 - DNA, 1719 bp, Homo sapiens
ttcattgtgcgtctggcctcttctctaggccgcggccgtggtgacagctgcttttaccaaagaagcatcgaagaaggcgatggggcctttggacgaagcccccgggaaatccagcgcagccagagctgggatgacaggtggggcggggagggggcatggcgcagagccgggcaggccagggaggggaggcctgggccctgtcgctagagggtaacagaggcccaccagataagccctgtccgagatcccggtgctcctgacccctggtttcgtttgtccccttcctccctccactgcctcagggcacagtggacaaggcatggggcggttgcacagggtggcaggggaggctgtactgtttctgacccacacgtttcccctgctgcagaggcgagaggcggtttgagaagtcagcaaggcgggatggaggtacgaggctgctgagggcggcggccggggcggcagggaggaccaagatgggtggcccagtctgggggtgcttatttcggaggtgttgggggcaggagggcctggagctggcccccccaacgtttcttgagggtccaggcaccacgctgcctttctaataactgcccctgtcttcccgtctcccagcacgatgtggctttgaggagggaggggctggcccaaggaaggagcacgcccgctcagacagcgagaactggcgctccctacgggaggaacaggaggaggaggaggagggcagctggaggctcggagcagggccccggcgagacggcgaccgctggcgctccgccagccctggtgagattggggcctggtagcattggcgggggcagtggggagcaggaactgtaatgagagggtgggctcctgtagccacggggagggagcagaggctggctggtgtgggagtggccgggacagcagccctggaggtgctccgtgagctgcagcagagggggccgctggcttcgcttgggtacccactcttcttctccctgacttttcctgtgcagatggtggtccccgctctgctggctggcgggaacatggggaacggcggcgcaagtttgaatttgatttgcgaggggatcgaggagggtgtggtgaagaggaggggcggggagggggaggcagctctcacctgcggcggtgccgagcgcctgaaggctttgaggaggacaaggatgggctcccagagtggtgcctggacgatgaggatgaagaaatgggcacctttgatgcctctggggccttcttgcctctcaaggtatctgtgaggaggcgagggtgggaacctgcccttccggggtcctcttcctccccacccaccccagctgttctctgctccccaccccggccccatgcagaagggccccaaggagcccattcctgaggagcaggagctggacttccaagggttggaggaggaggaggaaccttccgaagggctagaggaggaagggcctgaggcaggtgagccgcggggtgcccagcgggcctggggctgggccgggcaggcactggtgttctttgccgggctgggcattggctgcccacctacctgtagaatcaggctacttagatctggaagaagagtgctgagaggtggggaggaaccagggggtagcagagccatgtcttcaaggcagtgtaccagatagaaatcaggcgtaatcaaaatgacctttgaaagtcccttgaagaagctgtagaacctggagtgacgtctgc

SEQ ID NO: 44070 - DNA, 1007 bp, Homo sapiens
ctggggctgatggcctttcctcctcagcaccctggttgaacccgcttcctcttctttcccagactgtggcgtcctggagttgatgggagctgcagcaccaagccgggccagcctccctcccagccagtgacaacaccgcagcacctggaccccgcccacccgcttgagtcctctgcctggggccccagggatgcgcctcctcctgaaagtcccctccatcctcccttagaggaacaggctgccgccgcgcccccatcagcctccattgccctgaccttatttccacctgatggtgccagaggctgcttcccagctggtatcctgagatcctcgttcccttggtggcttggttgtttaagcctccattattgattgggggcggtggtctgggtgtgattcctgtgggggaaaccagcccgaggtgccttggctcaggcttgcctgcctggagtccttgtcgtgtacccgtctgtggccctagagtcacctcctgctccttttcactgggtttctccccagaccaagcccctggatttgagcttctgagcagccaactgatttttttcatgagggaaagaattttgctcctagatttatttctaatccttttctccgtaactgaccttttctctgtaagctatttgtggctctagtgggtttttgtttgcttgcttgtttttgttttatctttgccctgaacgtccatcctggcctcggctgcctccctccccgagttcttcactacacctcctgtctcagcctcccagagagggtggcgagggtgctgatgcccagagacaccatccggcgaatggacctctcctgtcatgcggggcagggcagggctgccggcagagccatgtcctgaaccctccctcctcccccctgctctccttaagggtctttcccagatgtgaaggtccctcccaggctctactgaggtcagaccaattcccagtggcttgggtaccctcgttcactccagcaccagcccctgccctccttct

SEQ ID NO: 44071 - DNA, 1404 bp, Homo sapiens
atcctagtgctaggaactaggagatgctacataaagacttgttagctggattggattttttttttccagccacccaagccttacttccctcctgcctctcaaagtgtcgttctggaagatcgtcagctttcccaccctcttgtgcactgcctcttcgagtctatatagaagtttcaatttagaaccccgccaacccctcgcctttggcatggaaacaccatcggtggtaccagtaagggtctctcctttgctgccgacatgggggatttggggttctttctccttcccatctttcctgtgccctttgcagacctaggctagccaccctccaccaggctagccagctccaatctgattttcttagattgtaggtcttggtcccccagcggtctgtcgtgccattgggaaggatttgagggtagacctggccttggtgtccctgccattgcctggggaccaggggccctgagggtcccacgtggtggttagtcaagtggaccatgtgcttaaacttctggactagctttttctgctgttggacacatcagtcttgtgttcgtgatctgatgcgttagccctaacttttacatctgctattggaatttgggaattaaagaaaaatagcccactttagaggagagaagatgagaggaggaggctagatgaaggatgttgaaagtctaacaaatgtaaaatggcttcaaactcacagaataatgcttgcgagtttgggatggttactgctaccgtgcgcacctccagtcttgcatagtgtcaaggatgtcggggcacgctgtcggagcagcttcctccttcttttccctggctggagcccaaggctgggcaagtgggcaaaagggatcacaggaggtaaagagtgaaaatcctttgaaaactgttaacttgtagacaattgccaagcggtggtgtgatttgctgggatggctcagagaggagagagctgggataaccgaccagccgcgaagaatgcgggtttgcatctcttttttaagcctcagcgtcctcaccctaccacgcttggagaatctccatcctgagaaagggccaggtcccctccagcaggcctggggctgggcggttgttccagtgttgaggaattggggactgtgcttctgtttaagtggctctgttctgtgccaaggcacagtgctctgtgttggagctaattttaggggtgatggagtgaggagataatgttcttagctgaatgtgcactgggaccgcctgttctctgtcttttctttctctcttgagttctgagccccagagagcaggctccctttcccgcgcgccctggcgcctactggagcacccgggcccagcgtgtcctcgccccttgtctccggcagggggcagtctttcaaaagcattgattcagatgct

SEQ ID NO: 44072 - DNA, 1068 bp, Homo sapiens
cctcttcctctccacccagctcttcctctcccacttcggccttttctttctcacactccatttccctctacggcaatctgtgcagcctcttcccccagtctcattttgcgggcttttctctcttttctttccttccctggcacccaagccaaaggccctgcctctggcctccagccctacccccttctgcggttgcacagaaggatggctgcccagctcttaaaaaaactgcccgggaactgttgacatctgttctccctcccccgctggcttttctgattggcttacaatcctgaggctaggaccgtctcaggagccaagagaggagagcggccacagggaacctagggtctcaccaagctctcctttccttctgcagggacctgctccgaatcggagtcactctggcgggacaccagaagaaaatcttggccagtgtccagcacatgaagtcccaggccaagccgggaaccccgggtgggacaggaggaccggccccgcagtactgacctgcaggaactccccaccccagggacaccgcctccccattttccggggcagagtggggactcacagaggcccccagccctgtgccccgctggattgcactttgagcccgtggggtgaggagttggcaatttggagagacaggatttgggggttctgccataataggaggggaaaatcaccccccagccacctcggggaactccagaccaagggtgagggcgcctttccctcaggactgggtgtgaccagaggaaaaggaagtgcccaacatctcccagcctccccaggtgcccccctcaccttgatgggtgcgttcccgcagaccaaagagagtgtgactcccttgccagctccagagtgggggggctgtcccagggggcaagaaggggtgtcagggcccagtgacaaaatcattggggtttgtagtcccaacttgctgctgtcaccaccaaactcaatcatttttttcccttgtaaatgcccctcccccagctgctgccttcatattgaaggtttttgagttttgtttttggtcttaatttttctccccgttccctt

SEQ ID NO: 44073 - DNA, 1069 bp, Homo sapiens
caagaccctgtctcaaaagaacagtggccaggtgtggtggctcacgcctgtaaatccagcactttgggaggctgaggcaggaggatcgcctgaggtcaggagttcgagaccagcctggccaacatgggaaaaccctgtcgctactaaaaatacaaaattagctgagggtggtggtacacgcctgtaatccgagctactcaggaggctgaggtaggagaaccagttgaacccgggaggcggagtttcagtgagccaagatcgcaccactgcactccaacctgggcaaacagagttggagagtaggaggcttggggcctgagctagggggaaaaagcagaggcaggtgggggactggggggcagtgtgctgggtctggtgagtccctcagtgagtcccccagctcaccttttctcctttttctgcagggaggaaagattcccatccgatggactgccccggaggccattgccttccggaagttcacttccgccagtgatgcctggagttacgggattgtgatgtgggaggtgatgtcatttggggagaggccgtactgggacatgagcaatcaggacgtaagtgtcccgtggtcctaccaagctttcctcgagtgttctctcacctgggatttggggtgaagggtgggttcccagagagtcatcactgctgggttcttgagaccatggagatgacaaaaaggagaattgatctttgtatcaaagagttgagatacagggccaggcctagtggctcaagcctgtaatcccagcactttgggaggccaaggtgggcagatcacctaaggttaggagttcaagaccagcctggccaacatggtgaaaccccgtctctaaaaaaatacaaaaaattagcccagcatgatgggcgggtgcctgtaatcccagctactcaggaggctgagacaggataatcgcttgaacccaggaacagaggttgcagtgagctgagatcacgccattgctttccagcctgggcaactgagcgagactctgtcttaataaataaataaaagagttgggtacagcatatttgggtcgcagaaggatgc

SEQ ID NO: 44074 - DNA, 1033 bp, Homo sapiens
ggctgaatggacagtgtgggggcctgcagaaagtgtgccctggggaaggtggagggaagattctggaacgggaaccaaggaggtccgggagggtgagctgggaagaacacaacagtccgctgggtcctcagggagtggggacagcagcggtgtgcctcccccccgccggcaggtggacacggtggccgcggagcatctcacccggaagcgccctggggccgaggccaccgggaaggtgaatgtcaagacgctgcgtctgggaccgctcagcaaggctggcttctacctggccttccaggaccagggtgcctgcatggccctgctatccctgcacctcttctacaaaaagtgcgcccagctgactgtgaacctgactcgattcccggagactgtgcctcgggagctggttgtgcccgtggccggtagctgcgtggtggatgccgtccccgcccctggccccagccccagcctctactgccgtgaggatggccagtgggccgaacagccggtcacgggctgcagctgtgctccggggttcgaggcagctgaggggaacaccaagtgccgaggtgagagctggagcttcccctgcgactgctgctcatccgggggagagtcctgaactccactcaggacccacttcttaagtttccattttgtatagttagatgttgaaatggaggcttgctctgtcacccaggctggagtgcagtggcacaatctctgctcaactgcaacctttgcctcccgggtccctgttcaagcagttctcctgcctcagcctcgtgagtagctgggactacaggcacacgccaccacgcccggctaatttttgtattttagtagagacggggtttcgccatgttggccaggctggtctcgaactcctgacctgaagtgatttgcccgcctcggcctcccaaagtgctgggattacaggcgtgcgtcaccacacccagctggaaaaaaaaaagactttattttcacctgaaattcattaatttccacttgaaattccacctgcagttgtagc

SEQ ID NO: 44075 - DNA, 1077 bp, Homo sapiens
ggatggaggctgtggtgagctatgatcctatggctgcacacccatctgggtgatagagcaagaccttatctcaataaaaaaaaaaaaaaagaaagaaagaaaaggaaggaaggaatgaaggaaggaaagaagggagggagggagggaaggaaagaagggagggagggaaaagaaggaggctgggcattgtggctcacgcctgtaatcccagcactttgggaggccaaggcaggcagatcacttaaggtcaggagttcaagaccagcctggccaaaatggggaaaccctgtctctactaaaaatacaaaaattagccgggcgtggtggcaggcaaccgtagtcccagccactcgggaggctgacgtgggagaatcacttgaacctgggatgcagaggttgcagtgagccaagatcacaccattgtactccagcctgggtgacagagcgagactctgactcaaaaaaaaaaaagggaagggaagatgttggggagagagagaaggggcacagtagaaagagggtaggatggatgaactcgggatccagtgaggtagagaactgttgggctcaggcctgacagagactttctccttgactaaattttagtcttctctgggtcctctttttttttttttagacagagtctccgtctgttgcccaaggctgtagggcagtggcgcgatctcagctcactgcaccctccgcatcccaggttcaactgattctcctgcctcagccttggagtagctgggatgacaggtgtctgccaccatgcctggctagtttttgtatttttagcagagacagggtttcaccatgttctccaggctggtctcaaactgctgccctcagttgatccacccacctcagcctcccaaagtgctgggattacaggtgtgagccaccgcacccgccctgggtcctcttcttgactgggtctcaatgttgtgttccactccctccacatcccactgccttgccaggcctgcctagcccagtttagagtgaatctgggaggttgagggtgcagtgagctgtgatcgcaccactgcactccaacctggttgacagagcaag

SEQ ID NO: 44076 - DNA, 1031 bp, Homo sapiens
agaactgccttgagcccaggagttccagactagcctgggcagcatagtgagaacccgtctcagcaaaaaacaaaaacaatgccatctggccattgcttttcaatttgcagaacatttctgtacccattgcctcacaataagcctttgaggtagggtgggtattgcttgttttccagaggtaaaacaggcccagaaaggtcaggtggcttgcaagaggacaagcccccagtgagtagggtggtgctagcccgggggtctgcctggcttcaggaaaggacgaccctggactcccatggcccagctgggttttcaaggtttcaagggtgggcgggatttggatggggctccatctgggtgaggagatgatgggatgaaggccctagaggtgggcatgaactaggtagatctgggaccaaagagagaagaggcaggaggaggttgaggtagtgtgagatgagctgggtgggctggacttggggcctaagggctaccctgagaagttgaccccaggaaggaggaaggcttataaactggggtggggagaaaggaattgagtgaaattgctgctctgggacttggtgcccccgtcctactctgggcagcccctgcctgcctctcccctaagccccctcccccactatccctccccctggactggactggggtcgtcctccggtccccaggtatctgcgggatggtggccatctcctggtacgccttcaacatcacccgggacttcttcgaccccttgtaccccggaaccaagtgagtgaggaaaccccccaccccccgccctcggggcagcgggtgggactcagccctgccccccggctggcgtctcacttgtcccccgcccccgcgccgcccttgtgcgcaggtacgagctgggccccgccctctacctggggtggagcgcctcactgatctccatcctgggtggcctctgcctctgctccgcctgctgctgcggctctgacgaggacccagccgccaggtgagcagggtgaggcgcaggctggggccgggcggga

SEQ ID NO: 44077 - DNA, 1044 bp, Homo sapiens
aggcgtcttgcaagttgcaggttgagcgtccgctgtaaggaggcggtgtgtgtgcaggtgtgtggggcttccaggacagtgtctttctggggtcttagagggctggagccaacagctctttgggcccagggcagttctttctgtggctgcggcaccttcccgctccctgctccccgctaagatgaggccgccccattgtttctccggggcagtctcccttccgtctgccctatgccagagactgagcgctggcgaccgtgaactgtgtgtggtgccgctgcacgccctcctgggtccttcagggccagtccactcaccaggcaccgtgtggcagggaaggagccgagggcgacactggctgtgaagcggggcttgagagctcacccccggggatgttggagctgctctgagcagttagggggcctgggtgggtctcctgtgcccccactactcccagcccctcctgaggcagcggcagaggcttcctgttttcatccatctctctaggactgactgtatgcagggccggcgggccccccccccaaaaaaaaccctataaaagctgagtacaacttgggccagaaccccagagttctgagtgtccagaagggacactggaggcagcccctacacccacttcccagacacatcatgctgtgaggagggggctctgctgtgagcctgcacacctgagaggggcacccctggcaactgcatgaaagatggtgccagagtccccagggcacaggggtagagggtgaccaggttccgggccttgggctaggtgcttctgcctacatttttccacagtggggaagtagggggaaacttttacagaagcaaggtgcagcaccccaccctgaatcacacaggcaggagaggggagccggcattcagactccacggctggggtggtcctgggagagggacctgactgcgtctcccaaccgtgcaccccagcccctggccacgcagcccatgtgcccctgggctcttccataatctctccattgactgctagagccacctggggactcagactcg

SEQ ID NO: 44078 - DNA, 1031 bp, Homo sapiens
cccctttgttcagccccgctcttccccacgcctgggcactttggtctctctgtaaatgaacccctccaggcagcccctcagccccaccccttccagttcttagagccccttgccctgcgactccaggtaggggtgtgcctctgttgaggggcagggctggcggaaggggacggtcagggtttccgcaggggccgggctcctgacactgtccctttccttccccagatggactcgtgggcatggccatcgtgggaggcatggccctgggtgtggcgggactggccggactcatcggacttgctgtgtccaagtccaaatcctgaaggagacgcgggagcccacggagaacgctccaggagggcctgtccatcctcgctgtcctttccctgttctccccctgccccccgtctctatcctctgtggccttcagctaatttctgctcccctgagattcgtccttcagccccatcatgtgctttgggatgagtgtaaataaaacggggctgtggcttgggaacccccgtgtctgcgttgaggggaggggtgggttctgaacgctgggcacagggggcggagacgtcactcctggtcctctcctgcccctgccctccaggttggcacggggttctttgtccaccccgcagcccagagcccacacccttccttcctccctttcctgaagccatgtccttgagagtgccgggcagctcggagacatggggcttttccatggtcccagagtcctgggagaaggcagtgacctgagcatgggcgggcagaacttcggggccaggccgggcttcaggcctgcattctcctctgacccactcagctacttctgtggagttttccacagcaggcccccttggcttcctcctccccaccctcccctccctttgtcttcctgtggcctccccttcctcctacctcctcctctgggggagggggagcccagtaggggaaggaatcctgcatctggcatggagtaggcgggggtcccgggagaggtcagagcccagggagccccagct

SEQ ID NO: 44079 - DNA, 1054 bp, Homo sapiens
gtttttgaaaatataaaacaaagataaactggcatcctcctaatgtatctttgaaatacacattactggccaggcgcggtggctcacgcctgtaatcccagcactttgggaggcctacgtgggcggatcacgaggtcaggagatcaagaccatcctggctaacacggtgaaacgctgtctctactaaaaatacaaaaaattagctgagcgtggtggcgggcgcctgtagtcccagctactggggaggctgaggcaggagaatggcgtgaacccgggaggtggagcttgcggtgagccaagatcgtgctactgcactccagcctgggtgacagagcaagactctgtctcaaaaaaaaaaaaagaaagaaagaaatacacattacttcatttttctcagacctggagaaaaagcacccccagccccattttcccatctccaaataatcttcagcatttgtagagatgtggcccctggaagttcatcagatatatggggcccacccacgcgtgtgttgcgatgatattagaatttgcaactgccagattctggcaccaaacccagcacctctcaatactgtcctgcaccccacatattgtatgattttttgtttttttgttttttttttttgagatggagtctcgctctgttgcccaggctggagtgcagaggcatgatctcggctcaccacaacctccgcctcctgggttcaagagattttcctgcctcagcctcctgagtagctgggactataggcatgtgccaccatgcccggctaatttttgtatttttagtagagacagggtttcactatgttggccaggctggtctcgagctcctgacctcgtgatccacccgcttcagcctcccaaagtgctggaattacaggcatgagccaccacacccggcttgtatgacgttttgaagggcaaagccaatgcaccattgatgtttgcctgttgcttcattcactcaatagagatgtaaggaatgaaagctttgattggggtgaaagaagtaaaaaagtttaaacccctactttaatgggattaatgc

SEQ ID NO: 44080 - DNA, 1050 bp, Homo sapiens
ctccttggctgggcacagtggctcatccctataaacccagcactctgggaggcccaggtgtgtggatcacctgaagtcaggagttcgagaccagcccgagtaacatggtgaaaccccaatttctactacagatacaaaagtaagccgggcgtggtggcaggcgcctgtaatcccaactactctggaggctgaggcaggagaatcgtttgaacccgggggttgcagtgagcctagatcacagcctgggcaacaagagtgaaactctgtctcaaaaaataaaaataaaaactccttaatcccatgctccctggaccccagaccaggctgtgcccactgcactagagcaagacagtgaggtcgtaaccaccccagtgatctcagggtgcccatgacctatactgcaccacaccgggttccaggccacctcttggggtcatttttttggtttccttttctgcctttcagcaaagacctttatttgcactcattttcacagagtggaaaaactgttttggccaactttctgacagaatcttctgacatcactgaatacagcccaacccaaggagtgaggtgagccctgacaaatctgtgtcccagagtgtccaactggctcggcagggaggctcattcctctaatcccagtgctctgggaggtcaaagcgggaggatcgcctgaggcctgggcaatatagggagaccccgtctcaactaaaaataaaacattagccaggtgtgttggcatgtgtctgtagtctcagctacatgttaggttgaagcagaaggattgtttgaggccaggagttggaggctgcagtgagctatgatcgtgccactgcactccagcctgggtgacagagtgagaccctgtctcaaaacaaaattaataataaaacaattttaaaagactgcccagccatcacccacttcctacttttgttgctgttggcattccaaaagtgtaatgcagcctcattattggtgctgctactgttcgtcttttttttttgggatggagtctcgtcctgtcgctgaggctggagtgtggtg

SEQ ID NO: 44081 - DNA, 1089 bp, Homo sapiens
ttgaggcaggagaatcgcttgaacccaggaggtagaggttgcagtgagccgagatcgtgccactgcactccagttctggtgacagagcgagactccatctcaaacaaacaaacaaacaaacaaaaagtattattattattttcaagatggggtctcactgtgtcacccaggctggtgtccactagcacgatcttggctcactgcaatctccacctcccgggttcaagggattctcctgcctcagccacctgagtagctgggattacaggcatgcaccacgacgcccggctagtttttgtatttttaatagagacggggttttgccatgttggccaggctggtcttgaactcctgaccccaggtgatcagtccaccttggcctcccaaagtgttgggattacaggtgtgagccaccgtgcctggcctggtttctagactttctttagcatgggggaacccttagagtaccgccaggcctcggggttggtggcagagcagagagggacatggggtgggagttgagtgacagcccagggtatgaggattgaggggtgatgctgggtctggaaaggtgccctgaggacaagagtgaggagaagggaggttgggacactgaggagctcaactgaacgctcagctctgtagggaagttggctgccctcctaggtgaccctcacgctggtgataggcacgggccaacccctgggacaccggggtggcatcagcaaagacctaaagagattagggtgcacagattcaaggtagtcaggcagtttggggcctcctggaagcagctgaggagatgggagtgcaggaggtgctgtccagcctcgggctggttccttaactttgctgagcctcctttgtaaaatggagaaggaaaaacatgttgtacaaacccttctcttttacaggggaggaaagtgagaaaggaaaccaatcaaattcgtgttagctcaagagggctgcgggccttccccggtcagcctggggcagaggctctgcctgcacctccccctagactccagctgccttccacagtgtcctgaggggaggaatgagccatcagagggtctcctgagggcacac

SEQ ID NO: 44082 - DNA, 1063 bp, Homo sapiens
gcttcagccttcctagtagctgggactacaggcccacgccacgatgcccggctaatttttgtgtttttagtagagatggggattcactgtgttggccaggctggtctcgaactcctgacctcaggtgatccacctgccggcttcccaaagtgctgggattagagacgtgagctactgcgcccggccttacattcaccattaagtgcacattctgtaaatgaacgagcagcagattccagcacagtaggcctgtgtgttattcatgctgaggggcattgaaaagcagtcaagattagctcccctcatgccacccgtttgtgacctcagtgccacctgggcctctaagatgtatgtggcagagactagaacttctatttaacaagagaaagaagtaggagttctgtggctatccagtgcccctaatgggcaccctgcattggttggtgggtgtttgtttataccagtgaggtcctagccaggtggttggtcagggatgtgtctgccattctggcccagggacttgtcattttactgtagacttggctcttccctctggtgccaccagcgaagccaggcttttccccgtctgtgagtggggtctgcccagtctcctggtgtgggcaggcgcagggatggaggactcctgcccggagcccagccagtggggcacccaagctctcctggggccctgctgctcccctgctcttgagctcagtgttgccacctatgcacgggtcccccttgtggtgctcacgccactctgagccgctctagaggagacccctgcgtgcccagggcacagtacgcgacgcagccccatggcacaaggcccagtgtgcgtggccagccgctggcagctgtgctgctcggagggcagagttccatttgcattccactcactgccggcagctggccctcctctcctgctgcctttatttgctgcgtggaggctctttgtgggctttttgggtctgagtcactgaacactggctggacattcactgcctgggagatctctttgccagcactgcggtgcccggtgggaagaggttgctggaatctg

SEQ ID NO: 44083 - DNA, 1022 bp, Homo sapiens
catgagtcaccccaaaggtgcatgggcaggcaggtgctggggaatcggctactccccagagcttggcgtggccatccctgtggcccctctgggagtctggagcccattccctcacactggtactcactgcagctggggacatctgcactaggaagacaggacacggcatggaagctggcctctgcccagaagccatgacattctggtcaccagcctgatgctataaaacgagtgtcacggccgggcatggtggttcacacctgtaatcccagcactttaggaggccaaggcgggtggatcatgaggtctggagttcgagaccagcctggccaacatggcgaaatcccgtctctactaaaaataagaacattagccaggtgtggtggcacatacctgtagtcccagctcctctggaggctgaggcaggagaatcacttaaacccaggaggcggagattgcagtgagccgagaccacggcattggactccaggctgggcaacagagcacgactccatctcaaaaacaaacaaaaaaaaagagtgtcacctggggctacttggccagacacagagagcaaggagacatccctattatctgtcaaaaataattgttggggctgagcacagtggctcatgcctgtaatctcagcactttgggaggtcggggcaggaggacttgaggcctagagtttgagaccagcctgggcaacatagcgagcaccccatctccagaaaaaatttaaaaattggctgggcgcagtggctcatgcctgtaatcccagcactttgggaggccgagggggatggatcatttgaggtcaggagtttgagaccagcctggccaacatggtgaaaccccatctctactaaaaatacaaaaattagccgggcatggtggtgggcacctgtaatcctagctacttgggaggctgaggcaggagaatcgcttgaacccaggaggcggtggttgtagtgagctaggatcatgccattgcagtccagcctggacagcaaagctagact

SEQ ID NO: 44084 - DNA, 1059 bp, Homo sapiens
gcttcagccttaactggcgtgagccactgcacccagccagttacccatgacttctaaacactttaacactctttgcatatatgctgttatagtagctgcctcgtgtaatataagcagattaaggatgtccttaacttggcaatactctaaaattgcatatatggcaacatctaatttatctagggaatgatgagtgcatttcctacatatatttaagcactaaaacttaaattactagttttgatggaaacgagtttcaagcattacataatatgtacattgcctttcaagtgatccgggtctttactttgaatatattctattgttgtatatcatgaaactgacccctttaggaatttacgagttgtgtgtggctagctgcctagaccctaatggatccagaatgctcggagtcttctgcttttcccatttactcatattgatctctgatctgctgttttgctttatatgtagttgttttgtcccatggttatggggcatttttatctcccttctggactaaagtgcttggactgtgagctctcagtcactcagaagcctttcagacctacctccagggttatcttccagatggttgaaacagcgaagaattggtctgtgaagaaactcagaaagatactgctaaatctaggcagattaaagacagagggtctactgccaactctaacatatcagaattctcactaaacgcaaacatcgccctccacactaaagttatagcttagcaaataagttactgacgtagggtgattctgtgagtgtgtactgttagcccagacttgtacagcatgggagaaagagaatttaacaaaagaagttatttttcaatgggaaaaaagctcatcattttgaaatctcttaaaataatttaggaaattatttcaggggaaatttcttgacttagggtataaagttaaattttatttgtaatataattagtgatcttttttctttatatataaaatagactaaaagtaaattcctgttatcaactatccattactaaggggttagctctaggaatattggataaccagc

SEQ ID NO: 44085 - DNA, 1026 bp, Homo sapiens
tatccagaggagatgtgtgaatagggagatatggaagttgagaggcaggagtaagtgcttctagctgtgggactcaagagatggcccgaagggataagggggaagataatttaacctgagaaatgggatgagtaccgtgcagggttcttgagctcagtctaggagtaggaagcagtctccatgtaggtgggacacagcacatgtggaagaggagcatgaaacgcccgagagaattggggcagtccctgggcagctcactgctgggctgaggaggtgagacagactttgtcaggcagtagagagccagtggagattttgcagcagaggagacttaagttataccttaagttggctgtttttgaggtggctcttgtgcatggattgagttgacaggcagatagttgagcaatctggagagctttgaatgtctgaatatttcttagcatcttaactaggttagtagctccacggaaatgcaaaagattggtaacattggtgcctggtttgttgtcagggttggaactttcttgctttttcttttggactacttgtagagtgcttattatgtcccagccactcgtaattctatcctcacaggaatgaagcataggtacaattattacacctgttttccagatgaggaaactaaaggtttaagtggctaagagaaacctttttgtcctccacctgtgctgctccttctcttcctgtccaggccttcttcccattcagactcactctctcattgacctctcagtttcccttcaccagcatctccccatctgccctcttttgtctgtgtctaccggtgtatcctttgctcaggtcctcatctcttcatatcttggcaactgttgtgacactctccatgccatcatttggactctagaattgttttatctaaacataattgggtcatgtctgtgtgtatgtgtgtgtgcacatgcatgcatgtgtacgtgtgtgtgtgcacgtgtgagggcaaaaagatacctcctaggcctggcgtggtggctcacacctgta

SEQ ID NO: 44086 - DNA, 1050 bp, Homo sapiens
agtatattggtttgaagggctgtcagatcgcagagagtgttttaaggtctaggagttttaaaggctgaggggaaggatcaagggaagaggatgagattaagattccaagagaggaaataattagtggagcaagtcttggaatatttggaagggtagaattaaaggcacaaatgtgagaagctaactgtggaaaagaggagagagaattccttttctgagatggcagggagtagaaaagcaagaattactatatggagaaatgttaaagtggagatgaaagaagctgggagtgctggcgtctaatggtctttgtttcagtgaagtatgaggctgggtcaccttcagaggtgagattgataggatgctggggtccaggggacatgcttctgtcacagcttggaaagggcatgtgataagcccttcaagcatttagaatactggcatcattacaccttatcatttttttcatatgtggtatgtgggttaagggagggagtgagagacagaaagattttgagcatctttggaaagctggatgaatttggtactatatttgaccttttccttatgtatcatctgaagagtttttgccagtgtatataattgttaggagaattagaaataggatacaaatatagttgaacaggatagtctgtatattttaaaattaatgaagcctaataaacaattaatgagcatctttacaaccatttaaagttttcaaccttttaaaaattatagcaaccgtgcttgcagacagtccaaaaatacaccatgggccatactttgcctatcctggtataaaacaagtaaatcttccgagaagtgtttaagataagcccaggacagttagtaatataggaaaagatctgggtaagcatggttgagaatttcaacattgcaattttttaatttttaaaaatttaatttcttcaataattattgaattaatttgcatttattttgttagccaagtgaagtaatttttgaatttttaagaggctattattggtggtttataagatgacttgccaagtatatttgggataa

SEQ ID NO: 44087 - DNA, 1075 bp, Homo sapiens
tgcatagaagaaaagaagccaggcttaccaacagcagcaatagctggactcctattataaatgtatttggtacatacttctcgaattgtctcagcattcacagcctgaaatatggaagacactgtcattcagctgtttgtagtaaaaacaaagtctatacctggaactttttaaaactaaagcaagatgaaagatacatattctcagcttttgtaacaaggatctttttacacatgacccaatagtaactcaggactacttacatcaattcttgcttcaagctcagggatgggaatccttctattatagcataacatttgcctaccaatatcttcacaaattggagttgaacctgtttaaagagaaggaaaaattaactattggaatacagatcaaccatatgaaaacagaacctatatctttatttttaccatcaagctgcaacaacatgtttgttttcagaagatttctggctcgtgcaacctcactttctgtgacacttgtacagagtcgcatcctaaaaaacgtggaaaaacagtagtagttggaaaatgttgtatttcatgagttaatgacctaagaatgatgatgccatcttctacacaaaacatacaggtgattacaatttaattccaatgctaagcaaaagctaaaatgattattttccccagtattaatttctcaaaaatgatacataaacatgcctaattacacattagcagacaaaggctttatacaaatgggctgatcacattttcagaaatgctataagcatcttgagacttcatgagtcctcatctgttggagtctgatatgctatgggttaagtcagtgggtcattcattggtttctgaaaacaatgagtagagtctaacttaaatctaatttttaacaataattacatcctagttgactagatttagaaagatgtaaaccaattaagaatagtggaggaaaggaaccagagctaaatgttttccaagaagctgcgagcctttctgcccatctatcgactcaatatactttgttttcttttagcagtggcaacttcagatttactttcccttcaaccaga

SEQ ID NO: 44088 - DNA, 1058 bp, Homo sapiens
tctaagggattgaaggggagaaatgagccaaagctgactcttaagatagcagctgacagaagcaacaagggcaaataaaggttctttttttacttgtgcatgtttgaaggtagtctagaaggaacaatgtaaatggtagagcttcaaaataaaagaggccattttgctatgccttcaccttttggtagagaataaatgagattgtctgcagaaagggtgaatatgagtttgaagagaggtttgaaatggccttgtggatgaataactcagtgacccacagacttgtcaattagtgtccaaggctaatggaagtcacatgacatgagtactgggaaaatcaggcaggctgtgggcagttcttggtccctcaggcagacctatgcagactggaagccagagtgaaaagctggtgcttctttttgggttggcctgagaggagtatggggtcagagtgagaatgacattgagagttgaggaccacaaagccctagccaggaagagagtgtagaatagcaatacagtatacttctaagtccctgacttatgatatttgtgcagatagaagaaataaatgagcaaatcagaaaagagaaagaggaagctgaggctcgtatgcgacaagcatctaagaacacagagaaatcaactggtggaggtggaaatggaagtaaaaattggtcagaagatgatctacaattactaattaaagctgtgaatctgttccctgctggaacaaattcaaggtactggttttaatgaaacttttcttcaactcacactggagcctggagataatgtagacagactccaaatagcagcacttgttatcacagaaacttgcagagataaattctgtgccacagcagaaaagtgtgaaaagtgaggtgcattttgaagctgtcagtcttacccattgcatcagtacacatgcacatatacatatgacagaatacttgtttctcaggaaattgaagatcatgagacaagtcttgatttatgttggcttactctgtcatggcttgttctagggattaggttttctgtagtttttcttttac

SEQ ID NO: 44089 - DNA, 1050 bp, Homo sapiens
tattaaattacaaatatatcttaccaattatatgcagttactcaaataatgtaactgtatgtgaagcagtacttttgtcatgatgattgttccaaaagcttctcattataagatgtgattcacaaacatttactttatgtttcacttgatcatatccccttaaaagttatttcaacatggaaatttaaaaataatagctagtaatatacagagagaaaaattaaactaggaagcatttcaaagcaggaaatataagtgtagggaaaaaatcaaactgacatttgaatgaaactaaaacatacacaaatgtgataaacaattatggttcctgggtctgcagatatgtgtttatatccaaaataatgtttcctgtttcagcgattgaattggaatactcagtagatcttggattgtcatggcacccattggtaagggactgtctgcctaccaatgtggaatgcagtcgctatcatctgcaacggatcctggtgtcagacactttcaacaagtggactagaatcactctgcctctccctccttataccaggtaagaatgcttctacatgttcaccacatgcttctacgtatagtgagcccaaatgtgataacatttggcatgtcaagtttaatgagatatgtgagggttttgttaattgctaatggtattgccatgtatgaattattaaggctgtcttaatgagtaaaatagaaaccagtttttatcatggcattattccatgttttcccaaaagccaggcctttactgacttttaactctaatatttttaaagaatgaactacaaaagaaaacagtggctgcatcacttggcttctccaacttaattcagagatgcccagacaagtcgtttaaaataggcccattggatacagaatagactgaaacagagtctgttttctgctagtgagactgctgtaaatataggagtgagtgatgtcctataaatgaatgtagcaaataaatgtacctttaaattatgtctgcttttaaaattttattatggacattatcttgagaattatcacctgaag

SEQ ID NO: 44090 - DNA, 1028 bp, Homo sapiens
aatcagggagaaattttagaacaccaataaaagaaaattctaaaccctctaggtaagatttattgtactttccttggtagcattaagcatttttttaaaggaagcagttatcttgaagttctgaaaattatgtgagttgtaaaattccttctccagccaaatatcaagtattaggaaaaaacaaaaactgttatagacacacaggattcagaaagtttaccaccctctctgaaagatttactgcaagatacattcctggaaactaatccaagaggaagatgagatattcaagaaagagtagtaaacaagtaaaaaagtaaaacttttagttcagtctaaataagtatggattatttgaaaactttaataaaaacttggaattaaaacgcagaagattgcaacatgaaaagtatagaaggtggctgacaggaaagggaacagaaaaaggaaataaaatactgcccaagttcttaacctgtttagaatgaaactgtagatcttggttaactcttaatgttaatagaaaactttaaataaaatataaatatgtgtgttaaaaaatagataagccagatagaggttatataacttctaaagcattaggttaaaattagaacaaagaagacagttcagtaatgtcaggaaagtggaaaaagtaaacaataaaatacagggtaaatagaaaatagaaaacaatttgtcaggagccaattcaaacataccagtaatgtgataaattagagtgagttatattcacttattaaatgagattctcacagtaagttttgaaaaataagctgtatatttgcccttatgagagacttaaactaacataaccaaagaaatagaaagtcaaagaggaactaatataccagacaaatgtaacagaagcagcaaggaggcatattaaaataagatagaattcaggtttcagcattaaaagaccaaaaagggatatttcatgcatcagtacatgtagagcactttgcataaagcatggcacataataaacaagttaaaaattagtt

SEQ ID NO: 44091 - DNA, 1066 bp, Homo sapiens
ccagagtggactgtaaatcatgatcgtgttacacccccacctcatttttcttttgaatttttattgcacaggagacccaatcctctgtttgcactttggatgtcccttatgtaatttccctttcagttgccaatatttgagttagtatccttccatccatgcaaacttccctctcttctgcaactcatcttttggtttgatcttgtgtgttgtaccaggagcagacacctccattctgcatcctttgacgtgcaatggctagggcctatgaaccgagaccctcctgaggcccatcataaggtagataactaatcctcacttccgtgtcactgttaatcagccaacaccaagattggtgtaaatcatgaggctgtctggggtgtcaaatagtgaagctgaagaggaagtagtttctaaattcccccaaactctatttcagctctttagcagccaccttgtgttaaggcagacatgcttcttccttggcaattaaattgccagaattgtccaaggatgagaacaagcagaggctttggagtaactattctgttaattaataaagacctctcagtagtaatctggatatatacatctgcatgaaacagaaaatcactttgtgctggtttttatgttatctttttcatagttttatttgtatattatcctgctacatgtatttgtctgttcctcttcttaatttcctcctgtccactttctatctttactaggttgctagcaagtgagttcaagggtggtggctgcctaaaagtatatactctgtaggacctattatgaagacaaatacattgtgagtatagaattattattggccatgagatacattcttacattggctggaaaatatgacatttcattagggattgataaatttaggtgaccttaattgttatcacaattgttagttcaccaacaggtatccttatctcacagctgttttttagataagattataacattatgggatttacttaattagaattactttttttctgttctgaatatcaagatgactttcatgttcacacaaagcaaataattcaccatt

SEQ ID NO: 44092 - DNA, 1066 bp, Homo sapiens
aaatgcagtttgattttttcagtctttttattttatttgaagcatttcatttacttttaatacaattgttaatataattttgtttctattatcttgtttatgccatttgatttacctgattttttttctcccattctgtagattgccttgtcattttattggttgtttcctttgctgtgaagaagctgttgagtttgatgtagtctcatttgtttatttttgcttttgtttcctgtgcttttggcagcctatccaaaaaaatcattgccaaaactaatatcagggagtttttttccctacgtttacttttaggaattttattgtttcatgtcttacatttaagtcgttagtccatttgaattaatttttgtgtatggtgtaagatgagagttcagttttattttttgtgcatgtggatatccaatatttccagtaccatttattgaagagactatccttttcccattgtgtatttttggtacccttgtcaaagattagttgaccttatatgtgtggttttatttctggactttctgttctgtggatctgtgtgtctgtttttatgccattaccatactgttttgattactgtagttttgtattaataatatactttgaaataaggaattgtgatacctctagctgtgaaaaatgccattggaattttgatggggattgcattgaatctgtagattgcattgggtagtatggacattttaaaaatcataattcttccagtccttgaacacaggtatcttttcacttatttgtgtcgtcttgaatttctttcatcagtgttttatagttgttagtgtataaataattcaccttcttgattaaatttattcttacatgttttattctttttgatgctgttgtaagttagatttttttaaatttcgttttttgatagttcattgtaagtgtatagacatgtttgttgatttttgtattctgcaactttactgaaagcatttattagttctaacagctttttggtgctcatttatagttataaatatttagaacatccctgtgtggctgaaagattattatgatgattttt

SEQ ID NO: 44093 - DNA, 1049 bp, Homo sapiens
ttactggcagttttgtagtacagaaagtgagtgctctggtataagaagaaaatccatgtttttgttttgttttttacagacaagcaatcatctccttgggccaaaaccatttccactagacagattattagcaatattatatagtatcgtggacagcagagttgctccaacagcaaatattttttcccaggtaagcttaatcatagattattatctgtcatctttgtgggattcttcagatagtagagtcaatagaattccaggcattcagatttttgttcaacatatgttactgttttaactatataatgaaccatgtttttggtaagtaattgaaaattacgtatatagaatctttgggggtatcactaaatttacatatgtttacaagtataacctcatggcaaataatttaatttggctctttttcaataaaggaatttttaaaattaaataatcataattatcttgctaattaaacaagtggcttgatgaccaagttgatgaattgtaatttaatgaaaacaaaattgaaaaatttttttttgtaacagagtaatctacaatgttcttattcctcatctatgtactttgcagatagatgtgcttttattaaaaaatgctgttttccagaataattaagttctcagaatttcactaggtggcagcaaagcataaaaatagaaaatatgactttaaaaaaaacaagtagttaaggtttgttttttagttgacattttaagaaaaaacaaattattaaaattatagtcacagtagatttcttaaatggtccagaaaaacaatgcttagcacatggtacaagtggatagaagaaaaagcaaaatgatataactagtatttatttaaaagcaaagtcatgtcagatattgcagtgagcattttgttttctctatgcatttttaggttgagaaatatgtaaataatgcctgcgttttaattaattcactgaataaatctggccccagaatagctgtcagactttgtaatctaatgtgtgctggtaacttttaatttttcatttagagaag

SEQ ID NO: 44094 - DNA, 1026 bp, Homo sapiens
cattagagaaatgaaaatcaaaaccataatgagataccatctcaagccagttagaatggctattgttaaaaagtcaggaaacgatgctggtgaggctgtggagaaataggaatgcttttacactgttggtgggagtgtaaattagttcaaccattgtgaaagacagtgtggtgattcctcaggggtctagaaccagaaataccatttgacccagcaatcccattactgggtacatacccaaaggattgtaaatcattctactataaagacaaatgcacacctatgtttattgcagcactattcacaatagcaaagacttggaaccaacccaaatgcccatcaatgatagactggataaagaaaatgtggcacataaacaccatggaatactatgcagccatgaaaaggatgagttcatgtcctttgcagggacataggtgaagctggaagccatcattctcagcaaactaacataggaacagaaaaccaaacactgcatgttctcactctaagtggacgttgaacaatgagaacacatggacacggaggggaacatcacacactggggccttttgcggggtggagggcaaggggagggagagcattaggacaaatacctaatgcatgcagggcttaaaactgagatgatgggacgaaaggtacagtagatcaccatggcacatgtatacctatgtaacctgcacgttctgcacgtgtatgctagaacttaaagtaaaatttaaaaaaacaataattctcattaaaaacacatcttatttttgggggtatactttgtgtacagaattatatatgttagaattgttaaggttacttttagtaacctcaatttctagtaaaaacctaggaagcaagaaattttgtcacatgtcagttttttatagatatgagcaattttgtaattttataaatatgtttataacctaacttttatgtgtagtgatagtcccaaatatagtcttttcttagactttaagaagccaagaacaaacttatgtttagtaattt

SEQ ID NO: 44095 - DNA, 2079 bp, Homo sapiens
aacatggaagaataaagatattcattttcttttttttcttcagatagtgttgtttgtgtttgtttcaaagtttgtaagtggcatatttcttgaaagtttattaaatcacctgaaaaatattcttttcagggatcttttctggaaagatgctttatgaattgatatttctgtatttttcagaggctagttctataggtagcttaagataggagaaaatgaagtactactttgatattcatttaggtttgttttctctaacaaaccttatgatactgcctttttaactgttattcataaattattaaacatattttagtgtttcaaccaaagagaaaatcaatacagttgccccttggtatacttgggggattggttccaggaccagtcccatatatatcaaaatcctagcacactcaaaccctgcgatcaactccgcagaacctgagtgtaaaaaagttagccctccatatacatgggttttgtattccctgagtactgtttttgatctgtgtttgtgatctgtgtttggttggaaaaaaaaaaaaatctgtagacaagtggaccctcacagttcaaacctatgtcgttcaagggtcagttgtttattttgattagccaaattgtgtaccagttgctgttaacattatgacactttagtgttattacaccatgcttagatctgaaaatctaaaattaaggtaagaaagtttggctaaagcgaataatttctttttgattcttcttctctacacttagtagaatttggaagatttttctattttaaatcattgttttttatgaagtagaataggaagaaattattttaatgatttggttcttagttttctgttatctagttatatgttatatagttacacatttatatatatctttttctgtgccttattgaattattttgatatgaaatacttgggaacaaactaatatatatatattttttttaaataaatggaattagtatgtttttaaccagtttgcttaaactgctgttcagtagaattccagtgttgattcatggaaaactactaagtagttataattagttaattagtactcctcaaactttagaatacatagagtttctagagagatcgttaaacatagattcctgggtctcatcctcagagattctgatttggtatgcctgagatggtgccaagaacttgcatttataacaatcgcaggtagtgctgccaatccaaatactttgagtcatacgaaactcaatgatgtttagtttatgagaatgttcagaccttagaaaacaacagttaattatttgtgcttgaggtttttcattatatgttttatggttctatgtgacataaatataacctaaaagaacaaattatgctttgttactgtagggaagttcacatttttaccctgcagttttgataatttgaatctataaaacaaactaataatagattaacgggaaaaaaaaggcatacaaatttattttttaattttaatttaattttaaatttaattttatattaagttccaggatacatgtgcaggggcgtgcaggtttgttacataggtaaaatgcgtgccatggtggtttgctgcatctatcaacccctcacctaggtattaagccctgcatgcattagctattgcatacaaatttattaatatgcatatgggcacaggagccttacacaaaatatgagactcaaaaggtggggggcagaaaggggggccagctggttcaaatttttatgacatcctgaggttacagaaagaaaatgggcttggagcatggcataacaggttattggagggagaggagcaaagacttggttagggaaggcagtcttgtgcaaatgaaacctcataggcagcaactttcagaaagaatagatggtagcctgtgctaagtttctctgtcacaccttcaaaggtgtcagaccctcaagtctctttcttgagagttaatctttcctagatccaaggtggggggtgatcagagaaagcctgtttgcatctgctgttttcttatttcctctacagatgcaaatctccctcacaaaatacagcttttcagggctg

SEQ ID NO: 44096 - DNA, 1029 bp, Homo sapiens
gtatgcggtgattgaggtctagaatctagatggatttgagtatggtcagaagctttcattgcaggtctttcattaaccactgaccctgagctggtaatctttgtatagatggttctttttaattttttttttttaacaattagaatagctgtttatatttcatagacagtttggaaaatgttgatgtttaatttttctttgaccttttttgttttaattgtagggatgggaaaggaaagagacaagaatttctgttttcccttttagaaatcttcaattaattaagatcttatctccatttaacagaaaatagtaatatatctgaggctggaaaacagtcactttcaaagtaacagattctatgtctcttagcacattttcttcactttgttctttttctgtttttgccctgaaaagtattacttagtttcagtgtgtgtttgcgacagaacacagaaggcaatcatttaaaattatgctcacatttagtatgtttttgaaagtttcagatttcagggctcctctgatttacatgtagatttcagacatcttctcagctgggaaaaaacaaaacagtttttccagttcaagcttatcactaacattcctctagaagttggatgtcttgggatccctggcttctgagggaaatgataacacaagagacttacagagaggagagggtcaggaaaacgcacctgagtgagatggacttaggagcagataatcctcctcggtctttcctggaaagtaacttgcagttaccactctttagcactcgaatcctgtgggaatctgtgctgacagccatttcaaagtagattataaagtacaagaaggaaaaatttagggaaaatatttatgggaaaataaaatgtaaagagagaaatatatatttaaatgtggtattttttaaagttcttcgagtttcactgtggaatgattttatttagggtgaggttacagctttttaaaaaataatattcataaatgtgtagtatggtttaagtcttatactactattggtaa

SEQ ID NO: 44097 - DNA, 1088 bp, Homo sapiens
ggcagtttatgtactatcccctttttcttcctagttgatttacttaataggaagaaaaataaactagaatctacagtattttttcccttgttactgattttgccggtaataaggttgttgagattttctttagatgtcattgttttctatttgtcttagtatttaataattttttttttaccctcagtttcaaaattgtgatttactttttcagaagtatttttactcaaaacacttctgacaccaaatgtgtggggtatttttgttcacccaacaacaaattcttcagttttctagatatcaaatgggtgtcctaaaattcaattcacttctgacactaactaccagaagttagtgcagacctcacaagttaagggcttagtcctacaagaatattagcatttcagacaccattctaagtcccaggtttctacctgtactccagaaaactggctataaattggggtttcacatgagcccctcctcaggtttgataatttgctagaatagctcacagaactcaaggaaacactgtacttactccatttatcataaaggatacaaatgaacagccagatgaacaggtacacaggacaaggaccagtggggtcccaagctcaggagcttctgtccctgtggggctggagtgtgctaccctctcagcatgtggatatatttactatcctggaaactctcagaacctcatcatttaggatttttttatggaggtgccattatatagtcatgatttgattaaatcattggtcattggtcatggattcagtctttagcccttctccttttcccaaggacaggaggtggggccttgatatggtttggctttgtgtccccactgagatctcatcttgaattataatcccgtaatccccacatgtcatggagggacctgttggaaggtaattgaatcatgggtgcgattcccccatgctgttctcaagatactgagttctcacgaaagctgttggttttataagtatccggcattttccctgctggcactcattctctctcctactgccctgttgagtgctttccaccatgattgtaagtttcctgaggcctcccca

SEQ ID NO: 44098 - DNA, 1104 bp, Homo sapiens
tgtttgttagttttccttctaacagtcaggaccctcagctgcaggtctgttggagtttgctggaggtccattccagaccctgtttgcctggctatcagcagtggaggctgcagaacagcggatattggtgaacagcaaatgttgctgcctgatcattcctctggaagttttgtctcagaggagtacccggccgtgtgaggtgtcagtctgcccccagttaggctacttggggggcagggacccacttgaggaggcagtctgtctgttctcagatctccagctgtgtgctggtagaaccactactctcttcaaagctgtcagacagggacatttaagtctgcagaggattctgctgccttttgtttggcaatggcctgcccccagagatggagtctacagaggcaggcaggcctccttgagctgcagtgggctctacccagttcaagcttcctggtctgcaatggcgggcgcccctcccccagcctcactgctgccttgcaatttgatctcagactgctgtgctagcaatgagcgaggcacattgggcgtaggactctccaagccaggtgcgggatataatctcctggtgtgccatttgctaagaccgctggaaaagtgcagtattagggtgggagtgacctgattttccaggtgccatctgtcaccccttttttttttgactaggaaagagaattccctgaccccttgcacttcctgggtgaggcaatgcctcgccctgctttggctcatgctcggtgcactgcacccactgtcctgcacccactttccaacactccccagtgagatgaacccagtacctcagttggaaatgcagaaataacccatcttctgtgttgctcatgctgggagctgtagactggagctattcctattcggccatcttggctcccttgtacagaacttttacacagaaggggctctgtttatttgttgaagtttacaatcaaccaaaattaacaaaatgttgatggagtaaagaataatagctaacagttatacagtgttaagtttgttaactcagtgttctagggatttgatggacgtatacatcaaaccaattccaagagggaggtactattatta

SEQ ID NO: 44099 - DNA, 1034 bp, Homo sapiens
gtcttatataacccatagcatttgattcctaagaatacatcctcttggccaggcgcagtggctcacacctgtaatcccagcacttttggagaccaaggcgggcagatcacaaggtcaggagtttgagaccagcctgactaacatggtgaaatcccgtctctactaaaaatagaaaaattagctgggtgtggtggcgcacgcctataatcccagctactcaagaggctgaggcaggagaattgcttgaacccgggagacagaggttgcagtgagccgagacgcgccactgcacttccgtctgggcgacagaaggaaactccggctcaagaaaaaatatatatatatcctcttaaaactcctttgcttttatgctaatactcttaactagttgatttcttcagcttcttaaatgttggatttcccagtgttgtgtccccaccaatgttacgttatccattttactaactgcaataatcaattcccatacctttacctgtcgatgactctagaatttgtaatctctgaactcaactgaaactactaaatacattacttgtcctatgaagtacctcaaactaaacaaatttaaaactgaccttggccgggcacggtggctcacacctgtaatcccagcactttgagaggctgaggcgggcagatcacttgaggtcaggagttcgagaccagcgtggccagcatggcgaaaccccatcactactaaaaatacaaaaattagccaggcatgatggcacgtgcctgtaatcccagctatttgggaggctgaggtgagagaattgcttgaacctgggaggtggaggttgcagtgaacccagatcacgccactgcactccagctggggcaacagagcaagactttgtctcaaaacaaaacaaaaaaaacctttctttagataatggctaaaactattttctagcttcataaaatcaaacacttttccaaaaatatgtttccagaaaaatctttttaacttaaaaaactgttcattgaccagagatttgagggtcgagtcaaaa

SEQ ID NO: 44100 - DNA, 1030 bp, Homo sapiens
aggttgcagtgagctgagatcgcaccactgcattccaacctgggggacagagtgagaccctgtctcaaaaaaaaaaaaaaaaaaggaattgcaagtagcctgtaatcccagcacttttaggagtccgaggcaggaggatcacttgagaccaagctgggcaacatgatgaaacccctgtctctacaaataatttttttaaaatattagccaggtgtctggcacacgcctgtagtcccatttacttaggaggcttaggtgggaggatcaccacttgaggccaagagatcaagatcagcctgggcaacatagcaagacccccacctataggaaaataaatccgagcgttccaagtgttcagctattcacccactttaggtttccaccttccttagaaagtagagtagtataaattatttctgaaatttgtgaaacgatgtaccacataaccctctcaaaccaggttgctactacttccaatgacttcattgataaggggcaaagtaactcgaatgatgggtgagctcatgacatggtttagctccgtatcaaactctggatttgggaaaattgctactgatttattaaacacttgaattcttatatgctaggtcagaatttggcaactaaactctcagaaatttgtaaacttcctttttacatagaaaagtgaatccaggctgggtatggtggcacgtgcctgtaatcccagctgctcaggaggctgaggcatgataattgcttgaacctgggaggtggaggttgcagtgagcccaagattacactgctgtactccagcctgggcaacagagggaggctctgtctcaaaaaaaaaaaaaaaaaaaaaaaaagtgaatatactgtactgtaaagcctgtgcacctcttcatcacacataattgcctgtacattatgcccagtgcctggcccctattggatttctgacaagctttaatgttgttaggttaagagagaacctgttcctcaagtttagtcttatctctagtatttaaatttttcatgaaggaaggct

SEQ ID NO: 44101 - DNA, 1045 bp, Homo sapiens
ttgacacttgatgggcattcaggtatacatggttttttagagattgataagattaactgtgcagtctataaactgtaaatactggcttttaaactcttttaaaggagctcttttgataaacaatttggataagagatgaaaggttagggaggctccaggcaaggcagaagactgctgatggcccagagatagttctgccccaaaaaggtgggaagaagaaaaaaactgagctggatatttttaaggaaatatattttatagcatttttctttaatgcctagttttgctgcaagcactgaagtttatcctgcatttgtatttcttatttgaaaaagaaatggcctttggggtttgttttgttttttgttcctttgtaagcacactgcaaaagcggcgttgtcagcgttgtcttttgaggtatcaaacgtgctttcagtcagcaaatatcttgtatatagtaccattcctaataaactaaattggttatcaacctaatacaaacggtacttcatacaacttaagcctaaactagattagattatgtagaaacttattcttagagaatatatcgccttaatatttcttatcctgaaaagagtatttcttaagtgcccctctcaaagtatatcgattaatatttgtctcaaatttaaaactatatcctggtttttcccttacagttgtttagcaagtaaatgtttacttactaatttattttctcccagacttcattctaccagtttaagcttagctcagttttgttttttggttttgagaaggagctttgctctgtcactcaggctggagtgcagtggtacgttctcagctcactgcagcctccggctcctgggttcaagcgattctcctgcttcagtccgtgagtagctggaactacaggcgcacaccaccacgcccagctaatttttgtatttttagtagagacagggtttcaccatgttggccgggctggtcttgaactcctgacctcaggtgatctgcctgcctcagcctcccaaagtgctgggattataggcgtgagccaccg

SEQ ID NO: 44102 - DNA, 2324 bp, Homo sapiens
tcggcagccaatcagcgcctgatgtgtcctgtcgggcgcgtcgtggttggctggcgatgacctcatcctgcagcagcgggtggggccaaagccgtagggggaggctgttgcaaaggtagagagggagaagtgacgatggtgatcgttgctgccgcggccgatatggaacccaagcagtggcgaagggaatcgcaaggctcttccctgaccattttctactgtccctgcgcgaggtgagggccccggctcggcctctgcaaaactttggggcgctggcgcggaggaggagacaggatttctcccgtgacttttgtaactgcgtcagggcaagatggcgctgggtctctttggggcgcggggggagaggcacgtccaccgccgcagcgcatgtgaccgggctgcattcctgtggggtttggctccgacccaggccggggcgggggaggggacagggcttgggcggaggagactgtggtgcggtcggcgttggcggcctgaagaggaagagatgactgttggaaagcgttcccctcccccatacggcagaacagctgcggctcccaggggaaagcccccgcaggacagtcctcgtggggtgtgacggctgttggtggagaaggtttggcgccctattttcttatctgcctttctccccgcaaagtatacttatgtaaggtggtagttccctgacgtgggactcggaatcaactaggagtccttgagggcctctgggaggcctagcgaggggtagaccagcttctgggggtacaacgtcaaggaggatcgattactttctgaggaaacagtttctcagattgaaatagaaaagtatttccaaagtttggaaacaaatttaaaggtgtaaataacacccaggaacactttaattgctttgaaaaggcataagcagccatctgaatttaagggcccttttcagactcttccttcctcctgtgattcctgttctttatttcagttttctgtctgtacatcccttaagaatatagttttgtcggtgggattcgctcttttgtgcccaggctggagtgcagaggcgagatctcggcccactgcaacctccgcctccccgggttcaggcgagtctcctgcctcagcctcccaggtagctgggattacaggcgcccacaaccacaccctgctaattttttctatttttagtagagacggggtttcaccccattgaccaggctggtctcgaactctcgagatccgcccgtctcagcttcccaaagtgctgggattataggcatgagccaccgcgccgggcctgctttttttttttttttttttttttgcactgggcattagtaatacggaataaaagccgtgttttaaactgtattaagttgtaagacttttcagtactttcaagtctgctttctttctgttgcccttttgtagtttttaaaaataaaagatgcaattataagcacttccggtgaatattattccttaaggttcctgcatcatcatgaaatttgaagcacttttatagtagtacaaactatacttttagcttttgaaatctcgataggagaaaatatccagcagttttaggggctattttggcatattcattaaggtagactaagtttgtttttcgtttttcccacttagccaaactagttaaagtagtcaaaactagcaaataatttttaaagggcttctccttttgggtggtgtagagggtggggagttattcaacaaacacatttgcagccaaaatctggcctacttcttggcagagcgcttatacttggtgctacgagaaaatgattgctggacctgaaaagaacctgaggtcaaggttgtgctatttccttaagtcttagttgtaggctcttggtagtttgaaaacaagattgggtttttaattcatttgtgtatccttaaatcctcactagtttttgtggatttcttttttcagttataagcaactgaatgtggatgagctataaatatttagtacaaagaatgtaatttgtccactctgaatagaaagtaagcattaagaactcttgaatgtcttcaagggttactttgttacgtgtaagatgtctccccttccttcatagcagtttttattcctgcttaaaaagggaactaaatatgaagtcagtagattttaaggtaattttcagaatgtttctactttcaccgtgccttaataaggaaaaaaggccattttccaagcgaatggaaacaccctttccttgttttgtgcctttaatcagcgtgtaccttcattgttcctgattgccaaatccacgaacttcttgagctctcaatttttcttgactttc

SEQ ID NO: 44103 - DNA, 1033 bp, Homo sapiens
cttcggaagtacaaaacacagttgtttccataaacatgcctctagtatcatcctgcatcaggcactttgactcacttattcggaagcctcctccaacctccaactgatgcgagggtgtcaggtccctcaagttggagttcactgagaagttaactcctgttctgtcagggctctttacccaggaagaatacattgtgccccgtccagagtgagtcgagtccagttggctgttgggctcagccctgtcatgtgcaggcgtttccagggttttatgtagggcagttggctcaactgcatcgagtcctagctgaaggtctgacacaggttccttttctccaggacactgcctgttgacttcagtcctactcctagggctcgtataaccaatagtctttatttcttgcagacccagttcagttaaattagaatttctaaaaggccccaatgttaacatggttgaagatctgtcatatccctgtttacaaattaaaaaaaaaaattacacaaataatcacatcttgggactgtttatttcaaaatttaccagtaatttaaggaaaacaatgtaataggaaaaaaactaccaattcaccctttttaagttaacttcttacctcttgactataagtgcgtctctttatttctggagaactttctggggaagaaatattctgtatataaagaaagaattagaattgaaaatttaaaaatacgtaagtatatccataataattatagaaatgaaaacaaaatgaaaaatatacagactttagttttagatcttgtttcctgtttatttccattccccaaataagactgctttaagatcaattagatacacacatttagtctactgtgtatatcaacaagatgaaagttatgctcattttagtaaaaataaaaacatctaaattcatataaatgaatttttctgatttttagtttcttacaaccttttttttgtattctcagcacactagttgttaaaggaggggaaagagctcttaaaagaaattccatccccccaagtgtt

SEQ ID NO: 44104 - DNA, 1033 bp, Homo sapiens
atgtggccctgttccagaaggctggtgctggggtcccggtcccaaagtggtatgatgtgtagcttgtgagggatacggtggtacagttggatgagcactcgaaggaaaaagtggaggtccttgatgaggtgggtggtgtaaggcttgagctgatgtggtatgatgcccagaagccaaaacactggaaggtggcggcggagggggtggtgggggtgctgaatttacaacatgctggtgttgtgcttgtagaccttggagtcctgtggatggatggggtggtggatggtgatgaggggcaggaccaggagggggtgggggtgggggtaagtggtgtccagcagtttgagaatgaatatgcgacccaggggtgaccgcatgaacaggccctactacatgtgctacagagtgttgctgatgggaattcggctgttgtacaaggtgcggtcctggagcaggtggtggtggaggaggaggggggactacggcagcagcagtttgatggtgaatggtagggttctgagagggcaaaaaatgccctggagtcacgtggtgtcctggaactgtttgctggcttgtggtgccaggaagtgcttgatttggtcctgatgtaaacacagtttgttgagaaagactacctttgagctgattataattctgaaagtttgcagagggctgctggttttgatagtaagacgaagaaggaggtggaggaggtggagggggtggtgccgtgctgttcagactttgttggttaaactgactgtatgttgctgaagattgtcctgagggtgtctgtgtaaataatgttccagaagttgcctgctgagtattggctggaaggttctgtgctgctggataaaagtttctttgaggctctcgctgaggtgttccaacttgaggtgactgtgaatgatgaggcctgtagggagatcctaactgctgtgaaggaggctttggtgaaagataaccatgctgtacaggtgtgtgaggcgtggatgactttggaggattttctaggtgaggtgatggagga

SEQ ID NO: 44105 - DNA, 1052 bp, Homo sapiens
cagtgtctgctatacagaggccaaggctattatagtggttgaggcaggtgctggagtcagacgggccttgttgagtcctgggttgaactctcgttctaccatttatagagtgcataccgcgctctggccaggcctgcatgcaggtgcggctgactcactgacgttttggttttgcttcctgcaaaatgaagagaatacatagctcttatatctttccttagaaatgtaaaaatacttctgaaacttctttgaatgtggaagaaagaaaaaaattagtattgagcactttcaggaggctattttgtttgattcagatcttcataaagtggcggtctcttctataaggagaaaaagctgttgacttgggggccagtctctgaagtgcttagcatgtcgtctgttgtatcctaggcatttgagctggcaacgggagattatttgtttgaaccacattctggggaagactattccagagacgaaggtgagtattggtgcctgctgaatacctcggtctaggtcttctgccagccctgaacttctgtagagtactgtatttttgtactgaaatagagccatgtgtttggttttcaaacaccaaattcagatgcttttcctttgagtttgatgccccctcagtctcagtgaatgggcagagcctgcctagcacaggcagcactccagcgagccctcaggggccctacaccagcggctcttcctggccttgcacagggcaggaacccagctggctgagagaagacagatgatacagacctgaagcctctatgtggtccttttgaccattgatgtgctgcccatttctctgtcctgtttgggagctgagttgaaaacccaggaattctggcttgaatgccatctgtaaacctgaccatctccatgcttatttgcttgcgatgctggggtggcctggggtgagctggcctcagtcactgttactgctccaggtggtgcctgaggcctgccattcccacaagcctctgcatggatgtgctgcagacactgttgatttgaatctatttctgattttttactaa

SEQ ID NO: 44106 - DNA, 1032 bp, Homo sapiens
ggttttaccccaaaagccaagaggtgtttaccaggtggtacataagcatattcaaaatgtattttattgatggagataagtacttaatgaggctgtattaaggagagtaacaagttctaattcttgacccatcaaattcttaaggtgaagctgaggaccaggaagagaaagaagatgctgagaaagaaaacattgaaaaagatgaagatgatgtagatcaggaacttgcgaacatagaccctacgtggatagaatcacctaaaaccaatggccatattgagaatggcccattctcactggagcagcaactggacgatgaagatgatgatgaagaagactgcccaaatcctgaggaatataatcttgatgagccaaatgcagaaagtgattacacatatagcagctcctatgaacaattcaatggtgaattgccaaatggacgacataaaattcccgagtcacagttcccagagttttccacctcgttgttctctggatccttagaacctgtggcctgcggctctgtgctttctgagggatcaccacttactgagcaagaggagagcagtccatcccatgacagaagcagaacggtttcagcctccagtactggggatttgccaaaaggtaagtgtttcttcccatcaactgtctgccatcgctgactccagggacgtgcctttaacaaatgctgtgaaggaattggctggaagtggccaagccctgtgtgtgtgtactgatcagttttattacttttatactcctgaagaagtaatgtgatttaaataaattttctatgccattaggctatttcttgctctctgcataccaaatcttatttctgaccagttttcatttttaatatatttagtcagcagcatcatttgcaaaaaccttccagttttagcaacttacacctttctagaatgtgtagtttagtttaaaattcgtatcttcttccatctaatgtcattatatttagtttagtttagttttgttttgtttctattcaagaaaattatgcctcctctt

SEQ ID NO: 44107 - DNA, 1067 bp, Homo sapiens
ttttcttttttccttttagacagagttttattctgtcgcctaggttggagtgcagtgccatgatctcagctcactgtgacctccgccttgtgcctcagcctcttgagtagctgggattacaggcgtgtgctaccttgcctgtgccactatgcctgtgcagtttttttgtgtttttagtagagacagggtttcgccatgttggccaggctggtctcgcactcctggcctcaagtgatctgcctgcctcggcttcccgaagggctgggattacaaggcaaggctgagcccggccttgacattttaaatgtaatttaaacatatcctaattgcagtattatccaaaacagtaaatattctaaggcaaaaaatgtcttaaaatcttatcctagttttatctacttcactggtacttactaggaacttgtcagtatcttattaaatcatatttgccatgcccatgattcatcttggttttttttttggccaattaccccacccgtcatactcatttcctgtcctgaattggtaacctctgtgaggatatgaggactgtaagcaacatgaagcctgggagcttttatatatcaaacacctggaataatggcatgtgataggagctcaggcgatgcacattcagtgaatttatgtaaaaatactctgtaaggtaaagttgttttaaatgtttgtagggattttgatcgtttttaagaggtattcctgttttcattttccttgtaaaatctttgttccctctcacttcataatgctactttaacttctactaacagtaggctaactactaatagcttactgttgatcagatgccttccactgtcgattaaactgggaatatttcagtgttggattgaaggagtggcctgcccctccacacctgtgggtatttctagtcgggtgggacgagagactgagaaaagaaataagacacagagacaaagtatagagaaacaacagtgggcccaggggactggcgcccagcataccaaggacctgcaccggcaccggtctctgagttccctcagtttttattgattattatcttcattatt

SEQ ID NO: 44108 - DNA, 1026 bp, Homo sapiens
gttgaatttgtgtgcagataactttgtttagcctgcctgtgtgttcatctcttcttccttttgtacggtttttttttttttttttttttttttggagacggagtctcgctctgtcacccaggctggagtgaagtggtgcaatctcagctcattgcagcctcctgagcagctgggactataggtgcttggtaccacacccagctaatttttgtatttttagtagagacagggtttcaccgtgttgcccagggtggtctcaaactcctaagctcaggcagtctgcctgcctctgccttccaaagtgctgggattacaggtgtgaaccactgcacccagccttgtatggaaaattggcagcttattctgtaacatgacagatgttacttgagaagaggggctggagagggaaaagttcactacattgtcttctatatcagttgaattgaggtgtttctatgtagtattatgctaggtatacatgtgggcctagatttatggctaacttttgttcagtactgtatctgtttgcccttagctttcaaatagtagcatttttattcattatttcgacaggctgatatctcaaatgaacaactttaatgtagaagaggttatgtggtgagggcagaaattagtatgttaagtggaattatttgatccccaaataagactagtgtattatttgtaacatttagcagcaactctaaagtctttaaaaaaaaaaaaaaacacaaaaaaacacaaaaaaataaaaccatattgttaaaacttgggaagaatctcctaattatttttgataaatcttgaaaatattaaaggaattacacattctaacaaatactgaataatttcagaaatagctgcctgcatgtatttcccgcaggctccatcatttcccagaacctcatgctttcagaggggcttgctgttgccttaagtgactgaccacaccaccaccctttaggcttagtgtgtaagaaggtgaatttggccaggcgcagtggctcacgcttgtaatcccagcac

SEQ ID NO: 44109 - DNA, 1031 bp, Homo sapiens
gggatatgcagtaagtgttctttgtcatttgtgcatttgtttcctggagtagttcaacatctgtgttctaagaaggtatggctgagggtcaccactgctttgttgaggtatgtgaagtgcttagcacaggcctgcctcagctggctagattccttcctgccccctgccttagtttgaagttcatttgaaatcttaaaatattacttgcttccagctttatttcaaagttaattcattgaaattgttttacactgggattatattatttttctagtaattcatccatatcagacaaacataatgtatagtataggcgtttcaaatcagtcatttttaacttttcaaagccatgacccatagtaagaaacttcattgctactccatacacacacacacacacacacacacacacacacacacatttggtgcgtgtgtgtgtgtgtgtgtactgaaacaaaagtgttaaaagagaatggttttcactattaggttggtgtgtaatattcgtgataactctgatgtttatctagtcttattttaattagggaaaaaacaaaacaaaacataaaagagattgtcttgacccatactactatttaatgtggccccaccatttgaaaagtactattttaaaggaaagcttatgtttctgtgtattggatagatctcattacaagttgaatatcccttatctgaaatgctttgagaccagaagtgttttggattttggaatatttgtgtatatacacaatgacctatcttggagatgtgacccagatctaaacacaaaattcattatatttcatatacaccatatacacataccctgaaggcaattttatacgatattttaaataatcttgtgcaacatgcaaatcttttactgagttttgattgcagtcagaggtggaattttacactgtggcatcgtgttgacacactcataatgttttaggttttggcgcattttggattttacattttccaattagggatgctcaacctggataccagtgattctttctactgat

SEQ ID NO: 44110 - DNA, 1032 bp, Homo sapiens
gggcacatagaggtaaatgagaaacagccctactttctagattatggcctcttagactttgccactagaatgccagctacttaagggcagagccttgacctgtctagcttccctggcaccccagtagaacaatctgtggcctgctgaatagtgactgaatgaatagactgctcaaatatcttttttttcatctaagtgtggttcgttaataataagtgagaaaagggaagatatgtgagggctaaaaggaagaatgttatatttgaatagaggactcagaaaagatgttataaaaaactgaaagggactttgtcagtaaagaatatttggatgatgttgagagtatggggcactactcagactaaatcctggaggcagaacaaggtgtaagaagccctaactgcttgtgttttcctaacaaatggggaaactaaaaattgatggtagaagattaggtttaaaagcagtttgggagcatcatgtagaggatagagatgagtgtgagaaatttgtggtgaagtaactttaaagcatcacttcaaaatattaccaaaaatccccacagaaaaccgaaagaaagcagagtagaaacagaatcctggtgttataatctctcctctttttacaaaacatatttagcaggccgggcatggtggcccacgcctgtaatcccagcactttgggaggccgaggtgggcagatcacgaggtcaggagattgaggccatcctggccaacatatcgaagccctgtctctactaaagatacaaaaaattagccgggcacggtggcacgcgcctgtagtcccagctcctcgggaggcggaggcaggagaatcacttcaacgtgggaggcggaggttgcaatgagttgagattgcgccactgcactccagcctgggcgatagaacgagactctgtctcaaaaaaataaaaacaaaaaataaaaatatatttagcaaaagagcagtgccaaaatgtcagcagtatgtggtaggcctgaggtgtttttttgaaatatacttttatcttgt

SEQ ID NO: 44111 - DNA, 1892 bp, Homo sapiens
gattctgcttccaagccctggggattaccaagatcaggggcagggtcagcctgtaaacaaacactgtcgggaggccttgtgtcatacatgcttgtttcatgagtttgagcaaaaaaaacctgtgtcacagccaaacctccttttgtgggaagatttgtgtttcatgtggggttttcagaggcagtagggggtgcctggtaaacattcctaggctgcactgtaaacccctgaattggaatccttgagagtgggacttaggaatccaaatatttaacaaattcatcagtgatttttctgcacattgaacactaaaatctgctccattctaaggtctgcatgtatcatccttctaaaactccaaggatataaccacatgaaggcacccttcatactatacgtgcaatataagcggaatcattgctttgaactaccttatgttcctaactttttccagaaccctcggtgtatacctgctacaaggacatactaaatggtgactgtaggaacattgccttgcaatatcaggctgcctgtagtagctgtcctcagacatgagttttgttgctctcttaaatcattcttagataagttggcacctttgtacagttttcatctcttgaattatttctggagacatcaacagctgtggtctgacttggtatgaaaacatgtcatttccttagaaatgcatttattcgacctctaatcagaccctttcctttattacccacggtattgtcccccgcatccccaacttatcatagtgtggaattgtacatttatttctgtgttcatgtatctccccctctctagtctgaaaggttccctttggtcaaggccctgtagtttgttaactccactgcatttgaaccatccataatgcagtacgtattttgtttggataaaggcattttctctagtgttgggttgcaagtacgggataggcagagtgctgatgttcaggtggatctggggaaggcatgtcggcatgagcaggctggcatgctgactggcagatcagaatatagggcctttgtttctgcctcacgttttcttaaaatcatccatagttctccggaatacttaacctgtcacacacatttgagtgacatatatttcttacctgtaaaaacttagggacattattttcttcaaaatagagcataaaatattataagtatacacactagaagcatgtcagatgagtttcttcctatacacaaattgcctttacccatgtgtgtctattttccatctgtgaaaacggtagactggttgaattttaataactcacaaaatttactgttggtggctatttgctgtcattggcatccctcctccctttctccttccctccctgccccccaaccctccgagtctatgactttgatttattttattttattttttatgagatggagtttcactcttgtcacccaggctggagtgcaatgctgcaatctccactcactgcctctacctcccgggtacaaacaattctcctgcctcagcctcccgagtagcttggattacaggcatgcaccaccatgctcagctgatttttgtatttttagtagagatgaggtttcaccatgttggccatgctggtctcgaactcctgacctcaagtgatccgcctgtctcagcctcccaaagtgcagggattacaggtgtgagccactgtgcccaatctgtgttgttttttaaggaaaaaaaagcaaagaaccttaaagctgctttagaattgatatttgtacagtaaaaagaataacaaacaaaagaaatatttgtacagccaagtaatgttggctgtgttacatcagaggttcttcgctgggtgcggttttgacccctgggagtccatttgtgaatgtttggagacatttgcttgc

SEQ ID NO: 44112 - DNA, 1052 bp, Homo sapiens
aacaactgtactgagttctgagttccagtttttaatcatctctgtcctggactaacaattgcagcgttttcccatgaattttctttcttcttgcttttatcctttctacctgttctacactctaatttcatatgttttttgcagaaagctaatccttgtttctatggttgcatttcagtggctactacttgcctcagggatagagcccaagcttcttagcattgtggtttattcttttgaattgtggattattcctatgcctaacctctttcctctctccagtcataccagattagtttgggcctctgtgcttttgatgatgtggttccctgagacatggacctcctgcagtcagcctcattctggccagtctgtaagatcacctctagatgtctctgacttggcccactaccatctctgtttccataacgataccaggagcagttgcttacatttgtgtgtttacatgcactttcccctcctcactagactgtacacccctcagtgctgggcatctgtgtgcttctgggtagttgtagaatcagtggatgtcattttacatgcatttggactcactggtttaacttttctgtcagtctttctccatttcagtagtaatattttctgtcagatcccacaagtgttttataaaatattaatagtactagtggcataagacatatgtagtgctgaaatgcaattttagaaccagaggtttgctttttgcaaagaatatatggaattaatgtgtaaaatgggaaggataaaagcaagaaacaaggaaattaatgaggaaaagttagtccaggaaatagatgataaaaacctgaactcagaactcagtgaggtgatcaggcagcaatacctttagaacaccaactcctttcttttctaaaatgtagattagttgggaagcaggtctgatttacttacatccttactaactttgagttggctgtgtactacgttctagaaaacagtatggtcttaggaaataagtaagtagtatttggcttggaattacaattgtttgctattaggacttggggagt

SEQ ID NO: 44113 - DNA, 1033 bp, Homo sapiens
ctaccatgtacacagttaccatggcaggggatttatgtgtcatctcttttaatatttacaacactctaatgtgcatcagaagcctagagaaatggtcactggcttgagttctcatggattggtaagtgatggaacaggtattcagcctaacctagagccttgttaccagaaagctgtacatttggactgtggcttgtatcttgactctccagccctaggataattagttgcaactttaccatgactgtaacagttattttgttgttgtggtggtgtctctctctctctctctttttttttttttttggagacagggtctcattctgttgcccaggctggagtacagtggtgcgatctcggctcactgccaacctctgcctcccgagttaaagtgattctcctgcttcagcctcctgagtagttgggaccacaggcgcgtgccaccatgccctgctaatacttgtatttttttgatagagatgagttttcaccatattggccagactggtcttgaactcctgaaaggagtttttggggggtgataagaatcttgaaaaaattacctcctttccttcatctcaccagtcactgagttccttttcctggagacaaccattattggcttgttgctccatccagtgcttaggatgtctgtgtaaaacaaatgatacatagcatacacagtgctctgcatctttttattcatcagtgtgtatatctttcatattaatacatgtagaagtgtttcattatttttgcataacaactttattaaaagattaattgcacaccatgtaattacccatttaaagtataccattcagtggtttttcagtatactcagagttgtgcaaccatcaaccacataatttaactttttttttttttttttgtagagatggggtcatgctctattgcccaggctggagtgcagtggctatttacaggtgtgatcgtggcatattatagccttgaactcctgagctcaagtgattatcccatctcagcctgcacagtagctgggacaatcagc

SEQ ID NO: 44114 - DNA, 1045 bp, Homo sapiens
atgtttggttttaaaatgtgtataatctttgatctggcagttttacttctggtactgtgccctaacaatttaattggtaaggtatagacaaagatgcatgattaaagatgtttttcacagtatatacaatcttcccaagactggaaacaaaggaatggttcagtagttttggtagacgtgtatgatgaagtgcctgctaaagtgatattttacagtgtttttaatgataggagaagatgtttatgaaaagagggatctcaaattatatctgggtaaaaattgagaggaaataaatggagttattttggtttatctgtggatactagggctgtaaagaattagtttgtttatagccctgtgatttacagataatgaacaaatattattttggtaatccgaagaaaaataaatactacttttcaagcagaaaaatcaccagttgtatgttaattttggaaagttggctctgttaaaaaggaagatgggttgagtggggagagggatgtggcgccacagatagatggcaaaggatatggttaggactgttgtggacagggggttatataagggagacaccacagaaaaaagcagcatcttgtttcagggatggaaattgaggcagtagtgacagaatgctccgtgatgctgaccttggcaaataggtatggttggggccaaagtagcatttggcgttggtgtgatattggtttgaaatcccagaaaaaatgtacaggctttcgtaaaccagatcatcaggcagtgtagattcttgtctggattcaagaagggcatgaggactgttgtagctggagaaagaataagattggtgagaaaagtgggtatcactcgctcaaagccacagggtttataactgatggagctggaacttaaaccaagctctcaacttttaagactatgcctttaactactactctgtacttttcaaattctagtgacaggagtgaaatattatttagttagtaaagacaagcgtataatggcaacagcagatacaagtccctcataatgacttgacttaggattt

SEQ ID NO: 44115 - DNA, 1035 bp, Homo sapiens
actgctagaatataaatgaattcccctttccccaagaaattatcccccggagaatagtgctgtgcaacatctctcatattagagggaactatctcaatgactttattttgaatagctaataattctttgtgatgacataaatggaaatggtttcaatcttttgttagttttaggtaatttagagttcactagtagaaatagttttttttttaaagatattttaacacctgttttgttaattatttctcatagtttcaaatgttgaatgtttctcatgccttttatagatcatatgaaaaagcaaaacaataagtgattgtgatatagagaggatatatttgtttgtgtataaaaccaaatggaaaagctaactgacatgaacgagaatgagtagttatttttgacttggggaacacttcctttggcaataccatacatatttaaaatgcatgcacatgcacacacacacacacacacacaatcccagacaacgtagaagtgaaaatgctgcatttcagaaaactgactttagactaaagagatggctttactgatgagtacaatgatggtaaaggtgcatgtgataaagcatttgaaataaacttgctttgtgacaatgggaaatacagtctttccaaataatctataacatgaatttaaatacatatgtacttgaattaaacattaaatattataagcaaacatttgactattttatctctattcctacaagtttacaaaattttggtgggagccgttgccaaataatacttgtagtttccaaaaaattacattaccctgtctgcctcagatggtctcccacagaggtatctaatcttttggcttctctgggccacattggaagaagaagaattggcttgggccacacataagatacgctaacactaacgatagctgatgagcttaaaaaattgcagaaataactcatgttttaggaaagtttgtgaatttgtgttgggcctcattcaaagccgtcctgggctgcatgtggcctattggacaggcttggtctaa

SEQ ID NO: 44116 - DNA, 1050 bp, Homo sapiens
agtgtattggatgataactttacctggctgccccggcctaatgactccgtagaccacaagtttgcttactgccttcgtgctttgttctcttgtcaagttgtccattttggaagaaagcttagaagagtgtgctccaaagtggtcgtgggtatttcggtctaggtggtggggttataaatgatgttactttcttcattgtgttcatttctaatttcctactgaaaatgattttcttattaaaatcaaaacacagaacaaattttcagaaattatttaattttaataaaaatgaaataatgactgtgtaatggtgaagcttgtcattcaggcttctgggttccaaataatacaaactgactggctattttatttctagttacagtgattgaagtaggttgtgtaataaaagagtgggcaatgggagaggcagcagctgtgggcaaaccactggatcagccttgaggccatggtgctagatgtgtcttgccactgaagctgagtccttccagtgattttcccctgtagttttgccgcttgtgacctcgagacttctttggagagtcaccaccagtgggcatgttacaaactgagcctaggccgtgggcctctgccttggctgcctgggagtaaggacagactgtacctcctgaggctcctggagtgggaagcagtgctttatgctgactcctgtccagacttttctcagcatcttttctcacccaagggatgatgatgatgaggatgatgacgacgatgatgattttgttaccttgactattgatcagttaggactttgaggcaagtatcacctttcaggggccatctgccttgaagtgaaaatgattgttaattttgttgctagttgtttattcaagtgatgctgctttgctgttgtttaccctgcacgattcagcctttacttagaagcttttgtcatttgtctggttgggggagtatggaatagttattttgacagaggagctgatttagatatatgccttgcctttaactctaggttattttgctcatgagttgtgtcaaacttaataa

SEQ ID NO: 44117 - DNA, 1064 bp, Homo sapiens
ctccgcctcccgggttcaagcgattctcccgcctcagcttcccgagtagctgggattacaggcgcgcgcctggtaccatgtgcagctaatttttgtatttttagtagacacagggtttcaccatgttggccaggctggtattgaattcctgacctcagatgatccaccagcctcggcctcccaaagtgctgggattacaggcgtgagccaccgcgcccggccctgtattttttaataggaaatattggacagtatctttttgttttactgccttctgaacagccttgcaaatgtttctttttatagcggttttaccccaacttctctgtgttctcatggactcagtggggtctccacctactacagtggttttggttggcctggaaaagcctcctgaccagcggacgggacttgggccctctacccctgccagctcttcagccctcgtggggcttctttatggcagctctttccttctagaagttcccactcaatgtttgaaatacccacaagttctgaaccttggaggcacactcatcttattaatggcagagttgggactccaactcagttaccttggctgtttctcttccattttattgatggcagcagccagaattcccgacaaaggtctctggattggactggtaaattttgttcattccacttctcacgtgtgaatttaggtaatctgctgagctgcagattcttattgtgttatggtttagagataataacatctttgtaactgaaattaaaatttttttttgtcttgctgcaaattcagtctattgtaattctcaagtttcttcacagccctaaatttaccgttcgttatttgagattgcttggcatgtggttttttttttttttttttttgagatggagtctctctctgttacccagactggagtgcaatggtgcggtcttggctcactgcagcctccacctcctgggttcaaggcatgcactaccacgcccggctaatttgtgtatttttagtagagagagggtttcaccatgtcggccagactagtcttgaactcctgacctcaggtgatctg

SEQ ID NO: 44118 - DNA, 1056 bp, Homo sapiens
aatcttactctagcaaatagtaaggatttttgccgatgtaaccttccagcttttctttttgcagcagctgctagagccattatcctctctctgccaggcttcctactcatgctagttgttaattgccagggtctacaacagtggggcccacaggctttatcctgcctcgcggtgacctaacattttgtcactctgctatttaatttttaaaagtgtctccagctgggtgcgatgatgtgtgcctgtagttgtggctactctggcagctgaggtgggaggatcacttgagcccaggagttcaaggccatagtgcatgaagattgtgcctgtgaataaccaccgcactctagcctgggcaacagagagaacttgtctcttgaggggaaaaaaagtgttttctaaatgcagaagcccgagttactttatctcctcattttcccccgtagtctgtatctagttggtcactagatcctaccggtttctttgcaggagtcctctccaaatgcttccgtcaaaactcgctgtactgctttcatctgtcattcctcatttgccctcaaatattgttcactagcctctcttcctgttcctccgccctttgcatcatccccagaattatattcctaaaagagactcattaatatagcttaaaacaggtcgttcacagtctggtggtcctctttatctaaagtcctcactgatcctgccatttctggctcttttacccttcttatcttcataatgtgtacttccctctgcctggacctcactgagaagatgccatgtcccctgcacgctgcccttaccatcccactgcagagggtcctgctgcctcctagagcaccatctagacctttgtactgagactcagtgcttctcactccactagctcgagacgcaaggagctttaactgtctcatgttcacgtttctggtgcctagcacgttctttggcctatagacacaaattttatttgaataaagatttttatttctttcccacttggttaggaaatactaagaaaaagaggtgtgtgtgtgtgtgtgtgtgtgtgtg

SEQ ID NO: 44119 - DNA, 1048 bp, Homo sapiens
gtacaatcagctgtaacgaggtaaaagattcatcaatagattcttatattcagtcaagcatttacgaaacagctaaatgagccattgatgttagcagttaagtgacatagtcactgagaaaatttgggtattctatttatgctaatgaatctaaattttgtaaggatttcaagaagttatgtgattcaagcctctcactctaaacaggtgacaaaacattcaacacagatggctggcttgtttttttttgtttgtttgtttttttttaaaataaagatgtacaggaattaagattctctaaccttaccttttcaaccatggcctcatgattggttgctcaatatattttcaatgacttaattttgttgcactacaataaaattactacttaattttgttccccttctaagacagttctaaaatgtaatcacctttttggtcaagaccttttcatttttctttctggaatttgaattacttttgtgggggacaggggcgtgctctctgtgtagtctcaggacggcttggatctagtctaaatagtattccaggaaacagcatctgagaaatcagggtgaaatgaaacattgtggcaccatcttgaaactctaaatacttgcataagcgggaaaagagatggaggagaggatgggaaaatagatgagaggggtatatagtgaccaggtggcaaagaaaggtctttgaattttatgctgatgtttaccaagagccattgaaaggttttagcaaggatgtttgtagataatacatgcacattttcctgtgggcatgaagtaaggtcttttaaagaaagtctaaagaaatatatttttccccctagcatggaaggctataagatatgctgtagactttgcagcaagatattattcatctgttctggaaattggtgggaatattatggcagcatttacaatgagtgacagagagtggatgaattccttgacactgggggtattaaacatcgaaatggagtaccatagttagaggtgcttctttctaaagacaggtgattgacctgttaagtctt

SEQ ID NO: 44120 - DNA, 1079 bp, Homo sapiens
tctgatgatagtttcttttgctgtgcagaagctctttagtttaattagatcccatttgtctattttgacttttgttgccattgcttttggtgttttagtcgtgaagtctttgcccatgcctgtgtcctgaatggtattgcctaggttttcttctagggtttttatggtgttaggtcctacatttaagtctttcatccatcttgagttaatttttgtatatggtgtagggaagggatccagtttcagctttctacatatggctagccagttttcccagcaccatttattaaatagggaatgctttccccattgcttgtttttgtcaggtttgtcaaagattagatggttgtagatgtgtggtggtatttctgaggcctctgttctgttccattggtctatatctcagttttggtaccagtaccatgctgttttggttactgtagccttgtagtatagtttgaagtcaggtagtgtgatgcctccagctttgttctttttgcttaggattttcttggcaatgcaggctcttttttggttccatatgaactttaaagtagtttttttcccaatactgtgaagaaagtcattggtagcttgatggggatggcattgaatctgtaaattaccttaggccgtgtggccattttcacgatattgattcttcctatccatgaatatggaatgttttttccatttgttggtgtcctcttttatttcattcagcagtgatttgtagtctccttgaagaggtccttcacatcccttgtaagttggattcctaggtattttattctctctgaagcaattgtgaatgggagttcactcatgatttggctctctgtttgttattggtgtataggaatgcttgtgatttttgcacattgattttgtatcctgagactttgctgaagttgcttatcagcttaaggagattttgggctgagatgatagggttttgtaaatatacaatcatgtcatctgcaaacagagacaatttgacttcctcttttcctaattgaataccctttatttccttttcctgcctgactgccctggccagaacttccaacactatgttg

SEQ ID NO: 44121 - DNA, 1027 bp, Homo sapiens
atattgttgtgtgtagttgtaattaattcagtctcatatctgtacagtattcatgaatatacctcagtttattcattctattaatgagcatttgggaggcttacagtttgtggttattaggaatagtgctgctatgagcatttctttttcttttttttttttgaaatggagttttgctcttttgcccaggctggagtaaagtggagcgatctcagctcactgcaacctctgcctcccaggttcaagcaattttcctgcctcagcctccagagtagctgggattacaggcccgcgccaccacgcccggctaatttttgtatttttagtagacacggggttttgccttgttggccaggctggtctcaaactcctgacctcagtccacccacctcagcctcccaaagtgctaggattacaggtgtgagccaccttgcccagtctgccgtgagcatttccatacatgtcttttggttaatgaagcttgcatgcatttgtttaatatattcctaggagtgcagttgctgagttttagtgggtattgtcagttttccaaagtgaatgtaccactctatacttccaccaactgtgtatgctccaggttcttttcaatttggtattgtatatatttttttccttctcttacctttccctccatttctcccttcctttttccttgttagcattctggtggctctaccagtgttacccagagtttgcaccattttgaggaggattagaagtagaaactggactatttctgaacatgagcgttcctgagggggaacagaattagaagcatagaccagtaagtgaccctagggtgttgttgttggaggcactgctttcccactgattatagtcttgtaactgggtactagaggccgtgggtattaacattagttttcagacttggtttcagtagcaaaaccttctttcgtcaaaccttaataggaagttatcatgtaaaatatataaagaagatgcttggtttgggagctggggaatgtaaatcagagccgcagttttt

SEQ ID NO: 44122 - DNA, 1048 bp, Homo sapiens
aaaaaagaaaacacccctctgctttaaagaaatggtacttcctgctttcataaacagtcatgtgcatagtttagcaaggcctgatgcctctggagctttttccctttatagcaccattgaatcccagtcctaacagaagtactgcgaatcttgtggcctcattctgaacaaaagggattagagaagaaaaatctcttgatataaggcttgaaagcaagggcaggcaatcttggttgtgaatattttctgatttttccagaaatcaagcagaagattgagctgctgatgtcagttaactctgagaagtcgtcctcttcagaaaggtacagctacatctcttgcatgaacaattaatggtgtagcattgctaagaaacaaaccaggacatatttttttttcttgtcaagtttgctatataacgtattgtcctgcatgctggtattgtgctgtattgaagatgtgtattggggcaagctgttctgcttttgcaaagggtgattgatttttttaagaaaaatagtggagcctgatcagctgcagcatgcacaccataacacagcagaccgctggttcatgtgtgacagctgttgaaggctttaaaaataatttagctaaaaagcagaaaagaaaaatcttgcttttttaaagggaaatgctgtgaggttttcttcctatatgttgaggttgctgctctacagaattacgaaggttatttgtaaaatgtaggttaaaaatacttgattttgggttgtaataaatatttattcttatatggtaagggagtgccatttgtaaatagcttaggaattgcaaacccacagattagtcacattctgtaagagagatatgatgcttcttcaagtctgtgctaggaaatggaacagtcactgcatgcagtaatggttcatgcctgcaggtaaggacaaaatgactcagaagtatttttaaagcaattattttatctgtcaatcatatgattatatctgaaaagagatatttcattaaaatgactgttttgccttataaaaagaattaagatatttttatc

SEQ ID NO: 44123 - DNA, 1106 bp, Homo sapiens
gccgagattgcgccatccagcttgggcgacagagtgagactttgtcttcaaggaaaaaaaaaaaagccaatcactgaaagaacaagtattaccgaggaagaaggctttaattggatgctgcagcaaggagatgggagctcagtctcaaatccatctcccagactaaaaccagagcttgatatagcagggaagaaatgtaacagtgtgtaagaaaataggaactagggaggggcaaggaagcaatcatgatgaatgagggatccaaagtgtcattgtctggatgtggtgatttggtgagtttcagttttttttttttctttctttgaggtggagccccacgcacatagatggctctctgtggtctccctattcatccgtctttttatacttttttttttgagacggagtcttgctctgtctcccagcttggagtgcagtggtgtgatctcggctcactgcaacctgcagctcccgggttgaagcgattctcctgcctcagcctcccgagtagctgggattacaggcatctgccaccacgccaggctaatttttgtatttttagtagagttggtgtttcaccatcttggccaggccggtcttgaactcctgacctcaaatgatccgcccacgtgggcctcccaaagtgctgggattacaggcatgagccactgtgcctggccttcagttctttgagagagagagagagggaatttattgttaatttttttttggaggcttgagggtcctttgctgaggaaggaacttagataaaacatacttgtattacgctttaagaccagaaaggtcagtttctgtgtttatccaaaagaacagcctatgggactattgggtgggttttactatttgggttgttgaagttcttggaaattttactgtaggtctcagcaacagtaatcttctggagaagatgaagaatgtgattgcctccagtatctttttgccccttagatttcccctttataaattcatgtggttcagctatgagatgatctgaggatcagtctagttctaaaattgcttggatctttggttaagtgtatctggaaatgtatatttaagaataaattaatgtagctcaattgtaa

SEQ ID NO: 44124 - DNA, 1013 bp, Homo sapiens
ttttttttttttttttgagacagaatctcgctgtgtcgcccaggctggagtgcagtagcgtgatctcagctcactgcaacctctgcctccgggttcaagctattctcctgcctcagcctcctgagtagctgggattataggcatgctccaccacacctggttaatttttgtatttttaatagagacgggttttcaccttgttggccaggctggtttcgaattcctgatctcaagtgatctgcctgcctcagcctcccaaagtgctgggattgcaggcatgagccccaccgcgcctggcctcaaataattattcttgagccacttagcatgttattgtccttgttgatttttctcttcatttacaaacctcataacctgctcctctatcctcatttatcattgattttgcctggctttctagaatttctttagtattttctgtcaactttgtcacttttttcatcctttgcagattttaagttttcacttggctctagatttgtattttattgaattgttagactgtgtgattattaatgagagagtgacaaaggattttgatgggtggggataaaagttagtgataattggggatagttttttgaatgttcagtttaccaatgatgatttttatgttttgcagaatttctgcttttctgtgaattctcataacagaggacttcagtaatgaacactgggataacagggactcccttttaaggctagactggccttagcagatgttggtcagttaatcatccaccctcctagattacgcagaggaattgctttattcttgcacctttgtgaacattcacttatgagtcagtcagttttgaatcaggacctcaatacttggcttcagatagcagtattagaaattggcacctgagccagaaaagcctttgcgggccttttgcatttcagcgagaagtctcttaaaaataccaagttgggccgggcgcagtggctcacgcctgtaatcccagcactttgggaggctgagctgggtg

SEQ ID NO: 44125 - DNA, 1078 bp, Homo sapiens
aatgtcattgaaaaatttgaggacatttgaaagtggagatgcatagaacatagtggcttagaacccaaaccctatgtacagactgtcttggtacagattttccctctaccacagtggctctgtgatctttgacaaattgcttagcctttttgtacctcagttttcctgtaaaatgaagataatgcgatagtatttatcttacagggatatgggagtatcaacagaattattatatgtaaagcaaatagatgcatgtctgatacattgtaactggtgtaaaatgcttgttgtttctgtttctactttgtattaggcagttcttgcattgctataacggaatacctgaggctgggtaatttttaaagaaaagaggtttaattggctcgcggttctgcaggctttacaagcatgggtccagcatctgcttctggtgaggccacaggaaccttacaatcatggtgaaggcaaagggagagcaggtggttagatgggttgcgtggtaagagctggagcaagagagagcgggagtaagtgccagatacttttaaacaatcagatctcatgtgaactcacttgtcaccaagggaacaatgctaagccattcatgcgggatccatcccagtccccgtgatccaaacacctcccagcaggccccacctccaaaactggggattacatttcagcaggagatttgaagtggacaaatatctaaaccacatataatttatttgaaatacaattattatcctgatattttaatgtcaagcactgtttcatgcttaaaatgctgtttcttttttcttttccttttccttttttttttttttttttttttggagacggggtctcactctgttgcccagtttagagtgcagtggtacgatgttggcttgctgtaacctctgccttccagctcattcaatcctcccacctcagcctcccgagtagctgggattataggcgtgcatcaccacacccagctaatttttgatttttttgtagagatagggtttcgctatgttgcccaggctggtctggaactcctgggctcaagcaatcctcctgcctcgggcttcca

SEQ ID NO: 44126 - DNA, 1061 bp, Homo sapiens
gtattctacaagctactttgtgagagttatgttttggatatgtttatcagtacatgtggatcttctgcatccttttcttctttttttttttttttttttttttttagacggagtctcgctctgtcgcccaggctggagtgcagtggtgggatctcggctcactgcaagctccgcctcccgggttcacgccattctcctgcctcagcctcccaagtagctgggactacaggcgcccgccactacgcccggctaattttttgtatttttagtagagacggggtttcaccgttttagccgggatggtctcgatctcctgacctcgtgatccgcccgcctcggcctcccaaagtgctgggattacaggcgtgagccaccgcgcccggcctgcatccttttcaaatgctgtatattatgaatgtaccatagttcatctgacagttgcacggctattcattacttgctgttgcatacagcaatgtgacaaacatctttgtgtgattctcctaggccacgtgtaaatgtctttctagggtagatttgggagaggaattgctggagcatacatagccagcattcttcatatttaaatcaataagtagaatagtgtttggcatgattgactaattgtttgtaaaatgaattatgcatttgcaatattgtcattttagttagggagtgccagtgtaagtaaaaccagtgatctcaatactggctgtgcatcagaattgcttatggaactttttaggtgttaccacccccagagagtgatttcgttggtctgtaaatcagtacagctgtcctttagcatgaagagtaaaattaaatacagaggatgcattctgagactgtcttagaatgcccaaattacccagcgcttaacttaaatgtagtttacctcataaactacggtcaaatatagcaaaaaattttgatcttctttatggacagttaatatgttaatgacttttaccctccaaacacttagcatagtaaatctaataaataattgttttaagattagcagagaggacaaaagaaattatttgtagagggatggagca

SEQ ID NO: 44127 - DNA, 1087 bp, Homo sapiens
atttactttttaaccagacatgaatagttcaatttaggatggcttaaataaagttaagataggtaacctttcaactcatgaacatatgactgtcaagaatcattgattccttgaagtgttggtagctgaggctcatgtgtatttcagagaaggaaatatggaagggaacacgtgagagcaacgggaaaactaggaggtgactaggccatcattttgggataaacagcattccattttgctttggcacatctttcagttattcttctgtttaaaatatttgaaaattgtgaatttttaaatgtatttaatacaggaaattataagcataaagaataataaaatagtcaatccctaacttgagaaatggaatgctaccacaagtagagatattttttctttatattcatgctgttaatttttcctctcgctttactttctgtatgttttttattttctctgcctttattttatttatttgagaccccctccccctgaaaaaaaatctcgttctgttgcccaggctggagtgcagtggtgccatcttggctcagtgcagcctctgccccctgggttcaagcaattcttgtgcctcagcttcccgagtagctgggactataggcgtgcgccaccatgcccggctaattttttgtgtttttagtagagatggggtttcaccatattggccaggctggtctcaaactcctgaactcaagtgatccacctgcctcggcctcacaaagtgctgggattacaggtgtgagccactgtgcccagcctcacaaagtgctgggattacaggtgtgagccactgtgtccggccttccctctgtctttaaagaaagtagtctcagtccaaatgtcagacagagttaggctttagaataaggaaaaagttgggcactttaggtgagtgaaaatactttggcaagtacaggcatacctcattttatttctgccctacttaaaagtgacatatctttgtatggcccagaaagtgctctgggaacaggcccctgccatcatctctggcttcatttcttaccagtaccgacttaagtcctgccagccaccaaaaccactcagatgg

SEQ ID NO: 44128 - DNA, 1032 bp, Homo sapiens
acatcttgccaaattctagagtggtagttgtcaccataatacaaagcaacagttagtgttgtaaccatcatataaaggagcctggcatacttggcatactttttttttttctttttttgagatggagtttcactcatgcagtggtgcgatcactacaacctccacctccctggttcaagcagttatcttgcctcagcctcttgagtagctgggattacaggcatccaccaccatgcccggccaatttttgtatttttagtagagatggggtttcgccatgtttgccaagctggtctcgaactcctgacctcaggtgatccgcgcccccctccctcctcccccttggcctcccaaagtgttgggattacaggcgtgagccaccacgcctggccaagcctggcatactgttatgttccacttggaagctacagttgtagagctaatcacttgggaaagaatcaaggagatgctcaaacagaagcagatgtactatggcaatggaaccctcaagagagagagcaggagtagaactgtctttataagaacctgatgtagaactcataaacattcaagtgccatagatggtttaaggaaaactttatgaacagtgtgggaaactaccatttatagttttctcaacaggatcaaatcagccaattagaagggtacacagatggcaacataaggcaatagtctgtctgtaaggaataaaacagaaaaacaatagcaagcaaaaagcgctgtcccaatatggcaccattggtgcagaagtagcagatcttcaggtgcgtttcagaggccctgagaatatctgagtagtgccaataaggaaaagcctggagttagccaagaaactttatattatgctcttttttttttttttttttttttttttgagagtcttactctatcgcccaggctggagtgtagtggcacgtctcactgcaacttctgcctcccaggtttaagcgattctcttgcctcagcctcctgagtagctgggattacaggcatatgccgccacacccagat

SEQ ID NO: 44129 - DNA, 1022 bp, Homo sapiens
gtggtgcgcgtctataatcccagctgcttgagaagctgagcaggagaattgctcgaacctgggaggcggaggttgcaatgagctgagattgtgccacagcactctagcctgaacacagagactccatttcaaaaaaacaaaacaaaacaaaacaaaacaaaacaaaaaaacagcaacaacaaaaaagaaagatccaggcatagctttcccttcgtttcaaacctcacaagggatggtagcctttaaaggaacaaacagttactgtgaattttttttcaccaaaacctctgaagagacggtttagggaactggatcgacaaaattttattggattcataccttgctaaatacagtgctggtaaacaataggtacctaacatttgaatacaaaatgttgaatactgagtagagctcgaagagaaatttgcagagggtgctgtgaaactggataaaagaacttttgttcaaactgcggaacttctttttcccagttccattcattgaactttggggattgggcctgattatgccaggcattctcttaacccttctggttgtcaggaactaggggcacatgggtacaggtatggactagagatgcccactggcagccctttgggatttggctatgttgtatgttgtatcactccgagggattggattaggtgtgccccctgaccccggtgcaggcagttcacagatagtccagcaaccttgtggatggtgtagcctggctggaaaagataaactgggataatgctttccttgcctcaggaatttgaatttctaagagattaggtcagttcaatggggatagcattgtagatactaaaagcattgacttatagtgaaagatctggggcccagttctgggtttgttacttacttagctaggtaacattggacatatcttatcttgcagggtttcacctccttttcttacctctaaaatggaaatgaggccaggcatggtggctcacgcctgtaatcccaaccctttgggaggctgaggtgggtagatc

SEQ ID NO: 44130 - DNA, 1061 bp, Homo sapiens
tagagtattgtccagtagatgggtgaggggagttcactaagtattcttagtgtctagtttgtaattagtttatgagacttaaaaccccaccacacattattctgaacctgctgtaaatattatgagaggcagtatgtatagttgcctctggagctggagtgcctggatttgttttccagctttaccatttgctagctgtatgaccttgggccaagctatttaacctctctgctttagttttctcttctgtaaaagagggttgataatgacagtgtctactccatggagggtttgtgtggattaaatgagctaataagtagtaagcccccacaacagtacctggcacatagtaagctctattagtgtttttcttctgtgtcagttaatagcctcataggctttcctcagatatttaaatacatgaatgcctatgatgccatctctcctttggcttcctgaaatcagatttccttagttcttgtaaagccagtggacttccattgtattttctttcctctcctgtttcactgtaattcctctaagttatactttattatacatttgaattttaggaaatatgcttgatgcatttggaatcttttttctaaagacttttttttaaaatcttatacactaactggaaataatttgttacatttttttccttttgtgttcagaggctcaaaactatttcatttgccttaagaaatatgagtcaaaactatttatctcctaagttaggaggctaggaaggccaagattcagaaaagttggtaaattaagaggactgaatactagaaatcaaaagaacatccactttcttgcttctctgtgtatgatattacttttgtaaaattgtgtgtcttttatagagaaaagtactcttagcacaaagctgattgtttttgtgaagagtattttgaagatgcctgttgaaaagcacttgtggagtagtttatggaaacagctgtgagattgcacaaagtattcttgtactcttcagagccattctttagtaggagaaaataaggtccatattttaagcttgatgatagcaagcc

SEQ ID NO: 44131 - DNA, 1122 bp, Homo sapiens
tgctgcttcaagggtagaagactcctcactgctttccttcatgagatttcaaaggaagtgttggttttttttttgcctggttcaagtattgaccaagaagatgacagtgatgtggtctcttaggtttcaaaatttctacttaaacatcttggttctagtgatacgtactttgcaaaaataattcacagttattatgacttttgttaatattctgaaactatggtattcagagatgatccgtcaggttctgattaagtttcttagaagcccagtgcactgaaaagattatggtgtgtcttttctcttcctagcaaaatggaaaatgacaatactgaaatgcaaactaatagaataccagcaaaaattctcattgttactcatggcttcaaaaactacatcagatgccttaaaaaaaaatcctcttacttcttttggtacctcatttttgttggttttctaagcatgtagaaggggaccagagcatgccaccccaaaatatcccacttttagtgtaggtgttgttttaagctgaaggcatttagtttcctgccctccacctttctgtctaaaagcaggctatccatttacatttctgaaagtgttccgtactaaagaacccctatttattatacatttctagttatcttcccatgatttgtacctccctcaaagtccagaacttgttttcctcagtctagccttttccccgtactttatcaccctttgttaagatggtgtgtaaacccaaattttaatcacccttttgagttaacactgagttctcctttgtgtatgcacattgcatgcataggtaaactgctttttttccccctcctgttaatcttttatctgttaaattcagggaccccagccactgaatctaagagggtagggaaagagtgttttcctctccaacagtgtgcttcatttttttcctgttgggtaattcaacactgactctccccaaaattacacagaagaattaaagtaacacaggaatgaagaagcgaacatagatttatctgtcagatgcatttaaataaagttatttctctacaatttccttggtcttttgtatactgttataataaactagtaggcagcagaaaattttttttgtga

SEQ ID NO: 44132 - DNA, 1039 bp, Homo sapiens
gctgtggggcattgtagtcaggattttgtagaggtatatctttgttaatttttctccagaagtgtttttaaaggtgagagtttaataatgtttggaaaaaataagagagagcacatgtcagatgacaaatggatggcactgccagcaagggctgtgagggtgcaagccggcttttctctcctgctggtcagtgattctgttcaccagcttaacagactaagttctagagcaaaacacttacttattacacattggttctctatacttctttttgggttatcgtatgtttatccttttaaaaacgtcatagaatttttcttcttcttttttaataataaagctttcttgcttgaagaaaagcctctttgtatccaccacagcagatggaatggcatttgtacttctaaatttttcagtagtaggagtaccaaaatagcactaaaaattaattactttgattacctcccctcccacccagtattgggaaaagtcataattaagtctcccttcaaggtagttcattagttcttgtatgttaaaaaatctgacccttaaattaaatcttccttttgagctgcctttgtgtttccaggacatgtttagctgcacctgcctgctattcggtctctttcttcaccagagttataaaataagaggaaaaggattgtattctctattcagaactagagttctgtggataacttgacagctttccataagtgtgagtctccatatctataatcaagttgtaagtttgtgtttaaacatttttcccccatatttagccatgtctcctcctttgtattgttttcttctacaaaaatgttcttgtaatagtgttttacttttaattctgagaaatttatgacattttctttttaaaagttattctccacttaagttagagatgtatacagcattaaaatggattgcagataaagatatttgtaaatgagtgtttcggttaaatgcttttccaactgaaggtggcatcttgccaacgagaggatagcagttagccaacatgttttttcttcat

SEQ ID NO: 44133 - DNA, 1043 bp, Homo sapiens
tcttgaactcctgagctcaggtgagccaccacgcccagcctattttttcatattttttacatttaatatttctttagtaaagagaacattttactaaaatattacaattctgaatgcatttactagccttgctgcgttctgtgcactgatgtgtgatccattattatggttttatctgctacctatgtttgtcttcagtctctccctgttccctgaacttcagttggttcagctgttcccctttccagtacctcatggggtcttagactcagcagtattcctcccaggctcatctccctagccttacacctttgtgttccatgttttctctgctgcagcctggcgcctctgtgttttcctttctgtttggcttagacctactaggactcatatcagatctcacccccagagggaggatttccctgactccttctcccccatgcgtgaggagttcctttgcctacctctgtcattgtgcagaccacagtgcttatggcattatgtctgtgtgatttttttctcctctactggcttatgagcccctcagggacataaactgagacttcttgtttatgcttgtgtaacagagtgtgtggcccagggttggcaccagtatctgtctgcagaatggataagtaagatctataatgtcacaggaggcaaactggtggatgtgggctggatcacttctgtagatgtgatcatgtggttgacagtgctttaaaattggagatattttacatgaaagtctctatggtttccatagtctgaaaaaaaatgtgactatttggccactctgggtcagcatgctttcatgatagttgttcactaggtatttttggtggtttgccacagattggtgtttttgtaaaagatggggttctggtttctggcatgtttttgcagttctggctttctgaatggctaattaaggatagagccttaatgcagatactcatgtgtatgtgtagatacacatgtatatgctaaaatatacacaaaatgctgatgaattgaattttcaaggcctttagctgaataac

SEQ ID NO: 44134 - DNA, 1060 bp, Homo sapiens
taaaaatacaaaaattatctgggcatcatggcgggtgcccgtaatcccagctacttgggaggctgaggcaggagaatcacttgaacccaggaggcggaggttgcagtgagccgagatcgcgccattgcactccaggctgggtgacaagagcgaaactcagtctcaaaaaaaaaaaaaaaaaaattacctaaagatgtcttttcgtttagtgtacacctttttgctttctataaaaaggctgggagtttcataatactaaacaggtagtaactacagaaaatttttaatgaccaatacctatactttgaaagagggttaggaggaaaaccatcatagaatctcagaattaacaaaaatttattatgcattatattagaatcatgtcaaatacaacttatccagatttttattgtttgttcaccatgaatatttgttcgttgggggtatatctggacttgccaaaggaatgagaacacacgtgtgtaatatttagcttgatattatgttataagtgactttagggattatctagtcaagttgttttaaaacagtggaaccttttctttaattgaaattgtatccagagtccaatatttgaagcataaaagccaagtggttgaaaggttgaaatgagagtcatgggcccagaattctcatgtttgcctggcagcaagtccttggttagtagtaatacacagcgttagtgtgcattagtgttcactctgtgccaggtcttgtattaagcactttacatgtatgatttcacagtttgaaaaccacttatctagttcagcttctgatttttttctgttaagaaacaggtccagagagcttaaatgaattgcccagcatctcaaactagtttttaatagagttagtattattaaaattcttatagtcagtttagctagtggcatgtgtgtgatattttattttcccagttgttagattaattcaggtcttttgcagtaaaataaaaatttccagaagagtataaaatggaaaaaatacttgactttcagtggctagggctttgataatattttggtgtgaatcattc

SEQ ID NO: 44135 - DNA, 1050 bp, Homo sapiens
atagtcccagctacttgtgaggctgaggtgggaggatcacctgaatctgggaggttgaggctacagtgactgcactccagcctggatgacaatgagatcctgtctcaacaacaacagcaacaaaaaggggtactttttaaaactaatgagaagaatgacattgttggacatttttgaaaatttctttaatgtctggcttaattgaagacagattatcatatatgtgtctgccttcagtctgttgtgatatgttatttttgttgaaatatatgaagaaaatattcaaccccatcctgtgttcttgtatattttctttaaagcaacaagctcatttcatacgcttttgagaaaaatgtctgtcaggttcccaaatttgaataaccaaggcttgtctgttaataagccttgctggaaaaagcaaataaaatgattgcacaggtgtttttcctggagacatgcattttactttggttggtagcaggaatacttcccattttagcacatagaatatgaaaacgctgtcaactcaacattgagatttaatgaaattaattttttcattgcttcatcaagaacatccttacatgaacctggcaactttttaactgaaagttaaatgcaaggactgctagtacagcttggggccaccacattgatttgtgctaagatgccagcagcttaatccaccattctttttatgtcgtcagtgcaaatgttgacacagaaagaggcaaataatgtcttgaatcattatggaaataggtttgatcttggagacttctgaaggtttgtgaaccacactttgagaactgctggaaggtataaacattaacactgggagttgctttggctgctcttcttcccctcaggaaaaaagagaatcaaatgagagtctgattttcaggtataaaggagtgggagagggaacagatgtttatgacattcctattcagtctcacttaagcctcataactgtcatgtacactagatattgttgtcccctttttgcaaatgagataaacaggtcttgagggttagaatagcttgcct

SEQ ID NO: 44136 - DNA, 1940 bp, Homo sapiens
ggtagatagggttttgtcacttgaatgcaaaattagctttataactataactttgaaactaaatggctaaattattactgattttatttttatttttatgggtcgccttacaagatgtatttagtttgcctcttggttttgagtactgtggaaatgagcttactggttgctgtttctgaaaatgtgtactttaacttattctcaaggtaattattgatgtgtttttaaactgaaaaacactgaagaaattttatagataagttttctccatattttgtttcacataaattgtgtccattttgaagatgtagttcctcttttcctcttccaaatgattaaactggtaaaatttttgtattagaggaattaaggtgagaggtgctgagcaaaatatgaatcttccaaggtttattcttgtaccttgttagggatatgcgtgggtgtttgtgtgattgtgagagaaacagaatgtgtgtatgtgtcactgattttttaaaagtatagatgttgctttattatttgccttaaatatatagcaaaatcaacctgtagacaatgcacctgaagagaaaatgtaactgtgtgaagatttaataaagtggattggtggaaagaccattttattatttggaatgttattatttggaatgttaacagaaaaacttcagctgaattaaatttaaaggagtttaattgagcagtgaacaattcgcgagtcgggcagccccaagaatcacgggagattcagagactgcagtgcagctatgtggtggaagaagatttatagacaaaaaaaaaaaaaaagggggggaagtgatgtccagaactcggaagtgaggtacagaaacagtcaggttggttacaggtcagcatttgccttagctgaacacagtttgaacactcagcagtgtatgaatggttaaagtacggctgctggaatttgccaggactcagctgtatttacaggcgcatacccatagttacgtttttcaatcttgtctacctgttagcttatggatcctccacaaggacttaaatattgaagtacggagtccttctcaggccatatttagtttcctttaaccggaaaagtaactagaaaaaaagtgtttaaaggggcttatattctccccctgccatccaccgccccccccccccccgccgcaagtgcattaaatttaagagtggatgttgaaaataaaaactaaaaattgttaatcaccagtatgtttcttaagtaagctttcaagaatgtagaaggaacaaagaggaaggtaatttttagccttgataatgttaaaaaaaattcacaaaaccataaatggagggctgtatacttaaactcttctattcttagaaacgaacctatggtagtagattattccattttgattataactcaggccatattgaaaaggacgtttgcagtgatgaaaaactgtgattccttgattaacgtgtagaatttaaaaatagtgtgttacattttcacagaaattagatctgtgaacatatgtttttcttagctgtgatttccaaattaattttgaaatattgagtgaattaagcagttttaaaagatgcaacagatttaattttcacccttttggatttgtttttattttagctgagatgtgattcttgttttacttgaaaatattgcttgggttttgttttaaaacatgaattttactcattcatgtaaattatgttttataggtcggcttgtcatcatttgatttgtgactctctattctttggaatacagtggttaaaaactggatatgtaaaatactgatacctcgctgctattaccaggattttataccagtgtctagtggaatagaccaaaggacagagtccttggactcagaacttgcatgaattctgcagtgtgcaagagttttctggagaattggtaccttactcatattctcaaa

SEQ ID NO: 44137 - DNA, 1049 bp, Homo sapiens
agttgacttctaatataccttctgcaattagcatggtggattttacaataggaaaaataggactattgagtattaatggtaacagatttttttaattttaatttttattttttgagacagtcttgccctgccacccaggctggagtgcagtggcgcaatcttgactcactgcaacctccgcctccgtggctcaagcaattctgctgcctcagcttcccaagaagctgggattgcaggcgtgcaccaccacattcggctaatttttgtatttttagtagagacggggttttgccatgttggtcaggctggtctgaaactcctgacctcaagtgatccacccgcctcggactcccaaagtgctggggatggtagcagatattgacagtgccaggcatagtgcctgatggacactctcactaaaacagcaacagtcctcagcattctatgggcctaccaactttgcttatttgtattgcacattcattagctagattttctgttaagaatagtctggcctggttgggtgtggtggctcacgcctgtaatcccagcacttagggaggccgagaattgtttgaacttgggaggcagaggttgcagtgagctgagatcgcgccattgcactccagcctgggcgacagggcgagactccatctcaaaaaaaaagaaagaagggagggagggaatagttggcccggcgcagtggctcatgtctgtaatcccagcactttgggaggctgagatgggcagatcatgaggtcaggagttcgagaccagcctggccaccatagtgaaaccccatctctactaaaaatacaaaaaaaatatatataattacccgggcatggtggtgggggcctgtaatcccagctacttgggaagctgaagcaggagaatcgcttgaacccgggaggtggaggttgcagtaagccaagatagcgccattgcactccagcccgggcgacaatgtgagactccaccacacacacacacacacacacacacacacacacacacacacacacacacaaagaatagtctgaccaaag

SEQ ID NO: 44138 - DNA, 1063 bp, Homo sapiens
atgcttttagcaggaaagaaatttgtaggccgggttgaaaatcatagtgtttctgtacctctagctgttcttttgaaacattactgtaattctgggcattgaaaggatgttaggatttatgagggtgattaataagtggcatacatgcagagggacttgaatggcataattgatagtatttagaaggccagtcatgatcttgccaattattcgctgtgtaatattgggcaaatcagtgcacttctctgagccttgtctatccatgaaaaagaaagtaaacttgctatagttatttctcaggattactataaataatggagaagataatgtacttcaaagcagtatgaaaaagttctttgtactatgcctttccgcagctttctttcaaattttaaaaagtcactctggccaccatatggggaatggattatagagtggtaaaagtgaaagctaggagactagagagcatgctgttgcaatagtctagttggtgggttgtaatgtggcttggccaggtggtcttagtagaggagatgaggtggtcagattaaggacttattttgaatgtagagttgattggatttaatgatagggtatgaattaagaggaaagtcaaggatgactttttaaactttttactgccacaccttgttttccaggatgatggctctccgcaccagacccgtgtccccgtgtgcggtagggcagtgtcccgccggcaggggaccggtagccaaggctatccgaggcccctcagcattgccttgtttttccgcctgggcaggattctgacttaagaagccttcagtcgtagtcccacagatggtagcttcaccctgttggcttctcagccaagcacatacaccaaagagacagggtcttctcttgtttaggctggagtgcagttgtgcgatctaggctcactgcacccttgacctcctgggctcaggtgatccccctgcatcagtatcccaggtagctgtgactacaggtaggcactactgctactgtgcctgactaattttttaactttttgtaggcatgaggtctcgctatgttgtct

SEQ ID NO: 44139 - DNA, 1083 bp, Homo sapiens
ttcccaggctggtctggaactcctaggctcatccagttctcctgcttctgtctcccaaagtgctgggattacagatgtgagccacgacatccagcccaaggttcattttaaagctatgagttgatttttgataattgaattatttgctcatagttcttttaaaatctgaatgataatgcaattgtttgctttattatcttgtggctataaataatcagtcatggaattgggaattttttgtcttcctttattagaagtttaataattatttgataataagtagtgttatttatttattttttgagacggagtcttgctcttgttgctcaggctggagtgcattggtgcgatctcggctcactgtagcctctgcctcctgggttcaagcgattctccttcctcagcctcctgattagctgggattacaggcatgtgccaccacacctggctaatttttttgtatttgtagtagagacggggtttcaccgtgttggccagactgatatcgaactcctgacctcaagtgatctgcccgccttggcctcccaaagtctgggattacaggcataagctactgcgcccagccaataagtagtgttctttaagttaattaattttttttttgttttttttttttttggtctgtatcccaggctggaaggctggagtgcagtggcatgattttggctcactgcaacctctgcctcccgagttcaagtgattctcccgcctcagcctcctgagtagctgggattacaggcatgtgccaccatacctggctaatttttttgcatttttagtagagactgggtttcaccatgttggtcaggctggtctcggactcctgacctcaagtgatcctcctgcctcagcttcccaaagtactgggattacagatgtgagccaccgtgcccagccaaactgtatacgtattttaataccagaaacatcagggctaggcgcagtggctcatgcctgtaatcccagcactttgggagactaaggcgggtggatcatgaggtcggagttcgagaccagcctggccaacatggtgaaacaccgactctactaaaaatacaaaaa

SEQ ID NO: 44140 - DNA, 1086 bp, Homo sapiens
ctgggctcaagtgatccccccacctcagcttcctgtatagctgggactacaggcacgtgccatcatacctggctagtttttgtattttttgtaaagatggggtttcattaaggttgcccaggctggtcttaaattcttggactcaagcaatcatcccacctttgcctccctaattgctgggttttcaggtgcaaaccactgctcctgccaatagtgacacattttacaaatgtttgccattcagacattcaggactttcaagtcctccttgaagccttctgtccaccttctttaccatctcttaccacttatctgcaaacttttatttaacttgtgaacacatcctacctgcagggcctcttgggagtaggtttgggtttagaaataaatttttcaggcccttagcacattttttatgtcatttgtatttgggtactagctcagcagtttattcctttgcctctttttggctctgtttcaccttttcccattctagacttttatatattccattttattgtccctcctttcctcttcttgtttatttgaagcttatctgtttttccctatccaggtcaaatccatagtttgggtatgtggggctgtgtgggaggagaatgacaaagttagggagagcatgtaactttttcagtgagagaaaagcagcgtatatacgggggcatggaggagagcgagaacaaggtggattctggaagtaatttggtatgtgttgagtttaatgtctttgtggagagtgttgggaggtgagaccagggagctaggcaaacagcatgttaggaaagatccttttcttgtgtcaggtgtgagccactgtgcctggcctaggcaactctttttgaggaaatttttatatggctatatttgatgttgtaggcttctctgacatagcagtaattttaacgctaataagctggacagtcctaggaatgtttcagattctacaaaaatcacatttcccatttatatttttattttatttaattattattattaatattattattattattaatttgagacggagttttgctcttgtcgcccaggctggagtgcagtggtgcgatc

SEQ ID NO: 44141 - DNA, 1025 bp, Homo sapiens
tgatcctcctgcctcggccacccaaagtgctgggattacaggtgtgagctactgcgcccggccggtgatttattattattattattatttttgagacggagtgtaactctgtcacctagggtggtctcaaactcctgacctcaggtgattcgccctcctcagcctcccagagtgctgggattacaggggtgagcctgttgcccatccttaaccaggggtgggcctggttaagactgggtaatttataaagaaaaggaatttatttctttcagttctgcatgctgggaaggccaaggtcaaggggtgcatctaatgaggaccttcttgctggtggggactctgcagagtcccaaggtggcctagagtatcacatggttagggggctgagtgtgctagctcaggtctcttcctcttataaagccaccagtcgcactcccaggataatccgttaaaattcgttaactcattaatccatgaataggttccattcatgagggcagaaccgtcatgacacagtcacctcttaaagacctgcctcataatacccacattggggattaagttttaacgtgagtttcagatgggataaacattcaaatcatatcacagggtggtagcaaatagataaagcgcgtaagataggctctgtaaactttaatgtagtatagggttggctggcagacgtggcttcttaccctaatcctgctgtgtaatggcttaatagccatgtaatctgaacatgtttaagctatctgtgtgcctcagttttctcatttgtaaaatgggattaattatagcaactatagcactttgggaggccaaggtggggaggtcaggagttggagaccagcctggccaatatggagaaaccccgtctctactaatacaaaaattagctgggtgtgttggcgtatgcctgtagttctagctacctgggaggctgaggcaggagaattacttgaaacgggggaggcggaggttgcggtgagctcagattgagccactgcactccagcctgggtgaca

SEQ ID NO: 44142 - DNA, 2857 bp, Homo sapiens
gggattacaggcgtgagccactgtgccttgcttgctaatgaaaaaaaaattttttttttttcgtagagatgaggtcttgccgtgttgcgcaggctagtcttgaactcctggtctctagcactcctcctgctgtggcctcccaaagtgctaggattataggcgttagccactgtgccctgctgtattttctgttacttaaaactgaaagagcaacattgttgatcacagccagatggaaacaactcagatgtcagttgatgaataaacaaaatgtagcatatccttacaatggaatattattcagcagtaaaaataatgaagtactgttacatgctacaacatggatatatcttgaaaacattatactggatcaaagaagtcagtcatgaaagaccacttattaatatgatttaatttatatcaaatatctggaataagcaaactcatagagacagaaagtagatttatggttacctagagctggtggggagggggaaatatggggcgtgcctgttgatgggtatgtgtttctttttggggtgataaaaatactgtaaaattgattttggtaatggttgtacagctctgtgaatatactgaagtcattaagttgtgcactttaattgggtgaattgtacatgtgagttatatatctgactgtagttgttattaaaaaacaacaggaggccatgtgggctgctaggagtagcaatgtctgttcccagccagcaggtagagaccagggctggacagaggagtatgggctgtgctgcagattatttgtggtacccaactgttgcataaaacagggtgtgatctcttgcattgctatgcatgagtggattcccagtaaattgtgccaggctgcctgatgatgtgtggcttgtgctttggatcgtaatgcttacctatgctacttaagttacataccctgtggcctttgtggccaggactgtgggctactacctggagtgattcgttaggggaaaggacccacagcctgtgcaggaggaaaaaagcatctctgagtacagggtggatgagctggatgagctgccgggcaagagccacgcacacccaggtggtgagtcttaaggataaggtggaatttgccccatagctgtcctggacagaaactgcccagagaagaatgaatggaggacatagggctctgtggtcccaccatacatggggagacctgtgactggtcctgttaccatgtcaacttagccccaaacccatctctgattgacttggttgcttattttggcacattcttgctccacacagccacatacatactggctgctcctcgaaggccaggcagatgcagcagctgttgggccagcaaagaggaaggtcctggaaggttctggcctgaacgctgcatctgttgtgtgacagccacaactgctcaggcttccttgtctgtgggtgcactgtggggaggagtgttatgataagaacattggctctcagtctccctggggagaagtttggcctcacgtgggatttgggcgttgcctttaggaaggctctctgcatgtctagttccagtttgtactgggaagaattaaaaaagtctgccagcttctttagtttgtcctgtcttttgtgatgattctttctgagatcccctcctatcagctcaggagtgggattttctggagaaggaaagtgtttttctgttccttactgctcaccttggggcattcaggaacatgggcctgatgaatttgcttgaaggcagtctgtaatcccatcactttgggaggccaaagaaggcggatcatttgagctcaggagtttgagaccagcctgagcaacgtgacaaaaccctgtctccaccaaacaacaacaacaacaacaacaacaacaacaacaacaacaaactgggctggatggcacgctcctgtaatcccagctacttgggaggctgagatgggaggattgcttgagcccaggaggtcaaggctgcagtgagccatgattgcaccactgcattccagcctgggtgacagagggagactgtttcaaaaaaaaacacaaaaaaacaaaaccattacctggaagaattctaacagcactattattctcattttacagatgaggaactgaggcacagaaatgttcagcagcaggcccattgtttagagctgataggttgtagagctgagatttaaaactaccaagtcgaagcttacaactgtgctatcttacttttttcaattaagagtcatccttatggaactttggagttgggagttccttagcaattacttaatctaaccctttcattttactgatgagaaaattgaaccttagataataagggatttatgacttagtctcagagataggcaggtaaacaactagcagtgacacaaggtggaatagaatgttaaccaatagaggtactggcatttactgtgtgaaattaagggagggatcatgtaattctgatgactagccaagagcttttttttttttcttttgagatagagtctcgctctgtcacccaggctggagtgcactggtgcaatcttggctcatgcaacctccatctcctgggttcaagcaattctcctgcctcagcctcccgagtagctgggattacaggcgtgcgccaccacagccagctaatttttgtatttttagtaagagactgggtttcactatgttggccaggctggtctcgataccctgacctcaagtaatctgcccaccttggcctcccaaagtgctgggattactggcgtgagccaccacacccagcccctagttgtattagctatttattaccacataacaagttactgtgaagcatagtggtttaatgcaacatttatcatcttag

SEQ ID NO: 44143 - DNA, 1031 bp, Homo sapiens
atcacaagatttatagtcaaggaaatcatgaaacagattgtagatatggcaaaaaaggtgggggttggaaggatgaacggtttccagatgtggattgtgagaaattcaagagccagtagacatcacaccacaggaattatcagatgacttgatggaaatgagtgcttccataccactgccagacgatgaggaagatgacatagcagcagcagtgccataaaacaaattgacgttagacaattaagcagaggcgttctgattattgaagactgcttttgacgtcttttttactgtgaagttgataagcatggagacctttatgatgatccacttaataaatagtgctgtgggcctggcacagtggctcatgcctgtaatcttgtcactttgggaggccaaggagggcagatcacaaggtcaggacttcgaggccatcctcactaacacagtgaaaccccatctctactaaaaataaaaaaaattagctggacatggtggcatgcgcttgcaatcccagctacttgggaggctgaggcaggtgaattgcttgaacccgggaggcagaggttgcagtgagccaagatcgcgccattgcactccagcctgggtgatagagcgagcctttgtctccaaaaaaaaaaaaaaaaaaaaaaaaagctgtggtttggatatggtttgtttgacctctccaagcctcatgttgaaatttgataccccagtgttggtggtggggcctggtgtttggattgtagggggtggatccctcttgaatggcttgaggtgtcattcttgcttctcactcttagtttccagagaactggttgttgaaaagaggcacctccacctccactcttgctttctctctctctctctctctctgtgttcttagcacccctttcttccagcatgggtggaagcagcctgagaccctcactgaaattaggtgctggtgccatgcttgttgtacagcctgcaaaaccatgagccacatacatctcttttctttatattaataaattacccaggcttag

SEQ ID NO: 44144 - DNA, 1033 bp, Homo sapiens
tgcctggccctaaatgccagatggaagtgccccattagatggaagtgccccattctggaaaaaaattgccatagaggacattaatccaatttgtaaggaaaagaagtaagcaccaggatttaaggcaggaagggatgggctaactctactcttttgtgcaaatgtagtcaggtttatgatcaggactgcccttgtctgtaaagctgctaaccttgaaccttgaagggataagagaaatactggctgccagtcctttggttgtacaagaagtcctggacaatgagaacccttttttggattgattccattgatgctttgtccctggagtcaggaaatacctagccagtgagagattgccttttaaagttcttttgattttggacaatgcccctgaccatccagaaccccaggggttcagcacagaaggtgtggaagtagtttacttgcccccaaacacaatgtctctaatttagcttctacatcagggagccttaaggacctttaagactcggccaggcgcggtggctctcccctgtaaccccagcactttgggaggccgaggcaggcggatcacgagatcaggagtttgagaccagcctggccaacatagtgaaaccccgtctctactaaaaatacaaaaaaaattagctaggcatgatggcgggtacctgtaatcccagctacttgggaggctgaggcaggagaagcgcttgaatctgggaggtggcggttgcagtgagccaagatcatggcaccgcactccagccagggtgacagtgcgagactccttctcaaaaaaaaaaaaacgttacacacggtatgctatggaaaggcttttcagtgcagcagaagagaactcaatagagagaccatcatgaatgtctgggttgtaccactgaagataccattgttgttacagaaaaagcaatgaaaaccatcaggcttgaaacaaattcctgctggagaagactgtccagatgtgcatgacttcaaaggatttttattaaaaattattttattattttttaattat

SEQ ID NO: 44145 - DNA, 1071 bp, Homo sapiens
cagtagatcatgcctgtaatcctagcactttcagaggcctaagcgggtggattgcctgaggtcaggagttcaagaccagcctgggcaacatggtaaaaccctgtctctactaaaatacaaaaaattagtcaggcttgatggtgcacgcctatagtcccagctacttgggagggtaaggcatgagaatcatttgaacctgggaggcagaggttgcagtgagccgagatggtgccactgcactccagcctggggtgcagagcgagagtctgtctcaaaaaaaaaaaaaaaaagaaagaaaaaaaattaattaaaaaaattggcttgtcagttccagagtgcattgtttcaggcatctctttgaaacattattaatgtaaatatttttcggcattataattttcaaatcagtcttagaatatggagcctaaaaggataggaataagaaggagcatctagatgacatgattgaatgcattaaacttgggtatgttgtaacatacaactgtcattcaactttgtgaacatatagtgtgggtacctgtatcccccaaactcctgaaatttagatgtgtctctggatggactgtgtgtgttgggcaggtttagtagatagggtgggagaaagggtaaggaaagactgtaagctaggaataaacatccccaggaagccgaagtttcattgagatgtagtagagataagatggataatttacttaaaagaaattcctggcacttggcagtcctacttttgtggctgggtgcttcatttggtcaccaggtgctgtcattacttctaacatccagggtacaaaggttgccactgtgtttgatgccagctagctactttggtcacttttgttgttgttgttgttgttgtttgagatggagtcttgctcttgttgcccaggctggagtgcaatgacgtgatcttggctcactgcaacctctgcttcccgggttcaagcgattctcctgcctcagcctcctgagtagctgggattacaggcatgcgccaccacgcctggctaattttgtatttttagtagagacggggtttctccgtgttggtca

SEQ ID NO: 44146 - DNA, 1035 bp, Homo sapiens
ccacatctgtaatcccagcactttgggaggccgaagcgagcggatcacttgaggccaggagttcgagaccagcctggccaacatgacgaaaccccatgtctattaaaaatacaaaaatcagctggatgtggtggtgcacgcctgtaatcccagttcatagggaggctgaggcatgagaatcacttgaatctgggaggtggaggtcgaagtgagccaagatcatgccgctgcactccatcctgggcaacagagtgagactttgtttcaaaaaaaaaaaaaaaaggaaaagaaaaaaaattttttttttttgtggcaaagtaaaggaaggaaagttaaaggataaaccggttgagggagagaagtctaaggagaatgagatttgagaaaaatttattacgtttgtttatcgttgatggccttcagatatcattagcattagtatcttttttctgatcttgacagtttataaataatttatcattatttcattagttggtataggtgggtagtattatctatgttggaactaaggattagagagagttttgtcttgctctgtttgtattacaggtccaataggacccacagattttttttgagatggagttccactcttgtcgctgaggctagagagcaatggcgctatcttggctcactgcaacctccgcctcctgggttcaagtgattctcctgcctcagtggcccaagtagctgggattacaggcacatgacaccatgcccagctaatttttgtatttttagtagagacagggtttcaccacgtttgccaggctggtctcgaactcctgacctcaggtgatccaccggccttggcctctcaaggtgctgggattataggtgtgagccaccatgcccagtcgtactcacagatttttaatattgtcttgtattctgtttgcaaagaggaaaaattattacatatattcaaataaggcaatattaaaaaaaatcattacctggagttgccagattcttaagcttataggcttttttaattctaggcgcatgaccacc

SEQ ID NO: 44147 - DNA, 1045 bp, Homo sapiens
tctcttatatatgattttgtatcctgctttccttattttacattttgttataaatatttttcatgggctggctgggtgcagtggctcaagcctgtaattccagcagtttgggaggccgaggcgggtggatcacgaggtcaggagtttgagaccagcctagccaatatggtgcaaccctgtctctactaaaaacacaaaaatagctgggcgtggtggcgggcgcctgtaatcccttcccagctcctccgtaggcgaggcaggagaactgcttgaacccgggaggtggaggttgtattaagccagagatggcgccattgcactccaacctgggcgaccgaatgagactctgactcaaaaaaatatatgtatatttttcatgtctttaaaaacttcataactaattattaatgactaacattctaatttgttttatttgcttaaatatttccctattgctagacagatgtttccagttttctggcatggtattacttcagtgaatatctttgtatgcatttcagattttcttagactaggtggaatcctgcaaatggaaatattaggtcaaagacattgaacctttttaaggctcttaaattttggaaaagctcttttaaagaagaatcagcaggagtaggactaattaactatgggacatgaagagaaaagcaatacaaaatgacaaaattaaaggtttttttgacttagactgttatacttaatgaagaataagaaagttggcagaaactggctgggcgcggtggctcatgcctgtaatcccagcactttgggaggccaaggtgggcagatcacttgaggtgaggagtttgagaccagcctggccaacatggtgaaaccccgtctctactaaaaatataaaaattagctgggcgtggtggcatgtgccataatcccagctacttgggaggctgagacaggagaatcaattgaacacaagaggtagacgttgcagggagccaagatcatgccactgcactccagcgtgggcgacagagcaagactccatctcaaaaaagaaagaaag

SEQ ID NO: 44148 - DNA, 1028 bp, Homo sapiens
cttaatgttgccactttgagaatgttatataaatggaattatacagtatgtcaccttttgtgattcgccttttttcatgcagcgtaatgcccttgagattcatccatgttgttgcctgtgtgagcagagcattccttttttttttttttttttttttttttgagatggagttttgctcttgttgcccaggctggagtgcagtggcacgatcttggctcaccgtaacctccgcttcctgggtttaagcgattctcctgacttagcctcctgagtagctgggattacaggcatgtgccaccatgccaggctaattttgtattttaagtagagacggggtttctccactttggtcaggctggtctcgagctcctgacctcaggtgatccacccgccttggcatcccaaagtgctgggattataggcatgagccaccgtgcctggctgtgctttcctttttattggtaacaagtattccattgtgtggattaacagtttattcacaggctaaaggatatctgggtatactttgcttctacttttttttttgagatggcatcttgctctgtcgcccaggctggagtgcactggcgcaatcatggctcactgcacctgccacctcccaggttcaagcgattctcctggctcagcctcccaagtagctgggactacaggcatgtgccaccacgcctggctaatttttgtatttttagtagagatggggtttcaccatcttggtcaggctggttacgaactcctggcctcaaatgatctgcctgccttagcctcccaaagtgttgggattacaggcgtgagccaccgtgcccagcttggtgagacagttttggaatgtaatgatacaagtttatatccttattcagtaagcctcaacccttgaatttatacttccctgtagtataaattcaagctcataagcccatgactttggaatacttctcatggattacctaattttcatttcttatttttttacacatttgtttattcaacaaacatttttgcttactacc

SEQ ID NO: 44149 - DNA, 1522 bp, Homo sapiens
agcgttcgacatcgttatctcttcctctagattaattgcttcgctcttttgagcaagaatactctgtgtggcatctttggtactgtggggaacgagaatccagcattatctttaataaaatccagaaacatttttggttgtttcctttgaggggtacgtcgcagcacgctcacttttttccccttctcgttggccttggtccttcagtttcacaaaatgtggatagtgacttaaaaataccttaaaaaaaaaaaaaaaagaaaaaaccattagagtaaggggaaagcacttcctaaagagttgaagaactaattggtcggtaaaaattggatattgaattcataagatgttaaaatggactggatttttggtagttttggttgcttttaaaaaaattagtgctagctttcaagtgaattacaaccttaaatttgagatttcctttggtgaaccatggaagtttacccagtggtaaggagaactgtaatgtttaggattctgaataagtactgtgttttaatcacagctcttaattcaaagcattgatttaattccacgtagtctgttatactcagaaacataaaaacaagtggaaaaagtatgaccccagtgtcggagatggctatgtgtgcatgtatatacaaatagacacgtatatgtgcatgttacctttacgtacatgtggaaaaacagttctaattaagtcaatatgtgtcttgtatttgcatatattagagtatgattttcctaatggtcgagggcctttttggtgggccgcagtttggatttatgtggtatgttgatgaagacttagtgaatagccacagtactcagcttttcctctcacagattaatctgccagtttctcccactgtgtattgtgtatatgtgatagaatttgagggggaaaataacacaccagctaatgatgaaacgaactggctctagtctgtaaggtaacgggaccagcccaattatataactgattgaggcattgccatttttcacttaactctttgaatcaagtcataattttatttaataatttttttgaggcagagtttcgctcttgtcgctcaggctggagtgcaatggcccaatcttggctcactgcaacctccgcctcccaggttcaagggattctcctgcctcagcctcctgagtagctgggattacaggcacccgccaccaagcctagctattttttttgtattttttagtagagacggggtttcaccatgttggccgggctggtctacaactcctgacttcaggtgattcaccggcctcggcctcccacacagctgggattacaggtgtgagccaccgtgcccgacctgaatcaagatattatttaaaagaactgtttgatgttatttatttattcatgtcttcaataggtatttacatgtctgtcttcggagatggtgttagaggttgttttttttttttttttgagaccgagtcttgctctgttgcccaggctggagggcagtggcgcgatctcggctcactgcaagct

SEQ ID NO: 44150 - DNA, 1067 bp, Homo sapiens
aaaagacagcaggagtatttgacacatctgtgatggagtatacaacaatgcattttaagagcaaatgcaacaaaacaaatctggactatggataaataatttgagagctgccacccacaaatataaatacagtactcatgctgactgaaataataagacatctacaaatttataaacaaaaagtgattgtcattatcctgcttatgtactagattcaggcaagcattatagactttttggttgcggtggcttttgcatttatattatcaatgccttgcaggaacgttgcattgataggcccattttatttttttattttttttttcgagacaggatctcactctgtagcacaggctggattgcagtgcaatcctgcaattctcaatcttgcactgcagcctcgacctcccaggctccagtgactctcccacctcagcctcctaagtagctgggagtacaggcgcgcaccaccacgcctagctgatttttgtatttttttgtagagacgggggtttggccatgttgccgaggctaactcctgggattacaggcatgagctgtgctggccgggtttttttttcttgatgtaaacgtgtacagctgttttattagttaaggtctaatttttactctaggtgccttttatgttcagaactctttccactggactggtatttgctcaaaaataaataatggtagagaagaaaactataaaaatggacaaggctttcttctatcagtagcgtttaccctttgtcaccagtggctttggtatttccatgtctggcattgcataaacttctctggtgtgaaaggataaatatgcctttctaaagttgtatatcaaaattgtatcaatttttattttctatgatttctagaaacaaatgtaataaatatttttaaaatctcctttctactggttatgtaaataaatcaaataaatatatcaaaatgagtgcagataagaatcttgaccttgactaaaggtaaggaactaaatgaatgtgggatcctcatcagaaatggtggtgacaccaaaatgtgttgtgatcagctgtgaagta

SEQ ID NO: 44151 - DNA, 1080 bp, Homo sapiens
gattcaaaaaataatggttgattcaaaaaatgttggataactgagtaaccatctaaaaaaccatttaagtgtggctcccctacctcatttccctttgctaaataaattccaggtggatcataaatttgaacattaaaatgcaactttaaaaggactctacttaggccgagcaaggtggctcatgcctgtaatcccagcactttgggaggctagggcgggcagatcacctgaggtcaggagttcaagaccagccatgaccaacatggagaaaccctgtctctactaaaaatacaaaattagccgggcatggtgccgcatgcctgtaatcccagctactcgggaggccgaggcaggagaatcggttgaacccgggaagcggaggttgcagtgagccaagatcgcgccattgcgctccagcctgggcaaagagcaaaactccatctcaaaaaacaacgacgacaacaacaacaaaaaacagtactctacttacatttgagattaaaaaaaaaagaatctctgaccaggtgtggtggctgacccctgtaatcccagcactttgtggggctgaggcgggaagatcacttgagtttgagaccagcctggccaacctggtgaaaccccatctctgctaaaaatataaaaattggccaggcatggtggtgtgtgcctgtagccccagctactcaggaagccagggcaggataattccttgatttcaggagccagaggtggcagtgagctgagatcatgccactgcactccagcctgggcgacacagagcaagactccgtcttaaaaaaaaaaaaaaaaaaaaaaatctctgactggtgacatcctaagtatgagttaaatctcagagctttttttttttttgacagccaagctggagtgcagtggcacgatctcagctcactgcaacctctgcctcccgggctcaagcaattctcctgcctcagcccccaagtagctgggattacaggcgtgtgccaccacacccggctaatttttgtatttttagtagagacggggtttcaccatattggccaggctggtctcgaattcctgacctcaggtaatccg

SEQ ID NO: 44152 - DNA, 1032 bp, Homo sapiens
ctcagaagttaacatttaacctggcttaatttttttatgttcttttttttaattaaaaatgtttttcttttatttattttttgagacagggtcttgctctgtcacccatgctggagtgcagtagcatgatctcggttcactacaacctccaccctacatgttcatgtgatcctcccacctcagccatctgagtagttgggaccacaggcgtgtaccaccatgcctggctatttttagtggagacgggtcttgccatgttgcccaggccagtcttgaactcctgagctcaagccatcttgcccgccttggcctcccaaagtcctgagattacaggtgtgagccaccgtgcccagccacattttagctttttatttttaatatggatagataatgttaagtgtccaattacaggaaatgtaatacctctagtccacacagctataaccacttaacctgtatttctttatcagactagaactgattttccactcaaaggttctatagcgaaaaatgagctcttacatctataacttttattatggtatatataatgttaattcttttgctttcaagatccaagaaaacattcttggccaaaatctaggggaagttactgccacttcgtactatataaggaaaacaaagacaccatggatgctattaatgtactctccaaatacttaaggtgagttactgttgttatgcctatacaaaatcaaagcaacagaaacgtatattcctttttccatgctaatggaaaaaggagcaggaggagcacagattacagatagtaaatgctcctcccaatgatagttttctttctttctttctttctttttttttttttttttttagacagtctcactctgtcactcaggctggagtgaatgatggtatgatcaggctcactgcagccttgacttcctgggctcaggcattcctcctaccttagcctcctgagtagctgggattacaggcgtatgccacaatgccaggctaattttattaggttttagagacagagtctcacta

SEQ ID NO: 44153 - DNA, 1083 bp, Homo sapiens
tcttaaggtatagcagcatttagtttttgagtcttgtggcttcatttatttcttgtcattatacttaattatgaatactccaaaggggtagttgagaaaaatgtagctacacttcatcaacttttatcacaagtgtttttaaagtttttattatggacattttcaaacttgcagtcaaatagaggaaatagtatatggaacctatgtacccataaaccatctttaagattatcaacattctgttgttttattgatttatccttcctccttttttttcttgctggagcattttaaaggaaattctacatagcatggcttttcactcataaatatttcagtatctatttgccagatgaggactgaaaccccaaactattatcacatccaaaaacatcaacaataatttcttcctatcacatacctattgcatatttggttttgctgtatctcaaaaatgtcttttttatatgcagatggcttgttcaaagaatgataaaaacaaggtcagaacattgcactcattgataagcctcttaagtcgtctcttaaatcttttttaatctataaagaacttagctgttttctataatatttaacatttttcaaatttaaaagtctttataattcaatgcaagaaattcatgaaacgcagaaaaagcaaagcaatagttacttgtctcactatcaaaaaaaagataatcacaaatagcattttggtacatgtcctcccatatttaagtaaacagatctctttttggggaagcatttactatccttaaaccttttgcttcatctcatgggtacagacagtgcagctttgagcgtgaactaacatgcccattgtgaagggattgagacaaggaggctgcacctgtagaagagttttctacttgttcactgtttgcctctaaaacattccattgttaatgtctaaatggctgttaacccaccgcataactaccgggtgctgtagaagtcctcagtgtaaacttaaccatgcgatcatttgcatgttcacctctaaagcactttaatattataaattaaacattgctcttttgtgctctttatgctgtgcatttg

SEQ ID NO: 44154 - DNA, 1065 bp, Homo sapiens
agtcacacataaaaaatatggaatatatagaaagacacccttttatctcagcccatcttttgttgtgtatcattcatttgaaatgggcatagtcccagtgagtcactgatatttatgttctaatgtgttatctacagccacaaaagtttctatttgcatataacctttcaggaaaattaggtaattttttttttcacctaccaaattgacagataaaatttaaatgaaaattacaacaagaaaaagttatttcctcaccctcctctcctactagcggtggcctgtattaatgaacatttattcctagatatatttggggcaaaattctaagaccatataacaaaaaactgtttatttattagggctctgtcagtattcttttaggttaattcaaaagataatactgtgatggatgaagccttaattgcttataaccatgtttctagtgaaatgagagggtataacaaaaaagagaacaggaggaaagcttcgctgtgcctgaggaaataatctagtcaaggcagcaagtctggatagtgctatagagatgagatacctgagcagttccagaggaagaggtggagatcagaggccagttttcagtgaacactgtaaagaaaagccagatgatgtgtcctggaactgcttggggcatgagtcctgaattactttttactccacaaacgaatggtgtggttgctgtgtgtttctttaatgtctgggtcatggtataaaatgtcacctgagcagccttttttcagccaaggttgctcaaagaggagtaagcccagtggaaagtgattggagccactgttggttcagttctcccaaggatagtgtgtagctagtaactactgtagatggagaggagaggtgacttctacaaacagccatgccttggggcacttggtcctaattctctcagggaacccagttgggaaggctgctagggagttattttttgtcaagaaacagcccatgttggtcagcagtgctgcccattatgaaggcgggaagacaaggcaaggtcttactctgcttggtgtggtcatgaggaagcaggtt

SEQ ID NO: 44155 - DNA, 1084 bp, Homo sapiens
agcagcgattggaagagctccagctgttcaaaaataaggaaaccagtgttgccattgaggtaactaatgcaaaaatatatgaaaaattatttagggttttagttgctttttgggtggatgttaagtgtttatggaaaaaattacaatggttaacaaagggtgactttttgctctattggatctaaaggatattacactaaaaaatttttttactggggcagataactagtatcccagataaactatagccccccccaaagttacatttttgtttaaaaacatttttatttgggtacagtgttacatgctattccaaagtcctagctactccgaaggctgaagccagaggtttacttgagcccaggaattggagactagcctggacaacatagtgagacatcatctctgaaaaaaaaatttagggaccacaaatgaacagcgacatatgttgtttagaatcccagagtaccaattataccacaatgtccgttgtaacaggaccaccatttgctgtctgtcaggtatgtgacccaggtcagattctggcttcagcagcttcttggcctcagttgggactctgggaaggggaggaaatggggaaaggaagtaggggagcatttatttgctcatcgtgggtcaattctgctattgaagaaaaggagagctcagctactaagtagaatagtaaattttgttgttaaagcttttgttcgccgggcacggtggctcacacctgtaatcccagcactttgggaggccaaggtgggcggatcacttgaggtcaggagttcaagaccagcctggccaacatggcgaaatcccgtctctactaaaaatacaaaaaaattagccaagcgtggtagcgcaggcctgtagtcccagctacttgggaggctgaggcaagagaatctcttgaacctaggagacagaggttgcagcgagcagagatcataccactgcactccagcctgggcggcagagcgagactccatatcaaaaaaaaaaaaaaattatgttaaattaattttgtactacattttaatgagctatggggttttcggttgtctgaaattccccctcccag

SEQ ID NO: 44156 - DNA, 1048 bp, Homo sapiens
gcctcccgggttcaagcaatgcccctgcctcagcctcccaagagctgggactataggcgcctgccacccacgcctaactaatatttagtagagatgaggtttcaccatgttggccaggctggtcttgaactcctgacctcaagtgatctgcctgccttaacctccctcaaaacgctgggattacaggtgtgagccaccgcgcccggcctgaaaccagcttttatataggtgattgttactttctactctttcctaacaggttttcttaaatgttttcttggagccttaaagatggagatgacagaaatgactggtgtgtcgctgaaacgtggggcactggttgtcgaagataatgacagtggagtcccagttgaagagacaaaaaaacagaagctgtcggaatgcagtctaaccaaaggtcaagatgggctacagaatgactttctgtccatcagtgaagacgtgcctcggcctcctgacactgtcagtactgggaaaggtggaaagaattctgaggctcagttggaagatgaggaagaagaggaggaagatggactttcagaggagtgcgaggaggaggaatcagagagttttgcagacatgatgaagcatggactcactgaggctgacgtaggcatcaccaagtttgtgagttctcatcaagggttctcgggaatcttaaaagaaaggtacatttagtttatgaataaagttattttgattgtattaggtttcttctttagaaagaaattagctttatattcttccacttagctttccatctccaaggcttgtttatactactgatcaaaaggaataggatgaaggaaacctgcctgaataaatagccttggatttttaaattttaattaattaattttttccctttttttgagagagggtctcactctgtcacccaggctggcatgcagtggcatgatcatgcctcaaataaattcattcaccaggcacagtggcttacgcctgttatcccagcactttgggaggccgaggctggcggatcacttgaggtcaggagtttgagacc

SEQ ID NO: 44157 - DNA, 1050 bp, Homo sapiens
gtaataaaagtttacaacttgattttttcaaaaaagtcaacaaactgcaagcacctgttaataaaggtcttaaataataataataaaaagaactctccactgggcaccctcaaaattgcacaagttccttctgttattagttcatgctgagttgtgatgccagcacttcaagccttgttaatcattggatcaacaagtaccgagctaggtgctagagagagatggaaaaaggcacctgggcccagccctaagcctggatcgcggacagtgacgttggtccacacctcacctgccctctctgccctgctacatgccccaggcttgccctgaaccgtgagctctagaaattccaggtccgggtcgcagccacagggcagtcaggcgtgtcacgtgaccgcgccgggtagagggagacagagtcgcacggctgagacgccaggcagtcgcctagcaacagcgggacgcggagcgatggagaccagcagcagggagctccaagccgcggagtatttggaaaagcatcagatcaaggaggtggttagctacctcaccagcgccctccttttctttcggccgggtaagggcccccatgccccggtacagccatacctccatgtggggttcgcttcccacacgaaacccccctcttacacattcgctttccactgcctcccagccacgtgagcccttctgctgttgattaactctgcggccttcaataaaagtccctcaggctgcagtacaatggcgtgatctcatttcactacaacctccacctcctggtggcgattctcaggggcgattctcctgcctcagcctcctgagtggctgagattacaggcgcccgccaccatgcatggctaatttttgtatttttagtagcgacagggtttcgtcatgttggtcaggctggtctcgaactcctgacctcaggtgatctgcacgcctcggcgcctcaaagtgctgggattgtaggcgtgagccaccgcgcacggccaaagtttttaatctggcaactaaacaattgatagggtaggatagaagatgttc

SEQ ID NO: 44158 - DNA, 1034 bp, Homo sapiens
cagcagaggcaactaattgggagctgaccatgggagaaagagaagaaagccaagtagaaggtcacccctttgggggagtgggctgtgaaaattcagaggcttttggccaggcgtggtggctcatgcctgtaatcccagcactttgggaggctgaggtgggcagatcacttgaggtcaggagttcaagaccggcctgaccaacgtggcgaaaccccatctctactaaaaatataaaaattagctgggcatagtgttacacacctgtaatcccagctactggggaggctgaggcaagcaggagagttgcttcaacccgggaggcagaggttgcagcgagccgagattgtgccactgcgctccagcctggatgacgaagtgagactcctgtctcaaaaaaaagaaaaaaaaaatctgaggcttttaattcattttgttatctcagcccttactaaaaagtcagaaaaggttgcctgtggaaaagacagctaggaaaccaaacttaaaacaaggaagatgagtatcttcaaatgctgttggcacccaccttggagtacttaaggaactggcttctgacagcacctctatgcttatctttcaagccttgagaagacagagaagggataagtgtggagtccatctaatttatgtatttaaagaaaaaaagtgttccattaattgatgacagttaattgcacttaagttcgtacctaggcaagctgtagagtaaaatcatccatcaatgggtttgtcactgcacactggaaattatgataacttagtaaagagctaattatgtcagatcaattacagagcctcttgtgatggagtggaaaggtgtaggcatggctgtggaggagttacctgccacacagctgggcctcgtgggcaagctttgttctccttgggttgttgggattgcgggtccatcctgcaggaggctgtagctggttagggaagactcagccggagagtggtgtttgcccacccaccggcgatgtgagtctcccagtcactaacctgcaatccgtcttatc

SEQ ID NO: 44159 - DNA, 1036 bp, Homo sapiens
ccaggagggtcttgaactcctgaccttaagtgatctgccaccctggcctcccaaagttctggggttataggcatgacccactgtgcctggccctgaattcaggttttattttatgaagtatgggcactaaaaccaaaacaacaccccctaaagagtaacaaagcaccacaaccagtctatcttcagtatcaatacgtaaaggagatcctaacgcagaaaggtagggaggatgtaaactcagaaaaatctgtatgtacatatgcatgtgtatgcatgtgtgtgtttatgtatcacattgtttaagacaaattaacacttctttgtggacccaaattggtagcattagcgtttgggaactgctgtcttagagtgcctgtttgctgtatcctgctggctgccttaattactttaacttaaaaattacctcctttaagtgatttcagaaagggttttaaaggtaactcagttatcttgaaactaattgttctgctgtagattatccttgctcttactttctgcaggcttttttaaaatttggatgaaattcacaaaacataaagctaactgttttaaactgaacaattcagtgacatttagtacattggcaatgttgtgcaaccaccacttctatctagttccaaaatgtttcatcacactccaaaataaaacctcatacccattaagcagttattccccctcccccaccacatacagcccctgctaatcaccaatctgcttttcttatctatggatttacctattctggacatttcatttaaatggaatcatactatatatatatgaccttttgtgtctggcttctttcatttaccatcatgtttttgagactcatttgtattgtagcatgtatcatgcttcattccttcttatggctgagtattcttttattgtatgtatgtagcacagtgtttgtttatccactcatccatggatgggcgtttgggttgtttccaattttttggctcttatgaatagagcagctatgaacatttgtggacatggatttgtgtgagta

SEQ ID NO: 44160 - DNA, 1041 bp, Homo sapiens
ctagaatccacaaacaggcaaaacaaaaagggttttgacctcgctccgctgccttcacaagggaagaggctgcagggctgtggtgctgtcttggtgtgtgccaacctgaaacacatgggctttgacacaaagtgcacatacaggggccaggagcagggtgggcagcctcatcttaaattctttgtggcctctctccctttggctagtgtgttttttaaaggatccattcaggatctgttgagtcttccataacatcataaaactgtgggattttagagctgcaaaagacctaagtgtgattcagtccaacttcccacccttttttatttataataataacagctgctatctgttgaataatataaatactaaatatttattgaatacatactgtgtgccaggaagttttctgagcgcttgatatgtattcacatatttagtcatcacagcaatactttgcaataggaactctcaatatttccaatttgtagatgaggaaagtgaggcatacagagaaaaggaacttgaccaaagactaacagctagaaagtggcagaatcaggattcaaacccaggtgtgtctaaccccgagccctcttagcccctctgctttgcagagacctcagtatgaaatgatacaccccacgtcatgtatccaaagagtgagggcatcgagacccagaaccacactccctaaaaactggcagtggtgctgtacattttttaaaatagggtcttgctatgttgcccaggctggtcttaaactcttgactccaagcaatcctccctcctcagcctcccaagttgctggaattataggtgcacaccactacacctggcttgtatcttattttattattttattttattttattttatttctttgagccggagtctcaccctgtcgcccaggctggaatgcagtggtgcaatctcagctcactgcaacctccacttccctggttcgagcaattcctctgcctcagcctcccgagtagtggggattacaggcacatgccaccacgcccagctaattttttt

SEQ ID NO: 44161 - DNA, 1053 bp, Homo sapiens
tcattggttaaggactaaagatattgtcaaacttcttttgaaaagcccactttctttctcattcttgtttgacttgcagtatgatgattttacccttccttactctcctgtactgtaactataccctaaactctattttgagggctatccagagaaaattctttaatcctgcaaggaatttcctctgaaacccaaaacacttccaaacatttctccaccaaccccttggcctgtgcagacagaatctaaactcatattaacattagtctcagtctaaaatcatcaacaagacaaatctaataaggaaaacagtaaggtggggcattccaaagtgaggggcgaattcctgtgcccccaagctgttcccttccttctcctcatgcagataatttagaatggtgcccaagcattgtctctctcactcctcacattcctccccagcagagggccttcccccaaacactctgaaagctcttttcgtttgcagttttttcttactaacatttttcaggaaaggaaagtttactttagtgtgccctgctgcctcatgagaccacctgacgatctccttatctccggggtgggcccagctctagagacacaggcagccctgtccacacttggccctgagtgctgttttgctcagctccccagagagtttcaagtggcagaggtacacagtgcaaaagccccaagcctcaggcctgagggagaagactctggaagcaggagggtgagcctcagctttctagctcagtcatacccaggcccaggtaaccagggggacacctaactgtgtcactggcaggaggattcctgcaacattggtgctgggtctgcagagatctcacgagggcatagcgtaggacctgtccatttgtgtggtccaacaggtaacatccaatcaaatggaactacagagccatgcagctggagagagatccctaagatggtcggatctaacctccccaaccctttattgcagtagagcaactcgggacctactgagaccagacaggcaacccagccagagtctcacaggtagagaagagc

SEQ ID NO: 44162 - DNA, 1034 bp, Homo sapiens
atatattaaacccacacatttacttactttagaaaggttactattttgagagtatgatcgttcctggaaaaaaaaattttgatgtgcctcctgtccattgaaaagttacatataaagaataatttccattccttggattatgtcttcagattcctgcattcttttcaagctttgtaataaagcaagggaagagagtattgtgaactccttgaggaagacattccctctcattcctccacattgccccagagttcaccatgtctgacaaatagtgggtattcagtcaatagcttatgactgaatgaatgatttagatgtttaatcctttaagtcagtgatacgcaacttgtagtcatgtgtcagaatcccctggagggcttgttaaaatcaactgcggctcccccatcccaagtttctgattcagtagatctgggttggggccccagaatgtgcatttctagcaggtccccagatgacgctgatgctgttggccctgggactatactttgagaaccactgctttggggtccactccactgcttaggtccattgtggttttttttttttctttaagctttgccaagccttctagaaaattgacatctatctctgtctgattttgctccgttaaactgagattgattttgtaaaaattactaggatttgaccagatggaaaagctacctggatttttttgtttttagttaaaaactacagccgggcaccatggctcatgcctgtaatctcagcaatttggaaggctgaggcgggtggatcacctgaggtcaggagttcaagaccagcctggccaacatggtgaaaccccatctctactaaaaatataaaaattagctgggcatggtggcgggcacctgtaatcccagctccttgggaggctagggcaggagaatcacttgaacccgagaggcggaggttgcagtgaaccgagaacacgccattgcattccaacctgggtgacagagcaagactccatctcaaaaaaagcaaacaaacaacaacaacaaaaaaaaaac

SEQ ID NO: 44163 - DNA, 1029 bp, Homo sapiens
ttcaaaatagaaaataatgaagctacaatggtctgggagtttcctgcttcttgtgatacccctgataattgtcatgtaaattaactagtcccatagcaactaggccacacataggaaaaaaaccacaccactgccagatggtaatttaggaatgtgattttagttttcagatgtaaaggatggtgagggagtggccttactattgttttatttttgatttcttgtttaattgatggtggtcagagaacattagttataggttatccattttataattcatgataacttcctttgtgactagctagcatgtgaaccacttttgtaaatgtctcacgtgattgaaaaatgtatataatctctctgttgtgggcagagttccatatatttattgtatattttgtaatttagatcatgtattattagaaaatttatttaatgtctctcttgtgtacagtattccatatattgtttattttgtttaaatcttattcattcttgccattttttgtttgcttgctctgtaatttctgggaagagagttttaagtctcctgtgataattctaagtgtgtcagtctctcctgtaactctgacaccttttgctttacaattttgaggctgtcctgttgggtatatgtaagcttaattgtgaggtctttttagtagtggtgtctttgtgcctattaatgcttttgccttaggttctattttatctgattaagattgctattcaattttctttgggtcaatatgtatttgcctcatttatttctttccaatcttttattttcaacttttctgtgtcattttgttttaggtgtctctcttgtaaagcagtatatcgctggctttttaaaaagtccaatctggccaggcacagtggctgatgcctataatcccagcactttgggaggcctaggcaggcggatcacctgacgtcaggagttcaagaccagcctggccaacatggtgaaaccccatctccactaaaaatacaaaaataagccaggtgtggtggcatgtgcctgta

SEQ ID NO: 44164 - DNA, 1065 bp, Homo sapiens
tgtttgtttattagcgtcatagatactttgcttttctccccctgaattattttctcaaattccgaagccttctctaggggtgcattttcctaagataacaatggcttagtttacattgtggctgtggttttctgctcatctttataagtggctgcctccaccccatatgtaatcttcttaaacaagcaccttcttaaatgaggcaaccctcttaaccaaagcgcattaataatactcattattaatgagtatatggtagtgctcttcttattaatgagaaggctgcggggccgggcgcggtggttcacactgtaatcttagcattttgggaggctgaggcaggtggattacttgaggtcaggagttggagaccagcctggccaacatggcaaaaccccgtctctactaaaaatacaaaaaattagccaggtgtggtagcacacatctgttatctcagctactagggaggctgaggcagtagaatcgcttgaacctgggaggtggaggtttcagtgagccaagatcgtgccactgcactccagcctgagtgacagagggagactctgtctcaaaaaaaaaaaaaaaagggttgctggctctgactgacaccctaatcctgtgacctgcatttgtcagctctgggcatcatcctgatagtgacactagctccaaaaacatgaatcaagtttcccggtgcgtttaagaaggcaggggctagatggtggccctttgaaaattttcctcccactttcttggctgagctgcctttgtcatattcttacaacaaacccatgggtccctagggtttggtggtgaggaacttctagcccttatggccaacctttgccttagctgctctttgaggtgggtactggtgatggtggcagtgcagagccagcctgggagacaagtggggtggccagaggaagagggtgtaccccagagctgccctcctctgtggcttgtaatgtttgtgagccaagaaaccactggactttttgccctccccggtgccccacatgcaggctgaagaactacggtcctatcatttattttttttaacca

SEQ ID NO: 44165 - DNA, 1022 bp, Homo sapiens
gacttttccccacctcttcagttatcattattctataataaaataaagggagttgagcttatccaagctctttaacagtctctctatatacaaattatcaactgcaaacacgtgtatatgtatgtatatgatatatacatatctacatatatataatctgtatctgtgtatatactgtaggcatattttgtgtttgtaatgtgtagaattcaggcttacggagcacctctgggagtgagtccaggactttcaaaccagcacaaggcaaagcaagggccctagaaagcgctataggaggaggtttggtcagaggccaagtcttctgcccctccctgcagccagcactgtgtcctcgggctacttgcttgatgtctcagggctttggtttccttgtccctaccatgggaagatgacttctgtgggtgtgtccagctctgacatgttcattctggcagactgagcaggaaaggagcaagtcgtgtgcctggcacaagttgaccttcttgcctagtgctctgtaccaaatgaccctctccactgcctggaagagagaaagggttaaacctctccaaagagaaactgtcagctggtaccaccagctgagatgacaggtggagaatccaaagcagagccatggcaagaaggtcccacccagccagtggttcagtgaccaggcatagaagctccgtgaccagtgcttctgtgcgtcttgtgagaacgcagaggctacatcatcctgaatatgattttcattcactcaattcacaaggatgtgcagctgttataggcacggaacaaggggttgcattctattgtaagccatcaaaactttcactgggactgggttcaatggcttacacttataatccgagcactttaggaggccaaggcaggaggatcacttgaggccaagagtttgagaccagcctgggcaacatagtgagaccccatttcttaaaaaaaaaatttagccaggtgtggtggtatacctgtaagtctcagctactggagaggcagagggg

SEQ ID NO: 44166 - DNA, 1041 bp, Homo sapiens
atggttaacaatactgtactatacactcacagatgtgttaagacagtagatctcatgttatatggggctttttaaaccacaacttgttttttaaaaaggatgtaatatattagtcactaaccctttgttttattgaattttctcaaggttaagggacttacccaagtgctcgcagcttataaaggaaagagggtgacaagaatgaagcctctgacttccagggctctttgtcctgctccaagtcaggcattagttctgtctgtcaaaatccagattatcaaaggaccatagtataaaagggctctgcaatatggggaggtgcatccacgcttctttgggagaaacgcctcacatgttggcttcataaaactcttctatgccccgtaggttggacaatgagaaataaataatccagacattggtgtttttgataggtggttagagcttccccaacagggggagtaaacaaaagaaccatcttaatttcaagcttagttagaactacggaagactaaaagtcatttttcaaaatggtgggtggtgccagggctctatccccacctggaaggggcacttgatctgtaaaagcagcaaaaataattgtgtcttttatgtcacttaggtagaagctcctgtcccaattaattcttatctcctcctccctttataaatatgcttgggcaaagtgacatcctagcagttttttgttttgttttctctcttcttaacaaggaattctctctgcttaggcattttaggtgctgatttttctcatgtcccagagatgcttctaattagttgatgcttccttcccataatagttcaccacagagagtggatttggactggaggagggagcaattttgtcatcttatcaaagtgccactgatcaggttggctttcctgagtgctcattcatttttccgcctctctggaaacagaagcagcaagctccttgctgagtggagctggaggtttttgggttttgctgtctccccagtgcttcccagcaccctttgatgaaatgctgcctcagagtct

SEQ ID NO: 44167 - DNA, 1084 bp, Homo sapiens
atctatccagtttctaagtcagataacaagctcagaaaatgagagacactgtacatccaaatttatttggtttctgggtttcagatgtgagtagtggaatttcaaatgatgaggaacagattccagaaaagtatccaaatctgttcccttctaaaagatgaaggctaagtgtttggatagtgagaggcatctatactgttcacttacagagccaaggagtatttatttccttgtgtcttaaaaacatgcttattgagtctgtctttgtctaccaatattaggcaatattggcaattccacttcctctcgtatgtaggtttttgcttgtcctaaaattattgcctcatggtttttacttgcattcttacctatatgtttatccttaattttggccactagattgggtatatcctgtcactatttttggcccagctggtcagacatactgaataaacccatcaattcccctgtattttctggagcccattagcccctcagcctactgtgctgctggtctgtgacaacagcttccctcttcattgtcttgggaagtccactgactggaagcctgtcttcgtcctgctcaatttactccctcttttgctaggactaatcttccaggggcatcctacatgaaaggtaaatttttcgagtcttcaaaatatggaaatgtcttggatctgtcctcagacttgattagtaatttggtggctacagaacattcaaagttggaagtaattttctctcgggattttaaagacattttcgtattgtcctctggctctagtgtcactcttaatatgagatgccagtcttgtgtgagaccactttcgttctctgaaagcttttaggatcttctctgtaacactgttgatctgaaattacttaataatatgccatggaggtttttttgttttttttatttttttgtttttttttttttgagacggaatctcactctgtcgcccaggctggagtgtagtggcgtgatctcagctctcagctcactgcaagccctgcctaccaggttcacacccatggaggtctttttttctttctttgggttgggcactccactggtggg

SEQ ID NO: 44168 - DNA, 1023 bp, Homo sapiens
tccaagcccccgttctctaggaccttcatagtaacctcttgactgggctttctcctggttagtgcctggttagtgactctccaatccagctttactgtctccagcatgacttttccagaactcagatcggattgtcactctgctcctacactcatgccagtggctccctggggtctgctgggtgaagttggcatacagcccctcactgtggcccttgtgggccctcccaggcccagccactgcctgccggcagagtccctgtgctctccacagaccactcaccctctcctctgactcctctgatcctgactgctgccttggtccacctggcaacttcctactcatccatgaaggcccagttcaaatgaggtttccctgacaccaccctaaacctcagacccatgcagaattagccaagtcctcatctgtttacatagcacatttcaggtgtttctgttacagcatataataatattgtattatttcttatttcacctgtcctcctttctggtggactctgggtgcctttaacacagaccgtatgtctcatttatattcctctttcccatgcctggcacatagtaggtgctcagtaggtgtattttcccatgggtgttcatgggctctctgagtgcaacaaagtagatactcatcagtcctctctgccctgcatatgaggctggacctaaggctgtcatcccttgtggggtgtttaagttcttcctctcctctgggtatcatgagcagagatgcagggagaaaagggagaagactcatctcatctcaccttgtgctctaactgtaacagctgccattcagacaccccagatggaccattcagtgtaggctgaatggccaaacaggctcatatgtgctaatcaggtaccatcttgaacccagtccaaacggggaagctgccagcatttacacccatgtgcccagcaaactgggagtgaaggcagtaaagagtgcatcgggctgagacatggaaagcccagggttggatttggagtgtttaggcca

SEQ ID NO: 44169 - DNA, 1026 bp, Homo sapiens
actggaggctagaagaatagtcactgggccgaggagcagcatgctctaggctgggtgcacggagctgcaatcatggagggcctggacctccatgagtagatttatttaatgatgctttttcttcatgcaaaagtgatatgtgatcactgtagaagatgcacatcaacaaaagaagaaaaaagctagcctatacccctgtcatctggaattaaccagtgctgaccttttgtttgtttcctgtaacttacaaaaatgggataattttgtattatgttgattatggtgagtacctttcctagttattaagtattccattgtaaatgtatttcataatttatttaactaattccctgtcattggatatattggttgttttcaggttctcattattaaaaataatattgcaatcaaatgaatatccttgtagctaaatttttgcacacattcatgattatttctaaagcataaattcttagaagtggaatgctgagtctaagagtgtgctgtttttgaggcttttgatactcattgctaaattgccctctagaaatattgttccaattaatactcccatcaggagtgtatgagagtggctgttttcccaactctggccaatatctcaccaaagattgtcagatatttgatgatttaataagttcaaatgttatcttattttagttttcattcttatgattactaataaggttgaacatttcgttagctttgtgtatgttcttatatgagttgctttttcatggtttttgcttaattttccattggcctattaatcttttttcccattgttttctaagagccctctatagattaaggctaacttacccatgtctgtcatatttggatcacatgagttttaggaaatcttaatgctcaaacattttctatccaatcttgcctataggaccaaagtagctaggaaaatagaaatttccagataattctcaaaccacatggcaggtgttactgaatgctggcaggggccatttcgtatgaatagttatgctgaca

SEQ ID NO: 44170 - DNA, 1032 bp, Homo sapiens
aatgctgtgtaaatagttgtcattctgaattgtttaggggataatgacaagaggaaaaggtctgtacatgttcagtatagactcaggcatcttttctttttcttccacatatttttgatctgcaattaagttgaaactgcagatgtggaactcacagattcagagggttgactattcttttaatttaacttacatcattaaaattttctccatcactttcttaaattttgataatcaaaaaaataataaatcatgccctgatttgtagtatgtgatgatttccatggtgtaaactctcctaccactgcatttcaagctgtcaatgtgatatcacagaactcagagttgggaagagatatgcatcagcacactgttacgtaggatatcctccatacagatacattagatggtaaatgactttgagagcaggattaagcaacgtgtggcccatgggctgcctgtttttaataaagttttattggaacatagccacactcattttttaatgtattgtctgtgctagcttttgcactacaatgcctgcatggagtagttgagacaaagcctaaaatttttactacccacagtggctcacgcctgtgatcccagcactttgggaggccgaggcggacggatcacgaggccaagagatcaagaccatcctggccaacagggtgaaaccccatctgtactaaaaatacaaaaattagctgggcgtggtggcgcacacctgtagttccagctacttgggaggctgaggcaggagaatcacctgaacctgggaggtggaggttgcagtgagccaagatcacaccactgcactccagcctggtgacagggtgagactccatctcaaaaaaaaaaaaaaagaagaagaagaaaagagaaagttcccaacccatactcaaagcatagataataagtgaaatgtagcaagataaattggaaatgatgagttttatattcaattgtaagcttatgtcatataacttttaataatttaataattggctcaccacattcctgagaatt

SEQ ID NO: 44171 - DNA, 1021 bp, Homo sapiens
cttttctgtacctcacctccctttttttgtctataaatcttccaccacgtggctgcgctcgagtctccgtgaatctgctgtgattctgggggctgcccgattcgcaaatcgttcattagtcattaaactcctttaaatttaattcggctgaagtttttattttatcacagccaaatgcttcaccccttcgaaaaaattaatgagtaagcaaaccccatgtatttatactacacacactgtcaaacacttcggagagattaagtaagataaggagtgagaatcaaccatcgcctttgacattgtagaggttattgtccttgacaagggctatttcagcggaattctgggaacaacagtacttcattacagtagtccaacagagtaatttgtaggtgagagagtgaaaactagcaggtatggatgattcttttgaggtgttctgctataaaggggagcagagaattggaatagctgaaagaagatgtgagatcgagggacgcatttttgtgtacttaagacttaagctatgacagtgtgtttttaacctgagaagattgattcattttaaaatagaaaaaaaaaatgctgatacaagaaggagaggcagggtgattgcagagccaactccttaagaaggtgcccaagaggaaaggttgatcttggcgagagcacacacaatccattcattgtattgggagggaaacacaaaagtttaaaggaagatttgtttgtagattgtatggtgattagactaaggaagttctctctacacttgttttctcagtgaaataagcaagttcatcacttaagaatgagtagcgacgcagtgcagacatttgattgaaggggaggccatattcatagaatgtgtaaaaatgaaataacattgtactgacgatcctagccaacacaacagaacaagaaaaaaagtaaatattagaaagctaatattagaaactaaactgttatcagcacatactatgtgtccagatagaaaacccaaaataatctaccactaacc

SEQ ID NO: 44172 - DNA, 1051 bp, Homo sapiens
tttgggtttttgtatttttcatttctaaaatttggttctccttttatttactgagactttttattcgctgagactactttttcgtttgcttcaagcctgtttatgattgcttgttggagcatttttgttttgttttgttttgttttgagatggagtctcactctgtctccaggctggagtgcagtggcacaatcttggcccactgcaacctccacctcccaggttcaagcaattctcctgcctcagcctcccgagtagctgggactacaggcgcatgccaccatgcccagctaatttttgtatttttagtagagacggggtttcaccacgttggccaggatggtctcgatctcttgaccttgtgatccacctgcctcggcctcccaaagtgctgggattacaggcgtgagcccattgttgaagcacttttatatgactgcttcagaagctttatcagatgattctaatatctctgtcatctcagtgttgttatccactgtcttttttcctttgttggagatctaactggttcttggtatgaagagtgattttcgataggaacctgagcatttcgggtactatattttgagactctgggtctttctatgccttctgttttgcaggctttttctgacatcactccagcagagagaaagagggagggccacctcattagagcctccatgggtggaggtgttcatttggcctttgctggtgtgggtgtgggtggaaccatagttttttcctgtggtgctgggctagggtagagtcgttatttcctaaaagttttctgtcttgctaggttgcctttttccttgtcctttagctaggaagagccaacttttgttgggactttatttttttttttctgtctgcattattgctgttcacatgttgccagtttcttcagctccaagtctgggatttataaggcaaaaggaaaatccagacaactcaccactatgttgtttcttgggttccaaggtccctagccagtctcccttcatctccgcctttcagagacatcttaggtttgttttctattaagttt

SEQ ID NO: 44173 - DNA, 1026 bp, Homo sapiens
tgatcaaaacagagtatggaaggatacagttattggtgatgacaaggtctaaggtatggtcctgggagtaagtggctgaggtgaggttatgttgaaggctgtataaaactttggtttctagtgtgaaaatcttagacttctgaggggatgactgagtcttatttactgttgtaactcaggcactgtgcttgtaacactaacagcaatgtttactatgctgactgacttttttaataaagtatatcatgaaggccatttctcagcaccataaggttgaatgtaatctcagtttcttcatcatggatttgaaatttagtattaaaattaactgttcattattaactcttactgatttttgctttaggactttgttgttacacttgttgccacttttttgtggttggtgagcacttcagcctgggctaaagctctgacagatattaaaatagctactggtcacaatattattgatgaacttccgccttgtaagaagaaagcagtactgtgttactttggctctgtgaccagtatgggatccctaaatgtatctgtggtatgtatgcattatttataatttttttctttcatatatttgtttaaagtactagtaattcaggaaagcaatagctttcagtaaatctctggatggtttttatttttactcagctacctgaattctagtaacaatatagtgtttagtgaagaaaagtttgtctaaaaaaagtattacctgtaaccaagatcatgattttattcatctctgagactttctttcatctagtcagatttatatctgggaagattaatttctttttttttttttttttttgagatggagtttcgctatgtcgctcagactggagtgcagtggcatgatctcggcacactgcaacctccgcctcctgggttcaagtgattctcctacctcagcctcccaggtagctgggattacaggcatgtgccaccactcccagctaattcttttgtatcttcagtagagacagggtttcaccatattggccaggc

SEQ ID NO: 44174 - DNA, 1047 bp, Homo sapiens
tttattgtacagatgtgtggggtttgtgttttatgatacattacagccaaattatttgttggtttatggacatactgccctttcattttttttcttttccagtgtttaggtgatctcaaattaggaaatgcatttaaccatgtaaaagatgagtgctaaagtaagctttttagggccctttgccaataggtagtcattcaatctggtattgatcttttcacaaataacagaactgagaaacttttatatataactgatgatcacataaaacagatttgcataaaattaccatgattgctttatgtttatatttaacttgtatttttgtacaaacaagattgtgtaagatatatttgaagtttcagtgatttaacagtctttccaacttttcatgatttttatgagcacagactttcaagaaaatacttgaaaataaattacattgccttttgtccattaatcagcaaataaaacatggccttaacaaagttgtttgtgttattgtacaatttgaaaattatgtcgggacataccctatagaattactaaccttactgccccttgtagaatatgtattaatcattctacattaaagaaaataatggttcttactggaatgtctaggcactgtacagttattatatatcttggttgttgtattgtaccagtgaaatgccaaatttgaaaggcctgtactgcaattttatatgtcagagattgcctgtggctctaatatgcacctcaagattttaaggagataatgtttttagagagaatttctgcttccactatagaatatatacataaatgtaaaatacttacaaaagtggaagtagtgtattttaaagtaattacacttctgaatttatttttcatattctatagttggtatgacttaaatgaattactggagtgggtagtgagtgtacttaaatgtttcaattctgttatattttttattaagtttttaaaaaattaaattggatattaaattgtatggacatcatttattaattttaaactgaatgccctcaataagtaatactg

SEQ ID NO: 44175 - DNA, 1460 bp, Homo sapiens
aatacagaggtgccagccaagccatacttactcttccagttgtcattggccaccctgaatgatgaatctaaagaagtatcattgtgaaacaaggaaatgtcagtcaagaaatattccttggaatataaaacaaagccttgactctgctggcataggtctgagttttcatagactggagcttcacaaatctgtaaaactcataatattaatgggtgctttttcagaaattatagaatagctgccacctcttctaaattaagcattgactgtcatcagtattagatttagccagatagtataagtgttatgcaggcgtacctcattttattgtgctttgcaaacattgcatttttttacaaattgaaggttgtggccaccctgtgttgagcaagtctgttggtgctatttttccaacatgtattcacttcatgtctgtgtgacacatactggtaaattctcacaatatttcagactttgtcattatatctgttatggtgatctgtgattagtgatcttcgatgttactactgtgattgttttagggcaccacagggcacacccagataaggcagtgaacttaattgataaatactgtgtgtgttgtgactccttcaccagttacccattccctttctctgctcacttcaagtttccctatgccctgagacacaacagtatttaaattaggtcaattaataaccccacagtggcctctgagtattcaagtgaatggaaaagtcacatccctctcattttaaatcaaaacctagacatgattaagtttagtgaggaaggcatgctgaaagctaaaataggcctcttaaggcaaacagtaggccaagttgtgaatgcaaaggaaaagttcttgaagaaaaatcaaagtgctactccactaagcatatgaataagaaagtgaaacagctttattgctgctagggagaaagtttgaatggtctgaatagaagatcaaagcaaccacaacatttccttaggctaaagcctaatccagagcaaggccctcgtttcaattctgtgaagcctaagagaggtgatgaagctgcagaagaaaaattggaagctagcagaggttggttcctgtggtttagggaaagaagccatctccatgagtgcagaatgaagcagcaagtgctgatgtagaagctgctgcaagttacccagaagatctagctaagatcattgatgcaggtgactaaacagattgtcagtgtagaggaaacagccttccattggaagaaggtgccgtctaggactttcataactagagagaagacaacatctgctttgaaaggacatgctaactctcattagtggataatgcagctggtcacttttaagtggaagctagtgctcatttatcattctgataatcctaggacccttagaatttgctgaatctactctgcctgtgctttataaatggaacaacaaagcctggatga

SEQ ID NO: 44176 - DNA, 1062 bp, Homo sapiens
gttttataccagtggcttaccgcagtatgctaaaatagattgtgtattccacagtcacatttaagtcttaggtttcatttcccttatgtttttaggggtccttataacctattttacatttttgtctttttatcttaggaaaaaggacaaaaatgataatcttgaggttagaagtaatgaaacttatttagaaattacacgagaatgttacatatccttatcagtgcttacaaactattggccaaagttgggaactctagtagtttcagatgtgttgatgaagagagcaaaatattgttgatttcttctttctaaaactgaagaaagaataattgattgcctaagcactacgaaagttattttgcaagtagatggtatggtagcaagcacatgacaatgggagttttgttttgtcttgtatcctgtcaagagagtccagaactatttggaccaaaggagcatttgaagtatatacattcacttctgtaaactcatactttattgtatatagtaaggaattaaggacactgacgactgtggttcctctattttcatcgtggttcttgttagaagtaaggacaccgtttaaaccgcattatccattagttatgaaatgtgctgtccggtgtaggttgcttctcaaagggtcatctgtaagctggttatctagaattcagcatatttttaaccattcatttaataaatgttggtgacctattgggtattataaaagaagacaaagataagtagtattttgaaatccaggagggacagaagttgattttatagaagtttcaaagagctgtgaaatttatatatggtgattaggaattcaaggcagctttttttcaaaaaaaaagaaaattttgcttcctctaatggccaagtaacaaatttttgttgcttgtctttcactgcttctgagcggatgcttcggtattgtcacggtggctcctgagtcaacctgagcctcatgagtggggtactgttgcagcttgtaccccagagactgcctatgcattcataaagatatatgtgacattgtacatatatttcaatttt

SEQ ID NO: 44177 - DNA, 1046 bp, Homo sapiens
gcttaatgctctaatggagaaagcaaatcctcactcatattattaaatcatttcaagactcaatgctatcagtatcttatggtcacacgaattgaggacaaatggtgagaccttgatcttcttaagtctttccatcaagagtcaatgtatatgcaaatatagacttaagaacataagcatcctggtttaatgttgttgtgagccctgtggaaataaaattaaactcagtgaatgtttacaaatcaatacatagtaatcctatatatgaaagctaagatgtataagatgtttataaatttactattagaaaatactgctttcttaaaggtgattttaaaaagctagctgatatctgatggctcaagcatccagaaaatgtatgcaatgataagacattgactaggatgaacagaaaagggatacaggaaaagtccgaacacatgaaattctaaattaaccaagaactgccaaaattcagttcagccaccctctcatctgactactgactgaccactatttttaaagaaattgtgaaaaatttaaacagatatgacctgcattttactaagaaacaggcacatgtacacaatgaatttaaaacatctttggccagccctcctactataaaaatattgatatcttcccttcatctttcaatgatacttcaaattgaccccactatatcacatgtaatttttttgcaattaatctaaaaacgctgaacctaaaagatgctagtttagtaatggaaaagttataagaaacaagtctatccaagatagcttatcatatagacttgtttgccaccattcctgggcctatttcttctcctccttgaaatttttcaatctagaaattctgtgccaatggcacaagtccccatgaatgacagctaacataccccaacacctccagccttattggtccctcaccaattaaggaaaaaaagctgttgagacaatcccaaaattattagagaaattttctactgtgatattaatggattaataatgcttatctttcaacccaactagaaacactgcatt

SEQ ID NO: 44178 - DNA, 1053 bp, Homo sapiens
ggtgggcggatcacgaggttaggagtttgagaccagcctggccagcatagtgaaatcctgtctctactaaaaatacaaaaattagctgggcatagtgccatgcgcccctgtaatcctgtaagccacctcagaaggctgaggcaggagaatcacttgagcccaggaggcagaggttgcagtgagccgagataatgccattgcactccagcctgggcgacagagcgagactccatctcaaaaaaaaaaaagggggggacaggtgattacccagaagattccattttaaaatgagctggttcttaccaggcctggcttagacaggcatctcagccagaaacctctgtgtgggctgggctgctagacatgctgttatgcgcatgtactgttcaggttgtttccctctcctcgtctgtctccgtccttgtccttccccttctgcccttctttccttccttgtatcatttacagtttgcgtcaagaatatattggaagaaaaaaagaaaaatgtaaatattcgaaccataaaactaacttaaattgctatagataagtttcaaacttggctttaaacttcatgaagccaaagataagagagaaacagaatcagctatctgattctcattatcagaaggaagaaaatgtatcaattcctaagagaaagttaagcatctctttttttttttttttttgagacggagtctcactctgtcacccaggctggagtgcagtggcatgatcccggctcactgcaagctctgcctcccaggttcacgccattctcctgcctcagcctcccgagtggctgggactacaggcacacgctaccatgcccggctaatttttttgtatttttagtaaagatgggatttcaccatgttagccaggatggtctcaatctcctgacctcatgatctgcctgcctcggcctcccaaagtgctgggattacaggtgtgagccaccacacctggccaagaaagttaagcatttcttggcacttaattctaaagtacttataaggacttttatacagagagcttcatacgggaagtact

SEQ ID NO: 44179 - DNA, 1031 bp, Homo sapiens
ccacaacccaaatggagcaaaacctactctgtaactccaggcagcttcactagcgttttgttctcattcctaaatgctaatctgttcctttggcccctagccagtactgagatagactagaggttgggggaaggaaccaagcaaaggaaaagtgaaaagaaaatttgaataagacatagaattgtctggagatagaaatatgtggtattaccatttttaaggcattttacagtttacatagcatactttggtataaactgtattattagttccgtgttacagattaagaaattgaagctacaagtcactcagctagcaagcagtagggacggcagacattctgggaacaggagttttctgattgcttctattttttcagggaaatatacagcaaagtcatcaactgagaataaggaggagggaaggaggtgtcggagattagagaaatgaggagaaggtgaggaacaatctcctaggggcttaggagcatgaatgggatatttaacagtattgacaggcaacgccaagaacccaccttggtttagtgatcatagatttaaagtccaaccagtgagaagctcattcagcttctcacactcaggcattgacttggtttcacccaggactagaattttcctaagtgaccatgaatatatgtattcttaataccctgccccgcttgctctctgaaaactaatgaactctccaggccccagtttaaagccagtatctccacagttgcactggatcccatttcctttcaagataccactcactgctgaagatatcactcactgctgaaattgattttaatgaatcacgtaatctaatccagaaaggaaggaaataaagaagtgggtatcagggactcctgtgagatagcatgagaaggtggtacatttgggaggtctcaaggggttactgaattattggaattagaatcaaagggacggccggtgcggtggctcatgcctgtaatcccagcatgttgggagtctgaggtaggtggatcacttgaggccaggagttca

SEQ ID NO: 44180 - DNA, 1024 bp, Homo sapiens
accaagatggagaaaccccgtctgtgctaaaactacaaaattagccaggcgtggtggtgcatgcctgtaatctcagctactaaggaggctgaggcaggagaatcgcttgaacctgggaggcagaggttgcggtgagccgagattgtgccattgcacttcagcctgggcaacaagagcgaaactccgtctcaaaaaaacaacaaaaagaatttcttactacgaaaagtaataatgcatgtaagattatagatttaattacatttttaaaattattttttaaaaatagaggtggggatctcactatgttgttcaggctggtctcgaactcctggcctcaagtgatcctcccacctcaacctcccaaagtgctgggattataggtgtaagccaccatgcccggcccttaccccagttattttttttaaattgtattgattaattagggcttaatactaggaagctgggattttagttattctgtatccctcaaagtaataaactgtcattcttttttgaaattctgtagtttgaagtttagtttgtactataatcaaattactataaatcaaagaagccttattctgtacatttcatgtagatatgaaggattgtttaagttgttaataaattacttacagtattcattattggaaagtgggaaaagctcagcatacctgaaagtgaacagttctttctttttcaaataattaaaaatatgcagacttatgactctaaatttaattaacaaggccagtgtttaggtcatgggtagatagaaattctatctgctgttcaaaagcttaagatcctttcaggaaaaataaaagctcttagagaggataatagatttgattagatgattcattcttagcaaattgtgtttgcgtttcttatcccctgtattgccaggtggagattttgacaggagcatgggtaatctagagaaggttaatgagaaagttaggttgagaaaggggctttgtgtggtaggaattggtggtatttgagcaacagagttttgagt

SEQ ID NO: 44181 - DNA, 1025 bp, Homo sapiens
aaactgcatgaacccaggaggtggagattgcagtgagctgagatcgcgccactgcactccagcccaggcaacagagcaagattctgtctcaaaaaaaaaaaaaaaaaaaagaaagaaaattaagatgaggaggtttgaagaacagaaagaagccagtgcagctggaacatagtgaatgaagaagggaagtgtttaagattggatcagagaggaaaggaaatgtgagatcaggtagagctttacaggcaatggtaaagggcttggagtttatcttaataaagtgagaaaccattgatttagaggaatgatgtgaactgataaacattttaaaattagcactctgactgctatgtagacaacttagggggggccagcacagagttggagaagtggaagatggaagctattttgtttatccagataagagatgataatgacttgaactaggatgagcagatgaggtggtaatttggttagattgattcaagatgtatttttgaaacaggatatgtagagggcaagccatggatttgagaggacaggggaatcaaggatacgactagttaatggaagactgactggttaagataggaaaaattttttcaaagcattgtatttaattaatatttttcttttgaaactggtgaattgaaaatgcaaatagagttgttgaaaaggtaattaaatatgagtcagggctggaaatatgtatttggaagtaatcatgcacttatttttatttttatttttttagatggagtctttgctctgtcacccaggctggagtgcagtggtgtgatatctgctcacagcaacttttgtctcctgggttcaagcgattctcccacctcagcctcccgagcagctgggattatgggcacacaccaccatgcccagataatttttgtatttttagtagagacagagtttcgccattttggccaggctagtctcgaactcctgacctcaggtgatccatccacctcagcctcccaaagtgtgggattacaggcctgagtcaccgc

SEQ ID NO: 44182 - DNA, 1028 bp, Homo sapiens
ataaaagtgcttcatcagatatatgtgaaattgattttccctttctggggcgtgtattttcattttcttagccgtattttttttgaagagcagacacttttaatttagatgttgtccagtttatcaatttcttttgcagaccatactcttggtttcatatcatgtctaactcaaggacagaaaagttccctcagatgttttcttttagaaaatttaatcttttttgagttaatttttgtataaggtacagagtgtgggttaaagagggtatttttgcatatagctattcaattgttacagtatcatttgttgaactctaccctgtgtctactaaattgtgtttgcacctttgtcaaaattcagtctgtcagatatgtgtgggtctatttttgtactctctattctgcaccattaatctatgtgtctgtctttaccccagtactagtgtattaattattatagttttatatgtcttgaaatcaggttgtattagtactccaacattgttgtttttgttgccctgactattctgggttctttacattttcatatgatttttggatcattttttcaatttctactaaaagaaatcctgcattgattttaaattagattacatttaatatatagattaatttagggataatttacatttaacaatatcttggaactgtgaatattctctctttccatttatataggtcttcttcatctcagcattgtttttgtagttttcagtgtgcagctatttcccattttgtcagatatatctatgtatttcatatttttagtgctattctaaattgtattcttttaaaatttcaacttctgattgttcattgctagtatacagacatatgactgagttttgcacattaatcgtatcctgcaactttgctaaattcagttattatgttaactctagtagcttttctcatattccatcagattttccatatagatgcttgtatattatctttctaaaaagactgtgtgcctttccagtctgaatgtcttatttatttact

SEQ ID NO: 44183 - DNA, 1041 bp, Homo sapiens
ttctttgttagttttctacctccatgatctatggaatgctctcagtggggtattgaagccccccactataattttgtggctgtctatatatgttttgcaggtctctgagaacttgttttatgaatccatgtgccccaatgttgggtggatgtatatttagtatagttaagtctttttgttgaattgagcactttatcaccatataatgcctttctttatcgttttttactgttgttggattaaagtctgttttatctgacctaagaacagtgacctctgctcttttttattttccatttgtgtgatctttctccaaccctttactttgagctgataggtgttactgcatgtgagatcagtctcttgaagatagcagatagatgaatcttgtttgttttacccaatttgcaattctgtgtcttttacctggagcatttagggtatttacattcaaggtttatattgatagctgaggttttgagcttattatgaagttgttagctggttgctttgtagtttctattgtgtggatgatttgtaggatgtgttggccatgtaaagtgtgtgtgtttttgtagtaacaggtatcattctttcatttccatggttagaactcccttaaggatctcttgttgagtatctgttcttatgcttgttagccattttaatatcatctttggagaaaaatctattaaagtcttttgtctattttaaatcacgttatttttggctgttactatatattctagatattaacttattgtccattatatggctagcaaatattttatcccattctgtaggttgcttttactctctgttgtttcctctactgcatagaaatcttcaagtttgatgtagtgtaatttgtttatttttgcttttggtatcatatataagtaattgccaaatccagtgtcatggagcttttccttattttggtctaggagctatagctttaggtcttatgtttaagtctaatcttttaagttaatttttatgtatggtataaggtaagaattcagcttctttcctttgcat

SEQ ID NO: 44184 - DNA, 1070 bp, Homo sapiens
acaattctgaaactgaagtttgattttgggaagcctttttaatatttttaaagcacttgattttatgaaatagaattccagattaacataaacgattttattttgtcaaaatgactcagaaattttaaagaagcaaaaaccttttataaaccttttgaatttaattaatatgttcacacagagaacctcttctgcaagattaattcccacaatttatgtgggaatttatgggttctatttatgtgatggattacatttattgatttacgtatgtggaagccaacttgatcagggtggataagctttttcatgtgctactggttttggtttgccagtattttattgaggattttcacatcgatgttcatcagggatattggcctgaaatttttttttgttgttgtgtctctgccaggttttggtatcaggatgatgctggcctcataaaatgagttagggaggaatccctcttttcctattgtttggaatagtttcggaaggaatggtaccagctcctctttgaacctctcgtagaattcggctgtgaatttgtctggtcctgggctttggttggtaggctattaattactgcctcaatttcagaacttgttattggtctattcagggatttgactttttcctggtttagtcttgggagggtgtatgtgtccaggaatttatccatttcttctaggttttctagtttatttgtgtagaggtgtttatagtattctctgatggtagtttatatttctgtgggatcagtggtgatctcccctttatcattttttattgtgtctaattgattcttctttcttttcttctttattagtctggctagtggtctattttgttaatcttttcaacaaaaccagctcctgtattcattgatttttttttaagggtttttcgtgtctgtatctccttcagttctgctctgatgttagttatttcttgtcttctgctagctgttgaatttgtttgctcttgcttctctagttcttttaattgtgatgttagggtgtcgattttagatctttctctctttctcctatgagaaatttccctct

SEQ ID NO: 44185 - DNA, 1050 bp, Homo sapiens
acacgtgtggagattgcctgtgagctggcaatctgggcattgtaggataatttgtttagccagtttctgggtaagttgaaattgtttagataagtttctccaattttggtggaaaaattgatgtgattgggtggcttggtcaagcagtgatgtcataacctgaaggtctgcttgattattaccataagccaatgggccaggcagagagccatgggctggaatgtgtgtgataaaaataggttgtgtatgttgatctagcaattgctgaagtcgaagaaaaagagcacacagggtgggctcaagaatgtacctaattaaggctgtttcaaggttctgcaataaataaacagagtaagctgagtcactcacgatatttatgggctgagtggaaaaagtttccaaggccagtatcagagccccgatctcagctctctgagtgctagtaaacccagatcgagtgattgagttatgtggtctccaccagactgctgcttttccatgtttatcatccggtttttaactgctccttaactaactcatgggctctttgttaatttcccttcagaggttactgtttacttaaactggatttggagagagtcacattaggggtaagagagagaacagtggccatcatcagaaataggtctatcaaattcttaaattttacttaaattttagcagcaaattataatctgagatgttgcttgtatacaaggaacacacgaaattttgccctgggcttcctgcggagctggagagctgagcaggtgggccccagggtggcagccactttgcacttgcttaggcgctgctgcttttctgctgctggctgggtggaccttcccgtttgcacctcctgcccctccccagcaggccagctctggcgtgcctggcctggcttcctgttgctgcctctgctgtccaggctgagttcccaggagcatttgctggctctgggtttgtgagcttacccgctgcagagcctttcttttaatttaccatctgcttgaccatggggctctggcctctaatgctttatctttttat

SEQ ID NO: 44186 - DNA, 1018 bp, Homo sapiens
tcagaattgatgggaggactggttaaaacacagatagctgagcccaacacccagaatttctgattcagtagatctggtaccaagaagtattccccttgatgataccctcaaattatttcacccttgcctttctactactcctgcacagcaaaatgccatctgtggaccatgcaacatttatccctattttacttctatgcctagtcttttcattgctcttaaaaaacaaaaacaaaacaaacaaaacaaaacagacaactgtaagactgttgtaactaaaatttatgattcttagatgcagctgggcttcaattacttttttattacgtccagttccctcttccatttcacagatggttgtttcagattttctttattcactgtaaacctccagtctcttctctctcattgtcatgagatgatcttgtcacactccttacaaggaaaatcaaggtcacaaggcatgcatgtttttgacttcatgcaaagttcattcttaaggacacaactccatcagatctctaaccttcctatttaaggctaattccacaccatcctttctgccctgcttctttactttgctttttggcttatctgaatcttcaaccttttcctttttattagcagcaaacaaagatactaaaatttctctcacttgaaaggaaaaaggattcttcaatgttaactgtttacttagttatatcttattatgtaactatttcctagtctgtttacttcaaactatttggaagaataagctgctcttactgtctccttttcttgacttctcatatagtccccagtctacactattgtggcttctaacatgacttcttcaatgaatctactgaaagtagattactttcagtaatctactgggtgactgctgggtgacctcccagtttcccaaaggactttttttttcttttctcaaatttttgatattggtaaccatttcaacttcttgacaacctttcttctcttcgtttctttatctcaatctctcctgttttctttt

SEQ ID NO: 44187 - DNA, 1039 bp, Homo sapiens
cttgcatcttgagaattttctgaaaatgtgagaatatttatttactttaaaatactaaatttgacacttttaaatgtgatctcttgacatttccttaaacttgtaataatcatcatttctattcttgccttaccaaatctgtcttatttggagcatttaactccagcataaattacttattaaatagaaaatatttgggaaactgtattttttaaaatacggattttgaatggcaaccctgtttaatagcgttttttgttttttttttttgagaagttatacatattttgataccttgatatttattcagtattgaaatatttgaatgtgtatgtttttgttttaaacagattatctttctcaaggaatagatctttctggaatagaagtgatagaaaatgatctactttttattgcaagagcccgacttgaagtggaaaatcaagctaagcgcctactagagcagggtttggagactcaggtaataaaaataagactgttttttaatgtaaaaaatgtgtcataatacaggtgaacatttgactttgagttcaaaaaagtaatatatgtcttatagtaatatatcactgagaaagtatgtctacaatttaaatcaaagaatgggtcatcgttaagggaaattttaatatatgtttaatatatttaatttaaaaatagacctaatgtttctaatgtataatgtatataacatgaaatgtattttttatgatgtgcatatatagatagataactagctgaccatgcctgctttgtctaaagcacgattcctcatttaagcccttcaacaacccagtaagattggtattattgttaattatattttgcagttgaagaaacagagcttaaataagttgttgaaaatcacatagctagtaaattatttagtttggattcaaattttaatcactctagtcccagaactttgcactcttaatcattatgccataatttaaaaaatttttgacttgacatttctcctaaggtatcattttcctgatgcttaattttctgaattgga

SEQ ID NO: 44188 - DNA, 1028 bp, Homo sapiens
ctctcttttgtatatcaattactcttgaattgccaaaatattttgcagcctggcatattttatcagtttgaattttattttaacccagcaatgttttgtctgacctctctgtgtttactttttcaactttagtttactacagagcagttatttttatagaacattatggtcttttcacttggtcattattgtcatactctttttgattattctttttgtacttaagatttaatgcttatgccaaagcattcaaacacatgagataggatatggtcaaaataagaatggcaaaatgatggtaattgttgaaactcagtaatgggtacaaaggatcattctctcttctttcatgatatttttacaataaaatgttcatgcacacacacacaaacacacacacacacttcctgtttaaaatagcagttctttaggctctgtatttgcagtctgacctttatttaaaagtcattgttgattgggcaggttcgtacctttaatcttagcactttgggaggctgagggcaggcagattgtttgaactcaggagttctagaccagcctaggcaacaaagtgagacattgtctctacaaaaaataaaaaaattagctaggtgtggtggtgcatgcctgtggtcccagctacgttggaggctgaggtgagaggaagttgagcctcagtatcctgaggcttgagcttgggaagttgagaccacagtgagctatgtttgtgccattgcaatccagcctgggtgacagaacgagaccctgtctaaaaaaattaaaaagaaaatcaatgtggcaaataggatttttctagtaaataataaaatctaatagtaagatgatagagtttgatgatgccccaaataaaaaatagattatctttcatatattctctatacttcagtgattttccccatctttttattttaaaaagttttaaattagagaaaagttgaaagaatagtaaaataaacaccccttacccataacctagatttgccagttgtaaaacctttgccatgttt

SEQ ID NO: 44189 - DNA, 1113 bp, Homo sapiens
ctttgttctatcaggcagttaagttacttgtggatcaacttgatcctttcacacttgtttttaagctatattagggcagcttcagaggaacatttattctaaggctagtttagccctactgttaaggcatactccttcatagagccatattgaatgctcctgttatttaatggtatctccctttttagcattccaagctagaatattttgcagtatcctgtgagtttgagagttgatcagttttgcagattttctggtagtggttctttgcctggcctttttgagtctcactgtgtacatttataacttaatatttctttgaagattcaagagtccctatatagaattttctggtactgtttctctgcttagcttaccttttttctgttattctgacctgagaattccagctttctcagcccttccttaactcaaatttgtcccttcaactaattgagttcgttgtgtttactgaggttttccccttacattataggggaaagtatatttagccgaaagctaaagtatatttagctgaaagctatattttagggatcacagtcctgcattgcctgctgtctaatatctgaaaagagtagtttcataaattctgccccattttctagttgctagggtaaatcctataccaattattctgttaggttggaagtagaagttttaaatctgtttttacaacttaattgtcatggcacttcttttagcaattatgaactaccttgaggcatttcttttactggtatcttaaagttatgtcttaaagttattgaaaatctttggtggttgttttactttttactccttgtttcttatgttagaaccgataggttagcaatattctgaatcatgcagatctgattcttgatgtttaaaatatctgctctgggccaggcacagtggctcatgcctgtaatctcagcactttgggaggccgaggcgggcagatcacttgaggtcaggagttcgagaccagcctggccaacatggggaaaccctgtctctactaaaaaataaaaaaaaaaattagccaggtgtggtggtgcgtgtctgtagtcccagctgcttgggaggctgaggcacaagaatcgcttgaac

SEQ ID NO: 44190 - DNA, 1622 bp, Homo sapiens
aggcggttggccttctctctttggaaaattatgaaggtcttgggacttagaattggataatctagatttagttgctatttattacctatataacttttggcaagtcaaacatcctttgggtcaactttgattccttttgttgaagtatatttttgtgctttgtttaactctttgtgagacagtgttttcaagttatattcagattatttcaaaaaaacaaaatctggggtttctgagccataatggtagctcgagcacagacagtgctctttattttctgtatgagtaacttgtctccaaggataaataagatatcacaaactttttttattgtgtacagtgcttagtataattttatttcctttttaaaaaccacaaattggtgattaacaaggtatgccgaaatcttaacaaggtaattccaacttcccctgtttttaacaaatatgcaaatatctcaactactgattgagaatcagattatattattttcatgaaaaaaattaattacagaccgggtgcagtggctctcacctgtaatcccagcactttgggaggctgaggcgggtggatcacttgaggtcaggagttcgagaccagtctggccaacatggtgaaaccctgtctctacaaaaaatacaaaaattaggcatggtggcacaagcctctagtccagctcctcgcgaggttgaggaatgagaatcgcttgaacctgggtggcagagattgcagtgagctgcgattgcaccgctacccctccagcctgggcaacaaggtgagactaggtctcaaaaaaaaaataataataatttcagattatcaatttatgaagatccttgtttccgtagtaacactcacacttgtgcatttaatatattttgtgcaattaatataacctttatatactaacctaggagagcagtttgacttcctaataataactaagcactagatatgattctaaccccaaaatacagctcaattaaaatccttttttaaaagtcgtgcttttctttttagttataaatattttaattgcatatctgttttaattcctcctatgggaagtctctaactaattttatgtatttgttttcttaaattttgacaaccgtgactatgacagagtaatttattgtatatttacattgtactattcatatcaaatcattcttacccagcttgtggctagttctgatgccacagttttgaagattctctgagtttgtaaataaaaactcagctttgtgaaatattggaattcaccataactgaaagtactttgaaacaattttaaggtatctatgtacaaacaatttttaattgctgaaaatcagttttaagctgtattgcgacaagggtcctttttcagtggatacttagcgtagtaaaccttgaactctctctgatactggagcccatagaaaaaaggtttattttgctttaatgccaattcagagattttatttggcttctcaactttacatttctttcacaacaaatactttatcagaaaaatagaaatggaccatctgctgaacttccatcaagtggggagtagcagaagtcgtagagaatcaacaacattggtgattcattttctatatgagaataactgaata

SEQ ID NO: 44191 - DNA, 1047 bp, Homo sapiens
catactgaaggcttcttgtctccagagacaacatttagattcagtctttctaaaaaggaacggcactgcttttcagaggaaagcctgttcgggcagcttttgcagaatgacagcctaccttgtcgcttctctccactgcagagagatgcagtgtattcactaattttgattggtcagttgtattgggcttaaactgtgcttcatatgtatagcagggatttcccccgctccccactgttttatataaaggacacttttaaaaaggctaaatttatgagtggttgtatgttgttcttaaatagaatatgtgtaaattagtattttaaaaatgtgtattctattctggtttgttggtcacttatgccaaacattaaaaaaaaatgcagggaggtgggggaacaggaaagaattacatagtaaaaagtatatatgctttctaaagccttgataattgcatttgagaatattttagtcatatataggtttttgattgagattctttgttctacaaatagaaacccactgcatctttactgtgagccacagtgaattttaaatagtttgtttgtattcaagtcatcttctctgggtattccaaattgttgtgagcatctcaaggtgttaaacattgtcatgacttcagtattcattcatttgggtattcattcatttcattcattcattcattcaaaataataatcagattgacctaaggtgataataccctaaaatattttttaaacatttcattatagtagcttagtctcgggtataaaacttcaatcagtaatcattgtattacttttggagattactacttggtcttcacctttcataacccttttatttggtagatgtatactgatcatttgctataatattttatttcaattggcttattctatttttgacctgggcacatttcttagtagattgctgtttcttaaatatgatatgtagctacacgctaatattgttagtaaaatattattttaaaggataaagtaagttacatgtctttataagttataaagccaaatcattata

SEQ ID NO: 44192 - DNA, 1035 bp, Homo sapiens
gggaataatattgcagaaacacaaatggtaacattatttcttttgaattagtatgaagtattactagaggtatatttattcgagtaagttaaggtcttagctaacattgaaatcctataaaaatggaaaattttaagtgtgccaaattttctgaactgacagattaaacatcaggtctttgtcacatcagttagatttataattaaataaagcagaaatgtcaagttaaatgatgattaagaaaaatacattttctctagagcaagattctgttctttcgtaaatgttaaacagtgtggtggggtgcatgcatcttctgacctacctgtttgctgttgccttatgggccttttggttcactatgacagtttttggcaaattgatacatgatatcattgacagattttgacatgaatttttacctgacaacagtgaagtagctgtgttttatttcatgtcttgtaggaattctttcgttttctctccaatacttcaactgcatgcattatgagatttagttggctgatggatttctaaagaacagtacataatatttgtatttgttttgctttaaaaagtcacggccaagaggaatttcctcagatgataggaattatgtttccctttgatggagtacatgataatatttctttattttccagaatatgtgaaaacaaaaaaggaaacataacgtttgtagcttctaaaatatatttagacatccttttgttaccattgtaaatctgtttttaatagcagtgctcactattttgaaatgatttcttgatcacataacttgctttatattataaatccaggccatgtccttttgataaaaaccatctgctgtttaattttgtttgttttcattagaagaggatacataattggtcataaaagtcagatagaaaaatccattagtcataccaattgatatgaatatctgaatatttagtgcagaaaacacttcctaaatcttccttttgtgtgctgataaagtattttcttttctttttggaaattcatgtttcatta

SEQ ID NO: 44193 - DNA, 1006 bp, Homo sapiens
acattcaagaatctatccctggattaaaccagagttgcagagggttttatacctagacaaccattcccatctaattctttttacttaatttcactttagtttgatgttattattgtacattgaggaaaactataatcattagctatgtgagacttcttgttgccttttctataaggttgttgtggccagtgttatacattgagggatataagaaacaaccatgtgagacttaaggtatcattaagtgtatatagttgtggaatatatagttgtggaaaacattgagaagacccatagagacatggtaaggcccatgagagtcactgctctctggtcttagtaccaatagtttgtacttctactgagcatctagggagtttttaatcttaccaatgctgagacatgtaatcagctccttttccctgtttaaatgacctagtagaaagtatgtagaattcaaagaaagagcctaaaataaaaattaaaaagaaatcataaggagcaatttgtggctcacctcttgtaagaatacaggacttaatgatacaagtattgtttcattcttttcatgctgtttgctctgattttattattttttcatttagttcagttgtgtctaaaattcttaaagtcatcttgctggtagcgttggtgcacgcctgtcaccccagccactcgagaggctgagcagggaggattgcttgaacccaggagtacaaggccagcctgggcaacctagtgagaccttgtctcaaaaaagaaaaataaaatgctaaagttattttatattatctttaggataagggaggatatatataaataaaattatatctaacatttaccagttttgcttccctgctttcttcctaacactgatgatgatttttattttagttttggattacatactctttggaggatcttactgaatttgtgaatctttgttctaggaaaaaaaaaaatgtataaccatacccgtgacattttgcatctgatttagggtact

SEQ ID NO: 44194 - DNA, 1025 bp, Homo sapiens
gacccaaaatgtaacagaggaaggaatttttatgaaggcctgccatgtgctatattttaaaatttttttaaataaatgggcttggaataatcagctcaattttgtatatttttaaaatgaaatactactgtcataatgctttcaatggtttaataaaacaatgtttcttataaatatttttaatttgtaaagttacattaacaatatatgttcattgtgaaaactagaaaattgaggcatatgttgattgctgaaaattaaaaactacagatataaccttgagattcattatcagcattttcagaaactaacctctcaactgtttgcttatgcattactgtgtttattatacatactattttgtacctaagattacattatggacataatgccatgttaataaacataaatctatgtcataattttagtggctggataatatttaaaaactatccaatactttatgtaataatctattgttaattattttagtcatactttttttttttactggtatagacactgttttgatcatccttaaacatacatctttgcacagttgttcaatttttttccttatgatacattttagaagttgaatttcttggtcaaaggtcatgtttgaggtttttgcttaatatttcaaaataaaatatattttgtgtagtaatgtgaaaaatactcataggtttatcaaaattattagtcataagcatttaaaaattatttgctagccaggcacggtgcctcacaccttaatcctgatacgtcgggagtcccaggtgagaggattgcttgaggccaggagttggagatcagcctgggcaacatagtgagacccccatctcttaaaaaaaattaaaaattgtttgccaagcacatatgaacattggtatattagttttaaaatttattctaatttggatttgtttttgctgtatgtggttgaacagttttgtgtttgtcattctttttcattgatgagttacctgtttgtattctttgcctattttccttttgccatg

SEQ ID NO: 44195 - DNA, 1045 bp, Homo sapiens
ccctgtacctgtgtagttagctatcgccaaggattctggcaaagttggtactaaaattatggcccttacctctttttcctttgtgtgtttcttccctatcctttcagttgccgtgccagccatgagctcagtcctctgacaccgcaagttagtaaggccccagctttctgccattatagctgtgcactgtttagggaatgctatcagtctgaaaaagcagcagactcactcattttacagatcttgtaagggtagattcctctctgactttcgattgcttttttctccaaatccccattggatctctgccacgcatatgtatgttaatgataaggcggggatttggtcttgctcctgtggctctcaggattccacccactgacccctcgtccccagctttatgtgaaataactactctgcctgccctgattcctgttctcagccatctccagaatgtaagtctgtatctatgggacttggaatgggagttgtggtagtgagtgccattagacaaaaatgaccagacttggaattcttactcattgcaatttctataattaaaagtaaatctttctttggttatttctgtcgccttcaaatgcagttattcatcgtttaatgatggggatatgttctgagaaatgtgtctttaggtgattcatctttgtgtaaacatcatagagtgtatttacacaaacctagatgatgtagcctactacacacctaggctatatggtatatcctattgatgttgctgtattgaatattgtaggcagttgtaacacagtggtacttgtctacttaaatatatctaaacatagagcaggtgacatattatgctaaggtcactgtggctgtgacatcgtaggcaataggaaattctcagctccattataatcttatgggaccactgttactaattaaaacatcattatgtggcacatgactatggtgtgtttttagaagtgctttatataggtttagagcttatctgctggaaactatgcctgaccagttcactctgccattagtggaagctagatga

SEQ ID NO: 44196 - DNA, 1044 bp, Homo sapiens
cctgggaggcagaggttgtagtgagccaagattgtgccactgcactccagcctggacaacagagcgagactccatctcaaaaaaaaaaaaaaatttactcctcttccctttgttttttaaacttttctggataggttaataggaataccttacgttagtgtggtgattttcttttttaaattttagaatggtaagtacgcttaatatgagatctaccctcttaacagatttttaaatgtataatatggtattgttatctataggcatggtattgaacagcagatctctagaacttacttatcttgctttactaaaattttatgcccattgattaacaactcctcatttcttcctctcccccagcccctggcagccacaattccattattcgcttccatgcatttgtctattttagataccttatgtcagtggaatcatgcagtatttgtctttctgtgactggcttattttactaagcataatatccataagattcatccacattgttgcatatttcaggatttctttcttgtttaagtcggaataatattctgttctatgtatatatatcacatttaaaaaattcagtcatcagctggtggacatttaggttatttctgtattttggctgttgtaaatagtgctgctgtgaacatgagagtgcagatacctcctcaagatcctatttcagttattttggataaaaacccagaagtgggactgctggatcgtatagtaattctatttttaatttctttgaggaatcaccatactattttctataggggttgtacaattttgcattcccactaacagtgtaaaacgattccaatttctccgcaacctcaccagcacgtgtctgttttttgttgtttttgcttgtttgttttttttaataataaccattctaacggatgtgaggtggtatctcactgtggtttcgatttgcattactctgatgactggtcagatattaatgatctttttatatacttgttggctatttgtatgtattctttggagaaatgtctattcaagtcctta

SEQ ID NO: 44197 - DNA, 1094 bp, Homo sapiens
catttggaggagaagacgcattctggttattggaattttcagcattttttcactggtttttcctcatctttgtggatttatctacctttgatctttgaggctgatgacctttgggtggggtttttgtgtgggggtctttttgttgttgttgttgttgctttctgtttgttagtttttcttccaacggacccctcttctgcaggtctgctgcagtttgctgggggtccactgcagaccctgttcacctgggtatcaccagtggaggctgcagaacagaaaagattgctgcctgctccttcctctggaagcttcgtcccagagggtcactggcctgatgccagctggagctctcctgtatgaggtgtctgtcaactcctgttgggaggtctctcccagaaacatagaagatttctgtgactttgaattagacagtgattcttagatattacccaaagcacaattcacaagagaataaagttgataaattagatttcatcaaaatttaagaagctcttcaaatgatactgttacgagaataaaaagacaaactgtggacaaggagaaaatatttgcaaagtatatttgatagaggacttgcatccagacatatcaaaagactcaaaacttaataggaactccaacaacccacttaaaaaataggcaaaagagttgaacagacacttcacccaagatgatgacagatacgcatctgtaaacatgctcaacatcgttaggcattagggaaatgaaaatgaaaagtatactattatcttattgtcagagaataagcagaattattttagtgcagacatatttattgtactttttaatgcaggttattatgtaatagtttaaaaaataaaactacaaagtgtagattgaatgattaagttatatcacatagattcatgatttttctttaagaagagtcttgggactagatgaaaatttagataggcattactacaaagtggtgatgttatttaagcatgagtaaggtaatgtacttaactacattcatggctgccaagagacagtatttacctgggtaaatttgtcataatccaggatctgttctctttcttactctttct

SEQ ID NO: 44198 - DNA, 1030 bp, Homo sapiens
gaaaactacaaaatattgttgagaacaaagaagacctaaatcaatcaatcagtcaatgttgttcatcagttggaagacttaatattgtttattaagatgtatgttcttcccaacttgatctatgaattcaacagaatttcagtttaaattccaggggggcttttagaaattgacaagctgattttaaaattcatatagaaattcagaggatctcgaatagctagaataacttttaagagaaaacagagttggaggaataaccctacctgatttgaagacttattacaaagactccttgaagtaatcaagacataaagatcaatggaacagagatctcagaaatagacccacatatatatgaacaactgatttttgacacatttagtagagaaaaaaatagtcttttcaacagatggtgcaggaacaattggatctcaatatgcaaaacagtgaacttgtatccatacttcatttcatataaaaatattaactcagaatgaattcgtgtcctaaatgtaaaatctaaaactacagaacttaaagtaggagactcagaagatttttttatttttatttttatttttttcttttcttcttttcttaaatttttaattttactttaagttccgggatacatgtgcagaacatgcaggtttgttacatagttatacatgcgccatggtggtttgctgcatctatcaacctgtcatctaggttttgttgttgttgttgttttttgagacggagtttcactctcgttgcacaggctggagtgcaatggcgcaatctccgctcaccgcaacctccgcctcctgggttcaagcgactctcttgcctcagcctcctgagtagccgggattacaggcattcaccaccacgcctggctaattttgtatttttagtagagacagggcttctccatgttggtcaggctgatcttgaactcctgacttcaggtgacctgcccgcctcggcctcccaaagtgctgggattacaggcgtgagccactgcgcctggcctaggttttaa

SEQ ID NO: 44199 - DNA, 1058 bp, Homo sapiens
tcttttctctaggaaatattctagagaaatgctgtttttaacatgacaaatcccatgctgatactatgcctagaagattttaaaaatttatttctttgttcattcttttctcagacatttattgcaggaccttgacagtcaagagtttaatgttcatggttttgactattaaccagctgcaaagtccatgatgcagcagttcataatttttcaggcaaaattttgaatagctagtgagtgcacatagaactgcccaacacttttaatgtggcttggtggttttcttcttttcactgggtacccacttatttttctgaagtggatatatgtagtggcatttgtactttgtaggctcagaagtctttaattatatccatttcagatatcaagagtctgcttactcttgctattgtgctttgaaagcagttatgccaaaatagtatcagagaaatgtacattacatgttctttctgaattttcctgtctttgattttttgattatatagtcatgctatgctgtaatgcttattccatattttttgttaatcaaggaaatccttcacaaataatgcttcaacagcattgcaattgtatactgctgaaatataggttttgcttaggaaaatcattgggaatatctctaacttgtgatttagtaggcttggaaaatgtcatataaaaagttgaacttttaagctgggtgtggtggctggtacctggaggcccagttacttgggaggtggaggcaggcagaattgcttgaggccaggagtttgagaccagcctgggtgaacagaacagatctcctcttggctctaaaaagtaaaaattgagaagtaaaggaaattaaaacaaaataaaagttgagcatcatagcatgtgcctgcagtctcaactacttgggaaactgagatgggaggatcactcgagcccacaagttagaggctgcagtgagctgttattgcaccactgttctccaccctgggtgacagagcaagatcttgactctttaaaaaaaaaaaaaagttaactttaaacaatgaataatgcttgtgtgt

SEQ ID NO: 44200 - DNA, 1018 bp, Homo sapiens
agtgtggttttccatgcttgtgttatatttaatagtaaaagtctaagataaaaaaacagggagggaaaggaaattgattggaggggaggcagctatattgggaaatggtgagaactgatgccttatagatcaacttataatagcttagacttattaactaaggattttattaaatggtattcccagaagattcaacataatctgtaagtagagagccattaaagtttactaaaaagggggttggagtgctgaaaactgtgtttttttttttttttttttttttttgagatggagtttcgctcttgttgcccaggctggagtgcaatatcacaatctcggctcatcgcaacctccgcctcccgggttcaagcgattcttctgcctcagcctcccaagtagttgggattacaggcatatgccaccacacccagctaattttgtatttttagtagaaatggggtttctccatgttggtcaggctggtctcgaactctcgacctaaggtgatccgcccgccttggcctcccaaagtgatgggattacaggcataagccactgcgtccggcccaaaaactgcatttttaagaagataaatctggctgggtggatttcaatgagagacttgaaagctagccgagaaaccactatgtaaaggtaatggtgataaagatgtggattagggtgatgcttgtaggaatagaggtaaaataacaacttttgttttatgcagtaggatagttggtaagacttggtgacagattaagtatggttgctaaaaataaaaacagtagaaataaagattgcatgttttgagagcataccctttgttgggtaggattagggaattctggatgacagtcttagagtaagagcttaatttcttcttacgatgtatttaaaatctcagaggaatgagattttacgttccaaattgtttatctaaaaatgtcagttctaacagggaaggtgctgataatgtttccagtgcaagatatccaagttactggtgtcgaatccg

SEQ ID NO: 44201 - DNA, 1046 bp, Homo sapiens
cccccactttttttttttttgctttccatttgcttggtaaatattcacccatccctttattttcagcctatatgtgtctttacacatgagatggatctcctgaattcatcacatgaatgggtcttaactctatccaatttgccagtctgtgccttttaattggagcatttaacccatttaaatttaggattaatattgttatgtgtgaattttatcctgtcattatgatgctagcttgttattttgctcattagttgatgcagattcttcatagtgttgatggtctttaacttttggtttgtttttgcagtggctggtaccagtttttccttttgatatttagtgcttccttcaggagctcttgtaaggcaagcctggtggtgataaaatctctcagcatctgcttgtctgtaaaggattttatttctactttgcttatgatgcttagtttggctggatatgaaattctgggttgaaaattcttttctttaagaatgttaagtattggctgctactctcttctggcttgtagggtttctacagagagatctgctgttagtctgatgggcttccctttgtgggtaacctgacctttctcttgggctgctcttaacattttttctttcatttcaaccttggtgaatctgatgattatctgtcttggggttgttcttcttgaggagtatcttagtggtcttctctgtatttcctgaatttgaatgttggcctgtcttgctaggttagggaagttctcctggataatatcttgaagtgtgttttccaacttggttccattctccccatcgctttcgggtacagcaatcaaatgtaggtttggtcttttcacatagtcctgtatttcttggaggctttgtttgttctttttcattcttttttctctgatcttttcttcatgctttatttcattaagttgatcgtcagtctctgatatcctttcttccacttgatctattcggctattgatacttgtgtatgcttcacgaagttctcctgctgtttttcagctcaatcaggtcatttatgtt

SEQ ID NO: 44202 - DNA, 1216 bp, Homo sapiens
caaatcctaatttagtcaagatccaaagagcctccacttcttcaatatgggcttctctaatgtctaatctacttttgaaaaatctgcgcttctctatgtaatttgcaatacaattatgctacaacttttctatagaaaagtaataatcaggagaatgaggacttagccctaaggatttgctgcaactccagaattttttgaaatgttctttaaaatcatgtcaattttgcattcaattccactgtttgaagataaaattttaaattacttaccagtgaatatccttggtggcccttaatccagaatgcatgccatgattacactattgctcttaaatgtaattactgacactaacattaccacttctttctgtctaaatgtggaactatagactttagatggtgaacttgatgaaaagtataaaaaagtagaaaatttaattgccaaaaaaactgaagagtcagctgatgccagaaggaaagccgaaatgctacaaaatgaagcaaaaactcttttagctcaagcaaatagcaagctgcaactgctcaaaggtgggtcttttcacacaggcttattttttaaattactttaaggcatccatagtttatttaaaagtgaaaaatatattcactttgtcttgagatcatcatagtataaattgctcagactttatatatatatatctccccacagatttagaaagaaaatatgaagacaatcaaagatacttagaagataaagctcaagaattagcaagactggaaggagaagtccgttcactcctaaaggatataagccagaaagttgctgtgtatagcacatgcttgtaacagaggagaataaaaaatggctgaggtgaacaaggtaaaacaactacattttaaaaactgacttaatgctcttcaaaataaaacatcacctatttaatgtttttaatcacattttgtatggagttaaataaagtacagtgcttttgtatatattttggtgtacttgttactttcactgattgttgatgaatcccttttttcactgtaaacgtggatttataaacaagtttactgcgtccatgaagaccctaatttatgttgtctataaacaagctattatatttatttgacaggtaaacatcctccaaaactccacacccttgactcccctcctcccaatcacctcccagtgggattcccaggttgaggttaaggaggacaaatat

SEQ ID NO: 44203 - DNA, 1033 bp, Homo sapiens
tgagaatacctgcactgggaagcaaggctgctagggccaatatttgatcagtaaatatttgctgaagagtatgaggagtgtggctcattggaaagcaaagagtcggcaccagaaagagaagccgttttcagaggatgggttatggaggctgcagaaagccaggcagaggcatcatggcttgatatcataagaaacaattgtgggttttcgtgaaacaatgaaagcagcactgtaggaagatcggttggcccgtggtagacaggatggactaggcagaagaggaagaagaatttgagaggtcagtttaggagattgttagagtaacaggtatggggtgatgccatcctggactgacgcagtggcagtggcagtgacaatgagaggaagctgctaagttgagaaacattttgaagtaaaagctgagtattgggataaaggaaagagaaggtgatgtctcacctataccatgagaagaattttaaatctactggcagaaacagcagagctgaggataagaagtcagtgtgggtggtgatgatctgtttgggacaagatgaattagagatgacagctggccagtccatggaaatgtcccattgatggctggaaatagagaagcagagcccagccacctgctgggtgctgagagctgtagggtgagggccatctgcataggaaagccacaagaatgagttcactgaaggagccagtgttgaatcagagccatgcctatctgtgatgacaattcaagcctgtggacacagacttgtgattggcagggccgctgttaagggaattcctttcacatgatcagctctcatggagccattccttgtttagaattgtgctgcagatagaggcagcaccgggagcctgctggcgcctttgtcctcaccttcatttgctcgttctctaatggttgcatgtgaaggtctagttgttttcttctttggtggttcatgttttggatatttgttgtctcagtaaacatctggggaggaaagaattttcttttgtccatatgatgtaatgt

SEQ ID NO: 44204 - DNA, 1206 bp, Homo sapiens
aaagctccaccagaagctatcagaacacacatttggcaagatgttaaatctgtgggagtttaaccaccttcgagtcaaagagaatgttggtctctgttcctggctcagagtcagaacatctggaacagatagtgtaagtgactgctgagagaatagacagatgtttccctgtggccttgagtcttcccagagagaacactctgaattcattgagcaagcttcatgtactcaaaaatggactttctttcccaattatttcccaacaccatagtagtctgctgggaaggaatgaggtattcagcagcaagaacatgttgtgtttgtcctctttatttgggtttgttctgttcgaggtcgtgccatagacccagtacagcatgtagcctctgaaatccggtgtgaatatctgttcttagaaaacctccagagaggaggaagctaggataattccataaaagcagggaagaaagacagaatgctgtctgcttgtggaatcacttttctgacttttcctttgtgactcccagaacacatgttgaatcctttagtaaatgactcctcagttcaaagctgtcatcactcctaaagtccttcttgatgagataaaagtggcatatgcaattccccaaattatgtcataaactcaggaatgtcctatgattcttaaccctaagtaagttttgttcctacactcccttcctctttttctctattccatacacacttcctgtctgtctccacccacgcacaggccctagcctgccctctaatctcttgtgcaaaaatttataaaaaccagaatgtattcaccaagagagtttgggaagcaaaattgtctagtaaagatttttaaagcaggtaatcatctgatctttctagcatgattgatgggatgccctatctttgagaatcattggtggaggggaaaaaaagaacatttaaagatgccttgtagtctggtgactctagagtgttttatggtgagccttttcaaagttgttgtccctcaagaggaatttccccaggagccccttaggcagggtcaactgaagcactgattctactgggagatgtgcacagatgccgcttgggaaatgtttactggatgattggtttgttgcaatcactcatcaaaaccttttacctgatatttctttttacgtagtaaaagaaatacgttgtaggtactgaataaatgctgattga

SEQ ID NO: 44205 - DNA, 1051 bp, Homo sapiens
agattagtatgaaaaagggttttaaactttcaattgattatggagaaacgtggctattcatacatctcttcctttgttctctcctgtttttataactttcaaggttcacggacactgcatgtgcaggcataacaccaagggcttaaactgtgaactctgcatggatttctaccatgatttaccttggagacctgctgaaggccgaaacagcaacgcctgtaaaagtaagtctgtgttgaagggacattttaaatccattcaggctctagtatccatttcctaattagaggtactgtaacagtgtactgttttgcagagggtagaaaagttactgtcttttttccagcttcaccctgatactcctagacaaccaacaatctgcattcagttaattaatattcactgaacagcctctgtgtgtttgacactgagctgagtagtttggcagctacagtagaaaactaaggtgctgtccttgacattgtatctgttttgttttttggtttttttttgtcgcctaggctgtagtgcagtggcacaggcggctcactgcaacctctgcctcccaggttcaagcgattctcctggagtagctgagattacaggcacgcgccaccatgccctgctaattttttttgtaattttagtagaggagaggtttcatcgtgttagtcaggctggtcttgaactcctgacctcaagtgatctacccaccttggcctcccaaagtgctgggagtttacagatgtgagccaccgcgccagggctgtttttaaggcaagatgaccgtgagagaaaaatgaaagaactatatggcagggtagctgatgaaggtctaagagatatggagtagcatttttggccttgtttctgtgccagtccagctgcggcctctggcatacctccctccatccatctcaggggttttctccgggtggagatgtagccggcaacaccactgcccctccccactccacaaacagtgattctgatgcatgtcctccccttgaagagcagctccgcctctgcccccactgagaaggactattat

SEQ ID NO: 44206 - DNA, 1033 bp, Homo sapiens
gatttagactagcaaaagctcatttagcatgtacacagtatgtttttctatattactagatgtttcaaaactcataactcttggccaggcatagtggctcatgcctgtaatcccaacacttgggggtgctgaggtggggggatcgcttgagcttcaggagttcaagaccagcctggacagcatagcaagaccctgtctctacaaaaaattaaaaaattagccaggcatggtggcacacgcctgtagtcccagctactcaggaggctgaggttggaggattgcttgagcccgggaggtcaaggctgcagtgaactatgattgtactagtgcactccagcctgggcaacagagcaagactctatctcaaaaaacaaaacaaacaaacaaaaaaaaacacaaaaaactcataggtcttttgtttattataaatttggaggcaactgtgcagcaatggcaggcctgggaaggttgatgactaagcagagagtatggaaaggattctattcgttaggtaaaatgtgttgttctggtttccagcagcttcttaactccacgggaaattggatgactcgtcaatggtcctttgggacttaaaagtttccaaaagagagggagaaggaagcacagccagaaatggctttcacagagccattggcacagagaagtccgattagaccttcccctctcttcctctccccaagcctcccagccaggctctcacggggagtttgccatggtacgtggcacacatggttcagttagtccttagggatttttctctcttactttaaaattcttaggctgatattctcttgagttgaatacggtatcattttcttatattcctgggtaggtgaaaaataaacctaagcagctagtgagtgaataagtcaaagaatctgtcaaaatgtaattgtccatgttcttatccttgacatcttttatcagagaaaaagctcagcaggattattaaggagggctaaaggaagcctaagcatgtttctagttttcaccattaaccctcacccaaatt

SEQ ID NO: 44207 - DNA, 1132 bp, Homo sapiens
tctaaaagagggcccaaattttagatttcaggggtcatatttatacaaagtcaaaagtaattttaaaagaagacacaaagtgtaaaatattcagaatcagaatacttttccttcatttttaaaaaggaggctggccgggagcaaaatggctccatgcctgtaatcccagcacttagggaggctgaggtgggaggatcactggagcccaagtgttcaagaccagcctggacaacatagactcagtctctacaaaaaatttttaaaacttagctgggcgtggtggtccacacctgtggtcccagctgtctgggaggctgaggtgggaggatcacttgagcccagtaggtcgaggctgcagtaagcgataatcagtccactgcattccagcttgatcaacaaagggagaccctgtctcaaaaaatttttttaaataaaggctgatatttctggcctctaacaaaagcagaaagtatcagtttcacattcggggcaagttccaagctaattgctcagaacatggtcagcccacccacctgtacaattgcccttcagaaggaggacagagtattgtgtgtggtttgcacagcagatcccttaaaatggagtcacttttacaaagcagaaagcccattctggagacctgatcaattagaccaaaggaatgtggtaaagtggattccgttcatttgcttccaggtttatacagagatgtctagactgcttcctcctgattagaagggaggctgtaattaaacttttttaaactttttttttttttgagttctggtgattgttctccagtactagtttccttgactacaagttattgaaggcagttgatgttacttttctaatattagcatttaaattttacctacaatattatgctaacacttacttgagaggccaggacatcctgtaaatgaatcaccagattctgaaatcagctttgaccaaaatgagaatcacactgtttgtattaaaagcaactggaaagactatcctctcagtgatgatttctatagttcgttactagagaagtttctctaaacatgtagagagcatcagaaaccacaaaaaagaggtgcagcggtctctcctgagtgtgaagctggctcttggtattgcttct

SEQ ID NO: 44208 - DNA, 1029 bp, Homo sapiens
ccgccatgcccggcctctttttattttttaaattatgtttcccctttcttctcacaccccttctaatattggtccatatgttctctgataaaagaaaaaataattaaagagctcagggaagcgggggagcggaaatagaaaaacacctcagcagttttctaaggccaaatgagcagacccttagctataggatcacagaaatttagagctgctccgggcctccgtagagctacagattcctcagaaaccctgggtaaataatttccatttggtcacagcctcctgctccatatttttgcccatataaggaactgtggattatttgcatgtttagaaaacattggtctgaatctttctgtaataaaacgctcttcttaagtttgatggcaaaattaaatgtcatgataatgaattatatagtcaaaccaatttcccatcatacctttcagcattccacatgtttctctgactctctgactaaaatgatgtcctccaagaacaggctgaacattattttggtgtgtgggggtgtataccagctttaaatttttttttttttttttttttttttttttttttgagagagacagagtcttgttttgtcatcaaggctggcttacagtggcacaatcatagctcactgcagccttaaactcctggactcaagcaattttctcacctcagcattcaagtagctagaactacaagcatgtgccaccacagccatctaattttttttttttttttttttgagagacggagtctcactgtgtttcctaggctggtcttcaactcctgatcccaagcaacccttccgcctcaccttcccaaagtgctgggattctagacataagccactgtgcccagcccataacagctttattgaatataatttacataccatacaattcaccctgtaaacaattcaataatttttagtatattggaagttgtgtaatcatcaccacaatcattttcatccccccacaaaagaaacccctcttctgcatatatacccaaaataattga

SEQ ID NO: 44209 - DNA, 1034 bp, Homo sapiens
gaaacgaaagctcagaggcaccttctcctgtcaacgccatgaattcctttgtttaatttttaagctctttgccaatattccatttctctagaatgtttatcctaagcacttgtttgtcagccctctcatactatgaacatatgggtagagagtatattttctgctgtatgttagtattatgagaatagttacagcaaaaacataactcagtcaaatgatatgttaatatgaactggaatgcaaagtgcatactttttcattcaaaatgggtattcttgatttcctcagaactgataaaaaataatgcaacatcaccaacagatcctgttatttcctctgcaggatacagttcaatatgatgcatgaaaaatgctccacatttaaaggacatacccgtgtatgttatgaaaacatggtttgatactttgtttatactaccctcagctgaacccctatatatgaattccgttttcattgtcaagaatgttactgtagtattctctagaacttcaatgtctttgtggacattgttgtgaaattggtgactatgtatagctgtcgttagtctttttgggagactgttaggaacagtttgtacagtatatacttgctaaatgagttcattatgacagtcacattgctgatgcttactgagaactattacctactcttggctcctgttactccgtaggcttcttaatcttccaggcattacagcagcacagtgttctactttttacatcatttctatgttcggttgtttttaggcataaacaatgtgtattgcagtgcatttcggcatttgtgccatactgaaagaatcaaaaacaaatcatccaaattaaatttcaaacattatttcagagaacacagggcaagacacatacagtgccttcagatattaagcattccacaacatcgtgcattctgtatcagctggtccagtccattctgggtcctagattactgtcattgtctaaaagtaacttttaaaaagcagagttcatgaaaactgcaatgctgggaaaagaagg

SEQ ID NO: 44210 - DNA, 1041 bp, Homo sapiens
gcatattttctggagtcagacacaggttgctccaactcttgggcaagttcttaaccttctctgggcatggatttatttctgatgcctacctcagagaattgttgtaaagattaaatgagatgtgccttcagcacagtgcctagcctatggtaagggtccaaaactgttagccatcagtgctattaccattgtcctcatcttcatcatcatgactatggtatgtgtatggaaaggggaaactgcctaaactgatgctttacttgtgtgtggctatgatacagctcaaaacttctctaataaggcacgagggcctattgggaaaaggctaccagcctttgacttgtatttcaaataaggtatttttgcttctcattttatttcttctacatatgtccatattttttttaaccttcctcttcacacttgatttttagcatttcctttttctccctaaactttgtatggagaaaaagaggcaatgagatgctatttttgcaacattagctgaacctgggatatgcgtagtcatgtttatttctgcatccagagatcacacacacctaactcaactgtgtaaaatatattcggaagaaattcagtcaaattaaaagcatgatataagcatgcttatagagtcaaaagaagaaaatgttttatcttgattatggtcaaaagagagaaaataaaggtcttttaaaaaagaatttatactagttaattaagcaaatctgcatgggcatgtctgaatagccattgatgctgcactttttcccataagattgatactttaaaataatacccgaaatgctcattattctgtggttttcttagaaattttgcatattatgactgatggaataaggggtttcacatttattaaacagaatagatgcaaactgaaaggatatgtatacacctaagtgagtactttcttttcaaactggtcatgtaggcaaataatgagttcactgactgagagatattccggtcttttgaatggatccttagcaataacgaatattgattctttgagggtggatt

SEQ ID NO: 44211 - DNA, 1067 bp, Homo sapiens
tggggcagctttcactttcagcagtttatgaaaagccagtacccccctcctaagtgcagtgtgcttacatagaacaaatgaggtggccaataaatgtttgtgacaaaatgttgaacagagtccaactttctgtttaagcctttatcatgcaagtaaatgtttttagaaatgacgatccctttagaaaaaccggtacttgggaaaggttgaatcgattaattggatacgttggaaggcatttaagtttactaaaagattcatcttgtgaatcataaaaaaacaattcttcccatagttcacttaagctaattaatgtgtatcagttcttttgagaaacatctttagagaaactcaacagtttcataaggcaaggtgcagataaagaaccttcctttgtattaaagaggagaattaatacaatgggaatatatacaattaataagcaagctagatacccagtctatttttctttgaggatattttcctgtaggtcattttaattgatttgtttgacatgactacatttataataatctaaaatggtaaacctaagcatcctacatcttgtctttagcttataaagaattttcctttcttgaagcattaagtgacttctggtcccttaaaatattcaaatgtgttgtttttgcaaaatttccataggcaaagaagaatggagaaaagaaattgtaaatggttctcggagcttctttgggttaaagggtctaatgccaggaacagcatacaaagttcgagttggtgctgtgggggactctggttttgtgagttcagaggatgtgtttgagacaggcccaggtgaggctcacaccacacctgttctggctcccgctcagaggtggaggccgccaggtgctccagctggagatgggggctggtggagctgtgttatgggtagggcatgaatgtctttctatggggccctgttgggttgggagttttggtttttgtctttggttctttatatcaaatgaattacggaatttagcaaatcatctagccacattattaccaaaaaccatcagaaaaatagacttaaatatgatttt

SEQ ID NO: 44212 - DNA, 1045 bp, Homo sapiens
cagagaagaaaaatggatgcttatgcagatgattttcctagtgaaggtaacagattcacactcactttgtttcatccgtttcacttctcctctctgacatacatgcctttttttcttccctggttattttcctattgatactttcaaaagtacaatccttctagccttgcaactttcacattcatcatggtcatgttgaccttgaacatggcattttatgtctgacttcaaaatataatgtgtttttattctcattgtgataatttctgtaatgaaggtttaaaggagctaaaggaagtgctcttcatgaagatatttatgttttacatgaaaatggaactttggaaattcctgtggcccaaaaggacagtacaggaacttatacgtgtgttgcaaggaataaattagggatggcgaagaatgaagttcacttagaaatcaaaggtaaggcagaggtaatgtgtttaatttttaaatgactttgaacaaattctccagctttgccaaatggataacgatgactctacatttcagatcctacatggatcgttaaacagcccgaatatgcagttgtgcaaagagggagcatggtgtcctttgaatgcaaagtgaaacatgatcacaccttatccctcactgtcctgtggctgaaggacaacagggaactgcccagtgatgaaaggtatttgaagacgatttctttactttctcttcattctttctttaagctattcttgaactaaaggtctactatgtagtcaattatggtgatgtttttagtttctgaagtctgctgtctccaaaatagagagataagcattttctccctactgtaaaatatatgcacccaagaaggtatcaggtgattgaaataggaccctgagaatgtttgtctatctttgcgtgctggtctcttgtgtaattcaggatgggaaaaaaccctcaggcctggacagcatccattgttttataccttgaacagcgaagtctcaacagatgttttcattacctttctacaaataagcagaaatatgacctctttaat

SEQ ID NO: 44213 - DNA, 1048 bp, Homo sapiens
gagaaaaggtgctgttatttagttttgattttgatcatcgtgctgagacagagacctaaatccctcttagtgtacttctaaagcaatataagctcaaagcctaaagtgtatcgttcacagaaaggaattcatctccaatctcacagaagttccaaattgctgggcatgcccgggactaaatcctcacatactgtgttacccagccagttctattccacttcagtaaggatcaagcctgttcctaacgttttaatacttgagagatttagctgaaaacattgtcttcaagaggaatttacacaatttatttatacttcagcttcaagaatatccacagcagaaaattaaatattttcacatttggttattagccccgtagtgtttatgtatttgttgatttatttatgtcaagaagaggctcctaaaaggaacaggtttgaacaagctggagtgtttctatattttttactagcttttgctatttcctcttgatcgttaactttttttctcctaaataaccacaatctcttgaacacggcaatgttttcctgaatttgtaatgcaattttcacctaaacttgtaagagttttttttctgcatctctcaaaataatacttggtgttcaacatggcacatgtatacatatgtaacaaacctgcacattgtgcacatgtaccctaaaacttaaagtataattaaaaaaaagatacaaggggcaagtgaatggaaaggtctttaaaaaaataaaaataaaaataaataatacttagtgttacagaatcaatcgacttaagactaaatgaatattgagcacatacccttgctaatatataactcaattctgagaaggaaaatgttctggtttctgcctaaattctagtcttattcttactgcatgtacttagagcagtctttatttatgtcctactgactttacaagcttaatatacatcttttaagcaaataggaataaatactttctatttttacatccaaacagttgcccctgatgaccccagcagaaaaatagatggcgataccattatt

SEQ ID NO: 44214 - DNA, 1103 bp, Homo sapiens
atggtcatagatatgtttatgagtttttctctgtacatgtttaatcccagctgatgaaaaattataattcagtatcattaatataatagtaattcttttgattaacatagtagcttcatgtaaaaatttccaagagttccttattagtcacaacgttgaaaaaaataattaggccccatcagtaaagcaactcatgctggcattcatactgtatcattgacatcgaagtttatggtgtgccatcaattagtatagttctgattatgtgaaaacgtaaaactgtgagcattatttataaaagtgtggtgctaattaaaatatctatgtatttcttatgattttttaataaagatttgttacaaagttgcatgaaaattcatcctcaaaagtagtcataggtggattccttttttgtaacatcattatttatttatcctatcaggcctaccccaattatttactgggcaaaggaagatggaatgctacccaaaaacaggacagtttataagaactttgagaaaaccttgcagatcattcatgtttcagaagcagactctggaaattaccaatgtatagcaaaaaacgcattaggagccatccaccataccatttctgttagagttaaaggtatattgtttaaaatccattcttcttgccttcatgagagaccctgaaactttaattaaatgtggttttcattacatttttagtaatggtaaatgtaaagttatgtcaacattcatggtaccttgactctcttctcattgctattggtagtgcatctaaatcaggttaaaaatttacttgttcaaatcttcctcacaaaagaatcccagttaatgaatataggaataatgaaggaaatagaaaagtcaatattagaatcccacagtaataactagagccggcaagatcaaacaatgaatgctaaaattagtgggtgaaactttaaggagaaacaggatatttgcatagcttcaaagtgtttctatcccgcagaaattaattactggggaagttttagcgtgtccacaaatactttattactcctttctttagaagatggagcttactttccctcttcttgagtgtatgctggacac

SEQ ID NO: 44215 - DNA, 1038 bp, Homo sapiens
gaagagcattagtggtccagatacaggtttcttcagattagattgttctgggtcagaacagtttccccataggatttgataataaaagatcagataacactttgaagagtaaatgggaacactgtctcctaggacagagaacttcctcaattccatttatcttctaaataagactcttttatctttgttcctcattcacttacctcctggctctgataagagatgtcacatctccagtttaacagtctgtttaatattaacttctcaaatgtatttgtccccaacatatattgatttatatgagcacacactaatgacctaagtctgttactctttcttaagaaagatgcaaatttatcataacttaaattcctttgaaaaacatcatttgaaccaaaggaatcaaaagaatttctcattgttacatcagaaaagaaactgtcttaatattaggtttgtattgataattatttccccaaacttttagtgtgagaaaatggactttgcaagtacacatagttaccgaaagaaagttaaaccttgacttcacagttttagcagacctttagcagaaaaatctactgaagtatatgctgctacactagaaattactaaaaatacttgaagcatatttagtctaaggtaagtgattttgatacaggaaaaaatggctactattatgattttaaataatttgtttttttacatttttttttttctacaattaagtggtacagcctccaaccatcacccaacagtctccaaaagattacattattgaccctcgggagaatattgtaatccagtgtgaagccaaagggaaaccgcccccaaggtgagtgtgcattctgctttgttatagtactgagaataaatcaggaaatctctctgaatagagaaatatgtttgggaatttccatcaaacaaggcagactatgtagagcacttcctttttcagttggatatttctcactgtgactcactagattgccctttggttcatctatcccagcccatttcagcccttcaaagatactg

SEQ ID NO: 44216 - DNA, 1060 bp, Homo sapiens
caggaaaacaggtgtctacagctgtggctgaaataagaggaacaacccaagaggactttgaagtggtgcacacgaggggtccaatacaacaactctaatggggatgtcctgtctttttgcctggaaagaagatgctaaaataaagaattccctggagtgtctttggcctttcaagtctatgattcatggagataaaaccaaaatttgctaaaaatctgttgattaataaaatataaatagacacagcaataacatttgctaattttattctccaaatgatacctgtcagctgtagacaatgtgtggagcaaaagagagctatactatctacttactggacaacagacctaacttaggcggtggtgatatatgctgaaaacaaagagagcagtgcttgggcttcaggaaaatctagtggaaagttgagtttattgatccttaggagcacaacctttacctgggtcttaagtgggttttataatgattaggaaatcttattaaagaagaaacttcggaaggggttctgggtgcttttagaacaaaggagaggacatagggaatatttccaagtcagcttggacccagacaaaattataaagtggattaagtttgttttcagcccctttctgtccaccatttctcctcatgtccccacattcacttcccctccatcagtgtccccctttaggaacctagtacctagtatcatactggcctgcttagatgcctctatgcaatcaaccagttgattcttattgatacttccaatgtacctagaaccttgccaggaattgaatatgagaacaccccacataaaccttccccaaatggcctatcctccagtctcaagtcctgcccatgatggtagataatttaaaaggctaatttatatacattgtgcccaacacctgtttatgcaccactccagagcctcggcctccccatctcttgttccagctctgtgtgggccccagccaatttcacaccagtacccctctcatctcccacccaacactcccatgttgacatcactgcagactccactaatgcccacgctctg

SEQ ID NO: 44217 - DNA, 1027 bp, Homo sapiens
ttttgaaagaaattctaacttgcattgaacccaatttattttatgatttgggcatataggcatttgattatttaactgactgattaatggagtttattattcaagcatataactcattacagtttcatctagctttgtattcattaccttttcagtgtgttcctccagttggatagaattgtatcatatgcgagtgtgtaacctgtagggaacatgtcgctaccttcttatgacacctggaccccttccccgtcacccatcctttccctcccagtgagacccttccttctgcgtgacttggatgaaaggtgacccaagacagacccctggtctcataaagtttacatctagagggaaaagagacagtcaccaaacaaactcactatatttgtacaattacaaagtgaaatcagagctatgaagaaaagagagatgtttaaaaaggaggttttatgccctggaagataaaacatagtctaaagcaactccttgccaagtcctgttgaaacctgagacaaaagggaaaaatcagcaatgctgatcctgtctttatttaaactttggttattttgttcaaatggctattttacattactgttgagtttcttttttcttttttttttttttcaaatacagcacgaagacatgattcgagtttttgatgcctccctggcctttgcatctgaggtaaatgcctcacttgctccctgtagtcccagcccaaagccatacttcccaggctcaagtcctggttctgccacttatcaattgtatgactgtgaacaacctgcatatactgtgcctcagtttcctcttctgtaaagcgaggataataatagtacttgataaggtcattatgaggattaaaagaagttaatatttgtaaagcaggagagcagtgcccggcacaaagtgccatgcatgtaagaagagtaatgaagatgcctgtatactgtttcaggtattgaaccattcataggagctggatttcacatgactgaattcaccaggctgccatcagcatttc

SEQ ID NO: 44218 - DNA, 1048 bp, Homo sapiens
aagagttaactatcctaaatatatatgcacccaatacaggagcacccagattcataaagcaagttcttaaagacctacaaagagacttagactcccacacagtaataatgggagactttaacaccccactgtgaatattagacagatcaacaagacagaaaattaacaaggatatccaggacttgaactcaactctggaacaaccagacctaatagacatctacagaactctccaccccaaatcaacagaatatacattcttctcagcaccacatcgcacttattctaaaattgaccacgtaattggaagtaaaacactcctcagcaaatgtaaaagaaaagaaatcacacaaactgcctctcagaccacagtgcaatcaaattagaactcgggattaagaaactcactcaaaaccgcacaactacatggaaactgaacaacctgcacctgaatgactactgggtaaattacgaaattaaggcagaaataaagatgttctttgaaaccaacgagaacaaagacacgatgtaccagaatctctgggacacatttaaagcagtgtgtagagggaaatttatagcactaaatgcccacaagagaaagcaggaaagatctaaaatcaacaccctaacatcacaattaaaagagctagagaagcaagagcaaacaaattcaaaagctagcagaagacaataaataactaagatcagagcagaactgaaggagatagagacacgaaaaacccttcaaaaaatcagtgaatccaggagctggctttttgaaaagatcaacaaaattgagagaccgcctgcaagactaataaagaaaagagagaagaatcaaatagatgcaaaataaaatgataaaggggatatcaccatcgatcccgcagaaatacaaactaccatcagagaatactataaacacctctacacaaataaactacaaaatctagaagaaatggataaattcctggacaaatacgctctttgaagactaaaccaggaagaagttgaatctctgaatagatcaataacaggtctgaaa

SEQ ID NO: 44219 - DNA, 1051 bp, Homo sapiens
aaatccgtatttagttttattaatgatctccagattataaagtgttttattctgggtgttttactgtttctttgtcttaattaagcttgtacaaagccaaagccctgtcctgactctgctgcaggtggactggcctccttgatgccccatgagcaagccaggatgctcccaccacagggtctttcaccgaggctccctctgtctggaacactcttcctgcacatatccccatagctcgctgcttcttctttaggtctttgctcagatatcattttctggtgagttatttcctgaacctgtggcaagaaagtatattacgcatgtgcatatacacacacatacgtgcgcatgcacacacacacattgacatgttggaacccctgtaccccttcctttgttttattttttttctctgtaataccacctaagaaactatataatttgcagttgttgttttttttatgtttccctccctttagaatgtaaggtttgtgaggacagaaactttggactattgtgttcatgaatgtatcccagcaccaagaacactgcctggcatgtaataggtacttaatttgctcaatgaacaaatgaatgaatgaatgatgacttatgaaacattaaagtttcagctctttgtcagataatgaaagtttcatccctttgtcagataatgttgttagctaattaaatgctgctttaattttctgtgacaccctgatttctaaagctttagaaatggcatttttttggaactcagcttactcacaaattctgctagcaggaggaaagggtattgtggctttccattgttaaaatgcggaggtagagttggaaaacaatcaaaagaaatgttcctctcattttttggaccaaatgaacaaatctagcatttgtttttgagagaataaatactcttcaaaaagaacagaaactgttctcaaaatctttgaagtatgtcactgatcctttaaccagtagttggagaagcaagtatcctactgacaaacacaggctttgtggggttgaaagccgatcataagtttacaaa

SEQ ID NO: 44220 - DNA, 1014 bp, Homo sapiens
gaaatattgaaaaatataccaatttgcatcaagaacattttttcagtcattctccttaactcagcatcatgatgcctttctagaattttggcattttgcctatcagtaaattatgaaaaagcaataggatgtcagtctgctgtgccatcaaattatctgtggggttcctgggtctctgtacagtatttacagaaacagatgactcctgtggcactttcctcaaatgacgtgacacttaacttgtctccactatgcagatctgcagtgttgagaaacacactctttgatgcctggtgagcttcttggcatagcatagcatttcaggagagaggaaagaaacacttggttaattcatttttcccacttagtttatgggctactttaacaaaaactttacctcatgttcagccaggtaattgacactctttttacttcctgtagaagaatttcaaaagaaaagcatccatcatttctgtgctaggagaacttataaagacattgcagaaaaaaactggcaatgaatgtgaacttgggccattataaaggcctgctaaataatgtcaaaaataaagatcatgaaggtaaacgagtagctccaagtagaactcttgcattctggatgaagtcctgaaagaatcatctacacatcttttcattcatagatggtgtctgttttatttctatttatttaaaagaaatacttacatagcatctgctatgtgccaggcactgaggtaagtaatttatgaatattaattcatttaatcctcataatagccttccaaagaaggtactatattatcctgattttacatataaggaaactgaggcacaagggcaaatataccacacatgcattatggtgtttagaactataacatttgcatagtaagtactttattaaaagccgaaaatttctgattatatctatttttttttttaagtttagagacagggtctcactctgttgcccaggatggagtacagtggtgcagtcacagttcactgcagcct

SEQ ID NO: 44221 - DNA, 1031 bp, Homo sapiens
acctaaaaataatttttacattcagttgtttacatgaattttacaatgtgtgtggaaaatttttgaaatgtgtgaggatgaagagagagcttaggtttagtagatctctatagaattaggttgggtttcctcagataaaatcttttagaacattttaaagtttctagtgaaccctagaagaatctggaaaactatattcttcgctggcacaatactgagggtagtgaaagaaaatcaggagaaccttttaacttttaacatattcgtaatcaatacccatgatttaaaaaaattcataatgttgtttgaaaggcaagtcgttttagttgttaattcctacagataatgttaaatcagctaatcgctctggttttcattcttttaaaaaatttctgtgctttttatcattttatttttgtaaacactgcgtccattcttctgggtgcatacaaatggatgcaaacataccgaataacagaagctctatcagaaaaagcatcaaattggattagacagccgggaaggggcactggacttgtagaagaagcttaaggtcctgtcctggatttgcctgcctcagttatgtaaatgagttggatggtattagacaacctcttaaatatgagtaattatagaaaataaggtcagcaaaatcctgaattagaagaaaggtcacttgaatgaagcaggggtcatggacaactaacaatttatatagaccagaataaaatggggctctggacgtccatttatgtgtaaggtcatttcaaatcaaataggagagaggcattttcagaagtagtgtcttgatttaaagataggtaattgaaaatattcttttgttctttatagtaatccccatcaatggtagtgctttctactgactgtggaaaatagaaatagaggggaaaaaagaattaagcaacagagggaaacagtagatagttaatagagtgatggatctgtcctatgtgtgagctagaatctctcccaggaatgtaatttgagatacgagaggacactgttcagtt

SEQ ID NO: 44222 - DNA, 1113 bp, Homo sapiens
acccagactttctgttctcattccaggcctcttttatgtccatatataatatacacagtaaaacaatcaattttcctatttgaattcacttcatcattccactatttctttataaaatattgaatttatcagggacccacattctttatcccctgttcatcaggtcctgctaatttgtttcagtaaaacttccacagattgagttgaatcctattctattgatagagtcagaagcaagccttccttcttatcttctccctcccccttatccttgacttcatataatgaaaggcagcaagaatgatgccctaatttctaaaatgtatttttgtttggaaataaggttaggacattattgcccatactaggcaattgtctctatgtactttttttctcaactatgaagtaagaaatataagctaaataattcctgtggtttctcccactataaaatttctatctatacccaatagctcctaaaatggtacatttcatgtaatagtcatttaataaatacttagggaattggtatttaatgggacagaatgtcagtatggagtataaacagttcattgaactttattattaattgctcactttgggagagtagtacgtgctgttactcttcatagcagcaaaaaatgagttatggaaatattagacgtgttaaccagtttttcattttggtttggtttttgcaggggttttttttcagttgcaagatttaatagagtgaaaacagagctcccatgcaaaaggaggggacccgaagagcatagccattgccagctcgaatgcctgggtttatatcccgatcattgtccctctcactgtgctctcaggcgatagatgattggctatttctttacctcctatttttgcctaattagcattttagtgagctctctttactacctgattggtcgggtgtgaggtaagttgcaagccccgtgtttaaaggtggttgcagtcaccttcccagctaggcttagggattcttagttggcctaggaaatccagctagtcctgtctctcagtaccccctctcaacaggaaaacccaaatgctgttggggaggttggccgatgaccgctccaactgcttcctgctgaa

SEQ ID NO: 44223 - DNA, 1030 bp, Homo sapiens
acgatctcgtctcactgcttcctccacttcctgggttttccagtgattctcctgcctcagcctcccgagtggctgggactacagggcccagctattttttgtatttttagtggagataaagtttcaccatattggccaggctagtctcgaactcctgacctccagtgatccacttgcctcggcctcccagagtgttggaattataggcatgagctgctacgcccggccccaattcttattttctgcaaactctgcctcaaaaatcaagcccagggagcctttccccctcatttaataccctagtaactttttaaatgctatttttgcctttgatcctctcctgcagcacactgttccctaaaatactccttttatcctgtcagtcctctaaataagatctttctgaagctcctgttccctgcccaaggataacagccaatctccttacttggcagataaggcttatttctgactcctccctcacaacccccaggctcagcctaacagaacttgtcaagctctgaacataccttgttgttacctactctgggtctttgccctggctctgcccctcctctgaaatttatcactgtgtctcccacacatatattcactcactcacacacacatgcatgcacatctctacccacaagaaaatcacatcttaaatctatctttttctcaaatttattccctgcccagcaaaggagatacgacacatcacaaagtagcacagttacatgtattacgtagacatttattcattttttgagtgcctacttcttacctgcgtatttggggcacaaagatgaatacagaatgctgttctagcctcaaggagctccatcctgtgggacagatgaatgtataaatataccctcctagaacatggtgagtgcagtgattgggatgtgcacagagtatgggggtggagaggaggcgggtttaggcagagtaaataaagcagggcagggctaaggtggaggggttcagttcactggctggggaacagagtctgagctcaaccaaa

SEQ ID NO: 44224 - DNA, 1033 bp, Homo sapiens
tctgtgttttctttcacttttctttagttaggaatgtcttcccatctcccattgccaatcaccaagtgtcaaaatgatcttccttcaagtatcatatcagaggtcaccctccttctctcaaacacctgtcctggtagcttttgtgtttcttttatgggactcttgactttctcctagttttattgtaattatctatgttgctatgtttatagtgctcacaatgtgccaagcactgtttatgaacatctgattcccacttcggttacattaaaggcaagacttacatctgcttcatttctgtctcccataggacctagataagcattgattaaatggatggatggatgaatggatgaatagattgatggattggaaggtgtggggcaatggggagggaatattggtaaaagaaagccatttcaaaaactctaaaatagcctacatcctacttgtaaggctaggataaaaggtgtaatgaactagacaaaatatggtaggaggtgagtataactctggtggttgtcagccaggtcctgagcttatagacatatctatgcaaatctgaaaagcatgacaacccctagaatgattcttaaacaatttcatgcaatctgttaagtcatttcccctgctacagccctttaactgctgggagttttgtgatgtcctcatctggcagtgcctttagactttggcctcaggcagaattcctgaccagacatctgccgcattcacatacccagaggcagtactcagttcgttttgctaatagggtaaacaaactccccttgacaggagggagtgacttacagtgttcagggcatacgctggggctgaagcagcagagcgccagcagttatgcagttattgtacttgaaagcctggctcaggcttcagagatgcaagctttcaggaggagctctgtgcattaccagtcatgggaatctgtgtgtgaatgcattagacatcacctgacattggcgaagcttctgtatgaaacctaccaacctatcaccaacatctccctacctct

SEQ ID NO: 44225 - DNA, 1120 bp, Homo sapiens
aagtatgtttaaatatatgtaagaactataaagtcagggataattatttgaggcagcaaaattgttgggatatatttctgtatcttgacagactcataatagattgtgaggaaaatggacacactatgattttgaacctgaaagccttcccaaatcaccacatataaaacccactgatttaaaatactgcacatgtatcatctcttctggggccagattcccactttgcagagtcataggagataaatctttgggatttagtattgtgcaggggtgtcagtctccatgtatattgggagaaaataatcaaaatgaatttggaaatatctatgaaataaaagttgggaaaataaaactttgtcttttaatgttccatttcttctgagttattctcttccattaccatcatattttcttataatcttactaatattctagcaaagtggttcttaaccttttgggtcataatcttttaaaaaatctgatgaaagccatgacatctcaccccagaaaattgctcatgtgcacatgcttgcaaaaaatttccatgaaatcgaggggttgggggaagactttactgaactctaatgtcctaaggcactaattgaatgtaatgaattaacttcttatctatgcactagctatgtaccatccttgagagaattgagaaaataatcatgcaaataattttctccagagcttaattctttcagaagtaagtggaatcctgcttgagaaaggctgcagatgaaacaaaatgaatacactaatgtaatgtatatttcatatatattctattagacattggactcatagagctatagtcatattgctgctcaaaaataacatgcagatttgggatttaataattatacatgttttaaagacaggtcagtttccagtacattctttcccccctgatattttcatgatagaatatattattcaatttcactgaaatgactattcactcaggcgcctttgagaagcattgcactccaggtgtagataggactaacctacattcagttttaaaaatcaagagcaatagtgtaaaccccactgacaaaaactacgaagtctgaaaatgatgtgttttaacattttgtgtaaagtgccc

SEQ ID NO: 44226 - DNA, 1029 bp, Homo sapiens
attttccaggatggacaactccttttgtgttttatttccatggtaacagttaagtttgggcttaagaacaacaaacctacaagataaccatccagttgacattaacgggcatccccttagagaatttgcagtgcttcatggtgtccagatcgcacctgaagtagaattacagaggcctgttgtgttttttatacagcaagctctttaaaagctgaaggttctcagagtaggctgaaattaggaaatacttcgttttagataacagttcagcacacacaaaaatattgtgagcagccagagacttgaaaggcattcccaggacaccataaagaactccagaactcaccgcttctgacctttgggtgaataaatttttggaagtgtgcagctggcaaaatggaggcttcatgtgactaaacatttttgctcatactttgtttgagggaagctcaaaatggagccactccctagcagagcaatcagtagagttacctttagattgtctttggaagtgtgaaatctttgaatgtaagtgagcctccattcattactaagaaagctgacagaggagtaaaacccaactaatggaaaagttgactgctgtgttcttgtgtctgaagtgattactgtaaattaattggtgtaacaaattataaagggtatggttgatgaatgtagaaaactttttttctgttggatcagttccttaagtcctcggcttaattcatttaatgaaaaaaaaatgtaacccaaattaaaaaatggaattatggtactatggacaacattttgttgtaaaatatattttacaactttattaaggtatatgccttttctggacatttcatattaatggaaccatatactatagaatcttttgtgtctggcttctttgaggtagcataatgtttttgagggttctccatgttgtaacacgtatcagtggtattccctggtatgtagataccacattgagtttacgtattcaccagtggatagacatatggactgtttccaatttgagactat

SEQ ID NO: 44227 - DNA, 1035 bp, Homo sapiens
ccaagagatcctccatcacagaatggcagagtatcaattacttggaatggatgactcgtggcagctgctgtctgtgactcaccgggctctctgccctgcactgacagctgcacatcacatcctgtgatcataccacctcagccacctccatgaccaattcatcaaaaaaagggggctgagcctactgatcccaaggtattactgtatgggcagcctgctcccgaggtattatatgtaaagttgtctctctgaattttaggaaatgagatcacaatgatttttataacttattactattaataaataacaataatccctgccatttattagttgcttacctatatggaacactttaatgaatgatcacatttaatcttcacaaaaaccctttatatgagaagctagcaaattgtttctatgaagggcgagatagtacaaatatgtaggcattttaggctatttgatatctccaaaaattctcatagacactatgtaaatgaacaggcatggccatgtaaaactttcttttcaaaattggcggcaggccagatttggcccacggtcaaagttttccaaccctgctttatgctattatactcattttatagatgaggaaactgaggcttagggagtttagctgattaaaataacatagctgctaagttgcagagctaggattctaacccaaggaatttgacccttatccctcagtcgtaattcctgcacattactgtgtcatcctactatgatatataacaaggaaatggacttttagcttctgcatggtgagagttacagttatgacccaaacttctaaggggaatgttgtatagagaactgagtcctgaagatgctatttaggaaagtgtagatagtctaatctaatctacagcacattcaggtaatgtaattgcatccttgactaattgaaaaaagcttctaaagttctttgagcaatctgatattgtggctgttttagtcaataggattgcaaaaagcaaatgaccctaatttttaaaattatgtacattatta

SEQ ID NO: 44228 - DNA, 1038 bp, Homo sapiens
cttctgactgttctgcggctttcccctctattatctagttgaataaatacagaaatgcccaaccagcttcccttgtaaaattgcatcgcagtgttgtggtgttgtccacagattgttttgatgtgcaacaagatacatctgtcctaaatattgtctaaccagtgttttttcttcccagataagtatatttatgaagtgtgattttggctttctgctcccggtgggagtccatcactcttatatttactctcgaagtttttcatatggcacatggttttccattcattttggtaggcagcatctgattgaaaacatttcagtaggaaacgttttctagtgtgtgcatcactagaataataaaagcagctactaggaggtagagggtactagaatgtattataataagtgaaataaaaagcaattttgggtaatttgaaattcttcctggtattctgtaaaactgcgattggaaatggaaaaattgtagtatttgaaaactgaaaaattgaaagttgaaacatcaccaaattttgctttcgcatctttgactgcttaaatgactcgacatagtcttttcttctgatgttagtagcatgatggctaaaagccatttttgtaaatgtatatttagtacattcaaatgaatatttctacttttagggaaataacattgacatggcaatatttgaacagttagtaacatggaaattccaacataataaatactctaatgtgaacaacatctaatttacttcagaatgattatattaacttacacgacatgttgtgttttacatgaatcatgatatataccttgtgtgtttcatgaattttaaggtaaatttcattttaatagatgtgctggggtttaaaaaactccatggttatgtttacgtttctagtaacagttactgtgatgtgaaattataatggaaggtaaatagatgtcaagggttcactgctgtcctaaaaccatgagggggttcattaaacagcagagagggagtgagttcatgatcagactcattacctctaaag

SEQ ID NO: 44229 - DNA, 1048 bp, Homo sapiens
ctatttctcccacccataccttggaggattaattaattctcttatcaacaaatacgtaatgggcatttgtattagtcagggttctctagagggacagaactaataggatagctacatatattatatatatacacacatatatatctatacatgcatccatctatatatatatatatatatatatatatatatatatatataaaggagagtttattaagtattaactcacatgatcacaaggttccacaataggccatctgcaagctgaggagcaaggaaagccagtccaagtcccaaaactgaagaacttgggagtctgatgttccagggcaggaagcacccagcacaggagaaagatgtaggctgggaggctaggcaagtctagtcttttcatgtttttctgcctgctttatgttctagttgctttggcagctgattagatggtatgcaccagattaagggtgggctttggcaacaccctcacagacacacccaggatcaatactttacatctaccaatccaatcaagttgacactcagtattaaccatcaaaagtccaccccttgtcaacttgaacccatacaaatctcctgagatcatacataatctttaagtaaagacaataataaggtcataattactcctaacataatacgactattctttgtacaaccagaaacgcatcaatccccaacccaaatactattacataaagttaacatacttaaatgctgatgtgaagtcaataaatcttatgtcccatgataaaggagaaaggaaataaaatgaagatgttttcttagtacaagtgtatacatgcataaacgtgtttttaacaaaagaaggaaatattcatgacaattgcagtcctcgtttctgcagctggtcacgtggtcgtagctggtattgacaactaccttcttctaccaccattctgtattccctttgctttcagcaagcacctcagcaggtcatggtttttttcctggtggagtgacccaaaccttcattcctgaagggtctgggctatttgtagtcctgcctgga

SEQ ID NO: 44230 - DNA, 1033 bp, Homo sapiens
cctaacaactaatttggtttagttagaacttatttaattggaaattatacgtgaagtaattgaatgtgtctattgtgagtttttaatcttccttttaattctttaatgcagaataattgtatagcaacagaaaatacagtcaatatctaaactcatagattccttttctgctcaaggaatgatcattctttttttttttttttaaatagaaatggttgccattaaacattcatctccttggggcatattaaaaattattactaggctcaaatggatgccatgcttctataaagctaggtcttttcatgttagctctaaagtggtgttgccaaattgctcagattactagagaaaataaagagcagagtaactggaaattgacttgaacaacttaaacttccagccttatttttagctccaaagaacaattttcaacgtatttttcaaatgccttaacaaaagtcattaactagagtgcacacttataaataaaatggcttgtaaatactaaattgtatatatattaaaactcaatggtgctgggcatggtggctcatgcctgtaatcccagcactatgggaggccaaggcaggtggatcgcctgaggtcaggagttcaaaaccagcctggccaacatggtgaaaccccatctctactaaaaatacaaaaaattagttgggcatggtggcaggtgcctctaatcccagctactcaggaggctgaggcaggaaaattgcttgaacctgggaggtggaggttgcagtgagctgagatcacgccattgcactccagcctaggcaacaagagagaaactctgtctcaaaaaaataaaaaaacaagaaaataaaaaaaaaactttaatggctaaataagttcatgaccatgttagagttcatttctcagaatacacaaaaatctatgtcattagtggagtgtcttgtatttggcaatcatggtcagtaaatgagtagaaaagctatcttatcacttgagactagtaaaatatagagatattcactgagcagactaaatt

SEQ ID NO: 44231 - DNA, 1040 bp, Homo sapiens
gacacctttgtggcagcccctcccatcacaggcctggaggcccaggacagaaaaatggtttcatgggacaggcccacagccctgggacatggcaccctgcatcctagctgctccagctccagctgtggctaaaaggggccaaagcacagctcaggctattgcttcagagggtgcaagccccaaaccttggcagcttccatgtggtgttgggactgtgggtgtgcagaaggcaagagttgaggtttggaagcctccacctagatttcagagtatgtatggaaatgcctggatgtccaggcagaagtctgctgcaggggcagagccctcatggagaacctctactaaggcagcacacagtgaaaatgtggagttggagcccccacacagagtccctactgggacactgcctagtggagctgtgggaagagggccactgtcctctagaccccagaatggtagatacactgacagcttcccccatgcacctggaaaagctccaagcactcaactccagcccatgaaagcagctgtgggtgctttaccctgtagagtcacaggggaagagctgcccgaggccttgggagcccaccccttgcatcagcatgccttggatatgagacatggagtcaaaagagattgtttcagagctttgacatttaatgactgccctgcttggttttggacttgcatggagcttgtagcccttttgtttgggccagtttatcccttttggaatgggagcatttacccaatgcctgtacccccactgtagcttggaaataaatgacttgtttttgattcatttttacagactcataggcagaaggttcttgacttatctcagatgagactttgaacttggacttttgagttaatgctggaatgagttacgacttaggggaactgttgggaaggcatgattgtgtcttgaaatgtgagaagaccatgagatttgggaggggcaaggggcagaatgatatggtttggctctttgtccccacccaagtctaatctcaaattgtaatccccatgtgtgagag

SEQ ID NO: 44232 - DNA, 1050 bp, Homo sapiens
taaaagggctccctggacattgtttttcttagaatgtaactgccttccttctgtgtttaaagcaagttttgattcaactggaaaatgtagccttcgagaccacattacctagtcataagtgcaacacacttgtactcactctgagtctcaatgaattcccgtgcttccttgatccactagacttccgcgctcatggagcaatgctatgtgcaaatggaatgacaagaatgggagagcacacagatggtgcctactcaatctcctctgcttgcatacatagtctttgttaaatcagacatataaaacacagaatcagttgcagctttccttgcatcactgctgggatgaagctggtcctactgtagggccatgagcaggtcattaggcaggtgaagtataactgtgaaggagacctcctcttcaccgtggccaaggaacctatcattaatgcatgatactctgtgaatggtgagaggctgggcatctacatgggccataccagagctgtgtggtatgtggacgctgactgggacaccaagcatgtcctcacccattcagctgacaaccatctttgggcctgtgaaacagggaaacagctggccctactcaagaccaattcaactgtgtggatctgcagttttgactttgggggcaatatcatcacgttctccatggagaagcagaaaagctatcagtgctttgtgagcttctttgacctgcaggatctgagccagattgacagcaatgagtgctacctgaagatcccttgcagtgactctaaaatcactagtgccatttggggctcctgtggggagtgcatcattgcaggccatgagagtggaaagctcaaccagtatagtgccaagcctggagaggtgttggtgaatattaaggagcactcctagcagattaatgacatccagttatccagggacatgatcgtgtttgtcactgcatccaaagacagcacagccaagctttttgactctatgactcttcaacatcagaagactttctgaacagaaagccccatcagctcagctaccctct

SEQ ID NO: 44233 - DNA, 1027 bp, Homo sapiens
tcatcacctgtttaacctattcatggaggatatcattgtccttttttaatatcacatgcagagaataaagttcattttattcctaaattaatggtacaatataatcttcattttgtataagccattcttcagttcaaattaattattttaattaatagacaatatatttaaagtttacagaagaatttaacaaaaaaatataaatagttctcatataacctcacttctctcccccaacacacaaagtttcttatattattaatattttttcattagtgtggtatgtttgttacagttaatgactaaatatacataccttgttattagctaaagttcatagtttacatgagggttcacttttatgttacacattctataggttttgacaactgtataatgacatttattcattattactgtctcatgcagtagagtagcattgccctagaaatcacctactcatgcctcttgctctccccacccagaacccctgatagccactgatcttttcacgtctctgtagtgcctgttcctgaatgccatacatatttgccatcatacagtaggtagcatttttagattggcttctttcttgtagcaatacacatagcacatttctttttatcactgacaatattccattatgtggtttaaccaccgtttatctgttcacctattgaaggatatctgggcttcttctgagttttggcaattatgaataaagctgctgtaaacaatcattttcaagtctttgtgtggacataaagttttgaactcacttaaatagcaggagaatgactgtgagatcatatgaaaagagtatgttcagttttataagaaactgtcaaaacgtgtttctgtgtagcagtattattgtgcattgtcaacagcaataaataagagctgctgcttcacctactcgccagtgtttgctgttgccagtgttttagattttagctattttaatgggtagatagtggtcatcattagttcaatttgcaattccttaatgtcatatgatgttgaa

SEQ ID NO: 44234 - DNA, 1022 bp, Homo sapiens
ggtgccacttacacaaaaggaaattaatttggtcattaaacatcttcattttgttcactagtaattacataacttaagtaacattattacaagaagtcatctcccatcaatccacacacttcgggattgttttctctaagcaagcctagtatattccaggtacatcctgctaaatgcattctacagataaggactctcatactccgcttttcaggagataatcttattagcaggtttgcaaggggatttgaccaggtcatctttctttgctttaatatcttgtgaaaaagaaaaaagatcctttcattctcaagctgaaacctaaacatctcctatcaccaagcacccttcactatttctgttatgctcttaacttggtagcagcttctctctgacaggctttgtggagtcttgtgtttaatatttgcagacaagtcctcagccaataatatgtgtgcaatcctaacatagatgtatgcccttcacttccacccttagggatcctcctctcaagactctgcccccaaattgcagtcacttctgcagtccagactccaatttgtgcctctaagttcagtgggactactgtgttctgcttggcttctacctcactgtgcttctgtgctgctcttctcagggatcagtcctgtggttcctgttgtccagtgattgaaaactgtcatctcacagtttgtccagttttatttttgtgtatgtggcaggagagcatgtccagtcttagtctatgattccgtcaaaggcagaaatggaagtcctcatttttatcttattttagagttcaggagatttaatttttaatgcccatctgtctgccataggcttttctattcatattttggttgggtgaatttgatccctgttaggtttttctagaagttaatagggatgatgtttcctgagtctttgtacattcaaaaatcatttattgttggttgtgttatatgactgacaatttggtttagtgtaattatttttagtcataaacgtatgacttttcataa

SEQ ID NO: 44235 - DNA, 1040 bp, Homo sapiens
taagaccattgaactcatgaagataaagagtagaaggagggttatcagaggctgggaagggcaacatgggaatttgggggagagtggaaaaggttaacgggtacaaaaaaaaatagaataagacctagtatttgatagaaaaaaagggtatctatagtcaataataatttaattgcacacttaaaaataactaaaatagtataattggattgtttgtaacatgaaggataaatgcttgaggtgatggataccccatttactttgaagtggtcattatgcattacaggcctgtatcaaacgatctcaacccataaatatgtacacctactatgtacatgcaaaaattaaaagtaacaacatttttctaaaaattgaaaaaaaaaaaaccctcagagaatataaggccaacataaaccatatgaagaaaatatttgagcaaggattccaagcaaacgaatacatgaatcacatcagaggcctcaggagcatgaaagacaaagtagagaggaaacattaataggttaaatgaagattctgaaagtcaaggagccatagtgcaaagaaaatctagtaagagtctgcaatgaaaagttctaagccatttcagtgaatccaaggttttggtctgagaaaaagggcagatgtaagagcctgccaatttcttttctgtcattgggttggggtcggggaagtattgacaccccaagtctcttcctgaattggggagaaatagttaacattttattttcaaataagagtagagatatgtgttcttgactgtcctcagaatgagagtataactaatctggagagtcataagtctccagattaacaagaggaggctgtgtaataactctatcaaattgtgtaataactctataaaaaaggagtaaacaaaaacccaatcagataaataagaaacataagtgagatcaagaaataaaattaaatataacatttgctatgctaaatgtgaataatctaaatgtgtctgctaaaacatagagactgagaatggctagaaaatattcattgaaaat

SEQ ID NO: 44236 - DNA, 1047 bp, Homo sapiens
atttaattatcaaactttcaaagatcaatgaaaaataaatgcttctaaaagtggcaagagaaaagcaaccaatatcatacaatagagctatagtacgtctggcagcagactttgcagtggaaatcttacaggctaggtgagagtggcatgacatgtttaaagtactgaaggaaaaaacttttaccctagaagagtatatccagtgaaaatatcatttaaacatgaaggagaaataaagactttccagagaaacaaaagctaagaaatttcctcaaccagatctgtcctacgagaaatgctttaaaggaagttcttcagtcacaaagaagaggacattaatgagcaataaatcagctgaagatacaaaactcactggtaatagtaagtacacagaaaaacacagaacattataacactgtaattgtggtgtgtaaactacttttattataagtagaaacactaaaagattaactgatgataatagatacagcttttcaagacatacacagaacaagatataaacagaaatgataaaatgttaaaaaggggacaaagctaaagtgttgagtttctattacttttttcttgtttctttgtttatgcaatcagtgtcaaatcatcatgagtttaaaatagtgggctaaaagatagcatttgcaagtctcatggtaacctcaaatcaaaaaatgtacaatggatacacaaaatataaaaagcaagaaattataccaccagagaaaattaccatcactaaaaaaacaaaaaacaaaagacaggaaaaaggaaagcaggaagagaagaccacaaacctaccagaaaacgataaacaaaataacaggaataagtacttacttatcaataataacatgaaatgcaaattgactaaaatcttcaataaaaagagtagctgaatggattaaaaaaccacacctaatgatctgttgcctacaagaagcatacttcatgtataaagacacacatagactgaaaataatggcatggaaaaagatatatcatggtagtgggaactaaaaaaaaaaaaaaagc

SEQ ID NO: 44237 - DNA, 1034 bp, Homo sapiens
tgtataagtttttgtatagtttggatattaacccattatcagatatatggtttgcaaatatttttctcattccataagttgcctttccatttcatttcctttgctgtgaagaaacttttattttattttttattattttaagaaaatttttgtgagtacatggtaggtgtatatatttatgaggcaagtgagacattttgtgcagaaagttttaaatttaatacagttctacttgtttactttttcttttgttgcctgtgcttttcatgaacaatttcataaagacttcccccaatattttcttctgcaagttttgtggtttcaggaattatgttaaattttttagtcgttattatatgatgcaatcttattttttaaaatgtggatatgctgttttccccaacaccatatattgaatggcttgtcctcttcgcactgtacattgttggcacctttgttgaagattagttaactgtatgtgcataggtttatttacgagctttctactgtgttccatttgtctatatgtctgattttaatttccaagccatgctattttggctgctataactttgtaatataatttgaaattagaaagtgtgatgctgccagatttgttattcttgttaaagattgccttatttaggatcttctgtggttccatattaattctaagattttttttttaaatttctgtaagaaaagccactggaatttttaaaagtagttaattcatgttaaaaaactgacaaataattattgtatatatttatggtttacagcatgatattttatacatacacacacatacacacacacacacacggaaatggccaattaagccaattattatagcatatttattacctcataaacttatctctttttttggtgagaacacctgattaattttgaataatctgtattcaagtttactagttcttctgcatcattgagtgtgctgctgaagctctctactgcatttttctgtcctgtgattgtactctttaggtcctggatttctgttggttctt

SEQ ID NO: 44238 - DNA, 1072 bp, Homo sapiens
tatacatattgggttatagtagaaattatattaaacattactaaggtattagtcaggtgagatctgtgaggttgtttggtggagagtaaatgaaagggaaaggtacagcagtgtttctcaaactaaatgtgtcagaatcaccctggaatcttattcaaatgcatattctaatttagtagttctgggtaggattcaagctttttctaagaatctcccaggtgctgctggtgctgctagttcaggtatggtactttgagtagcaagttcctgaggacaggtcatgactgaaagaggcagacccaggactggcccatgtggagtatatagttgcagattggcatgtgttttcttgactcggggtcattattaaaagcttcagtatcaaactaaagggaaaaaagagtttggccactgtccatgtttctcttatttttctcacaaatgcacttaggaagctaggtttatcaactgcttgttaaaatattaatactcagaaagaagtttttttggatcttctgttagaaacagctgaagttataacctctaagtgtctccagggctaatgaaagaggcgagaaagataatcaggtccaatcacttttattgactaaacaaagcgagttccctgctttccttttagtacttgacatttcacttttacctgtctggcttcacaataactataatgtgatttcaatgaccttcagccctgcaaaaggatgccagaatatattataagtttagtttaacattttaaaaacaaaatagagcccgtagacactcaaaaataaatttcctttgttaacgaaaagagtcaaactctgtaaaatatttgaagagatttattctgagccaaatatgagtggctatggcctgtgacacagccctcaggaggtcctgagaacatgtgcccaaggtggttggggcacagcttggttttatgcacaaaacatcgatcaatacatttaagaaatacattggtttggtccagaaaggcaagacaactcaaagtgggagttgggggagttgggggtggggagggttccaggctataggcaaatttaagcatttt

SEQ ID NO: 44239 - DNA, 1071 bp, Homo sapiens
tcacgcctgtaattccagccccacaagggctgaagcaggaggatcgcttgagcataggagttcaagaccagctggggcaacattgtgagacctcatctgtccaaaaaaaaaaaaaaaagttagctaggcatggtggtcccatactcaggaggctgatgtgggaggatcacttgagcctgagaagatcgcttgggctcaggaggtcaaagcagctgttagctatgattgtgccactgtactgcagcctgggtaacagagtgagaccctgtctcaataataataataataataatagtaatagtaataataaaatcatcctgctggtggatatcattcctttctctctccaattgaaaaactaaggtaaaacttacttcagtggaccaaccagaaaatgaggttagcttataagtgagattgtttttcttcgcctctatattgtacttgggttcttctgtatgagatacattggaattttcccaatttttaaggtttttactcaggtcctcaaatttctgtgtctggtatgttgtctaacagactgtgactttacttttctgtagagaagcaactattgagaatgccacagacttgagctttccatgctatatttagaagataatttgctgcacattcttggatcgattttgccatctcagttactttgtgggagataattgacattctttgtgctatgacaactgtatgtgatggattagttctagtgtttgacactggttagcttcatatcagtcacagaatttcatgagcaacccgattcaaatcctatgcaagacacaagagatttctaagaatatagccaaactgaactttagtaaaagaacaaacatcttctctctttgaagaaatcttcaattttccaaagtcacaaaaaagatgaacactcagtggactataattaaaacagtttctaatggtcagtatatattgcaattgaaaaatttcagtgtgactatagctagatattgtgatacttttatatcaaagcattaaaaccttaaaaataatacagttaaactcactttttacaaattaatcaagggtgtaatt

SEQ ID NO: 44240 - DNA, 1025 bp, Homo sapiens
acttgagaaggagggactcctccttaacttattctatgaggccagcctcattctgataccaaatgagacacataggaaaaaagagaacttcaggtcaatattcctgatgaacatagatgcaaaatgctcaataaaatattaccaaatcaaattcatcagcacacaaaaagcaaatccaccaggatcaagcaggctttattcctgggatgcaaggttggttcagtatacacaaatgaataaatgtgatttatcccataagcagaactaaaaacaataacaactatgatcatctcgatagatatggaaaataccttcaataaaattcagcattccttcatgtttaaaacccccaagaaactaggcatcgaagcaacatacttcaaaataataagaggcatctatgacaaacccacagctaccatcatactgaataggcaaaagctggaaacattccccttaaaaactagccaaaattcttttcaagataatgataacttgaactcatggatccaagaagctcaaagaatcgcaagcctagtaaaaatgcatatggctacacaaaggcacaaaataagcaaaattttttaaaaaatgtgatagtggcaaaatcttaaaagtagccagaaaatatacctgtaaaatgaaggcaatattactgtaaaatgaaggcaaaataaagatctttttcaaacaattggaagctcaaagaattatttgctagcagacctgcacttcaatgaatgttagaggaattttctcaggcagaagaaaattggtatcagataaaatttgggtggatgacaataaagattgttttaaattcatggtagaaatctcttaaaagataaaaaaattaaaagcaaaaataggattgtattgtggggtttataacacatgtagaagtaaaatttatggaacacttcacccaacagcagcacagtcacattgttataatacacatgtaaatcagtgcatgtggaaaaagccacagcaatttcaatgaaaattgaatgagagggaggaaa

SEQ ID NO: 44241 - DNA, 1058 bp, Homo sapiens
ccgcccctttaccttaagtttatgtgaatccttgtgtgttaggtaagtctcctgaagacagcagaaacttggttggtgaattcttatacattctgccattctgtatcttttaagtagaacatttaggccatttacattaaatgttagtattgagatgtgaggtactattctactcattgtgctatttgttgcctgaacaccttgatatttttcattgtcttattgttctatagatcctgtgagatttatgctttaagaagtttcaattttggtgtatttcaaggatttgtttcaagatttagagctccttttagcagttcttgtagtgctggcttggtagtggcgaattctctcagcatttatttgtctggaaaagactatctttccttcatttatgaagcttagtttcactagatacaaaattcttggcgataattgttttgtttaacgaggcttaaaataggacctcaatcccttctagtttgtagagtttctgctgagaaatctgctgttaatctgataggttttccattacagaacctgatgcttttggctcacagatcttcagattctttcctttgtctttagataacctgatgactatgtgcctaggcaaggatctttttgtgatgaatttcccaggtgttctttgagcttcttgtatttggatgtctagatctctagcaaggctggggaagttttcttcgactatttcctcaaatgtgttttccaaacttttagacttctcttcttctgtggaaacaccaattattcttaggtttggacgtttaacatagtcccgaacttcttggatgctttgttcattttttaaaattcttttttcttcgtatttgacatattgggtaaattcgaaagtcttgtttttgagttctcaagttctttctttctgcttgtttgatggatgagactattgctgagactttccagtgcattttgcatttctctaagtgtgcccttgattttcagaagttgtgattgttttttatttatgctatctatttcactgaagaattttactttcatatcctgtataatgt

SEQ ID NO: 44242 - DNA, 1033 bp, Homo sapiens
aaaattaaccttatttctgagtaaaggtaatttctaataccatgttttagaaaatgttttacaagtgtttcttgtatctcattttaaaatgacgtcatttaacatggaattataattttaaattttatgtcagtgagtataatctctgtggtgagtggctaccatgctggacagtgcagctctagagaactggctgttaaccctggtagcacaggggagctctaagtagagctttgaaaaatctgctctccagccccactccagaccaattacataaacatctccagggtggggtccaggcattaggattttcaaaagagctttccaagtgatttcaatgtgcagctaagatgaagaccactgcatgaattggagacctcattgagaggttttgtttttatcctagaaccatgatacatctttaaagctttaagcatggatgaggggtgatcacatttacattttttaaaaatcactctggtgaaagcacagagatcagattagagggaaatatgatagatgtaaatgttggcagatccttttagtggcttgggcagtagcccagttcatggatgatggcttcatggtagatgaagatggaatcaagagttatttggaagatgaaaggtcttgattacaaattgaatgtggaaggggaggggaggaggtgctgttcagtgtgatggaggatactgcaagtagatgcagtcgttacatgattttttaaagatcaaatatatgcaaaaacttgtcatgagttttgagaccatgcagacagatgcattaaaagtaaaataaggtctttccattgctgaagaagtccataggttttgctatcgagtatttaaattactaactgtaacactgacggaggttaggaattataccaatgatgaggaatattacttattgtattcttgttatctagaaagtaagtcatccaaaggaagggcaaattggagagtaattcttttattgtgggttcttgcatgacccactaaggtccttctgaagaaaatatttatttgtgcca

SEQ ID NO: 44243 - DNA, 1046 bp, Homo sapiens
cagtgaataatataggtatttagaatggcagatattcttatactagtacccagtgtgctcacacttacaagcacgaacttgctgtggcacaacagaaacgtgttgtctaattgcctcttctcttagttaattatttttcagacttcatttaaatgcatgtttcaacataagatgaattttatctgctgaattggttaattacatcagggagaagggaagatgatattgaaagcatgctttaattcaacctaaaaattaaaacttttttccattaataatttattcttgaataaaggtagacacttaaaaccaatattatttcttccttaaagctcctctactacacatatgttctactgtgtaattttgatgaggagtcaaatggggtgaaatgtttcattcaggatttttatttcacttagactttcagtttgtgaaataaggtaataataatttaaatttcatagcattttttttttattttctgagacagaagcaaagacagaactgttgcttcctgaggaaaaggatcatgaaagatcaccttgctctttaccttttaaattgagaatcaaagttccatagatcctgcattttagtacttacataggagttgtttactcataggtagtcaggaaaatgaaactggcactcttcttggaagtggggagttctgatttactttttgctgcctttgctctacaaaccagaggcttacaatgaatcaactcaatacttgctgaggtcgcaataagcaataaatggctggctaatgtaggcaaaggcatttagctatactttgtatgcattgtaaatgtgatattttctggagtgttcggctaacaccttgtagatatccttggttaattaaccaagtattgaaagaaggaaccctatcttttcacctgtgatcttgcaggtcttgctttctaggtaagcagagctgtgggttgtaatacaaagatttttgttggtatgtgaaatctgagttcttccttatctagcttaaactgtttcctcttccaaaaaggaaaaactatattcca

SEQ ID NO: 44244 - DNA, 1058 bp, Homo sapiens
aagggacagtccaagagtcagtggtttagctgggggccagtttttgtgaggatgacaagatttgcatacagaattgaaaattttctgtttccttggtaggataccttaaataactataacactaatgaagttgtatttaaaaggatagatttaaagacttctttacaaaaagttgtaatcattttcttccaacctgtttgtacacaattatatatgtcttcatgtatatttatttaaattttttttaaaaattaatgctttgggaatatcagttgctttcataggagtcttaagtaatttatctgaaattatcaaatatttacttggttaaaattagactttgtgtttgggtgactagagaaaaggtacaaatgaagggaagtggttaggaagagggatgatttgtcacttgttttgttcaggttggagatggatacaagcacaatgagatttcttgtttgtattttttaacacacatcagaaaattcagacacgctttcaaactaggttttttaatggccaaagaaatgtcctcctgggttgagaataagaatgaacatactgtatttgaccgaaaggagctaactctatcagctttaaaatggggtagactccatagggactagaagaataggcttgaagaataaagcttcgcatagaggagaaaccagagtaagcacatacaaggaatgtagaaaattagagcatattaggttttaacctatcttctagtaagattttaaaactaagagccagaacaagtctcttaaacagtgaccaagaattgatacagagatggggactgactacttagcatagattggtcattatggtccaacatccatggataatcagaacagacatatacaaaggtaatattaaaggatttacacctatcctgaaacatattaaacctcctcaaaccacagtcgggtcatttggctatttcatcctaaggaaatatttaactgtttttcaaatgctttttactttctaagagtcctttgtactttctgacataattaagatttttctcatctttcatatcaccttttctg

SEQ ID NO: 44245 - DNA, 1061 bp, Homo sapiens
agccaccaacctcttagagttggcgttggtgtgctttgtctttcgtgtttttcataatgcaaagctactgctgtttccaaagtgtatgtaaagcttttggaactgaagaatgggggaaagggtgagcagtggcaaagaggagtaatttttattttatattcttagattattttcggtttggtgtcattggatagtagggcttcagaatatattttgcctaatgaattgctttgttgtttaaaactcatgaagtatccaactgatgaaacagatagttgccctgttagagaaatgtagtaattgtttatttcaggttttgaagaacttcattttaacactattttctaggagatttgagaaaacataaagaaattattatatttatctagttcataatgtattttacataaagtaatattaccttttggtctggcccgtttgttattaatacagtatgtaacatagtcttttaggtaacttttctttataaagataatacaatatatgtttatttaggaaaaatctggattggcacctgaccaaaaaaagttaaagcaagttatccataaatactagtcataatctttttcataatcttattcataattagaactaaaaaggctaatattttggtctttcttgctatatataaaataatgtatatatgttgataggcatgacaggtattttgttactactgcaatcccaatgtctaagagtatttgtttttagtatttacctgatttgtttttagtattaatatcttagtcttcttcagtgagctaaatacattattatttattacctactgaatattaacaggccaaatctcttcattgatatgactttgctttttgcctgcccaccaaccaggctcttatttgatggtttctttctgccagtgtagaaaaatgatgtgaagttgaaacggtaattgagcttcactgtgcatttttatttgggaaagatgacagggttttaggttgccacattaaggaagaagaatgaaggttaacggtgattttcaagtaactcctataggaagggtgattttagcttta

SEQ ID NO: 44246 - DNA, 1050 bp, Homo sapiens
gtcagcaaactatggcccgtgggccgtatctgggcctatttttgtaaataaagttttttttggaacacagcatgcccattcattaacatattatatatggctgttttcacactacaagggcagagcagaatagttttctgagaccatctggcctacaaagcctaaaatgtttagtctggtcatttacataaaaaatttgctgacctctggcttagaggagagatgactaaaaaatctggataggagcactttgagaacagtctttttagtttgcacacttgtttctagttcttatttagaagaaactgcatggctgttaggtgaacttgtctaactctctcatgattaactgctgatttatttaataaatttgcatatatccttgcagaaggatcagtacatattttccagaggtgtttcttatgtgatttgttttctatgttcatcttcataatatattcttgatgatattagtatgtctttattcaaagtactggaaacttacatgggatacacaatagctgtattcaagtatgtgaaggactcttttcctgtgaataaagggattagatgtatttatccttcaagtccaattaaaatgtgcttttgttgtcaagcccctgattccagctactcccttctttgggcagaattaatcaccctctcttctgtgcttccaaaattctttgtacaaagtactgttacagtatttgtcacacaacgctataggtcttgtttgcacatttgtctccccagttgattgtgaaatccttgaaagtgaggacaatatcttattcattttggcatcctcatcatggggctcaggccctggctcatagaagcaacctaatgcttgatgagtgaaggtatattataatcccagagggcaaagcaaggaccattgtgaaatctcactaaaaagaactctgtggtagtgctggcaaccaattgaaaagtctcctaagcagtgtgcttggacatcaaggacaagaacttggggttagaatgcctaggtttgcattttgactgtcctgtttaataacggtcttt

SEQ ID NO: 44247 - DNA, 1089 bp, Homo sapiens
taagatgttatttagcaaaacccatgaatataccaggataacgacagtacagtgcaaaacctggctaaaatcagaatgacagagtagggtttttttgtttgttttttctttgtttgttttgagaggagtcttgctctgtccccaggctggagtgcagtggtgcaatctcggctcactgcaacctccacctcccagttcaaatgattcccctgcctcagcctcctgagtagctgggactacaggcacacgccaccacacccagctaattttttgtattttagtagagacgaggtttcaccacgttggccagggtagtcttgatctcctgacctcgtgatccgcacacctcaacctcccaaagtgtggggattacaggcgtgagccaccgcgcccagccctacagagtggttttaaagtcaaatcagttcggaagcagttttaaaaaaaaccctgctgggacctttagcttcaattagggactttcaccgaagcctctaacaagtctgagagcactgtttgttttaaagcactaaacactttagacttcacctggaaagaatacctgggtacctctgaataaatcagtgaccccaaatgtctagagaacaaatgaagattctgcagattctttccctctagtattttcgtcaggccagagcattcttcttttagtgcatggttatttttatacttgctattgcaaccctttattgaaatatttgtaacctctcataacagcctcttttgataagtttccatttcggttttcattttgcaaatgagatcttatttaccaagttggctgcttgtgtcttttggctaaatatgcagcatattttaggggctataacaagatacgtttgaaaggccaataatttgttattaccatatggtagaaagaataaagaagttttctcaagattcccattcccaaattgtgtaatcaaacactcacccagatacttatgtgaagggactttggagacagaattaagtttaataattctgaccttaaattagataaggaacctgaatgtttctaggggagggggcaatatttaatgtaatcacacaaacccttaaaagcaa

SEQ ID NO: 44248 - DNA, 1062 bp, Homo sapiens
attattacccaaagtctatagttcacattagagttcgttcttggttgtgtacattctatgggtttgacaaatgcatatgacatatatccctcattgtggtatcatacagaatagtttcactgccctaaaaatccctgtgctctgactttttatcctttcctcccaactaatttctggcaaccactgatctttttactgtcataatagtttttttgtttttgtttttcttccccagaatgtcatatatttgaaatcgtatagtatgtagcctcttcagattggcttctttcacttagtaatttgcatataagtttcctacatgtcttttgatagtttgatagtttgtttctttttagcagtgaataatattccattgtctggatataccacagtttacttatccatttacctgctgaaagacatgttgattgcttcccagttttggaagttatgaataaagctactataaatattcgtgtgcagatttttgtgtgcacataagttttcagtttatttaggaagatatcaagaagtgtgactgctagatcctatgttaagagtatgtttagtttgtaagaaactgccacactgtattctaaagtgactatcattttacattcccattagctatcagtgagatttcctgttgctccacatcctcaccagaatttggggttgtcagcatttcggattttggccctcctgataggcgtgtggtggtatctcattgttgttttaatttgaaattcccaaatgctatattatgttggacgtctttacatatgcttgcttaccaaccatattttttctttggtgagttgtctgttcagactttttgctcattcttaaaggtgatttatattcttattgttgagttttaattagtttttgtatattctagataatagttctctatcagacatttcttttacaaatactttctcacagtctgtggcttattgtctgattctcttggcattatctttcacagagcagaagttttaaattttaatgaagcccagcttatcaattatttctttcatgggttgtgcctttgatgtt

SEQ ID NO: 44249 - DNA, 1034 bp, Homo sapiens
tatgtctgcatcccattgatattgggcttatcagtgtgacttgctttggtcagtagagtacagatgctcctcgacttgtgatggagttacatcccaataaaaccatcataagctgaaaatatcgtacattgaaatacattcaaaatacctaacctaccaaacattgaacttagcacttaatatttaagtattcagaacatttacattagttgggcaaaaatcatctggccacacagtatactgttgagtaccagtttgttttaacttcatgatcatgtggctgtctgggacctatggctcattgccactattgagagagagtgccaccatcttgagagagtattgatatagcatattgctagccgggggaaagatgaaaattcaaagtacagtttctactgaatgcatattgctttctcaccatcagaaagtggaaaaatcctgagtcaaacctttataagttagggaccttccatgtaagtctgccagtatgccatgaccaagcaaaaatgttgaaaaatcatactgtggactttccattgctcttttctttgtgtcatgagaacaaacatgtcccagtgggggctgctcttttaacctggatccccaaaagaaggagatgtgtggagcagagctaagctgatcccccgtgacccatgaccaacatgtaaagtgagtaaaatgtaaggaaacaagaaataaactggtgttattataaacccctgagatttggaggttgacaagagctgtggagggtctgaaatgttaccctgcttgcaaactaatgtgtaagccagccattggatcatggattctaacagaggatttaagactcaggtcagagaaaaagggcagtttattactcatagcaacagcagtagccagagtatcagaatttgtgctggttctccgatcccccagtttccacagggtaatgtgtggagggccaggcgttataggaggtgggtcttgaacttcaggaatctgaattttttatatgaggaggtaagtgggccagctctctgctttttagg

SEQ ID NO: 44250 - DNA, 1088 bp, Homo sapiens
acctggataatcctgagggcagctaattagtgaacttaattccatctccaaccctaatttccctttgccatgtaatgtaacatattcaccggctctaggaatcaggtcatggacagctttggggagccattattatgcctttcgcacaagagtaacaaataatctgatattcctagagcatctctctctatgtctatacggctcaggtagttgaagttgaactccttatatatgttgggtaaggtctccaaagcatgttggacaggagggagagagagacaaagagacagagagagggggaaggaagaaaaagatgggcgggagaatagaggtgaagtgggggtaggaggaggagaaaggaaatcaacaggcagaaataaatagaatctgtgttgttttttatatcccaacctccaaacattctgcagcatcacttgtatcagtttctgtgcattagaagtgagtcactaaagtgagaccaaattcaagggcaaggaattatattgaaagagggtcaaagaacttgcagacatgttttaaaactgcacagtcacttaaaagatttacagtgtcccctgaacagcttttcttggggataacaagtaaataaaacttttttcatgggtctcataaaaggacactgtgtgtgatataaaagatgatggcctcaccaatatctgtacaaaaaaattgtaatgataaaattcatagagatgtttattatagcatttctaggtgctagcaccaaagcatgtttcaggaaaaaaatcattctacaagttgcaaaagcctttattccaagtatacaggtttcaaatggactaaaaagaatataagcaaaaacttaaagatgagaaaaattaacggaatacatatacatcctttaattgatgttccatgaatattgtatattgtaataaaaaatttaaaaagacttaggcatgaaagagatgaggattatatttcttgacaagaataatgaataaaagtaaattgcatggccatataagggcagatctgtaggcttttaaacctagtttggtatttacttcttagatgaaaacacttcagacataaatatatagaaa

SEQ ID NO: 44251 - DNA, 1019 bp, Homo sapiens
aactttttaaatggttatcccactgtgatatctctggaattagatctcccttatttccagataaggagactctctcagtcaatggtgtagtaatgtagtactactgttttgcccacatgagtatataatgtcagaatgtgttttaccttttagcaaaatatagcattgggttcccttcttttgctgtgtcagaacttcaacagtcttttctgtgtaagccctcttttgctgcacttgggagcttttctaacagcctgctatgttctattgttgatgcaatgaatacagcgagatacccacattttgtttaaagatagtcactgagctgtaccctactgccagcctagatgactgcttaattataggcatgcttttctaaaggacatatatttgttatcttccataaacagggagacagtaaaagtcatttggcttaccttcctagggatgaaggttcaggaaggggagcttcattcagtgcttcatgctgttgtcaacactaactttacaggtgacccaggaaattgtgaagtagttggggccgtagaacagacttcgtgccacagcacaaaaaatcttattacttttttttttattccctgtgtactcgctttacaattttagaaacaactgatttttttttttttttttgcaattttgcattagatcaatggttttaaaaatctggccaaacatggaagctcttgggacactgaaaaacacagatttctggaagtcacttcagaacaacttaattggaaacacccaggaatgcagcccagggatcggtaatttgtaaaagcttccctgggacacaaaaagtcttggtcccatttcagaccagttaaatcagaatcccaggggtgatgccctaggatcaggcattctaaaaactctccaggtaactctcatatataaccatggttgaaaactacttctctatactttcttctacctttagaagtcagctttgggagctctattttctgctttagaggatttagcaatgtaaacttagc

SEQ ID NO: 44252 - DNA, 1038 bp, Homo sapiens
aagaacatgagtctcagccatctgttttcatttttctctctccagcagcataagtgctgcagggattgtccctgcatagcaaaggggatgaggatatgcttgtttattattgaaaagtcttaaatgggccccgtgtcagtcagcttagactaacttcttctgtggtaacaccctacccccacatctcaatagcctgcagttaatagaggctggtttcttgctccattatatgttccccatgggttgcatgaggctctgctccatattttttttcctgcagggaataaagctatcaaggtattaatagtctcaggggagatggagaacaaaagcatggtggaacgatgggatggatcttaagcttctactcaaaagtggcatgtattatttccacatacatgtcattggccaaaagaagccgctgcatgaccaagtctgaaatcaacagggtgggcatgtactcacctatccctctgtcagggatgggaaacaaatattttgaacaaggatacactctactaaagtcttttttagagttctcttaaaaatgaattggttttgcacttgtatcaaggtgcatattcaacacacatcgaatgagcatgtaccacaaacagaccacagtagggaatgtgaggctaagtcagaaactctcttttcaaggagctgactgtcaaaagggcctaaaaatacctatgatattttcctgcacagtagtcatgccagcattgctggagaaacccttggaggagagaaatctggagttgggacagcgtgaaactgtatgccttagctagtgatcctgaactaaatttctattagtattactttttagtctcataagtaaaggtatactgttcagggattcatcacatccatctgtcctttaattgttgtcttcatttcagagattgtgtggtcaatatatgtcattatttttaaaatatttgcatgtttgataataaagtattacactgactttgcaagtcactgataaagatagctggcattgccttatttgtcatattacttgggtgc

SEQ ID NO: 44253 - DNA, 1029 bp, Homo sapiens
gtgtcaggaacaagcagtaattatttccatatttaaatgttgatatgaaactaaaatctgtttgctgttttatagagttggaaaatgtttattgaaagaaatattaatgatagatttctattttttaaaaaaagtatctctagttttcttctgcaaagtaatcttgcatgagagtctgaatggttctcctcagcagaactaatcagattttgaaattgatcatcctcctggttgggattcaaatgagaatttgagtgaaaatgattaaatgtttttccttatttagggggctgacagttgttgatattttctttcagaagagtaaattgtgtagtgaaacctgtatatttggggtatggagagcagcaagtcattaactttgggctctgcaactggacatctgggaatcaaagagattttctactttgtttattacacaaataaattatattccctgaccactgtgtgatacctgattttaatatgaagccaggagcagacagtgaaaattgctgcatcccacgctgcttcagctctaggtgtactgatacttccaaagaatacttctgaagcctagatttcaattttacatacatcaaaaagtaaacgactatttaatcttttactgtaacatgaagaggagtgagtaatacatactggaatggagtttagtaggatggaaagccaaaatggaaagattttctatttgagatgaaagtataataagcagtaagctttacaaaaccctggaatatgcttttgaggagaccaatgaacagattagaatttggtttatgtatgggaaagtaaggtgacctttaatggatttctggggccgtcttttgaggattatgtaaatgaagcctgaattctaaatctaatacagctatcattaaaatcaagagaatgtttactgcatgatggtaattgaaatgactcctagctttataatgttcctgagccctagtattctcacatgactttcaaaaaataatgcctattttttattaaaacctgcaacatccttaa

SEQ ID NO: 44254 - DNA, 1098 bp, Homo sapiens
acacctgtaatcccagtactttgggaggccaaggcggttggatcagttgagttcaggagttcgagaccagcctggccaacatggtgaaaccccatctctactaaaaacacaaaaaattagcagtgcatggttgtgcatgcctgtggtcccagctactcaggaggctgagacaggagaatcacttgaacccgggaggtggaggttgcagtgacctgagattgtgccactgtactccagcctgggtgacagagagagattccatctcaaaaaaaaaaaaaaaaaaaaaaaaaaaagtctgaaaacaagctatttaaaatataacagccaaatttttttgctcccattacaatcacagttcttgaaccccattgcctcctagcccttctctccactttcttgcttcccatgatcttttccgtccacgctgattagcctttgatctctgtcattgtgttgaatggttcttatcagtcacttgcacgttgccaaagtctctcaaatttctttgttcttaaagattctatgtacaaatagattttctcttgatattttccgcatttctgttttttgatcgtagccaaaagtactgcaaaactatccttattgctaaaaccaaatacgtgattgcaatcttggccaaaaccagaaatgaaaggaaaaacaggtattggaatgtggaagttaaaaaggcatttgaagaaaaattgagactctgtcacccttttctattgtgatcaagccccattaggaagaacattagaattttggtttccagctgtgtctgtgtagatgaaaactctgtgagccaacttcccttttccaaagtgatctaaatattgttcagagaattctagttagttggcagagaaacaagtatttaggcagaaatatgtccaaaaatgagaagactaaagatatgcatcatgtgcccatgtattttacataggaccaagattaactgggttttgctccgaaccttaagaaagaaggctttttcagcattgctagaaataaatcttgctttaaaagtttattgcaagtgtggtgtttatgaaaagcaaattagtattctataaattctctcaaacacaaagtgat

SEQ ID NO: 44255 - DNA, 1031 bp, Homo sapiens
tacagagttaagaatatatttttgtctcaatgagacctttagtaaggaaataggaaatagctctggactgggagcttctggaattctatggtcatgcctctctgctctttgcattctggcaagtagattcacattttagactcaaatcacttgtaacagccattatatttggaactccccatctcttctttttgtttttcttcctcttttgtgtgagagactgtccccttctctctgctttctttttctgtcttccccactgttctagaagccatgaccctctcgttctaaatagattttgccctgcttccaatgagatgcgaggctgggtatttctatgcatatttttaatttgataggaagtgtagcttacagcttattgtgaatacattaacatctcatcgcttgtgacaagtccttcacacttttcatccctgctattaattttccttttctccacatttaaaaatttttctttagcatttgctccccgaatcaaaaagactagatagggggattaatgatgagacttttctgttatttagcatgatttacaactattgctggcaaccatactaagtagtttcacatataatgtcccctcagccttttaaaaaattgatatcagcttcaatagaagtgatggtattagttactaaagtgacatcatatcaaaatatataaacatggagcattatcaacagaagtgagaacaatttctagaacaaaatgtagagtttggtaaatctaaagcagataacaaaagaaattgtttcattctctacaataaatttgaactgtggattacagaagtaaacatttacaggaaattgggacacagagggagtgggagaaggaaaatcatatgacttttgtctctcccctacctggagtttcatcatttccaactctgcaaaattggctcaagatgcgaatagtaaaggcaggtatgtgcatgcatgaatgaaggaaggtatcctccagcaaatttgcctttcaaaaaagttgcctgaatataggcccaaactcag

SEQ ID NO: 44256 - DNA, 1047 bp, Homo sapiens
attgattacaagtttatattcaatactctagtcccatgccattaacaaatttaggatcagtgaattttagtcattatggggcttttaaagactatcaaattagttacctgccattatttctattttatctttttatctacacagtagtaaacaaactagagagttactttaatcattaaattaaggcagactaaccagtaggaagtaaattgcctcgattagagcacttcatctaaattcagatgtgaattcaaattccttcattttgcctctaaagctcagtcttaaccactaagttctactttctctcaaatgtttatttttaaaacagcaccacacaccttggtatcttctcagaaaggtgtttcctccaactgtataggtgcactgccttttttgttattattgttgggtgtttctcttcctttgataataaagtttcactcagatgaaattataaggcagttgagtattgtggaaggaataaaataaaaactgttttctaggcctagttttgctatgtgagagtaatcacatcgctctctgaatcttagtttctcacaaaatatgcactaaatttttactcttgttttcaagttgattgttaatgtcctgtgaaattgtagagattttgtgtgggattgccattataaagaaatttgtttattagagaaaaattatttttgttattgttcaaaatttatatagtaaaatgtatgtcatgtatacccatatatttaatggatgctgtcttttagagtggttttagagtggattctgatattttcagattctcaaatctgatattttgagattttcaaactggcaaaaatcctcttattatcattatagaaataactatagatttttttaaaaggaggggcaattttattttatgtccttgtcatgtttaagaacttttatttttacccagcaagcattaatgcagatcataaacaaatcatgtgctgtttccattcctctggatatagggctcagatgagtcctttagatgacaatataggccttgtaataaagttctctcag

SEQ ID NO: 44257 - DNA, 1089 bp, Homo sapiens
tctgtaaagctctgtttgtggtgctgaaacctctcatgatgtatgagcatgtctggctgataaattctaacgtcagcctctgtgtgatagtgattcatcgggttgtaaaatttgtgtttgagaaacacgttgaattagcaagtttcatattttggttgtgttaaaatcaactcaatttaccctcttgttttaagaaattcttaacaattgccttccacattgtcaaaaacagctaggatttaactggaaactgtccatgctatcacaaaataaatgtctaatattaacaaataaattgatatgactacagtgctggaaatgtttataggccagtgagatgttgatattatgcagaaagctattgtaagaaaagttaaaagttgcttatgagcagacacagtagcaattaacatgaaagctttgtaactttgagagataaacaatttgcctataaaaactgtggtattttattgtctcagaatgtttgctttgtacaaaaatacttctatttttgcaggactgtgggggtttgtttgtaaaaatgactgaaatcctcaaaaatcttaattctctttttttttaagtgaaatccgtatattccctatataagatttttaaatgactactaatgtacttggcacttcaattcaatgatttgtaatcttttaagctgtgggtttccagtgccttaaatatatttttagaggactggactaaaaaattaaattcttaattgtttcttttactttaaaatagtttcagaagcttttcctttagttaacatcattcctcttaaatttgtgtcaaactctgaaagtatctgaattgtgtcatttttatattggagtgagctaaataaaagaaatttcagaaagtcgaacctgttaaacttctactactaatgctatatgttttatggtgtaattttaaaatcttagtgttggactgaaacatgttgtttccttgccatgtttcaatatagtaaattattaagttatttgcttgttacttcagtgaagctccttaactgttttgaatcagagagagatttgaaaattatacctagagcataagtcataatgaaatttg

SEQ ID NO: 44258 - DNA, 1045 bp, Homo sapiens
agtgagctgagatcatgccactgcactccagcctgggcaacagagcaagactccgtctcaaaaaaaaaaaaaattgtagggtgacatataagcaactgacctactatttactatataatggtaatgtctgtcagtcacatcattgggaggtttgagggctgtaggaggataacaggatgggcactgaagccatcttttattctgagataagaggtctttgatgataccttgaaagtgtgggcagctctagtctggattaagagtgaaatagtggagtcaagagataatattataaagtttgtcaaaggcagaatgacaggcttttgtaatagtgtatttgggagacagggagaatatgaggccttcttttttgtatgttcttgattttgtataataagcatatgttaattctgcaataaaatatactaagttattaacatgtaaaaattatttcatatttgaaatggtgtattttaaaataataatgtggcatcatgatggtaatgttgggatttcaagtcaagaactttggaagaggtttaatattaaaattattttctgaagccagagtatttaaagatcacagggttagcttttcccaatacagtaaaaatctttattgataaggcccatcacttctaagaaagacacagctctgtcacagtgctcactttggaggaatggaaagactcagtgggattgcagatttgtctgaaaatatttttattcagtttctccttccttatgaccaataattcatcaaggtaggttagcatggataataaattaaatcccaggcataatatgtatgagtatgtcttatatcttaaaaagtactttatagatatgtaatcagtagagtgttataatatcctcatatttgattttagtttcaaaatcaggggccattggtctcatagatattatggtgttttatatcttctggtttcagtaaagctaaaactggattcatttttttccagaatgagatgacagtttgtgccgaattacttacatgttctacctgatattctgagtattcaca

SEQ ID NO: 44259 - DNA, 1034 bp, Homo sapiens
tttataagcaaaggaaaatggattgctaagaaataaatatttgtgaaatgacccaaggtgagttttaaaaaatgtgtttggatagagcatttctactttattttcttaaaaatccaaaattgttggtctttcacggggaacatctcagtgcttttaggataacacctgttgttatggatttatttttggaatttttgacctcaagtgtgaatgctgcatagccttgtgtcatgagtgtttacctcgcttatttagcctggcgcagaggttgggggttgggggtaggattcctcagatatgtattcagaaaattaaattacttcttagtagttataacatcacaattgcatttaatatttatacagtatcataattatctgtcacctctttttgaaatccatgcttttgttttcttctcattgtgtaataaaatggcagtttccaaagatggatgtctttagtttttaaatgacatgttgatttttttcatgatatctgcaaatatttttgtcttttttgacctcagaacaaatgtaaagcattgattggagcacacacaaaagttaggaaatatgctgcttggcaactgagtaaaagtaaatatatagtctcttaaacttccaaaaaagtatacaatagtacaggatgggttctattcacaagctttctgtctgtaacgtaaaagatatcactatctaaaaataaaatcagaatgatgaatttcagtgacaacaataaaagttttgggaccgtgagagttgttcatctaattgagggcactgccttttcttgtcctcaggtataggatattgctccattttaagccattgagggagaagggctttgtatttaaattgcaagctaataaatagtctttttctcattaacacacatgacctttatgatatgtgctctcatgcatactggcccaatttctcagtctctgttaatgatgtttggaacctctgtttaacatgaattattttctacctgaatccctgtaaattcacgataggtgttaattgtagtgatct

SEQ ID NO: 44260 - DNA, 1022 bp, Homo sapiens
tcatctagggtacatgctgttcctattgtatcttcttacttacttggcagtccattggaacaaattgttgattttattatcaaatccattatcattctgaacttcttactatctctgctgctgcttggcctacccagaccagagcaatggccttttgtttggtctccgataattaattcttcctaatagagccagtgagttaaatatctagatgacattgttttcatttaaataggtaatagacatacaaagataaaattgaaaaggcacaacagcctatacagtgacaagtaagtctccttcctgcttctgtcctccagccatggttcctctctacagaggcaactacacatattcccttttgacttatgtgcatatgttcacaaagctgcttcttgctagatgaagatccaaatccttagtatatttcatatacttgcatgagtatatgtcttcagttgtatttctcagcatattctctagtttcctctcctccagccacactgtacctagacatattcttttgttgtagatcctaccttgcttttcccaaactctacacaacatatgcacatttctaccctgaaggttcttcctccttctttgcacctatttagctcaactctcccaggttagacaatatcttctcagagaaatcctccctgaacctacagttcagatcaggcccctttaagacaatattcatgttttgctttcataacatttatcacagtttgtatttatatatttaatgatcatttgcttaatgtctttctcctttgcaagactgttagtaacattagggcctgtgtgttgctcgacattgtttactcagtactggcacataaatagttaagaaacatctattgaataaatgctcaagaatcctcatttgcttgtgggaggtatctctttcattgtaatccattcacttatttcttgtctactgttttttatatggccagtctcctagaatttctgtcccccgtggatttaatatgttttaactcagcaactcttaa

SEQ ID NO: 44261 - DNA, 1037 bp, Homo sapiens
aataatttatttatcaataaatataaaaactactggtatgaccttacttttggtttggtttgcaatcattgattttctgattttgatataaacaattttagtgtgttaaccagagcagaccgtcatttggactaacattagccatctaacagttattaaacacaagtggtaactcacacatactcacatattacggagttcagcatcagaattctatttaaagcatatcgtaatataattttttttaaatgttggatactttatttgaagtggagacattttagtttgtcaggttgtcttaaaaattgtcctgtcaataaaattatttataatgaaatgaataaattgcttctttgcagtagacatttcattcattaggatcaaaaaccttgtagataatgaatgtcctgaagtctgttcgctactattttgagcaaattggtatttaatactgttactccatacaatacacttgtttagcatacttattattcacatccttgaattttgaggaatgtgctctgaagcatttgtgaaatttgaatataccatgataggatacctaaaacattcatcattactgaaggttattttgggtatctttttcgtttcctgatttgctatttttttaaccataactgagtaatcagttttatcagatacttttttctatatctattgagataattataattttttcttatagaatgttgatatagtaaatgacatttatagttcctttaattataatccccttgtagtcctaaaagttagcttagtcaaacagtagaaatgtttttatgtatcactggattttatttttatagcattttgttcgggatatttacatatacatacatgagtaagagggcatattattttttgttctattgtcattttctgttttgtcgtcaaagctatattgacttcatagagttgggaaataaatcactcctcccttccatgcccttctccctcattctctagaaaagtataagattgaaatgctttggatattgaaagtctgataaaacttg

SEQ ID NO: 44262 - DNA, 1033 bp, Homo sapiens
atggtggcattacctctgagtggcagtgtctggggtctgctgtaggtaacaacagaagtcaggtttctgttgcacttgtgacatttatagcaaacttcctttccacagtgttttttgaccaactttgaggtggggtgggaagaactgcttttgtagtactggttgctacaactgcttctaatgatctctaagtagtagtgagaccagaagctctagagaagaaaaaggcaagggaagttcctttcaatgcttgagagagaaaatggattgcatccttgtttaatagaatatggagaaattgaatataattgtcactgacttcaaattatcaatatatatgtactttggaatactacacacaattcattctgtacaacataatttttgtaaatgatgatacctttcagggtgtcattttagatggaaattggcaccttaaatattttaaggtgaagattaaagaatatagaataacatttgcttattgactcatttccattattttcccccctatttctctttgattcttatgatataattataatttttctctagagcaccctggagtattctttgattcttcatagctgctcatatatctctaataaagtagtaaaccatagtatgaaaaaattatatttcattgaatataaaatataataactactacttatggatactttctatttccataaatgagctggataacttatattgtccctattattgtgacgacagtgcaaactaggtgttattatttccattttataaatgcagaaaatgagaccaagagaaattaaataacttcccaagttcttacaaatgtacctaacaactggcacaactgggttttaaaaagccgttatcagttaaattccagagtgtatgttctttcttttatgcctgaaatatttgtcttttgttttatgtcagatatttcacagggattcatagtttcttgattgaggcattttgcccctttgagttaaagggtctcgatgaactacaaatatgccttgtggaagacttaaca

SEQ ID NO: 44263 - DNA, 1490 bp, Homo sapiens
agaaataaacaaattgtgctctctaagttgtcatcacagattcttataatgctatcagttttaaactataaacatggaggcagcacccatgggagtaagatattgaacgtttacagcatgtgtacataagttacctcaaaggataattagatgattataatgacactttctttgagatagctaattttaaaaatctattgctcccaagtctaattatttgagtaatgataacatattagcaatcatgaaacttcagtcacagccaaccccattgaagaaaaaaaagtaaatcatagcattttctataaagacccaaaggattgcaccagaccaatccttgcattttctgctgtgtattctatgcccagcctcccatccgtgtgtactctaaactacctacacatgtatcattcatgtgatttcactctatttgttttcatttgttttataactcttcctttggtaccagggagataattttctagttcttctccatcctttgtgaacctctgaaagaaggcttttataattagacttcatagctttaacaaacatttcataacctgccagtaaaaatgtcagttctctgggccagggcataattaaatgagtaagtatcagtgtggtaattcagccacaaaataaaataatttaaagggtctattaattaagggcttgctttgattttggaattctaatcaacagtaagctctgtatgttatgggtaaaaatcttcttgctttcaccgttcccttttcttggcctattacaaatagtaaataaaataattgtatcaatgaaattttcactttgttgttcttttttgaatgattatgcacctgagagaatgttgttaaaatagcaacatattggatatggtcaaaatgaacattttgctatgagcctttaaaaccaaacctgagtaatacaagcaatatataaacggtatagtagactctgtttgagtccattaggtcctgactgaagactgaaaaaacagtaaaagtggaatcctggaagctaataatagtttgtttggtagggggtcttttgaactgagagcagtaggaggaagacaaatgtgtgaaatgatgggcaatataatgatagggtacagcgaggatggattaactattggtagctcttgtaacaaagaaagaaaagctaattttgtagacaaacaaaaaggctggtagagtaaaattaatattttagaatagaaaacctctatctttgagctgggtgtggtggctcatgcctgtaatcccagcactttgggaggctgaggagggcagatcacgagatcaggagattgagactatcctggccaacatggtgaaaccttgtctctactaaaaatatgaaaattagctggacatggcggcgcgcacctgtagtcccagctactcaggaggctgaggcagtagaatcgcttgaacccggaaggctgaggttgcagtgagggattgtgccactgcactccagcctga

SEQ ID NO: 44264 - DNA, 1032 bp, Homo sapiens
ttgtttttgtaagctctagagccagaatttgcatctgtctctgtctagttccagagcatatgtattttcatctttgcgtatttcttgttgttgtacaagaataaaatttttacaaagcaaatcatactttatgttcaatacatagaagacagtggtgaatgtgtttttaaagtgaccttttttgggtaaagatctattttaacttcaaattattttatattatatattcctcaaacgagtcacatccatagtgacttggagtgtattttcagatgctttaaatatatgtaatcttattgataatattcagaagcattttaaattaatagttttttgaaagtaagatttaaacgtaaattaagcacaattgaaacataatacaatatttaccattcgaacagtaactaagttactgttatcttaaaggttttccgagaaggatacggccatgacagtgtagcatttacatgtgttctgagtgttcatttattataactgtaccacctgtagttttagatgctctgtggtttgcattttaaaagcatttggtgtttatagcacctgtctttctaagacatggcctgactaggtctgatgtctagtgtgatgttaaaaaaatcacattaagtgtgacttaagtatgggggttagagtgggaatgaaaatgaaaatgtttaatttttctgacaccagactagtatgcttcagggagaaatttagcaaaggtaattgggcagactaccaatataaattaggtcaatagcctagacctacaagtgctagcctttataacatacttgaccgcaacaaaaatctgttaaaagaaaatgggactgtccctaacatgaagtaatgggactgtcgtagatacaacacatggtacactttttccttttaattaccatatgagaacaaaatcagtttttgcagctggttcttcttcgttttatttgccttgactacatctcacaccgaaggggtttgaaacatgacagacaacaggtgtgaatatgtatctaataattgactgca

SEQ ID NO: 44265 - DNA, 1032 bp, Homo sapiens
agtaaaattaaaaaatgcttttcttcataaaaccagtattttaaatggtattaatatatattagccatcgtgtagaagatatataaatatgcatgaacaatatggatggtaattagtgattaaggccctactaccttgtgaacatattttatattttacccttgatcttcttgttttcaatcaattcacctttttttcttctcaagtatgtacattgtactctgtgatcacccacacatgaggggtgacatgttaactaatcttttaatgtattgctccaaatatcttcatcattgagatttgtggtagcaggaagcataatggaacaactcttagttatcattattttgttgatgtttcaagagtttctttattaacctttgtgttaagttgtggggtttagtaattacatatcattgtgctaggaaaacatgccttgcttaattattaaatcaaatatcctttagagaaaggtgttttaaccatgtgttctcactcataagtggagttgaacaatgaaaacacatagacacagggaggggaacatcacacaccgaggcctgttgggggctggggggctgggggagggatagtgttaggagaaatacctaatgtaaattacgagttgctgggtgcagcaaagcaactggcacatgtatacctatgtaacaaacctgcactttatgcacatgtaccctagaacttaaagtatagtaattaaaaaaaagaaaaagaaaaaggtgtttaaaagatgtataggccgtatattttgtaccagtgtaatcattcactgtgttgtttaagcaaataagctagtttaagcttataatgagtttttaatttatagagaaacgaatcagtagggcaaagaaaggtgcaaaatcttggaagaatttgccttgtataataatggaagactcacatgagtaaaatccctactgaactagcttttgttggactaaagaatgcaattatattaaaaattaatacttcagtctaatacaaatccaatgctgcctgaattattatgtg

SEQ ID NO: 44266 - DNA, 1041 bp, Homo sapiens
cgggccttgactttgctttcttcatctgaatgaggctgtgaccttgctcatgctgagcttgattcaagaaataggagagctgctgtttgtaaacattcctttaaatggaagcatgtctattgcatcataagttctttctggctaagtgattttaactatgtgtataagagggcagtggcatgacaaaaatgtggcaatttcacatgtctggcaggaaaatgccgtagtcttagctatttaactggggacttagtctaattttacagtgggtgtatgtaagttcagttaggcctcaattttatagatgagggaaatgcactttatggaagaaaagtaacttgcctaaactgatgttcttagtgccagagctggagatagaacctagatcccttttttttttttttttttgggagacatagtcttgctctgttgccaaggctggagtgcaatagtgcgatcttggctcgctgcaacctctgtctcctgggttcaagcgattctcctgtctcagccaccccagtagctgggattacaggcatatgccaccatgcctggctaattactgtatttttaatagggacagggtttcaccatgttggccaggctggtcttcaactcctgacctcaagtgatccacccacctcagcctctcaaagtgctgggattacaggtgtgagccaccgtgcctggctccctggtttcttttaatgacagtgttagatttcagtcatttttatattcattcatgtgtttatgcatttagtgaattagttattacttatgtttgtagagatacagcagtcactgttctcataaatattacattatattcaaggaagacagacaataaactaagtaagtaaaatatgctttaatatatgtttaaacatgtttaaagtatgttaggttgtggtaagtgctatttcaaaaatcaactctaaaagaggcatgcccccatgtgtgagagcaggctgctgtgattttaggatagattggttagggaaggcctcactgacttgggtaatcagtcattaacccagt

SEQ ID NO: 44267 - DNA, 1145 bp, Homo sapiens
atgagcaaaagccctgagggaggataaaatgagaagtggttgaaggccagcatagttaggtgggagagtttacacaagataatcctgaagagatatagtaagggctttatcttggaggttatgggaagccacattaaggattttagactttgtctaaaagatataagaagtcattggagaattttaatgtcatcatgtttatgttttataacagttattctgtctgcattacagaaaacagatcgggtggggaaaaagtagaaatggagtgtttgtatttatctgattaggaggctgttgctgtggtccaagcatgagatgactctggtttagattagtgtggtaatagagatgaagtagacaggttggaaacatgtgtaggaatagaatgtgaccagagagagaaagtagttaagaatgacttctaagcttgaacaacttgagcaacttgcttcatggtggtgtcatttttttctgagataggttttaggtaatgtagggcatttgtacttagggactctccaagatatccagatggtcaattggatagataagcctgatcctgagaggtggatttggagtcatggcaggcatctgtgtggatgtagttacctgggccactgattgtcaaaatgtggtcccgtgaccagcaacatcagcatcacttggatgtttggaatttagacatggacttacttaggccccaaccttgacctactctatatcagaaactctgaatgtgaggcccaacaatctgtgttaataagccttccctgtggttctgatgtacactgaagcttgagaaccactggccaaagcagtgaaatacagcatgagggcataagtgtaatttacattattttactccaaaagcagtcttaatttgtgatgaattttatgttattcagcttttgtccattcttccattgggtgtgtatattaatccattctcacagtactataaaggactgcccaagactgggtaaattataaaggaagaggtttaattgattcaccgttcagcatggctggggaggcctcaggaaacttacaatcatgatggaaagggaagcaaacacgtccttcctcatatggcaacaggaaggagaagtgccaagcaaaagggggaaaaaccccttataaaa

SEQ ID NO: 44268 - DNA, 1029 bp, Homo sapiens
acagctgacattatacttaatggggaaaagttgaaagtattaagaaataagaggcatctaaattggaaatgaggaagtcaaattatccctgtttgctgatgatatgatcttatacctagaaaacccggcagactccactgaacaactcttagaattgatcaatggattcagtaaagtttcaggatacaaaattaatatacaggaatcagcagcatttctttataccaataacaatctagctgaggaccaagtcaagaagacaatcccatttacaatagctattaaaaaatgcctaggaatatatttaatcaaggaagtgaaagatctctatatgtagaactacaaaacactgatgaaagaaatcatagataacacaaacaaacggaaaaacattccattctcacagattggaagaatcattatcattaaatctaccgattcagtgcaatccctataaaattgtatgttaaaacttaattgtgttaccttgtgaataactcatgcacacctcccacactgaataagttgtatctgatttgttagaagtgaattttgtattattacattttcagtataattactgtctttccttcaccagtcccccacaactgtttttggagtgtgaattacttgtaggaagtagcccaagtatagaaatgctagttgggggaacagtaattctggttcaaaaccattaggaattcaattcagaacataaactttctttttaacaagctaattctcctcggaaatatttgagtttgttggtagaaatgtttgtgtgagagtgctttgctgttatttgtagagaagcatttgggccaagtctcttatctcattagcgtccctccacctcttatgagtgggcaatgtggtctcattgacttacaggcactgacctgtattccttgtctctgtgagcagatcctctgggagcctccatgggattcctatgaatatgcacagtgcaattgcatttttctcaacatgaaagaattcaaatagtctggaaacttgccaactttaatt

SEQ ID NO: 44269 - DNA, 1025 bp, Homo sapiens
ccattttcatactcaataccttgagaaaaatattgccaatttaaagtatattttgtttgtttattttttttttttggtgtggattcttgattttgtggaacaaaagactgtaagttacatctgtatccatgatattagtgccatcctttgccctccatccatggtgcctttacaaatcagttatggtgtttaatacaaaagcctttatggtggctttacgtagcagttatgatgcttaataccacagtcaaaatcagggtttgcagatgttttcctgattgcttagtaaatacttctgagcaggtaaagcaggaatatgtacgtttagagattcattttgtatcgtaatggcttggcacacttaagtgagcaggatatatgctccttcttatttttcttcccatgtagagaaaagtaaggttgtttcttatgctggtatcattaatttattaccacagacaggattgaggtgggctttaaagaacattgtttctgatatctaattattggctgtaagaatggtttcatagcaccttctctaaaatcaattgcagagatcctctgatattttatggttcatagtaacaaccccatggagcaagtcatctcacttctctagggagagcacattttgcagccagtttatcttgaaacattgcctaatttgaattattctaagggtgtcttatcaaatgttttcttttacagcatggtgattgggaatgcctgccttggaaagtgtgtatccctaaatcattctgactaggctctacatctctgggacctcagtcacccactgatgggtgtgttaaagaggatccatgaccattttctgagagaaatcatggccttcctttgcttaggagtggggtactctccacatgctgctgttttgttttcatgaagtaatgcaaacctggttgttaatctgctaattctctaagttcaatatgcccttaattgacaacagagaatatttatattcctgttttttctcggagaccacaatctcaaactctatgcca

SEQ ID NO: 44270 - DNA, 1045 bp, Homo sapiens
gcatcatatttttgcaagatgtcactactatgacaatgtggctagagagtacatgggatctctatgtattatttcttacaactgcatgtgaatctacaattatctcaaaataaaaaaaatttaattaaagaaaaaccctttactcattattttggctgattagtagacaacatatgacttccagccctagtgattttgatttaactggtggggtccgtgtctgtacttttagaaagatcttcaggtgggtctgctatgcaaacagaattgaggacctcagcaaagctgcaaacaaatctctgcacttaaaagtacaggatgttatccaggagtgttttaggttgtgtgtgatacttgttacaggcatttgactctgtaagtctgtgacctgatcccagaggaccagtatcacttactcaactaagaacctcttaactgagaatgtcagagatacttatatgtctatagatgtcttaatattttttccttcaaaataagttttactgtaattccactccacttctctagggtctatccagcttttatttcagatacctgttgaaataattactttccttacttgtagttactgcaatttcgtcagcaaggatgcagcccttgttcatttgtgcttgtatattgccgttagtccttttgttctcttttctttttaaaatgggccctggctagacaataaattctatgtgtaaacagaccatatgcaagtatctttgcatggtagctgcagaatccttcctattaaaaaaaaaagacaaattcacacatgagattcctcttttgtgtgcatgttgcttatgatcagaaactacagtaaactgttatctcattaataagtttaatattttatttttcaaaagatccactttgtgtcctttttaagtagataatcacgcatttctttttttttttttttttctgcttcagctacctttaaagaattatctgggaaaaccccactaataatagttttgtatttgcttctgaaaatgacaaactcttgtttgatttttctaatggccactga

SEQ ID NO: 44271 - DNA, 1027 bp, Homo sapiens
tgaaacacagaaatagcctacacagatgtggccaacttaatttttgacaaaggagccaaatagttcaatggaggaaggttagaaatttcaacaaatgatgctggagaaactggacattcacaggtaaaataatgaaccttgacctaaacctcataccttctacaaaaattagctcaaaatggatcattggcttaaatacaaaatatgaaagtatacaacttttagaaaaaaataggttaaaatctttaggatctagggctaggcaatcagttcttagacttgacactgaaagcatgatccatagaaggaaagattgataaattgggccttatttgttctgtgtaagactcttgttaagagagaatggaaagacaaagctgcaggcttggagaaaatatttgcaaaccatatctcctgccaaaaaaaaaaacaaaacaaacaaacccccagtgtctagaatatataaataactcttaaaacctaactgcaaaaaataaacaattcaattaggaaatgaacaaaagacaagaagaaactttttaccaaagaagatatacagatgacaaataagtacaatgaaaagacgtacaacatcattaggcattagagagatgtaaattaaaatcacaataagttattactacacacctatcagaatgactaaaataagaaagtaacaacatcaagtgctggtgaggatgtgaggaaactggatcactcataatattgctgataggatacacaaaattgtacagccactctggaaaaaaaacagtgtggcagtttcctatgaacctaaacatgcaattaccatacgacccagcaattgcactcttgtgtatttatctgagagtgatgaaaacttatgttccaacaaaaacctgtacatgaatgtttgtagcaactttattggtgggcccaaactggcaacatcctgaatgttctgcaactgtcagtggtgaaattaattgtacacatatatacctagaatcctactcagcaatggaaaggtatgatacatgaaata

SEQ ID NO: 44272 - DNA, 1029 bp, Homo sapiens
gtgcagtggtgatctcgactcactgcaacctccacctcccgggttcaagcgattctcctgcctcagccccgcgagtagctgggattacaggcacacaccaccatgcccagctagtttttgtatttttagtagagttgggatttccccatgttggccaggatggtcttgaactcctaacctcaggtgatccacccgccttggcctcccaaagtgctgggattacaggtgtgagccaccgtgcccggccagaatgttattaatgcacaaaataaatgcataggattgtaaaggaaataaactaaattgaaatagtgccatcaaaatattttaaaatctctaaaatagtaatacatgaatagtaatagtaatgggatgcggcattacttctaacaggtactataattttggagttagtgatgagtgtaacaatatttcaaaatatatattatttctgtcggtcacaagtacaacaaatactactgtgatttgttgtctgcattcttaataaagggaaatttaaacttttagctaattgttagtgaaaataagcatatgatctttttttcatccaaatacatgaatcatattccctatattgtatctattgaacttttcggtggggtttaaaacctctaacatagtggaaagacaagactgagtgaatctatgtgaaaaagtatcaattctttgaccagggagataccacatagtaaatgaatacttctgatatactaaatggttccttatggacctttgggagcaaaattattttgagcacacactctgttttcttccatttcgttaactggtttgagctcatttacttataatactcatccaaactggccatataacatttaaaatttttgtttatttccaaaaaattgatttcttgcaatcatcttcactaattgcctggcatagaattcttactagtgtgtttccacgtgtactgtttgttgtacatttgtcagctcactcaaataaaactgcaaataatgaaaacaattgtattttctccagtacatc

SEQ ID NO: 44273 - DNA, 1028 bp, Homo sapiens
gacagtataggctctgttgagcaataacagagcattcccagtggcacctgtagaagtttttccaggagctcagcaattactgcaggcttgtgggctccagcctagtggggtagcaccctcactttggtttgaaaccctgtttttgttttgtgccttcaagtatttatttcttccttttttttctaaccccttcaacaactgtataatcagtttctggtattaaatttcctattctggaaatgtctatagtagtttctgctttctttagtgaacaataaccaggagtggttttaggagacagaatttcaaagatgagaatttgagattggttatctgaccatactgcaattgaacacaatagtatatcattgccagtggaaaattgccgttccatgcagggtcagctcagttacttaatgtatcacctttcttatcagaaatgaagtgtttactaaagtcaaagttttgggaaatcaaatggaagttgtaattgactgttatggattgaataatgactcctgttggctgtttttgactacactagaaggtttatagaaaggaaattatgggttcaggacttctctcagttcaaggatagtcacgtaaacagagatctatgatcccctccccactcccactgccaacacaaattgtcttgtcttttatcattgcagtaatgatgcagctgaaaataagaaccaaacttcagttctgagaattatagaatcacagtacaagttgaattcacagcctcactagctttcttatatggaagataagacatgaatggtagacatggatcatgataattgaaatgaatatatttatgtgagtgaactcacctaaatctcagagccttgaactccagtttcctctatgcttcatctgcagtttccccagtgctttattgtggaaccaacctcttcttctttctctaaggagattaaattccctcttcttgaagagtctgtaatggccatagtgacttcagtcttgcatgaaaatatcccaaagccttagggagatag

SEQ ID NO: 44274 - DNA, 1075 bp, Homo sapiens
atgtgtcacctggagaaactggagaagtctaacaatgttttcttgaggattacacctgaatcaaactcaattgctttagtgttctggatgaggaatggtggtgcctagtactgagagaatatgagtaactgagtaatttcaaattgtttggcattgttgggtaccacagtgggagtggtaagagttcagtgtgagcagcaaccagtcagattatcaagggccttgtaaacagtgttaaagagtttggacttgatctgagggtagtgggttgttcctaaaatgttttagaaagattattcagattgtgttttagaatttatgggttgtaggccagagaaagggaaaccagttaggaaactgataaaatcacctaggtcagaaattatatgggctgaagcaaatgctgaggaagtgagagagaaatgaatagttgcatgagtgaacaagaatttggactgtaagaatgggaagaggcagagtggctcctcagcttctgatttgagtaagaaggtggatggatggtggtgaagccattgactgaggtgaatggagaaacacaagaaggtgtagtttgggatttcatagaattagcttctgtcttggtaggacagtgtgaccacatgttctgtgacctaacagtgtgcagcctgggtatgatctattgttgaagcctcacttgacttatggctggggatcaatgacttttcctctctttctgtgtatatatatcttcccacgatggaggctgatgtggggatgaagattttttttaaagtggttttaatgcacagaaatatacagtaatgaatagttaacaagggaagaaagagctccagttaatagtactaagttaaaaataaaagagaaaaatagaaataatttttatataaagtcattgttacgacctcccatggaatgtggcagccgaaatattaactattagttatcccctaggaggccttgggcattacctggaaatgggccctgaaggtgtattttcagccaatgttctggtcttcctttaatctgtttgtttcctgtttcatactatatgttatgctaacattctaaaaaa

SEQ ID NO: 44275 - DNA, 1046 bp, Homo sapiens
ttgccactgttcttgccagtgtcttgccatttgtttgtgtgagagggtggaattttttatcaccttaattgtttgggtccttattttcaattttctttttatgctaggtttttgtttatctgtatgttgggatggcttaacatttctagttcaagagcaccctctcctgttattgtaagcaaagtattgtttctttactggatggcatggttttcaaatggcatatgccttccaatttttaaattttcttttgttttatgtaattcgaaatgttctcccctttttctctctctaatgtatagtttccaaagaaacctctcctgttgttttagctgtcttttctctccaaagtgacgcctttgcaaggtggcttgtcatgtcccatgtgcgttttcaagtctcctttctgttatcagtgttctgagctaactgttcacttttcagtatatatagggccaagggctgagtttctttctgtttctagcagtggttttaaatcatggttcaacctgcccttaactcctctctgctctcgtttgtgtagtttctcctgaactgctcttggtctccatgaaggctactggcaggagcacatgagagaggtaggtaggtcttgatgtttatatttatatttacaagtactttgaagtttggagtttccttgttttctagttatgttgagatagggtgtgtagttttaattcttctccttctcttttttttcctcttcctgtttctgtttcttttcaggatattttggtactttcaaatttatacctctgccacagcttcagctgcctagaatcctctctattaatgcattcttaatagcgctcaacatcctgcagcaacttaaatgtttcgtatcttggcttattatgaatttgaatactgaataacatgattgtacatgaaagcttttcaaaagatgtgacgatcttttaaattattgtaggctttatgagacacctagtctgagcaggttaggaaaaagtagattctgagatcttaccaaggtcttactaatgtaaaaatcaatggctttt

SEQ ID NO: 44276 - DNA, 1936 bp, Homo sapiens
aagttgccctgaatcgtaatctatccttttatgtgtgttttaactctccaactggattatgtgcagaggcagtcctttttatttctttgtatctctggtaaacctcatagaggccttcacatgacagatttttagtgaatgtttgttgatgctgttgctggttttgcttctgctaatgttgatggaaaagaaggaaaatctaatcctgaatgtatggtacttagtttttctgtttgccttgggtaactaagacactctaggtttaactaatttgaggtcagacttggttcaccttgctgaatggttgattcatttatttgtcagcctacctgcccattcaactgtccatacatctgcccatgtatggtacttagtttctctgtttaccttgggtaactaagacactctaggtttaactaatttgaggtcagacttggctcatcttgctgaatggttgattcttttatttgtcagcctacctgcccattcaactgtccatccatctgcccattcattggtccatttcatccatccatccatccatccatccatccatccatccatccatccatccttccatccaaataacttaattaataccttcagttagatactgcaaaatatgtgctgggagccatggaagatagaaaaaaagtaattaatggggtgattatggcataatttctattattggctattcttaaataatttttatatcttcaaataactttaaaagataggcaaatcaatatctatttgtgtttctaagttaaaataaactatttagtgtattactttttataattctctgctttttttaaaaaaagaaaacccagacatttcatttagctgacagctgtggatgttcgttgcattagatagattttttatcttaatatagaaatcttactgaaccaagaaagttttgcagaatttctgaaggccgaatattcagacttaaataataacaatgtaggcttgcttttcattaacttgattaaaatttaaagttggagttgagaaaagattggaacaattgacattaaatatatatgatgcttatgaatctgtgtttggcactattttcacttatttggtttaccttatcaagactagtttctgttaagccactttaccttattcagtataaataagactgagtaccaaaattctaaaaaaaaaaaaaagtctacttctgagaaaggcaacttgattaatcaataatgtaaacatgaattcattttgggtaaaattaatttagcagaaagatctgatcaatactataaaataagtgtgctttattatgaagataattgaagagagaactttcattgagaaagagcaagaaattatataacaaaataggcagaatgaaacatgaatgcatgaatatgaaagagaacttattagaaactgtggaattgaaaaatgtaattgaaattaaaacactactgtagacaagataaactctagaaaatttactgttagagataatttttaagctgaaagatagtattgagagatccaccccaaatcaaagatagataaaacatataaaaatatggttgagactacaagttaggttgagaagtgtcatcataactaaaagtatctaaaacattttaaacacataatatttttatttctttatcttccattcactttaaaataaggcctggtgtggtggctcacacctgtaatcccagcactttgggaggctgaggtgggtgggttgcttgagctcaggagttcaagaccagcctgggcaacatagtgggaccctgtctctacaaaaaacttaaaaaaaaaaaaaatagccggcctggcggcacacacctgtagtctcagctagttggggggctgaggcaggaggatttcttcctgggagtttgaggctgcagtgagccaacattgtgcctctgccctccagcctgga

SEQ ID NO: 44277 - DNA, 1025 bp, Homo sapiens
ctgaacatgttgaatgagtcaaatttactagcctaaaaggaatctgagtctgttaatctactttatagctgattgtattttattcaatatgaagttttctgtgtatatatatatggtgtatgtttaattttctaaatttaaatttaatgtttaaattaaataaaatagaaaattagtttaattttctaaattctgcctatgtggaaccccatgtcgcttaattattgccctttggagtttgtttttcagataatcatatactcatgaaagcaaatattttaagaatcattaagttttctaacagaattagactttgtattttcagatacatgtaattaaagacctattgggaggaaaataacttaaagagcactattaataaagcttaaacacaaacctttgaaatatgaagcaaaatcaaaatagactaattgtatgttctccttagttaaaaaaatagcttcaaatatgtttggatcattgctcagagagtagaaaataaattacatttgatatagaggtgaacatttaaaagattactcatgaacaacatttctgtacatcttatgagtgaccagaaggtttttctattctattttttccctgtttttttattgtttttctgttttgagtagaagttttcaaaattgctcttaaaactggtgggtatttatgagaataactgaagaagagaaattttgaaaaaatatctgaaattactaattaagaggatatacacagattctatacattaagtaataaagcccaatattacaatttacattgaagaagttttgaagagtaataacactttttatttatacagtatctggttaaagatttatagtgtataaattgctaattttcataattaatttatataagaaaaatatttcaccaaactgatgtcatgcattagtattattatgtacattatatttttaacttttaaaaatttattcattttgatttttaaaaaattcgatgtacattgtaaaaaataaaggaacttttaagaagaaaat

SEQ ID NO: 44278 - DNA, 1354 bp, Homo sapiens
gggaaaatccaatattagaagaaaataactatatatactatattttttattgtgcaaatatatattacatatatttattttaaaaacacctttactgaaatttaattcatataccatatgattcacccatttgaagtatacaattcaatgacttctagtatattcacagagttgtacattcatcagaataattttagaacatttgtattaccctcaaagaaaaccccacatcccttagctgtcaccaccatgccacctccattcactctgtccctagcaaccactaatatgctttatgtctctatagattttcctattctgaacatttcatataaatggaattacatgatatgtggttctttgtgaccgacttctttcacttagcatgatgtcttcaaggttcatcatgttgtatgtatcactactttttattcccttttatgtcttaataatattcactgtatggatagaccccattttatgtgtccagtcatcagttgatgaacatttagattgtttccaccttttagctattatgaataatgcttttatgaacatttgtttgcaaatttttgaataactgttttcaattctcatatatatatagctaggagtagaattgatggattatatggtaactctgtgtttaagcatttgaggaaatgccaaactgttttcggaagctgctgctccatttcacattctcaccagcagtgtatggggttcacttcctccgtatcttcatcaacactgttattatctatttctttgattgtagccatcctagtagatgtgaggtagtatctcgtggttttgatttgcatttccctgataactaatgatgtggaacatctttttatgtgtttattggccacatatgtattttaagttaatgagattatggggcttttttacttttggaatttattttttttaccaaaaaacttgtcagatttgtttagatatttgtaccattactcttcattgtttataattttgagtgtgcgttatgtaacacagtgttactctacataatttctctgttagctaactgttgtaagaaattgggactgagagaaggtaagttatttgttcaaggtcacagagctagtaaattgtgtaggatttgaatccaggtcattttaaatccagagcctgagttctttaaaaatggtactataacatgtctcaagtaatatatgtttttaggtttcttgtattactattgttattgtttttgctctggttgttactttattttacccaactacataatctcatagagacaaagacttaaatttcacatgaccctcagttcaaaaatgtcacttttggccgggcctggtggctcatg

SEQ ID NO: 44279 - DNA, 1050 bp, Homo sapiens
gggaatctgggctcatttctttaaagcacaataacttcatctaaaaggtttaaactgtggcaaagtatgataactatgactcttgccttgggaaggaactaattagggttatatagacaggagagaaaccctctttattctcttcagtctctctacttccatgtgcatagatagaaaccgtagagagatatgtgggttccctgtccccaatcactctagtctacattttcttcctccatgactaatggcaatcatttctcacaggtttattttttgtgtagtagagtatagatgactggccacagagtagattaaagatgactctcccctacctggatgaatctgtgtccttggctttcgaatatttgctataaatattaaatccttggaagtatggaaccacatttgcagctactgttagctaaaggtgcccggtaattactgtataacctgagtaatattttaatacagaacctagagttcttacctgcttctgaatttatctttgcctcttgagccaccttcactttcatttctggacgaagaggtgttctttcttctgttcaggtttgcctgtccatctgtgttctaggtcttctctcccagttcctcaggctcttgctccattagttattccatttcttgcccctttaatcagcttttctgtactgattgcttttctgagcttttgaacatgctcaggtctctctcatgtccaaaataaaaaatgacaataccccaaaccatcccttgattctgtgctcactactttattatttttttattatagttaagattttagaaacagttgtttatacttggtctttcttgcctctcctttgctctttcgccttttggagtctttggcagtcctgcttgttcttaccattgggatcgccttcatgaaggtcatcagtgatctctgacttgccaaatactttttgattttttttctggcattgtgtatacttttcaatgcttctctgaaattatgtacttttcttttgtatttgattctattgaatgttacttccttaaaaagttcttctg

SEQ ID NO: 44280 - DNA, 1027 bp, Homo sapiens
caaaattcagagcagattgtggcccttcatagagagttaaggtttttcttaatagttatatgggcatttaaggccaaacatgtctttgttttttaatcatttgacaatgatttcaagcttgtagaaacattgcaagaatagtacaaagaactgatatgattttcactcaaattttcaatattaaaattttattatagttgctttatcatattctctctctctctctcaatctgccctccctctcctcttaccattacacattattattattttgaagtttttttttggcttgagagtacattggagacatgatgccccagtactcccttagtacttcagtgactattttctaaaaataaggacatttccctacataatctcagtataaccaccaaaataggaaactagtattgatacaatattaccgtctattacacagattcaattcataattcactaactgtcccaatgatgttctttatatgtccagaatctaagccttgtatttagctgccctggctctttgctctccttcaatctggaatcttcattaatcttgccttatctttaatgattttgacatttctgaagagtacagctatgttttgtttctctacttgggtttatctgatgtttccttatgaataagttgttattttgggcattattaccacaaaagcgatgctatgttctcagttcctcatgttaaaaggtgtggttcaagcttatcttgtacttttcttgccccagccctggcgctaccaaagacttctggtttcttttagtggatgctaaggttgctctttgctactgggtctaagattgctctttactactgaggtgtctttgcttctagatcttttcagtgaacaaacctaggaaatacagatttgcacattatatgtatatatgtatgtacatatatgcatgtacatacatatattgatatggcttggctgtgtccccacccaaatctcaacttgagttgtatctcccagaattcccatgtgttgtgggagggacccag

SEQ ID NO: 44281 - DNA, 1115 bp, Homo sapiens
acttatttctttgagatgaaagaactaacttatttcggcttgaatactctgagctaagtcatttagcacaaccttacataaccccatcagagtgtttacagttttttaatatggggacaaatgaaaaatttagaaaattaggatagaaaacaaacaaacaaaaatggcactcagaaaagaaatagaataaggagaacacatcagaaccctaacttgattcatatttgtttctgagacttttgttatttgtttagaaatgatgatgatgttgatgatgttgatgtcatcaatgatggcagcaatgaaaatctgttatactacatttaatgctaaatgctttacataggttatatctgaggtaagccagaaactgttgagagaggaacttaatatatttatcaaacctaagattcatctttgtgtcatttattttatctttgtcttatgtatttatgataaagtatttcttcatgtactttatcaaaaatattgtcagttaaactatgatattatcgactgtaagatatatcttgattccagagatgataaaatattttaaaaattatattatcatcaatgaaatatgttgattggtgaaagtgagactagcagactgatgaacaactgtttcctattttgaaatcagtttttaaaaagtttatcactaataaaggaggaaattttgaaaatgtgagaatatgatgttaagaaactgttccaatcctgatctcttggctatctttgggcctctcctttgtggaaaaaaacacacgtacataaaacccacttatgtgagcagagaatcaaaagaaggatttggaggggtctgcatatcttcaagtaggagtagcttttaatgtaagtataggataaactttaatttctgctagttttatacattagatttcaaagttgtactcttgggcgtgagggatggtggtaggaaagattttaagagtaaaacagaaaaagaacattgagaaataaatacgttgttccttggggagtgttctttctagagacactgagcctgtaaaccattccctcctacgtaaaatgtcaggagcaagattaaatagctcttcctagcatgcagagtttacagactgcagata

SEQ ID NO: 44282 - DNA, 1053 bp, Homo sapiens
agactttctttctacctgttttcactgaaatagttaagtggttgagttttccgtgaactgttgtatgtagttacttatttctaaatggaaaaagagttccagaaagcatttaaaagtcttgagagttgtgctcagaggtcgcttgtgatttgtgggaagaaggtagtcaaaattggtattccttatgtgtctattacatttgaatgcatgtatattctgttatgtataatgtgttctagatgaaatccttaggaagtaaaattttttcattgtaattacagtgacagctgggaaaaccctttttgcttgaagactctcagtaatgcccctgaacactcctaatatttcagcttcttgtggtgaccatttttaattgtagcacactcaacctgaattctttgtatgctagttatctactcagatgaatttacatcctttttactccaaaatatataaaaaatggattgactagcatgaatttctgtggccatttgttttctagccaagtagataaagtactgtgagctagggctgtgttaaatgtgatgcatatgccaggccttcataaaggataaaactccctgtgtgttatgccgctgctggattagttaattagtatatgtgtttgtgggggggttgttccaagtatgcctcttacagtaatatataggttagaaaaataaacacaaacctttcaaaagacttccaagtggcatggctaattttgccccaatattattttatatttaactgatggcatctctgtatttagaattcaagctatcatgtaatcaaaggatcccaactttaacaatattacacagaaagggatcctcacttctaccctttcacaatcctctgcaggattctttacaacccaaaaaatattgggttttgtgtttgggatgtagctttcaaactatgtaatttggaatagctgcttaacttttttcctgtgattcttcatgtgtaataaataaaatagttgacttagattattttattgaccccctttaaacaaaacatatattttgaatacttactacttgaggc

SEQ ID NO: 44283 - DNA, 2071 bp, Homo sapiens
tatattaaaggtattatgtatcataccatattctgcttaactttggatgttgtttagggattaaactctcaattgtggtctaattttatactacatatgattcatgtattgcctactgagcaagtaagcaattttcttaattatggacaaatattatgctggcagacctgtgcatattaaactgaaaaaatacttttaaagtgcttcttctggttgggattttaaaaatatgattattagaaccaatcatattaaaaaaccttatatgatgggctaaaatatgtgttttcaaagcaggggttaaaactttttacatgaagtacttttatttttctcttaggaaatttaataaggcatctccaaagacagagggaaagtggattatttggttgacatgcttaatattttatgttgctgcttagtttgctaattctagtggttcaaaccagatttcaaaatctgggctaaatctctgtcatgctatgacatggcatttgacagtaattcctgaatatttaattgatagaaaaacagaaagcatgcatattgtttagtacaattgtgtgaactgctatgacatatcattacatacagttttctgaaagactgcatattttattcattgtatgcctagcacggggaagaaatttttaatgcagtgaacaggtgacctttcaagcatcgtatataaagtttcaatatgtactttaatgggatagctgatgattttctgtttatgtgctgttgattttatttgcgtagttgggtgttgacaaaaactgggaatagatgttctccgtagatctacatgtaataattataattaatatttagaatgctcagattaactttttaaaactgagatgaagttcacataatattatgaaccattttaaagtgtacaattaaggaaaattatgcaaatctcttttcagaaatttaggactcatgatatgttttatttgcaggtttcaaaattttttttctgtttttttgttgttgttgttgtttaaaacctgtatatgtttaaaaattaaaaacatttaattatcacttggtagcaatttgtaaaatcctaagtagaattttaagttgttatgtgaaatttctttgaaattgagaattttattcctaaattacttcctgatagatttgttgttgcattttattctcaggtgtgtaatttttttctataggctgtggttgtgtcatatatactagttataatttggcttttcaaaatatcaaatgccaactatatgcaaaataagtaaatttttatgactatgaaattcacttcaattgtcaaaatgtacaaaattccaaaatgtcttcttttagcctattttgttgacgttggtgatttgtcaacctgaaggtaacagactgtattagttttctattgctgtttaataagccacaaacttagtggcttgtaaaaatataaattaattatctcagactttttgtagggcaaaagtctgggcatagctgaattttgtgctcaagttcttatatactaaagtcaaggtctcccctgggctataatctcatctgggatctcataggatcctttttcatgttcatgtggttgttggcataatccagtttttggggattgtgtgactgaagtccacattttcttgctagctcttgtctggagactgctctcggtctctagaggtcccctcctgtaagtccttgctacatggctcctatacaggcccccttctttaagaccaacaggaaaagctctctcaagctttgaggcttatccttcaaggaggacccactcccttttaaggactcccagaatcatctctgttttgacaaactcgaagacaactgctttgggactttaattacgttaatacaatcttttcatgcttgtcatataatgtaacatcatactgggagtgaaaactatcatacttaaagccctacccacccccaaggggaagggaatcttcagagtgtgtgcaccagtgggcaggaatctgggatgccaccttagaattctgcccactacaggaagctatgggaaaatttgaaaatgtgtttttttaaaaat

SEQ ID NO: 44284 - DNA, 1036 bp, Homo sapiens
aaaaatggtcatcatcactggtcatcagagaaatgcaaatcaaaaccacaatgagataaccatctcatgccagttagaatggcaatcattaaaaactcagggaacaacagatgctggagaggatgtggagaaataggaatgcttttacactgttggtgggactgtaaattagttctgccattgtggaagacagtgtggtgattcctcaaggatctagaactagaattaccatttgacccagcggtcccattactgggtatatacccaaaggattataaatcatgctactataaaggcacatgcacacgtatgtttattgcagcactattcacaatagcaaagacttggaaccaacccaaatgtccatcattgatagactggattaagaaaatgtggcacttatacaccatggaatactatgtagtcataaaaaaggatgatttcatgttattggcagggatgtggctgaagctggaaaccatcattctcagtaaattatcacaaggacagaaaaccagacaccgcatgttctcactcataggtgggaattgaacaatgagatcgcctggacacagggcggggaacatcacacacgggggactatcggggggtggggggctgggggagggatagcgttaggagaaatacctaatgtaaaagatgagttgatggatgcagcaaaccaagatggcacatgcatagttatgtatcaaacctgcaaacattgtgcacatgtaccctagaacttgaagtttaaaaaaaagaaagtttcacctgtacctttattgtacagatagtttttttatttgtttcaaaacaactgtccttggtcagagaagttcggaatttcttttgtgatctctcaatttgtgtggtagtaaagtgctcacagagtcacaacttagaaaacttgatttcttttctccattttattgtgagtttgaatgaccaacttaagtatttaatttctattatttataatgaagcacttttcaattcaggctgaatctcagaaaaaatgaatataaaaatgtaa

SEQ ID NO: 44285 - DNA, 1021 bp, Homo sapiens
atgttcttttatttgatagaaagcaccatattcatccattcatatgtcctgagcacctattcatccaactacttatgtatctgtccatccacccacctcccatccacctagccatctagccttcattcgcgttttatctgatactttctatttgtcaaaactctgtgtattttatttttacacttttaaaattgaatactatactgctttgtaagtacttatggagctttgtaagtacttatggaaaatgaaagaatgattcacggcaactatggagatgttctagtagagagtatgtacatatttgtttgtggttgtataataatatagtttgaagcattaataggtttggaaaggtggtatagatagtcatttcagctttgcttatcttagactgattttatatttcagaaagtctttttgtgacctttttgtactgctctagttttaaaataaactgcattgtcagtaaagcagagttagatttctttcgtgaaagtaaaattgatagacacttgaacatttctttagaaagttactgtatcaaagaaaattttaaaaggtttttaaaagattttacccattttactgaaaaaagtttctcttcttttgaattgattcttaatttatttcacatatgaagcatcttgtaaaggttttatttagggcagtaaggaaccattttagtatttttaatcattcaatttttatatagaatttttttccagtccttattactttaaaaaattacaattgaaaccccctatttctcttgacatttttggtattcatttttctactgctttagtctttatcatctatatgtgaaacagaaaatatattttttagacaaagaagacagagtgacttatttggaaaataagattctaattactctatcattttctgtaagggtgaaatacaatataagggaacaataaagaaaatcactctcctagaatattgcaaattctaaaaaaaggaacataaagattcaaatgcactcaatctgctgacagga

SEQ ID NO: 44286 - DNA, 1031 bp, Homo sapiens
atggaggccacttgaactctaggaaattgtttcttcttttgtgatcttcaattatttctaccacatttttgtggccctaaccaccctcttttttgttttaatatgcattatggacctatccacccaaatattagacttaaaaaattatataattgaagataaagttggctggaaaaaacctgtgtgatcttgcattctgcacatgcatattttttggctgcctatgttgggcgggtgttagggtaccatgatccttgcttatagagtttatagattaataaaaggaatgtgtaaaatactttattatgtatgagaaaactgagaccaagcaaactgacttgctcatgagcgtacaacaatttctctttacactgactagtgaaatactgggaaagtccgaagttcattaatgatgggtattattgtaccacaggttgcattttctctcttaatttatctggattttgttatctaacaaaagatctataaatcctgggcatatgccacggaggtactgcaagtatgatacctattactgagatggagaccttttgtggtcaagataaaaaagggcacagtgtatttaacttttttgtgagacagagtctcactcttttgcctaggctggagtgcagtggcgtgatcttggctcactgcaatctctgtctcctaggttcaagcgattctcatgcctcagcctcccgagtagctggccctacaggcactcaccaccacgtctgactaatttttgtatttttagtagaaatggggttttgccatgttgtccaggctggtctcgaactgctgacctcaagtgatccacctcccttgggcttccaaagttatgggattacagatgtcagccaccatgcccagcctatatttaactttaatagtgtcttttgtctatttctctccctgggtaaaagagaaaacaataaaaatattcatgaactggtataggttcttattttgtgcacccagcatccaagacaatatttgagtgtactacttagatctcctaaaaaggc

SEQ ID NO: 44287 - DNA, 1001 bp, Homo sapiens
tatattaattttgtatcctgaaactttactgaattcatttatcaaatctaaggtttttttggtggaatctttagggttctctagatactagatcttatcatcagtgaagaggcatccaatttggatgcctttgaatattttctcttgcctgattgctctagtgagaacttccagtatgatattgagtaagagtggtgaaagtgggaattcttgtccttttccagttctcagaggaaatgctttcaacttttccatattaagtaaaatgttggctgtgggtttgtcatatatggcctttattatgttgaagtatgttccttctatacctagtttgttgaggatttttatcacgaagccatgctgaattttactgaaggcattttctgcatctgttgagatgatcatatgggttttgtccttaattctgtttatgcaatgtatcacatttattaatttgtgtcttttgaaccatccttgcttccctaggataaatcccacctgatcatggtgttccagctaatcttgcttcactgacaccatttgtttaaggaaaactctctctaactgtgtttttcctctactctaacaccacaacaatcatcaacacagaagactgctgtgaccatatgtgtggggttttttttcccccacactccaagcagcagacaccagctgggtgtcctctaattcagtcctgacactacctacctggagatagtgtcagatcccacaggtttagggcatagttcccaagactgcacctttccctattcctcctctaccagtctcaagtctaggtctctggaacttctgatgaactggcttcaagttgcagttcccatgaccccctctttgggttcaattaatttactggagtggtttaccaaatatgaatttctgagtactaactttttgttttccaaagaatacaattttttttttaaatctgaggaaagtttggaaaaagtataaatatcttaaaatagaaattaggaaaggtt

SEQ ID NO: 44288 - DNA, 1070 bp, Homo sapiens
ggaaacagtgggtgtgggactcctgaatataatagtaatttaaactcagaggtttttcataaaaatcttctttttttaataaaaaagagatgacagtttataaaaaaatgtagttctataattttagatgtttaagaacataaaaatggattacattaatgatatatagatttacagtattctttgagactgtcagcatgttattttaaaaataattgatatgtgtctaatagtaaacaatttagtatttttggtgaaaaatactttaaaaatttactgctattataattcattcatattggcctttaataggtaactccgttgagttggtttctgcctcagaaatattttgctgttatagatttcatggaatagcaaagagcaaataatttgtacatgcttgtgtaacataatgttaaagaatatttaggaattgaaaatgttgaggaacagcttttcctggcatgcatgcctagagagggtttgcatcaccactagggaggacacagaactgttaagatctctggcgttttattacatgtctgataattatttgttcacagccagacctaccatattcagttctgcaggttgtgcactgcataactgtaatgatattcacatgtgtaaaacctacacatttgtatgtagtgactctgggttttgaacaagataaaaaaatttcttaaggagtttacattccagtgggccagacagataatcaataaataagataggaatatatcagataaaaatagataccatacattgtaaggtgaaagcggccagatggctggtttagaagaaatagtaaaatgaaaagaactggtaatttaaaaaataaaatcttttataaatggtataattaaaattattttacatatatttctagacgttatcgtttttgcgttttgttgctaaagatagtctgacacagttatttgttttcactttgggtttttaaaaactgtgatagcagtgggatgcattaatttattttttttgagatgtagtttcgctcttgttgcccagtctgtggggcaatgggcgtgatctcggctcagtgcaac

SEQ ID NO: 44289 - DNA, 1049 bp, Homo sapiens
catgtatcactgaataatgtaatgtctccaatagatattatgctgaaggacagtaggaagggacagaccttcctactgtaattagaggggcatatctactccaatttgaagaccactgcattatgccatatagtttctgttcttgcttatcatttttgctctcttacttctttgttttaggtatattcattatcatcagggttaacagtgtcctgttgtttattttctgagtgtaggaagtatataaattttgtctgtatggctggatttgatggttaaatacttgataaagatgtagcagtagaagcgatgaggaaaatgaagagaaggagaatgaagaaaagtaaaaaataatttaaaaaaattcaacacttatttgcaggcacttaacaatgctagacgctgttataatcactataaatattaaatctttatttagtcctatttgtacccctagaggcacttactgttattatccccattttatagataagaaaattatggcactgagaggttaagaaacttgtccaagcttgtaagtggtggaagcagaatttgaaccaagcagtcttactctagaaagagccttagccactgtgccatctttcttgttatgtgcatgtgtgtgcatatacatatacatctatgtgaacatattcaccaatgcattagctgagctagaccataaatatatgtatcagcggatacatgaatatgcacaatattttaaaccctcagaaaaaggacaatgtaattaatgaagaaaaacatgaaggatatgagaatggggaaaatagaaaaaaagtaacaaccttatttctctcaagtgacaaagtgattttttaaaaatagaaacacaacatttaaagatactttcatagcaagcctatacttttaatattttgtgatatttgcagagaaataattttaaaatctatttaaacatttttcaccttttgaaattatataccctgtgaagatgcacatactgtatgctttacagttcagttttcacatataataatgccacctaaacttttccttccttc

SEQ ID NO: 44290 - DNA, 1037 bp, Homo sapiens
tcttctattggtagcatgtatctttacatgtgcttaatcagtttaaagcaagttaccgatatcaaacaatgctccaatgataccgatatgaaacaatgctccaatttacaatgaatactttaaaaatgacacttaaatttgttaaatagcttcacaaatgcgtctctcaatctgtttctaacgggcttttgtgaaggtttttgaagggccgtgctgatcagtggaaaatcagaagagggaatctgctgtcatagtggggagaaggcatcaaggaaaatgtacacagcaaataattaaggtggtaaatgtatacaagaggtattcaaggcaggaaactgcgaagacactgcctaaataagagtgaagaagcaagctatacagtgggatgccataaaaatgaggtcagctacgaacagaagtattatctgggtttcaatgaaggctgcagtgtgcacagattacttccagttgtagcaatggacacttatctatgataatgacacgaagattagaaaaatcacatgcaattagaatcggaacaacatgtagtttaggtagtgctacctcaggtggggagtttgatactggtaaagtaatagtttatttattcagtagagctcctactatgtgtcagacactgttctaggtatttgagattggccagtgaacaaaatgatgtagatccctgcccttttgaagcttactttctagcaacaagtgacataataggtatagtaaatatgtacatttttttgttaggagataagtactatagaaaagagtactgtaaagaggatcaggagtgttggaggagattatagtagattgctgtattaaatagagtaataatttgcttttgaattggagagctatagcaacctgctccttagttttatttcctctaccttgcgacttcagagaattggaagttggacctccccacagagatttagtggcagaggaacaggaagtcaacggatgtgtatttttcaagattgtaataaaatttggatagttcactcatgatcttctctttg

SEQ ID NO: 44291 - DNA, 1026 bp, Homo sapiens
aatggttttgaatttctcatttatatctttgggtcagtaaattgaatttaatccagattatatttttgggtaaagagaaacttaaaaaaaagctttaaaactaagggatctacaaacacttattgattatatactttataaaagcccatctaattaaaataaattatctcaataattcttaataatgaaactataaaaattataagaagaatcttaggaatattttttagtaattttttttgaaatgatacacaggaaatattaatgaaattagctatatttgagtgggtctttgtatttaattccttttatacttcctttagtgagttgagaatgaatagtttcccattttttaatggggttaatcgcttaaatatggagaaatggaaaattaaatgtatttgatggagagcagaatcaaagctatgatcacaaaatatatactttttcaaaattaaaataaaaaattttaactttatttttacccatgaattttgactgagaataagttgtcacttgatgagccacgtgtggtggcctgcacctgtggtcccagctattctggaggcagagatggaggattacttgagaccttcaagttgaggcttcagttagttgcgatcgcatcactgcactccagcctagctgacaaagcaagaccccatctctaataaaaaacaaaaaccaaaaaccctcaaaaagtccaaagttttttatatggtttcaattcactgttagaaagttgtctcacaatgctttgatgatgtattaaatatatgaatgcatgaagttcttactgagcatgcagatacagttatttaagtgttatgtgtatcagctgggtgaggtatatttttgagacgtaaccctttacatttgaaagtctggtatttaatttggctaaacttcccaaaccatagggaaatactcattgatccattaacttattcagcaaatatttattgagtgcttattataaggcaatcattttataaatgcattttattttagggatctttctcttgc

SEQ ID NO: 44292 - DNA, 1050 bp, Homo sapiens
aaaaggatatgttttaagggaaaagctatattttactataagaaattatcgatgatatataatagtaacagaaacttttgcctgtcatttaggttgctgtgacagagggaaaggacatgataaatggcacttgaaacttttgactagaagtatcacataccacttttgcttgtatttcattgctcaaagcagtgacatgtttactcttaaagggggagtaagtaaatatagtataatgatataataaagatataaaggaatgtttgtttatcatttgtaagtactttcatagatctgattggttgattgattagtttatttaaataaaatttattgaatgcttactgtttatcattgttgtattactagtgcctatcatatgcacaagggacaagattcctgcactcatggagctaacgttgtgataatattgttttggaaataagcttgtcagtatttatcaagaaccttaacaattcttttatcttttttccccattaatttcacttctggactgctacactaaggagatattattaaatatgaaaatatgtataatgataagataacagttttctttgtaatattgaaaaatcagaaacagatgtctagtaggaaaatagagggaactctattatatttactcatagaatattgtgaactcatcagtttgtattagaaacatttgctacattttttagtggctattttcaataacattttagcatcctgtggtgacataaagcagataacatagttcattctgggtgtaaggactagcaaatggtgaagattttagattgttaggattacataggataattatatgtccccaagtattgagtttatatacaaggagattaggaggatgtagagaaactagaagttttgaattctaatagtgtatccagtcattcaaggagacatatcctgaaggaaactggaaatacagaatcagagactggttaaaaataaaggctaaaaatgttctttggggattcatcagtatggaaatgttagttgatcttgtggaagcagatgagctgtgaa

SEQ ID NO: 44293 - DNA, 1030 bp, Homo sapiens
atgttgcttaatcaaataatcttcattcatttttatcagcactattttgcattttttttcttttttctttcttttttttcttttagtagagacttggtttcgccatgttggccaggctggtcttgaaatcctggcctcaagtgatccacccacctcagcctcccaaagtgctgggattacaggcatgagccactgcactcagcatagcactatttttggagcagtatttctacaaaggaaataactaccatgactacaacagttattagcttattaagatgtctcataaaattaagttttaaagtttcaagtgatgtttacttttcaatttcacatggaaagttagcatgaaaagactaattttttaaataattgtgtcttttcttaatgaaaagcataaatacatttatagttgttggagtatattgaagaaattacagctaaatattttggttggttacaattattggtgattctggaactgtggtttacctacaacataatggttgagtgtctttgaagattttattgggcaaagcaggattttaaatcttgccagaatttgaaatacagtatatcatcatatactatagctatattttgaatataacttttaattttgtatgaatattacattaatgagcaacatgatgccttagtaagttaccactatcaaatggcagataataatggttgagagtagtttctctgaacttttccagatatgttttcttagaacttttttttaaagagatgtgtacttgaaaggaggatattctctttaaaattcatgtggaattggttgaaataaattcagagtatatatatacatgcccaaagtaaaacacaacaaaactgaatcgtgagttgacatacgttaacaatattagttaaattacaagttgactggtgaacaaaggatactcttatggagattatgattttaagatttttttacaagtcattttattgaatgtggtacagaataagatcgtatataacagttaaattttcactgacatttcaagag

SEQ ID NO: 44294 - DNA, 1047 bp, Homo sapiens
tattgaaaattgcaaacataaatgttggcaggtagacgttttacagaaggatgagatcaaaatcctttcctatttatttaaaattactcaaaataagatagtggtagaaatctttgtttctttgttccttgtaatttattctgggagtagagtttttaatattctaatggttaattttgttctggttatctccatatctcttgtcaacttaagatgtgtttcccactggtaaacacagtgtccgctggttcttgctaaataaagataccatagtctatattctgcttcatattttaggtcttggaaaagtggaagaaatctctaaactaaacttaaacataaccttatttgatccaaggtcagtagatacctttcatttttcttttccttttagaaaaaaaaaaggcactgttttggtgagtagaggtggcaaggctgggaaatgtgtcggtagctgataagaaagggaaaggccttaaaacgacacccaccaaattttatcagtgccttggagctcaggaaagtatttctttccaagaagagaacaggaatgccttttaaaaaaattgtttatttccattaaggagaaacctcaagggcccatgaaaggttattcctttgcataatctagtgacaggtttactcatactcagaggttacattaatacttactgatggcacaagtataagtttcactttattaaaaattgtatggatgttggaactgctgttgaagaagctggcttggtttgatttagctatggatatgataattataatatggctttctgtacttttagaagtcataagttatattgcaaggatttgtgtatttggattgctagaaagttaccgtatagtattatgacagtacagtaggaaacatttcagtgtgaagaatagtatgtctcacataaattttaccatagaattaagtaagaatcattaaaatattccgggtttattaaaaattcattattctactagatgatctttaaagagcaataagaacttgaagaaataataggaaagctttggtaacaatga

SEQ ID NO: 44295 - DNA, 1048 bp, Homo sapiens
actagtgcttatgtttataaatgttttcatttttactctgaaataatctagtctctgagaatgctgtttcttatatttaaaaaaatgagtaagtacaagacggcatttgcaaaggacctcccaaatacacgttaaatattatatgtaaggagtcagatttagctatcgaggagaagcattttgaatgtaagtttacataataattacaacaaaattaattaggatattagagtagtgaacagtttaggtttcaagcaggaaatagaacacaaggcaaatcaaccgtcatataagggtgtcaacttatcttaaatacttttggaattaataagatatagaggcatacataaagataggccacagatcagtcagtggctgatttctatttctggctgtaaatggactagtttatttcaaactaaggcctacactgtgaataatgaaaaaaactggattagaaaaatatatatatctaaaggcattggagcactaccaagagctaaagatctaagaatgaaaggaaacacactgaagtgagccctgtatttggtgtcatttttcaccttgggttctgtcaatttgcaagcaacacaggccaagctgagaaaccaagcagcaatagctaagatggtgacaggatgagcagaacttttggcagtttcacagtgcctgcaagctaaaattcaggaaggaggaagaaggaccctggtaaaacactctaagcttttcattggaattcttgtggggctatatcctaggagttaggaagaactataaataggccactacttacaaaaatcaaaatgtattctttgataaacccaatcttgattttaaggtggtctgcctttacttcaactgtctgtcattgctggaagcaagagacatcatgcagagtttctataatttttttatacgcaacacttggcatttaataaaaaattataccatgcatattagaagccaggaccaagaaaaacaatataaaacaagaaaggatagaaacagtctcacagtaatctagatattggaatgattagacatggac

SEQ ID NO: 44296 - DNA, 1034 bp, Homo sapiens
ccataatcacaccactgtactccagcctgggtgacagaacaaggccctgtctcccccaacctaaataaataaaaaattaaaaaaaaacaagcaaaaaagcaggataaaaagggggggggggtatgacagtttgtttagcctacaatggagaagtaagagtacagttgttgagtgaactgcatgaatttgggcccatacttgtccgttttggattttatgataaagtgagaatcaactatgattttttattattagaggtctcatctttaacatggtctgattgtctggttgtttaaattgacttgcaacagtgattgttccaagccctcagttaaggaagtagagcagcacagtaccttatttcacctttctgtagcattctattccatagtggtttaaaattcacttattgaataaataagagtatatttgatatttgaatcagtttcaactctgttcactgaagtgctggttaaactcaagattgcagtcagtggtctttgtaaaattcttctctgaccagcattctgctgcttaaaatggttctgtggcttctagttgcccttagattaagaaaaacttacttaaattggcctaaaagacctatcctacctggctctgcttgcctcttcagctttttctctttttcactacaacattagcattctgtaccccaatgagactaatttatagacaataagttctcgttacctgggcctttgtttcatttttaaaatttggatcatatcttctcattttttcagatacaatttaaatgtttagtggcctctataaattttccttgctgtgtgctactatatcacaaaattcactggatttacttatttgtaaatataatgcagtaggctctcactaaataatttttgaatcaaggtgatcttgagtgattagggagagagcagagacatcaacttgaattgacctttgaaggaagggaagaacattcaaaataaggaatatagtttgaacaaagacatagtggaagtacttttgttcctaaatttgagaattaa

SEQ ID NO: 44297 - DNA, 1030 bp, Homo sapiens
ccaaaagcataaattatgttgccacatttttggatagtgtcagagacacattatttcctgtttgtaggaagaaaatgctagattctaaagcacttatgaccagtctctgtatgggttaagccacgagggcaaggtagaattagatggaaagattcttgggaagagaatagaaataggcttgtaaagttaaattcctgagggaggtgttgtattgaatacaattctagtttcaatcaaaatgtccctatagtttaaaatacttagagaaaaatggtaagtgacatgataatgaattaaaattataaaaaaaactatacacttctgagtttgagaatggttgatggtgattacttcgagataaaggtgtaattgtcatctcctgttagtaccattgacatgcttattatattgtaatatcaactttttgtatttatactaatttactttcttctgttaacttcaaagtgtatcatatatctaaagacagaacggtggaatatcctatgacaaaagatgtaagaatgactgttaaaccactaacccctaaagtagacatggggaatcaaaaaggaattgtcaccagcaaataagaaatagtacagacaattcctgttaggtgttacctgatttatgatattgagaatggggagaagaaaattttaaaagcattctagagaagcatgcagtcaaacaaactttattttttgaatgtatttgtttggaagaactttttttttgtagcaagcacatagaaggtcattttagaggattgaattgggtgacaagatagataatattctctccctgatagataatattctctccctgaaactggtttctcactacccaggctaaacgtggggaaattcaatggtcataacatctcatgaattctttctggacatttaatgtcatctgttgaaagcaggatgggccaggtgcagtggctcacacctgtaatcccagcactttgtgaggctgaggcaggaggatcacttgagtctgggagtttgagaccagtgtgaacaac

SEQ ID NO: 44298 - DNA, 1066 bp, Homo sapiens
cacacacctctaacagtcatacctaacatacctaacatactatttgttactaaacatattgtatgtttttggtaatacatagtacgttaggtataactttcagaatctcattgaactcttgcccagtttggtaatacatagtatgttcttgacttcttagattaagaatacccagaatataaaagtgtacaactttctttcaggcaataaatcataaaaatttaatatttgtacttttttccaagttattctgagacataggtctttgtcacacacacttttatatatctttcctttgaaaaatgtagcatttacagtcaacttttgaaaaatcatcttgcttgtcgctgggggacacattgcaaacagattatcaagttctagttacggaattgtatacagcaaagacttttttttaaagaagggaaatgtttgtaatgtcatcatgttttgtattttaggataatttcatttcatatgattttcccattatgtaaaccaataaacaaatttgtatcaactcaggattcttttctccttgttgctgcagattttctcctgcagatttatctgctgacttccctctttagcagttctttgcttccttagccccactacctgtcttctccatctcatttgtacctgactccttccctgtctttggactcagtatactgatgaccattagaggataagcaggctacagtgggcagagcagatgttatgaggagcaatgtgtgtgtaaataagagctgtgcagaaggttagcattgacagccaaggatgctttctactaaatagttaacagaggacctgtgaagtaataattgataggagaagattaagattgccgcagatattttgccttatttaaaatagacttttttttagggtcttttggttcacagtaaaattgaatggaaggtacagagatatcccatttactccctgccctcacacatgcatagcctctcctgcatgatcaacatcccccaccagaatggtacgtttgctacaattgatgaaactacatggacacatcattatcccccaaagttcattgttt

SEQ ID NO: 44299 - DNA, 1045 bp, Homo sapiens
atattttaccatcacgagcattttgatgatatattttactacatttgtgtaatgctacaaggttgaagacctaaagccaaaatgcagaaccttaaagaaatagcagttgagcatttcctgtctgatatattctaattgtttaaaattacacagatgcttattgtaattaagatttaagtgtgtagtctcagtgtcagtaatattttagtattaaaattctctaaatgtgttaagtgtttattttcatgatatgcacattaaaaatagccattttccagaaaatagtaacaactccacagagcacaatggagcaccacaaatggacttattttggagattcccattatattcgttaagaatgcagggacatatactgtgtctctgtactgtaggaagcttgacatactagtatcagtcatataatcgtgtaggaatgatcatccttacagtattataccttattttagttgagaagaaagtggtattgtttaatgacaaattgaacctaaagcctaaagactgggttccagatctgttttctctactcattcctatatgataattggtaaattaacctctctgagcctcatatgtaaaattgggttctctgttgttttgtaacatgaaaaccttagtggctgaaaacaacaatgattgtttgttatctcatggttgctgtgggtcagcaatttgagggtccttgcttggttctctggaggttgctgtcagatatcagcaggagtggaagttttataggagcatcactggagctaaaagattcacttccaaggtggcttactcacttggctggccagttggtgttggcaggttggttcctttccacaatgggcttgccgtgggactattctcatgagatggcagatgactttcccgagattcaagctgccaaagtagaaactgcagtgccctttatgacttacctgtggaagtcatacaccatcatttcagatgtattcaattggttctacagaccagccctgattcagtatgggagtggattacacaaggacatgaggcaaggatc

SEQ ID NO: 44300 - DNA, 1057 bp, Homo sapiens
aagatacaggccaagggcaaggagatccagttcctagtggaggcagatatctgagacagccttaggacagcatcacagactgtggttgagaagttgatacaaagccctctatgtatcttcaagatagaaggtagttcaaaccagtggcctctgtcaagggtaccttttccaggaggatggaaattccaagggaattcaggcttatgaaggtcttaggcacagagcttcccatctcttccttatcaccatattggtctgcagagggtaggcaggaccctgttcagagggcctttgacagagggtactggtgcttacattctaactactatagcagagctccactaattacatgtgacaaagtcgaagatcaaaacaccaaagtcatgttaaagaaatacattgtctctgggagctaggaagcccacaggtggatctggcttcaggcatgatcattttcaagaggacacgcatcagggctggttgtttcccagctctcctttgttctgtgtgttgactttaacctctgtgtactcttaggctttctccactctgtgggaaaatggcttccatcagcttcaagcctatttcttcttttcaaagtcccttttagaatgtcgctcagagccacagattgttcctgctgggtgatgtgcctatcatgaaccggtccctggggccagggatgaagctgggttttgtttgtttgtttgtttgtttgtttagagaagtccttatgtttctcagctgtacttcattttgggcttccgtgatcctcctgcctcagcctcccaagtagctgggactaccaggagtgccactgtacccagctgaagctggttatttgacaaggcccaggtgatatgcctactcttgaggctggggcagtagagtgaggactccccaaccccatcccaaccacatggaatgatggattaatatgggacaaatgacacatgtgattgcactctcccatcagaaagataaaaaaaatccctcttcctttccacccctcaagttcctaaatggctttcttgcatttactctcagacaactttaa

SEQ ID NO: 44301 - DNA, 1053 bp, Homo sapiens
tgagttgcttttctctttaacgttctcaggttaaggaagttctggtgttttagagtgcacttcagaggggtgtaaactgaagataatttattacccatttagaaaaagaagtgagaataaaagcatttttttagtcttcttcgtttctgtatgacccagagtggaggagaagacagggagcattctccgactgttttccctttctggtttttggatctcggcaccatgttaaacgtgctgcccatggttgaaggcatggtgctgcaagccatggaactggatgaactaagtggtgggactaaccacgcttacccacgcaaccttagcttgtccaccttgtatgattccccctttcacttcctaaatttgtgatttgcctggctttctaaaaaatggatcttggagagcctgtgttgcctttgggcaaggcttctttaacagaggaaacgtgctagattgcctgctattatggcccatgctaaagcacttacctttaaaaaaaaatggttctagttaacttccgaacttaaaatccccttactaattaagtaacattttaataggaaacactataggtgccttagaagaacgtagaaaccaaatggccatcttttttgctgatgggaaaatattgagactaacatttgactacagaagatatcttactcccaactgctgaaggcagaactttcctcatcacagaagtagcagtagaaaaacttaaaaaggaaaagttgcaaagctgcaatgtactgcagagaactagcaatgtgtcctgtattagtgagaaacaattaagttatgtttgttgaaaccttgagagagaggaaaggactgcatgactttggtgatgtaaagggactttcagatgggcacaggtctgagggttgtgtttggagctgtatgtctggctagataatcaaagcactttgagcacttgaactcacactgacactcaagccaaggtaaaatcagcccgcctcctgtgatagagggacactctctgatggtgtaaggtctctggggagcacccattcccaagaatgggggacc

SEQ ID NO: 44302 - DNA, 1095 bp, Homo sapiens
taaaaaatttaaaaaattaattaaaatttaagtttaagaaatagagcaaaaaaattacattatggataaaatatacattagtaattggacatctaggcctcctaacagagttgaatgtggttggagttcctaaacagcataagtgaataaatgacattgtagagtagatgttgggattgacaataatcatcataaatgcccaagggattatatgtcatgattataagttattgcaatgggcataagtcagatatgacaaaatcataaatctggattcaaacaggttgttcccctatgtatattgactgtaaaggcttaagatgaaagtctattccttattgcataatatttcttgttactactaaatttgcaaataatatgtcatttttcccacttcagcatatttcactattcacaggattgtgtgttgaagtaaatgtcttaggaaaattaatctagtagctgtaatggagacaatgtgaatatgatatggaaaaactaagagatggaaaagagatgaatggatttctactaactagatttgcatttttaagtcaaggcatagttaagagaaaggtaaaaaagtatgaaccttagttatcaactgatgaattcaagtatacttactgatattgtaattataaccaaaaacctcaggtgtattttctctatacaatcaaatagtctgagcagaaggaagatgagtcactgagtacagacttctagaaccagggatacctgggttcacatcccagtctcacaattctcaagctgtggaacctggggtaaatttctgaaccttaagagataattatcttttctttaaagtgaaattgattgtgtctacccaacaaggcccaaacaaggaatgaactcaatagcatagtcaaagtatggtaatttacacatagtgccattccataaatcatagtgttgtcatatgtcttttttattttattgaggtataattgacataaaataaatgacacctgtttgaaatgtacaattttagttttgacatatgtgtattcctatgaaacatcaccacaatcaggatagcaaatacattcatcactttcaaaagcttccttgtgc

SEQ ID NO: 44303 - DNA, 1062 bp, Homo sapiens
gtgtttctgagctctttccctgccgtgtactcagaactgttgaagctctttgatgtccgggaagtagccaacttggtccaggacaccctgggcagtctgccgaccatcctgcatgtggatgattccctgcaggccatcaaactgcagtgcattggcaaaaccgtggaaagccagctttataccaacccaggtagggtgagtctcttggaggaaattgtgcctctgaaaagccattttgtatattttgtagccattggtcagcagatgcaattaaaaacaaaacactaaaaggcattttctcaaaaccattgtttatttggatggtaaatgtatttagtagtcaaatacaaaagtatggcaattaaaactttatttctggaaagaatgaaaactaatgattacattattgttttttatgtttaatgggatttaacactccttcagagatgcttacaggtacctgataggatccttatttttctcttttgtttttaaaagtttttcatcaatttatgttctgaagctatatgaaactttgcattattgttgttttttactttaccccaagagcaagtggtcagtgactcaaattaattttgttataataactgttagtaagttccattgcctcttgttttcttctgtttttttttcccgaataaataacagagtgagtactaaccttatcttaaagcttattttaagaaattttaatcagcctcccaagtaaaaaagttcttaaaatagattccattaataattattttccctgacaggcacggtggctcacacctgtaatcccagcactttgggaggccaaggcggccagatcacttgaggtcaggagttcaagaccagcctggccaacatggtgaaaccccatctctaccaaaatacaaaaaaattacccgagtgtgttgagaggtgcctgtaatcccatctactcgggaggctgaggcgggagagttgcttgaacctggaagacagaggttgcagtgagctgagatggcgccactgcactccagcctgggcaacagagcaagactctgtctcaaaaaaaaa

SEQ ID NO: 44304 - DNA, 1096 bp, Homo sapiens
ggcttccaaatatttatctgtgtgttcatatatttattcaaaaacatcagttattcatgaaacaaatatttgttgaacacccactatatgccaagcattttactgggtactggagacacatcagtgagcacaagaaaatagccccgctcacagagctttcattccagagaggaaagacagataatagctgagaaactaagtacatagtacatcagatagcaagtgatgaagtgcagtgaagacttaaattgcagctagggagtagaaagtgatggtactgtgttgctattttacacagggcagtcaggaaagacttcgcttataaggacatgtgttggcaacaaactaaaagaagtgaaggcctgagccattgagactattctgtctggggaaagaagattccaggcagagaggacagtacaaaaggcttgaggttgaaatatgcttggccttttcaaggaatagcaaggagaccaggaaggtagcagaggtgccagatcttgtatagtcttttatttcatgatgaggactgtgcattttatttgaattgagaagaaccacgagaggatttggagtgaagatacgtctggctactgtatgggataatagattataggtaatatggttgggaacagaaagaccatttgggaagctttttttagtcttccaagtaagagatttaaagtgttctgcattacgatggtaatggttcagttcttttttacagaatattaacagattggatctgaaagaaggagaaaagtccagggtaacccaaagatgtcggcctgagaatgaagtgatcatttaattaagtggggaagacaacagggagaatctgtttggggaacaaaaatcgaacattgcattttagacatgttaaatcagagatatctgttagacactcaagatgtcaagtgggcagttgagtaatgtccagtttggaaacttgggaatgagaacatacagttcagtggttggtctactgagccagcactggggggtggggaggatccctgaactgtagcatttgctgatttccatggtgtagatactcccactatgtccaatttcaagcttccaacatgacatcact

SEQ ID NO: 44305 - DNA, 1034 bp, Homo sapiens
cataggacttactttgtaataaggaaaattataataaatatgtaagtaaaacatgtatgttcaaagatgatgaatgctcaggtgaaaaccagtgtaggtaaagggctagggaatgtcttagagggtagtgggtggagagatggagatttgtggtaggtaagaaatttaggtgagaaggcagtagagtagagacctaaaagacatgaggaagccgtgcagataagaggattccaggcatagcaacaataagggcagtggtcctgcagccatagaatcgtggcttgtttgaggaactgcaagaaggctaacttggtcaaaatacagtactggggatgggaatggagattcgaagagggaagtcatgtggaccttgtaggtcacactcagcactttgggtcttattcagaatgagaaaggaaacagctagagggtttggaacagaggtgtgacactgctttacattgccacaggatcactgtggttgctgtatagagattatacctggagggaatatgggagggcagcagagaaacagggagaccggtttggaggctgtttgaactaatccaggtaagtggtgatcatggtgttgagcaaggtgttagcagtggagatggcgagagtaagacctgtttatactttgagggggattacagtccacaggcagagacacgctgtaacccgaaaggagttggagaatgcagcatggagagcacagaggagttgtagaatcttattgaaggagtctcgttaaaatttcctgaggaggtaacacctgagcagggtcttcaatgctaatgattctaggcccacatcccccgagtctttgttctccactgcactaatagcaagtacctgctttaatagtgaaagactgtgtagtcatagccaacatggctgtacctctgatgtttcttttgtttctttgtttgtttgtgttttcttttttagagatggggtctcactctgttgtccaggttggtgtgcagtggcacagtcattgctcactgcagtctcaaactcctgggctcaag

SEQ ID NO: 44306 - DNA, 1054 bp, Homo sapiens
gggaagcaagagcacaagaaattgaagagggaaattagggtgcctaatgtttaaactgtcacaacagttagataatgttgacttccgctgttttctctctggaccacagaattgtttgttaaatggaagcagtgcagtcaaacgttttcaaaagaattgagttcactctaaaaagtactgtttttccccactttctcctgctattcctcagtcactggcactaaaaaaagagaaaaaaacgcaactttgaaattggtttcggaaacaaattctaccagctaatttccaggccctttatgcttcattgatgtcctcctagctattggagttgtaatcttgtctggttaatagataaagggattcaccaattaactgggcttttttcccctctaacctaagacttatgttgcaaaggtacattaaccactatcttagttgagtttagaaactgggagaaaattgcaagcaatccatttaactttttaagatgttttaaaaattgaattactatatcttcacagttagatatagttaggttgagtagtttgaaatctccaaagttgtgctgttttatgaattttaaatccaaaggcaatgttgtgagaatttgaaattctaaaagtattcattaatgtgagcctggtttaggtttgttgagcaaatggttattataaatttcacctctgatagacagcagttgaattataggaatgtgacattagactgagccaatatgatttactgaggcaaattaagttctacgtcttgaaacggtgtgtaaaaatcattggctatggttcagtatgtcccaagagaaacttcaaagtcttttcatattatctgtgtatttatgaaatattttctatggtttgcacatgtagcttacacctagaagaaatcatatttgctattcaggtaagtttctagagtctttgttgtatcttagatgagtgtacatggttgtattcctgccagctatactttttaactccataaggagaccacaatatatagcgagagcagtttaactctattcaggaaatatatggtgttt

SEQ ID NO: 44307 - DNA, 1049 bp, Homo sapiens
ttcatctgttattaggttgtttgaatatataattgtccaaactctgaggtcatacccaattgcctctggaatgttggtgaagttctcaatggtaggctttgatttatatctctagatagactctaacataagtgatcctgtatccttaaggcctgcgttaaaggtcaggattccagttaaaccaaaccacacatttccctctgcttacagacaggagtcatctcttagagagtatagtgtagtatttaagagctttttctctgcaagcaggatgtcctaggtttgaatcctctaagggatattgggaagattaaaagaaaaaatgtatgcaaagcacttaccacaggacatcatacatggtgtgtgtttaatgttagctattattattgtttacccactttaaagccactagctgaaatattctatccttacctcttaagttgtctgttttcattgtctcgaaatggatcctgatttaatctccttaatgaagacttttagaataacacaattggattattgatatgttggatcattgaaccgaccccttctatactttgtttccttcatctcctctccattgatttgattgctaatatctcttcctggtttcttttaacttaattgttggccttctgattaacttcaggaaggaagggaagcacattctgtttccttgggcagttcctcccatgtttagatgtgtccacatgttccatgtgctttgtcaattttactagctccttattcttactggaatcctgagtgaaaccctaccagatagtgagatccaaaccacccttttccatgagtcataccttttctgtttacagcctttgtactgaaatgaaaagctacgtgttgtagcctttgcaaagaatgaaagaaaccattgtaccataaagccttgtaaaaaggtttccccttcctctggcaggatccattcccattttgcagcctgctgtgatgctcagattcctaggcaaccaaatgtatgcactttatacctggcttctgctacaaagccctgtctgctccgctgtccttgt

SEQ ID NO: 44308 - DNA, 1054 bp, Homo sapiens
gttggctaaaaaagaaagtgatgctgattgcagtggcatgtgaagaaaaatgtgtgtgtgcttgttcagagaggaactgaaatatataccactataagtcgtatgaggtacatagtattgtactagtaacatatagtatatactacattatatagcatatatagattgcatagcataaataatgacatctttaggtttggtcagtagacaaaaacttggtgaatattgtttgttcttatccaccattcagacccacattgaagcaaaacaaagtatgcagtcatgtgctttaatcgatataaagaaacttcaaataaagtaagctgtttcttgaactgaatgtgttgttttttaagactgatttttaaaaacaccttgaatatagatatttttgttgcagtccagatcacctggcaattaggagaaccagaatttaaattcaaaccgcctttcttttttcagagccttgcacatcttgctagaccaaactgaccgcaaagagaaaaccactgtagacagagctttgtcattcagttcagtgagagccataagtacctccaactcacacatgtggcaacgcttcagactataatgagtggtgaggtcagtttcctcctccctctccttagagttggagagataacttgggttttatttgatgcagatggccctttgctttggacaaagtcctgcatctaccactaaacaaacaagacacttggagcacttactattgagggcagaatctctaaaagactcacacgagacaggagaaatgaaatacaacatggaactactatgtatgcttgtcttctcttttcccacaaaacaattacaattctcggctgggtgcggtggctcacgtctgtaatcacagcactttgggaggccaaggcgggtggatcacaaggtcaggagattgagaccatcctggcaaacatggtgaaacacccgtctctactaaaaatacaaaaaattagctgggcctggtggcgcgtgcctgtaatcccagctactccggagtctgaggcaggagaatcgcttaaaccaggga

SEQ ID NO: 44309 - DNA, 1025 bp, Homo sapiens
atggggaagaaaaaaaagtcgattctcagctgtggccactctttgtgtggagtttgcacattccccacatctgcatgggttttctccaggtattcccctttctttccatatctcagtgatgtgcatgataggttcattggcgtatctacagggtctccatctgagtgagtgtgggggtatgcgagtgcaccctgtgatgggatgactgtcctggccaagggtttccctgtggaataagtggataaataatgatcttccttgtttttattaatctaccttaaatgtatgtatagctcacatttatttcagtgttgaatattagaagtattttaggtcattatttagaagtttggtgatgtttttgtgaccagaaaatatgctgcaggaacttaacctttgtttatgtcaattagtctttggtaaaattggtttcattatatattgtttgactgactgaaagtcgcagtttctaagaccttattgatgatggtaaggactgactgtatgtagaaatacatggactgtacaaatactgtttgtagaaattgaataaatttagaatacaaggcctacttttggcttcaccttgctttcttacctttatttactttgcttcctgtttcttcaatttatagtttctttttaaatgaaacaagtttattttaactttctatattaagtgtgtcttaaattactttaatccttcttggaataagtacaaagggctttgaaaataccgcctattgtattgttgctcataaacgaaccttaagatttttggaataaaacttctaaataaatgtaaaataagttaattccaaattaagtgaacaactttcacttaattaaaaggatttgggagcataggtgaataaatccaacattgcatgaaacatctttttttctccctacaagaactgaaaaatacattgttgtatttcattattttgtagttttgtttttttttgtcagtaattcctagttcagagcttggtttagaaaagaagaacattagggctttctaa

SEQ ID NO: 44310 - DNA, 1093 bp, Homo sapiens
ccatttgaggaagccttaatgtgagataactcacagtttgagaaacactggttcacttaataaccacctacctgtatacagcactcttccaaagaagcagtctttgtcctttataaccgtacatccaaagagccattttattttttaatttttaaaattttctatttacgtattttttttgagacagggtctcactttggcacccagactagagtttagtggtgccatctcggctcactgtaaccttgacctcccaggttcaagcaatcttcctgcctcagccctcaagtagcgaggactacaggtgcacgccaccatgcccggctattttaggagagacgggtgtcaccatgtcccccaggctagtctcaaactccttagttcaagtgatacacccgcctcggcctgccaaagtgctgggattacaggcatgagctgccatacctgggccaagcagcctttttatagcatactttttttcattcaggcaaagaggtgtaaaatcaaagagcctaaataaaagattaagcaggaaagtgtgctcatttatatgaaaaagctcataataagaacatttgtggagtggaacagtaaattctctctcgatcagccctggactctattttggtttctctctggctaggaagaactatccctgcaaaatgtttctgcatttgaaggtctcagaagctcccgcaggcacccacatggcctccatcagtatagcctgtcacctctcctcaaaacactagagagatgcggtatgacctgtatccctattctgggatttgggttggaatgaagacctagaagtctcagaaggacttcaatattagagaagtagaaaattcttgtggaatttagaggcagttggtcatcctggaatttgagattctaaattttaagagccctgaataccagtctctggattcatccatttcacttctgtccattgtcagttgaaattcaggagtgacacttagaattcctgacaaagagtaaagactggcctgtaggagcttccttgcttaatgaatcctgcagcgaaagtgggtctgtcaagctgtgggccaggtgcccaagtagaagttta

SEQ ID NO: 44311 - DNA, 1029 bp, Homo sapiens
tacattatgtatatatattatgtatatatatacataatattatgtattattatacataagtataatacaaaatgcttgttttagaagcttacatcctggctacagagggaaggtatatgcagttaccccaaattgtgactattttgtggaaatgtgggaagacagaattgttattgggatagggaaagcgtctggggtaggagggtcatataagtgctagatcccaacagatggataagacttggacggaacgtgacacatccttgtcagggagacaactgttagagcaaaagaaatacggaagtacgaactgtgttttgacaggaggaagtagggccgtttgtctgtagttgaggagtgtgtttagagaagtaggaaaaacataggttagaaactcaggatggaatcaaataatggaggacttatgccagaccaggttgggctatgaatgcatttgagaatgggagtggtggtgataaaggtggtggacacgcaccagggagcgatgaggatgagaagggttgagggactgctgcagagactacgtgataggggcctgaacagggatgttgagggcgggaggaagaagagatgcagatgtgagaaagattgggaagggaagaaaggcagcgccagtcaagtaatgagatggtggtagggttttgtagagtggtagagacttgaaaagatgctagaacatcattttatgagacaataacatatttctaggagggcgtatttgcagtgatgtactggtagggaggatactgaaggcatttggttacattcacaagtataaattgtgaccaactgtttggcttctgttacatccttcatagcaaccaacacagagcaggccacttggtaaatattgctggcttcagtaatgggattcatttagttggcttgtagtaacttagatgaagctgggctgaactttacctgccgtgtaaaccttaaactgtgctagtagtaaaagagaatgggcaaggaatatttaaaatacttatggaaacaaatgatttttaa

SEQ ID NO: 44312 - DNA, 1028 bp, Homo sapiens
ggggcctcgagtcctgcttaatagagctcagagtcgatgttagcccgtgaaaatatttgctcagccttcattctcaggaaaaactgatgaaatgtaaactgatgaatgccgcgataggatctttaatagaggctatagccaagtacaagtaagttgtttcgaaagataagtgtatagaaagctaaagtttgacaaattaattgttgttccctgctgaaggaacattctgttttctttcctgcagtggccactgacctctggctggggcagtgggggtgcctgcttaaggagataacccagggctgttcagatttctgtgtaacctctgactgccatgttcagagtcttgctgatttactaaatagattaagatactttccagagattgggccagcttgataggtttcctttgtcttagttgctcctccctcagagcttgcatcaaatcattctcttcagggaaaatttgccccaagaatcccatggaacctgatgtggtttgtactgtctttggattcctgtggcattttaatactgttaagatctagatatcatactgttctctggcattgtgtgagtgtacatttgccttctcaattaaattatcccaccaattcaatttgcagagtgttttcaaaagaaacatcttatcatctcatttgatattcacaaaagccctctgagagaggtaaagcaggagcctctgtttacagatgagctgagtcacagagtcggatatacttggagcccttgctctgactgcagtgcactgagatagacagaggagaatacaggttgagtagtctttatctgaaatgcttgggaccagaagcgtttcatatttcacatttttgttttgatttttaaatatttgcattatatttactggttgagcatcccaaatctataagcctgaaatgctcattggagtgtcatgttggtactccagaaattttggatttgggagcattttggattttgggttttgggatttgggattcgggtatttgggattattatgtattata

SEQ ID NO: 44313 - DNA, 1587 bp, Homo sapiens
tcagaaaggtctcagggaatgagagagtgatactgatgttagtaagcattttgggattcttccacatctggatgctgggtacttaatacaatttgtttattggattgattatggtcccacagccatggtactgtcatcaagaaagtcccaggggataggtataggtgtgtagcctgtgctaggcagatgagagctcgtggccagtcatgcccatgggatttcccatggtgtccatagagcataaagaagaacagcctttctgcaaagcaggtgtcctttcctttaagcaaacctaatgctgagttgataaagatacagatttcctgtaaaaggtgactctttttttttaccttataaaagggcttatttcaaatttctgttaaaaaaaaatcagtagtctcctatagcatttgacatatcaactatgaatttacagaaattcgtagttgtgcaaaaccagtcatttccatgtgattagctatcagaaaccaaaaaatgtgcttatcacagttgaggcagtttctctgtcggattggaactcaggctatgttggtgtgtgactggttttgaggaatgatgtgaggaaaccatgtattttcagttcagctcttttcctagcactgttatttcatggtgggttgcaaatttacattggtttgcaaatccataaagatattttaacaacagctaccattaaacgaacagttctgtttgccaggtatcaggctaagtgcttttaaatgcattattagcttcttcactcatcacaaaagccttggtaaataggtgctatcattatcatctatgtatttcggaagagctatctaagatttagaaaggttacttgcctaagatcacacaggtatagtaaggggtgacagcagactttgagcccagggctgtctgattcctgcaatttaactcttaacaaatacctcagcctaggctgctgtctgtaacagtagggacaggcaccactctgcgaggatcatatagatttctaatgtctctccccaactacttgttctagctatgattttgtgctctggagcttgatttttggaagtgatgactagaattagaagttggttggcaggagaattattttcttccttccctcattctacctcattatccttgtaacctagggaacttatgtcactaaaggacaccatggccaagatcttgaaaatggtaggtaaggcttctcacatgtcgatgatcaacatctgtgcaatgatgtcattaaaaacaagcacaaacaacaccaccaccaaacttgtttttatattatgtgcaatttcagttttatattatgtgcaatttcaacgcggaacacagtactttcagagcaaatgcagttggttgaaagaaacaggcactcaagagacagcttactgtaatgagtcagtttccatattgttactgagtaggacttggtgttagaagactctggggagtaaaaattaatgtaattaaaatatagtaattggcagatttgtgcaaactataggtttttctgttttgatcctgaagaagccaaataagggcattgtgcttgtagtttttttccaatacatttttctg

SEQ ID NO: 44314 - DNA, 2055 bp, Homo sapiens
tacataaaatctgaaacatacattgtggttctgtttgtcctgtgactatgtaaaattgccattgaaaaaacccagaaagccgggtgtggtgactcatgcccgtaatcccagcactttgagaggctgaagcgggtggattgcttgcgcccaggagtttgagaccagtctgggcaatatagagaccctatctcaaaaaaaaaaaaaaaaaaaaacaaaacccagacagagaataaaaacaagaaggctaggctgctatgtcatgaagaaacctaccaccaaccgctgaatttcagtgaagataggactgtattatttttattgtatcctctgctcttagtataacatttgctacataataaattgtaacatatagtgaaaatgtacatgttatttgagtcagtgtgtgtaggtataaatttttaatagggtatttacacctgaagtctttacaacaccatgtgactgctagactccgtttaaatgccagaagatactcagatacatctgcttgtcatatcctctggccaccatgtaatggtcagttgtagaaaatcttcggtcagtactggatcttaggcatttttactgcttcctgcaagtttggggtgcttttccaaccttttagtgattgcattttgtaacaaaaatttcccaccacagttttttttttttccagaataagagtatcttgagatagcaaggcaagctgttatcaaaagacagaaacaaaactcctaccaaatatgcaattagccattggtgagaaacagcattttcactccacagcataaccaacacaaaatatagaaatatatggcatgctgaagaaatagactacaattgttatttatagcttcccattccaaatttttgttttcattagaataggcttattcactagaacattgtgttggcagtgatctgtcacacacttgtatggtatgctctgcatatggtggctggattttgggatgtctcagctgggaagaaggataccctctttctcatttgcagtggtgtgacatgggctaccaggaaccctcgtcattgttcttactgacttgatactgagaaaatataaattcagaaagataaaataagtttagtaggataaaatgctgcttttatatgatgagggtgtatatgagcatttatttgaacaacaacaacaccctttactgtgaaaaccaaggtttgaaaaccactgacttaaaatgaggctggagtattgcatgtaaattctgttacaacaaggtttgaagttactacctagattttcctaatgagctgacatgcttctactttaagtggtggtagggaaatcttctgggttggggggtatgaattgtcatggaattattgcgtgttccagacacgtatgccatgcagcacagtttgcaccactgatgtaataaagctcttcatatctgaaaaacatttgtttgatatcatcattctaaagtacctagttgaaagggttaactccagtttatcttatgaaagaggccaggattctaattttggttctttcacaactgtatgaactcaggcaaagcatttatcttcttagggcctcagctgtgaaaggatagtttgatgaggtgatttccaagttaccttgaaattatagaattcattgtaagttcgagagtctcttgggcactctgactagatgtcattggaactgtctgaagtattctgtatctgaaatgttttggtttgtgttcaagtaactgaaggtgaagtgtatgagatatttactgtttgtgctggtctcttctaccagacagtatactatgtttgcagcattatgtgttatcttgaagcccttgggcaattccctatagtacttggttctgttaattttggtaagtatttgataaatattgtataaaaccactctacttccctaagtctttctgtccttaacagggaattgccagagctattaagttatttaaataaattaactaaaccctatattcaatttttgagtcacatggtaccaattcaaagaaaacattggttaaaggggtcatatttggaaataactta

SEQ ID NO: 44315 - DNA, 1034 bp, Homo sapiens
attgtctttgatagtcagatatgtgggtttattttaacaaagaatttaattatccttttttccttcagtctaagtcaaagtctgtcttctgtagtatttcttattaaagatggaacaaatatttaaagccatcacatgcattgcgtaagttttctcttttagtacttgtatgtcttcctaccaggacctttttgacaaggattacataatgaccaatattagactcttctgtatcatgtcctttgacaacactctctggtcactataacagaagagtaaagataatggtttactgaggtactttgccagttgtaggtttaccactcactattcttttgtacctttttttatgttgctgatcattattagaaagacaaggcaacttgtataacttgttttattaaaaaagtgaactatatgcttatttggctagagtatataagacaaaaaaataaggaattaaagttccccaagcctagcttcatttaagcaacttaaacttacttcaggaacaactcttggactctctggcatttaaaaaaaattgtgccaagatgacattgggtaactactaagtaaataaaaatcatcaaaaaagtggaatgcctttggtaacgtaactgcagtaaaactgatatgcagtaccctgaggaatgtatggtaatcatgatccttttggaaacttttatataacttttattggaaactgcaatataaaatagcatttgtggagcacttgctacatgtcaagcacagttctaagagcttgtcttatattgtcatttaatcttcatgatacctcatgaaggaggattcagttatcactcatatttcacaggaaattgagtcatacagggattaagtaacttatttaaggtcatactgtaaatggtggagctaggattggaacctaaattgtcttgcatagaaactgttctcttagccattacgccatgttacctagtatgacagtggttagcagaagtttgaatcagtaatcccaccccttaaagtttatgtgacaaaataaatca

SEQ ID NO: 44316 - DNA, 1026 bp, Homo sapiens
aagtagcatatgtccttcagtgttctattcaaaggactcaaactctcgaacttgcccagatcttcctgaagtatgaataccattggcttcttttaaattgggagactatgtaaatgaaaataaaataaattatgaaaaagcatctgtaatacctaaaaacctattattacaaagatcgataatgtggttttagaaaaaaaggaactctgaagtaaatcgacacaggtgaggatgtggtcaacataatgcagtcagcaacaaactaactcttctttcaaaatatctcaaatcataatagaactgcagatgcaatagcaaacaatttcacagaactgctaagagcacataggaaaacccaaaccagccatctcagacagatggagatgaatgcatacagctatacagtaaaactttctctaaagagagttgctaggggaagaaaaatttcaagtctctgaagagaaggtaattaatccaattatttcaatgaacttgagtttctccttgctacaatgtttctggagtatttatgtggttgtaaccttgacagtgtggtcatctatttataatatagcagcaagggtctgatacaaaattctaatatcataaaagtacatcattaaaatgctttatatggagtaagaatttgaaattctgattactcactaaagggatatatcttaaagttaataagggaaagtggttacagtggagagagaaaacagaaagaaaactgaaggaggtcaactgtagaaagaggactggatgaagtgggcactgaatggattgacttatcaagggagacctatgttcttcataacccctatgctcacctctccaacatgtaaatcacattgtgtggccatggcctttttatttgactgtctcactgctgtactataagcttaaggataagatgatgactgttgtgttctccattgtgtctccagcaattacacaaggtctaacatacagtaggtacttactggtagatgttaactggatggatggatgggtgggtggaag

SEQ ID NO: 44317 - DNA, 1059 bp, Homo sapiens
ctgcttttttatatgtattcaaatttatagcttagtctcttttaaagtaatattctacattactttcccacaagtgatgatagttaatataatgtatgccagaagaaaatgatttaattttaagaatgtgattagatatatttgacagtaagtgctcaaaggagttagatctgtcagtactttcgaatgtctcctgtattggaaactattagactgtcacctctttttaggcagaggcttacacatgttggtatttctggtacacagttaccgagaagagtgccttgtccgtaatgagaagcatttaataaatattttggactgagtgaataaatctagaatcctaaggagaaattggaataacttgattgtaaattactacattttctttagttttacttaaatggatattatttcaagatcttcattaagcaagtaatttagtaaaaaacttacagaatccataaaaagaaagcaaatctcaaatttgtagttaagagtaataagtgttaagattagggaaggaaaaactgtttcagaactggtttgaatgaaaacatagctgatgttgccaaaaaatggctttttgtgagttgagtccatttccatcatgactctaatatcattaagattgaatcattcatttcctcactattatatctagacagattggaaatttaccagaaatggaaattattaaaagtctgactgatgaacaaagaaggaatttgactatgcatatcagtgacaactaaattggaaggtcagtaaaataggcctataagcataagcaggttaaggacaagctagggaaactataagtatctccttttttatattgtcttacctattcactaattataacacatagaaacaatataaaacgatgaagtttaagcagtaattgttttgagaaaccattctgttgataatttacatttatgtttattaggaaatattgttattattacttagaccaaagttgactgaaaattgaaaactgtgggctacccgtaaggttttttgctttgaaatattcaatacctaaaagccattttg

SEQ ID NO: 44318 - DNA, 1492 bp, Homo sapiens
atcccctagtgcatttggcaaattggttatgcggtctgaaccttttttggatctgcaaaacttgttttaggtgcttgaaaagattaaaaatgagttggtttcttcctactgtgctggacacaggacaaggcttcaaacttgtcaaatcttaatttggaccccaaagcgggatattaataagcactcatactaccaattatcactaacttgccattttttgtatgctgtatttttatttgtggaaaataccttgctacttctgtagctgctctcactttgtcttttcttaagtaattatggtatatataaggcgttgggaaaaaacattttataatgaaagtatgtagggagtcaaatgcttactgtaaatgcataagagacgttaaaaataacactgcactttcaggaatgtttgcttatggtcctgattagaaagaaacagttgtctatgctctgcaatggtcaatgatgaattactaatgccttattttctaggcatataataatagtttagagaatgtagaccagataaatttgtttactgttttaagaaaactaccagtttacttacagaagattcttttttccaaacagtaggtttcatccaagaccatttgaagaactgcaaactctttctcttagaaaagaaagagggcagcctaaaataaacgcaaaatttgcttatactccatcacattcagatgtcttggttgtgacttattaccagtgtggcagagaacccaagttacattttagatcaaaatattctttatgtaggtattgttaaaaggctagagcctacaagttgctcttccatgcgttggtcagggggccctgaaaacactggtaatattaagagtctttctcagggtaacttaatgttttcttaatgaacagtgtttccagctacaaattcttccaataaattgtcttcctttttgaaaagtactctcatagaagaaatttagcaatttctcgttgactgactcagtctattttaagtattcagaaaagattttgatccccattgagttaatgctctgccttgaaaattatttttctgatccttgttagtgataacattttttttctactgaaggtcagaggataggaaacaagtatttctcttctggtatacatgtaatgtattctgtaaaaaagtattcatattggcaattttagttaggcataatattgtggttgtaatttttaaaacttagtgttttgtctgattaaagcaggcactgatcagggtatctcctaagaggtaattcacttcttattcctttccaataattattacattctaaattttcatctatgagaaataacaaacaagaagggaatagaattaaattggggtataatctaatcttcattgtttaaatggtttgccttctcaccattgaagccatttttttatagcctcagaaagaggaaataatgcctccaccattttctacctggtgacttgaaaattgaacttttaagt

SEQ ID NO: 44319 - DNA, 1053 bp, Homo sapiens
tgccatacatatgtatttctaatctacagaataagctcatgacataaattatctctgtatatattccagaaatcaagactcaaaaggttaattaacttattcgtgtacacatagcaagtggctgagctgggattgaacaaaagtctaactccgaagcttgggtcctttccactatgccctacttcttccacgtaaagaagtcatttgactttaaaattatacagtagccttcataatgttcttaaatttcctgaaacaagcaaagttttgaaagtcgcctgtggtttcttaaagctggatttctcacagtctctccatttatatattgccgcatttacgtatactgtttcttagttgggctttactttctttagacttctatgtatgttttccaaatctggtttgcataaggtgactcatacaagaatgcttctaaacaaacaagccgtatatgtttatgtaaatgttacattttaaaaatgacattgcataaagaaattttgttcctgttatctgaaaaattttaggatatgaaacattgaatactttgaccatgacttgaaagcccagctgaatagagatctaataactagtaacaacttttattcaaagggcattacttacaggttgtttattggtcttcttttgtgctcagtttatatctgctctgaaatatgagccatgtcttaaaatttgataatgagctgaggataatttggagaagcaaaggagaataagtacttgtaggcttgaatcaattgatcttatttgttacttggaattaaggtgtaaggagtactccaaagtcacaaatgacttctagattgaagctatagaataaaggtttgcaggccaataaaattgaagctctctgaaagtggcaagcagacaaaacatcctaaatttattttggcttcccctggacatacttgccatctgttcagttaagattacgaatttttgtattgccaaaatactaacttgtgtgtgatcataatagaatatttaatactgtttttctaagcttgctttttcaaaataacctaatagaag

SEQ ID NO: 44320 - DNA, 1099 bp, Homo sapiens
taatcttgaagttcttaatatgccttgttttctgtttctgcagagtgtctataaatgtgatttcctgaacttacagcttcagcaaccactccagcttgcacaggatgctatagatgcttttttgaagcagctgaaaaaccctattgattctcttcctggagagcttttccatgtggttgttttctctctccttctttcttattttccatctccttaccagcgatggatttgctgcaagaaagcccatgaactgttagtgttaaatggtttattactaatcatcacacctgattcctcccatcagaaccgtcatgctatgatgatgaaaagctggaagattgctatagagtccctgggctttaaacgcttcaagtactcaaaattttcacatatgcatctgatggcatttaggaaaatctctctaaaaaccacaagtgacttggttagtaggaactacccaggaatgttatatattcctcaagatttcaacagtatagaagatgaggaatattctaacccttcctgctatgttcgatcagatatagaagatgaacaactagcatatggtttcacagaactccctgatgcgccatatgactcagattctggagaaagtcaagccagctctattcctttctatgagctagaagaccccatattacttttaagttaatatagaagcaaaaagcccctttcagtccaggctcctaaactaattgcttacaccaattggaaatactaacatgaactcagtactgaaaacctggtttgcataaaagaaatgcagaggtttacagagtttgctatttttttctacttctcaattttaaaatttattcttatatagaaagcttaaagtttcatgcagagtgactcatgtcatagcagaaactactgttactttagcatttagcactatcatagaaaggtacctttttctctttagtgctattgtgaaaacaagcataatttgctatatgttttccttttcaacttttcagtgttgactataaaccattgaatggaaaactttaagatgtagaaagctgtagattgcactttgatgactcacaagttaaatgtgatacagaaaaataga

SEQ ID NO: 44321 - DNA, 1075 bp, Homo sapiens
cccacttacaggttagaacatgtatttggctttctgagtcattatacttaaggtcatggcctccagttccattcatactgctgcaaaagacgtaatttcattttttatggctgcgtagaattccatgatgtgtatgtacatatatacaccacattttctgtatttagccatttattgatggatacaagttgattccatgactttgctattgtagatagtgctgtgatcaacatacaagggcaggtgtctttatatataatttcttttcctttgggtagatacctagtagtgggattgctagattgaatggtagttacatttttagttcaccattttccatagaggtggcactaatttacattcctaccaattgtgtggtgggaatccttgccaacatctgttgttatttgactttttaataatggcctttctaactggtgttagatgatatctcattgtgatttcacatgattagagttgttgaacattttttcatatatttgttggaaacttgtatgtcttctttggaagaatgtctgttcatgtcctttgcccactttttaaatgggattgttatttttcttgttaggttgtttgaattccctttaaattctgcatattagccctatgtaggatgcacagtttgcaaatattttctcccattccgtaggttgtgtgtttactctgttgattacttcttttgctgtgcagaagcttttaagtcccatttgtctgtttgtttttgttctcgtgcttttgaattcatgcctagaccaatctccagaagagttttccctggatttttatagtttcaggtcttacatttaaatctttaatcaatcttcagttaatttttgtatatggcaagagatatgagttcaatgtcattcttttgtatatggctatccagttttcccagcattattgactgagtaggcttttttccccattgtatatttttgttgactttgtcaaacatcagttggttgtaggtatgtagctttatttctgggttctgctttgttccgctgatctatatatctatttcatactaataccacactgtttttgttat

SEQ ID NO: 44322 - DNA, 1033 bp, Homo sapiens
gaatttgtacgtatttccaggactcctttgccaaaatatttatcttgcatgttgttgaaaatatgagcctggacctaagaaacacgttcaaaaatcagaaaatagttacagaagtctcaactgcagtccaggtgcagtggtgcatgcctgtaattctagcactttggaaggttgagacaggcagatcgcttgaggccgggagtttgagaccagctaggacagcatgcaaaacctcacctttaaaaaagatacaaaaaatagccaagcatggtggcatgtgcctgtagtcccagttacttgggacgctgaggtgggaggatcacttgagctcaggaggcggaggctgtggtgagctaagattgcaccactgcactccagcctgagtgacagagcgagaccctgtttcaaaaaaaagtctctactacatttggcattattttgattggtggaaccacatgtcatctggaacataacctgaatcagtctggagaaagatgataaaatagaaagagagaaacttcaactgtggaactttagagaaggcttacgtataacaatgatgaagccacagtgaacgtaacagttcagaaagtcagtcatcagtgggatacagattaagaggatgttcttggatttaatgattaagtcatcattgaccttgagagggatttgtgcaatgttaagggtgacatctaaatttcaatgatttgaagttcaagtgggatgtttatagagtaatgatactcttaagaggagtgtgatagggaaaggttaaggggtaatgccttgagggaaattcagatcagttctacctaacttgactatagcacatattattctgtacctgtaaatctatagtgaaaaatattaatcttttgaatatctaaggtaaattcatttttaatgctaatacacagtattaacaaaattaggggatggagagagcttagaagaagagaaaaggtagagactattggaattgaaaagttattcagtctgaaaagctataattgaaaagcagaaaaattttctg

SEQ ID NO: 44323 - DNA, 1075 bp, Homo sapiens
accgctgccatcaataatatacacatacaaaattgtaagtatttcagtgatggtttttaatagttttgcttctagtttgaaatccgttgtatattaatcaaatatatatacaaatatattgaaacctgaaagttaaatcctacatgtattttgctgaaatcttaattggataagtttataattacaaataccagatgtctctggaggcttagtatttaatattaagatattaagtcctctgtaaaaaatgcataatctagtttttaaagctatttatgcagaaagaatgcttattatcaatttcaaaattaagtttccctccttagattttctagacttaaaaaattatattgaagtttattaataaatggagtgcaaatgatctgtgcttatcagttgcttctttacagttacttacctaatttttagcactggctcagggaataactttggggaaatatctaacattctgagtctctttttcttctataaaagaaatactgtatgatcgtctagctggttttttggggggaattactatgtttaaaaaccctaaagctctacattttctgatcatgacccaaagctctaggcattgagaatgaaaatagtgatgattataaggttcaaatcatttgagtaacagctcaattggcaaattttttagaagaatgtcatgatccaggtttctataatgtgactgtataaatgaaaatgatgattgcggaatattttctactgaaagaaattgtctggaggaattcataaagtaaatgtgtttccttagtcagaggtacagcattcaaaaaatttattctgttaacctgtttataagattcttaatgtagttctgtatattatgtccctaactagtaaagatttacttattattttagtaactagaattgaatctaatttaatttaaaaggttaactagacttatatgtaaaattatagaaagataatttagagaattgagtcttcactgtttagttttaactaacaaatgactattttcaaatgagttttaagctaaaacccttaccagagcaaatatctgtgaatattactcatt

SEQ ID NO: 44324 - DNA, 1035 bp, Homo sapiens
ttcaagtaaaagtgagttctataaagtcttaaaacatcttaaaattttttaaatcttgaatttttgatgtacggttcagggtattccagcatttatattgactttggataatgtttattttctcatgatattgattctaatgctaaaaatatcagaaaatgaaataatgcttatactagttctcttaatgtggtaaaattataagaaaggataagtatattgactaaacttaaacatgaattccctgaaaaactcccgattgggtactatgcttattgccccggtggtgaaataatctatataccaaacccctgtgacgtgcaatttacctatataacaaacctgcaaaagtaaccctggaccaaaaaaaaaaaaaaaaaactagaggctaaataaataaacatgaattcccaaaaataaagcattgtctttctcatggacagtaagtttatgataacttctggtttacattttctttccatttttattcaaaaatttttacatctcattttaaaactgtaataatgcatatttcattcattcaacaaataattcagagaaaaatatgtatttaacttagttcttttatttaataaataatatttagtgattgtctactttgtaccagtcatattataggcactaggagtacaataaaactcacaaaatccttgctctcatagagcttacgtgctagttggggtgagtggccggaaacaatatgttggttaaatttacactagtgcagacagtggtgagcaccatgagaaaaataaagcaaggaaaactaaaacaattttaagtaaggtaggggaagagggtttcactgttgtgatgtgtgccaatgatataaaggaaatgagacagtaagccagccctaccaagtctgaagaccttgaagaagaggcatgctggcatgtttcagaaacagccaggagaccagtgtggccagagcaaaatgacagagggagagaggtagaaaataaggcaatgaacagctagattttgtagggtcttgtgggccattttaagaca

SEQ ID NO: 44325 - DNA, 1059 bp, Homo sapiens
ctctggtctttttgataatagccatcctaacagatgggaggtagtatcttattgtggttttaatttgcattttcctgatgattagttttgttgagcacccttctatatacccattggccattttttgtgttgtctttggaaaaatatctattcaggtcattgcccattttttagtcagattatttgtttttttgctattcagtttgaggttttttttatatatcttttggatattaaccccttatcaggtatatggtttgtaaatatatttttatcttaaaatggcatcacatatatacttgctaacttattttctgtgctttgtatgttttaaaaaggagaattaggatagagttattgagaaaaaatattatttttatacacatcaagtatataaaaatcaagtggtcctggcatgtaaaaatgcatgaaccttagcaccacctattcatttttttcacatataagtaattctttatctatttggtggtgttactgttcatttctccttgagctaataaatttttcgaaaagatctgtgtactgctattaaagaacttaatggatatgactggactgtcagctgcaaggttttcttttgacaataacacaaaatgaaaaagcctttttaataagcttaaaacaatggtctctagaaaaatgacattgaaattattgcttttctgaccttggaactcttactttgaaaacagtaactattgtgaaaaatttaaattctgcttttgagtgactgctatttattgaaagccatcctctgtagtttgaattttatcttagcaactaatttaatttgtttatacttttcatgtttattttttgagcatgatgaaaatttaaatattttgtcctccactgactgagcaccctaattaacttctctaatttatacaaattgtaaatcaaaagtagtctttgcttttccatttatactttctattgggaaaatcacacctggttttaatagacagtatgtataaatgaatgacaaagtaccgtaaggatggcagatgagggaagtgtaagatgataaagtgggag

SEQ ID NO: 44326 - DNA, 1086 bp, Homo sapiens
aatttcttttttggccatcagtcaaaacagtcaaataagttaaaggcatatttgaattggagcaacgtagagagaagtttttgttgttgttgttgttgttttgataactgtttttgccttatgctgcaatgtaacaggctctaaataatatattaaaaccaaaaaagctttaactgtatgaaaagattatataaacaagtcctggtttttaaaatggggcaggagttttacatcatccctttttgccaaagggatgatgtccattagctgctcaatccctttgggttaaaaggcttttaaagccagttttcctctcaccataacaggcagttattacaaggactggctccctgaaaggtccccagaggaaatcaaggagactgtgtttccctctgagtaattgaaaaaaaaaaaaaaaaaaaggcctcaaagccacaggtggtttggggttttgaattattcacacctgacattcatagctgcctccttggctccttctggggacgtaggacaacatcgtgctcagaaagacctaggttccaagttcagcttggaggcagaaagcaattcctttttcttctctctgtgtttggaaaataatagattattgacacaaatattaaaactgatactgtaatgcatttcctggtttgtgtggttttgacagacaataaagtaacatttaacttataagggtattcaagattatgggataaggaaacaagtcattcattatcccacaatataaggaagatgactataatcctacaatataaggaaaagtgattataatttttaaagctgaattgacacttgagcttgaactagctaaagttaattgttccttttcatagctttcagggggaaaaatctgactaaatagatgaaaaaagagtttgttctttttcatccaaaaatttaaaagttaaaagatcattttcttctgtgaaaaagggaatttttgaacatttttcttaagcatttttacttagacacaattcagtacaacaatcatttattgcgcatctactgcatgtgtgattttgggcaagttatttaacctttctattcctcatcagtaaaaag

SEQ ID NO: 44327 - DNA, 1050 bp, Homo sapiens
gaattctctcaaagcatgtgaaataggaagaaggaagttcttgcccagaatcttaggaaatcaccactgttcggttataatcactgcctcctgaatcgttgaggagtcttttaaattagatttttgttttgttgtctcccaagttaatattatatttagatatcagagagtcaggcaaaaaggaaaacttttatctctagggaaaaaacatttagaaaaatgtattcagtgtatctaatactgaaatgcggaaaaaaatttaatgttaaaaaaaaactatagacattgacatggaaaagagatttaatgttttgaaaaaaaactttatattaactgagtaacatcctcctgatgagaagtactatattaaatataaacccattatgttataagttaatgtttcgtgtccatttcttatttggggctgtttgtatccattgtggatttttatatgagctaagtggagaagggcaggatgccttgtgttaactgattgcggtagcttgaagagacataatgagaactgggcagcattaaggtcagagaagcccctgatagaaaatctagaaatatagaaggaaaatgaaatggcttaaactgatttgtacgccagccaaacgaaatatcctctctggcctagctacttaaagtgtcttcaagccagcaacatcacctggggcttgttagaaatgcagaatctcaggccccacccagaccaattggatcaggaacagcattcgtttccaaagcccaagttaatttgtatgcacattacaaatttaagaagactgccaacttgcttgagcccaagaatcattccaggcacttgataagactttttgattccctggtctttctcctggttgtatagctgtgagatggggcctggaactccatgtctaacaagggtcctcagtgattcatttgattctcaagttgtagccagcataaagtagtctaaggaaatcaaactttagggtcacactggaggtaagtagtgaaattttttcctaaaatgcattttccaatctgtagctctccagatgacat

SEQ ID NO: 44328 - DNA, 1068 bp, Homo sapiens
tgttaaatttacatgataatattctgaattgcttctccattttgtcttgaatttcactgaatttcttcaaaacatctagtttgaattctttgcctgaaaggtcatatatctctgtttctctgagatttgttcctggtgacttgtttagtttatttggtgaggtcatattttcctgtaaggtttttatgcttgtggatgtttgttggtgtctgggcagtgaagagttaggtattcattttattcttttcagtccgggctggtttgtacccatccgtcttgggaaggcattccaggtatttaaagggacttggatgttgtaatctaagttcttggtcactgcagtggtatctgcattaggaggcagctaaagattagtagtgctgtggctcttgcagactcatacatgtaccaccttggcggtcttagataagatccagaagaattctctgtgttgtctggcacggactcttgttcttttcccttaccttctctcaatcaaatggagtctttctctgtgtgctgagctacctggatcttggggaggggtgacacaagcacccctctggccacctccaatgggactatgctgtgtcagaactgaagccagcacagcactgggttttgcccaaggcccgtggtaaccattgcttgattactgtttatgtttctctcaagggcctaatgccctacaatcagcaggtagtaaagtcagccagacttgtgtcctcaccctcagggtgatgagatccccctccccatgctagtccagagataccagctgggagccagggcctgtatttaaaaaccttaggaatctacctggttctcttttctactgcagctgagctggcacccaatccacaagacaaagtccttcccactctttcttttccttttcacaagctacggactctcccaaagctattactgccccaggcctgtggtgagtactatctggttggttactcccaatgttcactcaagacccaaggtctcttcagtcagcttttggtgaatgctgccagctccaggactctccctttagtgcagtgggcttccctctggcca

SEQ ID NO: 44329 - DNA, 1025 bp, Homo sapiens
ttcttggctatttgtgtatctactgataatagacagtatctctaggcttctcagtccataaaaggacaatagtgatttaaactaatttaaactcttgttttaaactttcttccttgtttccatttcctaatttacatcacttatactttcacgtatacacgtcaagtttaaaagcatttgcattctgttctacacccataattaacacctttctgatgtatacgtaggttgactttcaagagttgaaaacgaacacattctgggctgtgactttttttctggataacttcactagttatcccacctcattctactttttgcctcctgtaacttcatttaaaactcttatttgctgatagtccatctccagttctttcttttttgtgattctatgttttctctatatctttacttttgaaaagatctagagaagaaaagaggataaacaaatgtgctcagtccaccatcttgcaccactccttttgaatttgattttcttcccggtacatgtgcaacagaagaaatgtgttgtaccagtaattatctagttaggctttcatgttttcagtaatgtactactgaaactatgttatatacatatgcatatacatatacatacacatatacatatacataatcatttcatttctgcagtttaacattttattactgctttaaatttaggaaggaaagtggttctaattcaaaactctctgagatagcaaatagagaaggcaaacacatggtttgggaaatttgaagaagcatgtaagaactgaccattgattttaattcagtcttttcactctgttaaccttaaaaatattgaaaacaaaagcactttcttttaaagcattggcatgatatcttgattccttattttgtctccttttccaatcacagtttacaatacacctggcaggcaataccccattttgatatcttcatctgcactgcaggataagatagcaacatgctttccttttgcctctgccttctgtaaagtctggtttacagttttaata

SEQ ID NO: 44330 - DNA, 1052 bp, Homo sapiens
ctggtgagggactatatacacatatatgtaagtaatgttttcttccagaattcatgtttaaaaattgatccagctttctcctttgtctgcgtgcccctctattttgtgttaagttcatgtaatcagctacagatctatataatgcagtccatctgacactgcacacgtaacaaactcaacatgtcctgtccccaaacctaactccgggcttcccccgccgacttccttttttgttatcagtcatccagacttagaacttctcagcctgttcttcccgtcagtcagtcatagcattttccaaatcctcactttgtggcacaccaagctccagtactaaggttgaaaggacctatagccatggcaactgatcatcaaaacacagtgtgataagtgcatcagaacagtgttagctggttattctgtaaacattggcccctggcctggggactgtgagacaagaccgggttcctctcaccctcagagagctagtgttctcatggaaagacaggccttcaaaaagaaactgtctatctgtgtaggatttgggaccttggaggacagtttttattcaggaggcattattcaagtgctattttaaaaaaacgtgttcagtgtgttagagttgtacatccaaatgcccggctttccctcaggcttttaagttaattgtataagctttatctttctgtgtataaatctagcaaaatttaacaatcacctttgaagggactcatagcttaattacatttctttaaatagtttggtctttaaaacttcaatatattttatttctctttttaagaacttctgctgtctgacaaatcttcccaagtacttaactaactcttgtaaaaccagaaaattaaatttataaattgtggctcaaatgatctcttaatagccttgtaccatgtacataaacttaataaaattctcttaccccttcttaagaccacaaccctaaactcagttaccattttaaactggacatgaagctattctaatatatgaaattcctgtaaacatttcaagtatttaaaaatacccaatat

SEQ ID NO: 44331 - DNA, 1067 bp, Homo sapiens
gcaccctttctccctgctccactcttccctgggatgttgtttgtgttgcttggtcaaaggtagtcaccactcccactctcacttcctagctggaaagagagaacctggagggcaggcctttcctttcaggggaattgcacacgtcattcctgcccacatcccattcaacagaacttaagacacctatcggtgcctagctgggaagtggagccttttgctgggcaattgtgcacccacctaaaaccaggtggtctgttactaaaaggaagaagaagaatatgatcattaaaagaaagtagcaaattataaatgtaaaatggataaatgtaatgctttgcattcattaaatacttactacatgccaggcaatatgccaagtgctgttatgacttattttatttattcttcaaaacatccctatgagataatttcatccattttacagatggggaaactgaacagagagaggtaaaatgctcaaagtcatgcatctagcaagtgatgaagccaggattgtgcaagtctctgatgtgtatgagatcaatctgaaactaatactactggtataaaacattaaacataattttgcttgctgccttaatttcgatgacctttttaaataaatgagttggaactatgacccttgacaaaagttgtttccatagactgtgaattgatgcctttgttttcacgccttatgaaaagaagtattcaaaaccattccattgatcatctagccaggctcacagttaggattagcttttgtaccagcagccacagtagcagagaaacattcaaagcctcacagtgtagaaaaggtggattctcctgaatctgatactttgacttctttgctttactctttgtcccccttcctaaaagcatgaaagtatgcctgtgatgggaaggagatgtatatcattacttggcttaagtgaaggttgaagggtgtgatcaactggttttcaggaatgttagcctcagtctctcagtagaatcagctggtagaaccactcccttctctccccttcccccttgtcagcttctccgtacaaggcaaggttctg

SEQ ID NO: 44332 - DNA, 1041 bp, Homo sapiens
tcacaggaatggaagcatggataactttgcaaacaggaaggaccctggagaaatctggggatggatttttttctttctttcttttagacggagtcttgctctgtcgccaggctggagtatagtggtgcaatctcagctcactgcaacctccgcctcctgggtctaagcgatacccctgcctcggcctcccgagtagctgggactacaggtgtacgccaccacacccagataattttttgtattttagtagagacgggtttcaccgtgttggccagaatggtctggatctcctgacttcgtcatctgtccccctcagcctcccaaagtgctgggattacatgtgtgagccaccgtgccaggctggatttgttaatttaaatgtgtctgatacacatgtatatcaacatgtcacttaatttaaaaaaaatgtataaatcagatactgcaagggaaaattaggaaaaacattcattggagtgaaaataaaagatgaagtggattgcttcttactttgattatgatttagccctcttttctaagtttattctcaactaattttacaacttaagctctacatgtttagctagtaaataagtgtcacaaagtcttgactttacctcatttctttcctccttgattctcaggacagtgagtttctgcttagctatcttttcctcatcaactagcctgacttcaggagacaggacaacctctgctgtcttttctccccaaggcaacccttttctcagcctttctgctgccttttatagagaaggcacatggtgccctgctgtctatgctatttataattattttctcaagtgaaaatctcagaatgactcagcagccttttttcagtgttcaaactatttcgaaccaaaataatatatatttatcaagtacagttaaaccgttcatcccagtaagttaaattctaaggactctactttcacaagttggttatagggaagtgtcataaagcaggtattagcacttttcaaaatttcctgggagaaattaaattttatgattagaatatat

SEQ ID NO: 44333 - DNA, 1029 bp, Homo sapiens
ttaaacttgcatgataaattttcaaactacctctccctccttggagaactactggcccatgatctttccaactctagaatcctgtgtttccatgtaagcttttatctataaaaattatgactaagttagagccccaaggaaaattggaatgacagaagttagccttttaatgaattgtagtataaattacccaaactctatttggcaacctttatagccaaatgttaaattttttaataacattcttaattctaaatgaactagaatttcttgttcctcctgaacttgccaaatagacacatttcaaatgttagatgaacagaagcctaaaccagaaatcactccaggcaactgagtttccatacccttggaaattgttttttctgttttttctttttttatttgatacatttgatttaatttggtttacaccttttccctattgaaacatatcttttaaaaattatcctccatgtatgattggcttaaaggctaaatcagaaaacaagaatgatctgggctatgacattaaccttctccaccctctgaagctgatgccagaagctgttctcactccttccctctgccattgcatgtccagtcattcccttcctcctggcatgttgtgcaggatgctcaccttactaatgtttgcgtatgacactgcaaaactgattgaccttttgctaacatcattagagtagctgtatgaataccggtctgttctgtcttaaccactatttaacctcttaactaagtattaccatttttatgattgtcgggaatttcagatgaacagtatagtctcatgatgaagtcctatttttcccatatttaggcaggatttattaaaataagcttgtctatgctagacaacattggaaatgttagtgaagatataaaacatatttacagttttaaaatacttggtatttataaagcatttttcttttgtaaagattttaaaaatatattgcagacctctaaaaaaataaggcaactgatatatcttctgtagttctgtgtaag

SEQ ID NO: 44334 - DNA, 1028 bp, Homo sapiens
gatccctgtgctgtgatttaaagcatctggttattgttctctttttctgtagttaacttcaatagactttaaaaattctctattgttgtaatttagatgtctttataaagccatttacgtctattttctcattttaatgtgtctttaaaatatttcttatcacaacactttttgaaaatgtggcgtttttgctaacccgagttatgtaattgttagaaaattaataaaaatctcacaaaaagcatttccttggtgaaaagaaaattctgtatattaatcagggttttcctgtgaatttctttcagctggaaatggagaagcttcagctacaagcccttgagcaagagcacaagaagctggctgcccgccttgaggaagagcgtggcaagaacaagcaggtggtcctgatgctggtcaaagagtgcaagcagctctcaggcaaagtcatagaggaggcccagaagctcgaagacgtaatggccaaactggaagaggaaaagaaaaagacgaatgaattagaagaggaactctccgctgagaaacgaagaagcacagaaatggaagctcagatggaaaaacaactctctgagtttgacactgagcgggaacagcttcgtgccaagctgaaccgggaagaagcacacaccactgacctcaaagaggagatagacaagatgaggaaaatgattgagcaactgaaaaggggaagtgacagcaaaccaagcctctctcttccacggaagacaaaagataggcgtttggtttccatatctgtgggaacagaaggaactgtgacaaggtctgttgcatgccagacagacctagtgacagaaaatgctgaccacatgaaaaagttgcctttaaccatgcctgtaaaaccttccacagggagtcccctagtttctgcaaatgcaaaagggagcgtgtgcaccagtgccaccatggccagaccaggtattgacaggcaggcttcctatggtgacttgattggcgcttctgtacccgctttcccacctccaagtgcaaac

SEQ ID NO: 44335 - DNA, 1044 bp, Homo sapiens
ctccatctgcatccatgttgctgcaaaggacatgatttcattcttttagttggcgtatatgtgtatacgtatggcgtatatggtgtatatgtaccgcattttctttatccagttcactgttgatgggcacctaggttgattccatgtctttgctgattgtgaatagtgctgagataaacataggcatgcatgtgtctttttggtagaacaatgtattttcctttgggtgtatacccagttatgggtttgctgggttggatggtatttctgagttctttgagaaatctccaaactgctttccactgtggctgaactaatttacatttctaccgacagtgtataagtgtcctcttttctccacagcctcttcagcatctattatttttttgactttttattaatagccattctgactggtgtgaagtggtatctcattgtggttttgatttgcatttctctgatattagtgatatagagcattgtttcatgtttgttgactactcgtatatcttcttttgagaaatgtctgttcatgtcctttgcccacctttttaattgggttatttgctttttgcttgttgatttaagttatttatagattctggatgttagacctttgtcagatgcatagtttatgaatattttctcttatcttttagagtgtttactcattgagtgtttctttggtcatgcagaagctttttagtttaattaggtcccatttaacaatttgtatttttgttgtgattgctttcgaggtcttagccataactttttttttgtttttttgtttgtttgtttttgttttttttttttttttttttgccaatgctgaagtctagaatggtatttcctagattttcttctaggatttttatagtttgagatgttatgtttaaatatttgatccatcttgagttattttttgtatatgttgaaaggtgtgggtccagttttgctcttctgcataggactattttgaagcttttaaaagaaatccttcctcatattcaagtgattactatatctgtttcttatataatt

SEQ ID NO: 44336 - DNA, 1032 bp, Homo sapiens
ggcagaaagtgggataggtaggagttgctgattgaaatcccttctgtgactgtgaaggagacgtaccagaaagcagcattgcaacagtgcatgactcagacagaagcaacaaccagagagctggtcattcccttatactctgcaaggacagacgatgagagacttttccttgtacctagtaaggagacacagccaaagagactgcatatccttaacacagatgggggataaaacctgtctaggagcccatttgtcttgaagggcctgccattggcctttactctctctcactcaaatgaaaggagcaatgaaatgtacatttgtaccagtctacccaccgactcctggtattaagcattttaatggcaaccagctgggcagtaaatatattcagaaagattctacctgcatgccctgcttatggataaacaccagatctgagttaactcctactggtccaaggatggagtaaacaagaaaaaagaaaacataaggcccatgagagatcttgcaggatagaacaaggaagataacgtaacatttaaaatgcaaaggaacaacttacatttgacaaaattattacaagaaacaaattttagagtgtcatttttagataccatctgtcttgtgtcttacaatttgaagaaacctaggcgttgaagtgaaggaagccagattgtgaagggtggactagctgtgaagctagggaagagaaagcattgaatgggacatagatcttggaggcagattgctgggagtgagtccaggctccaaatttctagccatgcagctgtgggcaagtcccttgccctttcttggtgctacagttttcttatttttaaaatgagcatcacagtacctacatagtgtgattgttatgagaacttaaagtatatcagcagaattaaagcatgtattggaaatagcagaaaaaatcaacactgttaaaaaattgaatcagtaacaaacttaagaagatctcccggaacccagtggaaaggattaaagtgataaagtagaaatgaagattcg

SEQ ID NO: 44337 - DNA, 1030 bp, Homo sapiens
caggaggtataccttctctcaaggactggggaacatttatttaatggtggtaaaattactggcagggtttgaataaagactgctttcaaactgttgacattccttttcccttgattgcttttgatatggagtgagtcatcttcagctggtagatggtgagaatgttaagatctttctgtttattttttccagatgctcagtggttcatgcagttggcgagttactcctcagtggccaaggctggttctttagggagtttggggctgggcatagtgggagtacaggagaacaactgcccccaccattcgctcttaatgtcctggggaatttaatttttagccaagtcaacttgtgtttcttggagctataaaagggactgtatttaaaatttttaatcacaacttctgcctacagaaattatctgttgtattatccctagtagacaagaaactacctttatttctgtgtttttcactttttaaattttgtgtgtgggaatgcttctgttaactcttgtttccacagccactactgtttccccatttcttttctcaagtcacatataagtaagcatttctggaattatcatactgcaaactacattctccccgaaatattgaaacacctcagggaaacttcctgcattctcttaaaggttttcacttgcttgcttgtttgtttgtatacgtgctcatgtgtctattttttgtaagaagcttaatattgggaattttttttctgttatgagttgaaatgtcctagacgattaaacacaaacacacatgatcaaagccaaataagaaaatgcttctgtgcagtcataatgatgagaacaacatacaagtgggggaaactcctgtttgaaaatttccaaaacaggaatttggtctagcaaacatgaaagcagtacctgctaaatcctgcaccagcccccactcccagtatgcttgctacagtgatattcatctcccacaacatgatgattgcttctttggacaatatcaaacccttcttcagaagccttattttg

SEQ ID NO: 44338 - DNA, 1034 bp, Homo sapiens
agtgcttctacaataaaatgagggttgatgtcaaataattttggcttatgacactgtcagaatgtatgatgactgctcataacacaaattatgttatgaatttatgaatatactttatagtttaagtactggtagttgacagtgaacaatatttttctatagccctgaaataatttggctagttattttctctaatcaacttatttcagtttagaacattctttttctttggagtcttgctctgttgcccaggctggagtgcagtggcatgatcttagctcactgcaacatctgcctcctgatttaagcaattctcctgcctcagcctcccaggtagctgggattataggcatgtacctccacgcccagctaagttttctatttttagtagagacagggtttcaccatattgcccaggctggtcttgaactcctggcctcaagtgatctgccagcctcagcttcttaaagtgctgggattacaggcgtgagctaccacacccggcctagttttctgcatttctgcttttgaactttccaactctctttattgtcctacttttcattgctttgaaaaccagcttgtgcatttttttttttctggatgcccctgaaatgatttaaaatgttagaagcattttggtaaccctgtaatctaaaattttgttatttagctcctcttcctgttggtgagttgaatattgacttttgcagggcatcattgctctttctgtggtgtctcttaacagtctcaaattgtctctaagtcaatttgtctttacgttgtaactaaccaagtgtaactcctggtaaacattcactaccattttttcttcataacaagttaagctgcccctttaatatgagagtatatatatatttttttagttacaagaaaacattaaattatataaatatttgcttaaggaaaaaagtcacaatgtttaagaagccagtttttaaatcttgatacatttaactaaggaatgaagatggttagatcgtaataataatggagcaacttttaacattttt

SEQ ID NO: 44339 - DNA, 1021 bp, Homo sapiens
cagaaaggatctatggagagcaacaaacctggaatgcttattaagtaattgcctctgatgttctttgtctatgtgtgtctcgttttcaataacacttttttgaaatataagtttttctctgaataaagacatttggaaagtgtagcttttttatcctagcgaaggactgtatagtcaaaaggggatagaaaaaataacaaatattttaaacattttaaaaatattttacaataaacatatttaaaacatgtaaaatatgaaaaaagatggcggggcgtggtggctcaggcctgtaatcccagcactttgggtggccaaggcaggcgggtcacaaagtcaagagatcgaaaccatcctggccgacatagggaaacccccgtctctactaaaaatacaaaaattagccgggcgtggcggcatatacctgtaatctcagctacttggaaggctgaggcaggagaatcccttgaacctgggaggcggaggttgtagtgagctgggattgcacccctgcattccagcctggcgacagagtgagactctatctcaaaaaaaaaaaaaaaaaacaaaaaaaaaaaaccgaaaaaagacatggacactgtatgatgtgaggtgaaaatactgtagaaaaagcaagtattgcttgcatggtaaaagaaatggcatagttagaggagaaaggaattaaaagattccaacactgatcatacttcctctttgtttatttctctaaccaatttatagagaaaatttaaaaaaaaattattcattttattacatctatgtgcaggagaaatctaaagaagaagaaactaagagaaaaaaagagacttctccaactgaaggatgcaataagaaaagtcaatgaaatgtgcataagatgacttgtgagaaaaaatgttgctatgcatgatgatctgaatgttgggtatggaaggctaagatgaaaaagataagggacagatgttgagcccagtgactggaagaataattataacaaacaggaagtagaaggaaaatg

SEQ ID NO: 44340 - DNA, 1036 bp, Homo sapiens
tttctgaaacgtaaaatctaaaatttataccattttttttacatacccaataaaaagtgaaatctttattctctgggtctgcaaaagcaacttttgaagtcgaatatatttatcaacatactcactaggggcatttttttccctacagttttggagagagtctgaaaaccaataccagtatggtttagatattcataattgtttacacatgtttcagtaacgaaatatatttcggggggttggcactttattttaggatttgggatagctggaaattattattgttatggttaaaagtgttctaactggataatggcattaaaaagaatataacattctggaatccttcctcttaacatgaaaaacattattttattacatggagttatttaaatatggattggctgttgtctggctagttacacatggaagtgtctaaagaaataagttcttggaagaagcatcaaatagaaaatgactatcgtttcttattattaatagtattattgttatgcagagaaaccttagtactctttttaagggctagatggttaatattccatatcctgcagtgacagattctaattaaatatttaagaagtgggacatcttttccaatcatgatacacagtatctattaccttggagaaatataaaaatttttttaatatttgttcctccagaaaaaaaaaaaaagatgattaataagggactctgtgtctcccagaacctgaaatgtttcttctaaggagctagactatgttaagagccaagaggaagcaaggttcaaaggaaattcatctaatatttgtgctctggttatgaaagggggtgagaagctgttcatcagcggcatgtgtccagttggcagggagggctgaatgccagactggggttatcgtgatcacagatggacttagcatgggaaagaggatgtcaaagactcccagtcagtgcagctattttgggggctttacacaaatcattattttttcattctgtaccactattgcctcagtcaaatgtatttgtttaa

SEQ ID NO: 44341 - DNA, 1166 bp, Homo sapiens
tgttttaaggctccactgacttcgctaatttcaacaggtcaaaaccaaaatggatgtagcattagacactactgattcccagtgagtccctctgccttgccccaggtgttccttttaattggaaatgtgtatatgacagaatagtttaacagctgaggctactaattggggaaaaatactatctaggaagataaactgttcaataggttggtcattattttttatctttccctatggtattacataaagtttcaaaagcctattttaattgtactctaaaaagtttatggaaataagaatgacataataattcttagaaaggtcatacgtttcccaaattatgttccatgaaatacagtttttttggaagttagcaaagtataaaaataatggtgtagatcaactaaactaactttttctttattatgtgttttaattttttttatttttatgggtatatagtaggatactaatatacaatacttgtaggatacatgagattttgatatagccatacaatgtgtaataatcacatcagggtaaatagggtttccatcactttgagtactcatcatttctttgtgttagaaacatttcaattgtactccctcagttattttcaaatgtataatagattattgttgactgtagtcactctcgtgctatcaaatactagatcttattcattctaagtacatttttgtatacatcaaccatccccatttcccactctccaagccccatccttcccagcctctggtaaccattattctactctctatctccatgagttcaattgttttaatttttagctcctgcaaatgagtgataacatgtgaagtttgtctttctgtgcttggtttatctcattttgcataatgtcttccatttccattcatgttgttgtaaacaacaggatttaattcttttttatggctgaatagtgctccattgtgtatgtgtattatactttatccatttatctgttgatgaacacttaggttgatttcaaatcctggctaaagtgaatagtgctgcaataaacacgggagtgcagctatctcttctatatgctaatttcctttcttttgggtatatactcagcagtgagattgctggatcacatggtagttctacttttagttttttgaagaacctccatactg

SEQ ID NO: 44342 - DNA, 1027 bp, Homo sapiens
catctcagaatccataaataattcacagaaggtatcaatttatttataggataggtggccaagagagacttccggctgtttaccaatagcatggctctggaaactccatcctattgaaataattcctgttcttggcaggagtaacttgagctaagggtgtatccacacccttttaaaaacatgccagtgattttgcataactaatatgaacattgaaatgggtattctatagaggcaagtgtgaacagagatcaggttttcccctgtgggtatgcacatgtagtggaaactgatggacccaaatttgtgccatttgatgactaaactcattctgggctgcaaaggcattgtttcagttttctctcataatatttttaattcagaccaaattttatcttataagtagaagaagtagttgcaaataattccatgccctgccaatgacataggcactgatttttaacaaaaggctcataaactctttttatgatactgtaaaactggagagcctgtgcccattaaaacataagcttcatgttacatgtaattaaggcaagaaggagaacataaaaatgtaagctttaaaatgtatcttgtattacatattaaatgcacacagaaaaatactgcataagttccatttcaaaggcaaaggtaaggacaagcaggaatgatcacagtagatgagtaagcccttcggtgaaaaaatcaatttagtaaaaaatgggtttctatttcaagttcttgaggatatactatattgatgattagagcacattttctatttttcctgatttttaactcagaaaatatcattagagtcacattcacttgctatttggttaatctaggttataatttttggtccactaaagacttaaaattattatttcctttttctttggaaattggaccctccaatgtgattcatactaagaagaggttgaagagatgtccaagagctgtcaaaggtagctagaaggtgctcttatgtatccatccccaaacccagtggagaagagcttcc

SEQ ID NO: 44343 - DNA, 1085 bp, Homo sapiens
gtattttgacatttaaaatacttccctcaattctgtaaattaaaagaatagttattttacagttccagggattgtgaaataaatgttgcagttttttaaaataatgaaaataaatactcttggttttgctttgtgaatttttttttttttttgtattatctggcaaagtaatatacctacagaacttcacaaaaactcacacaaggtttttcaagcatttattatactgcctaacttggaaaaaaaattgttgctgtggttaaaaatagtaatatcctagatgtgtcttaacatgtaagaagctaagtatctagatggcggaaaaagcccttttattaagactgtaaaaggatagcttttccagatatataaaatgttaaaagaagacaaagattggttatgttaactggtgtggtttccttttgtctcagttcaatcttgtatagattgtgccaacttaactttgaaagcaataactttatactacattttcagatacctctttaaaatcggttttagacatgaaacagtgctcatttaatattaagaatgttctttattaaaatcaaattaacattgacatagtatttgaaatggtgcttatgggcttatcgatgcatattttttatttgtaatccgatgctgtcccagaataagtgtattgtaatgtgaatgttaaaattgaacaagagaaagcaggaaaataagtggtatttgggaaattaaaggaagattgaaccagagtctttatattcctgaatttaattggattaatgggaaatttatcattgttctttctatattggacttgtttttaagtgaatcagctatgttataattttatgacagatcaaagctgagttcatttagcctgttgcactttatactttaaaaatttacataaattttaaataacttgaccaaaaaagttataatttcattcagtttggtcaacaaactctcccttaattgaatgcaaaatgtgccatgttcagttagtagagcaattaaaagtggaaattcatttagaatactttgtttcaaaggaatatgagagagataaattacttgtgttgattagggag

SEQ ID NO: 44344 - DNA, 1064 bp, Homo sapiens
ggaagaaattgtgtttgaacctccctctttaagaatgtattgctcctttttctgaacatttgttctgattgcatagtacttatatttcaatttggcactgattttaatctgccttgcattatataattttttttctttttttcctctttttcctgtgtctgtcccccttcacccaagagtgagtcttaaaggcgctattttggtgcttcacccagcatctagcactgggtgctgcaatcagtaaatgctgattgagtgaaaacaaatgtaggtaacagagaattaggatttctacatggaaaggaagagtatttccaaagtgggattcacataaagctgtattagttggaatatcactggtagtcagctatgaacaaacgttgagttactttattctcctactttttatttcttgatttttcctgatgttaagaacctgcaaagtgtttttgtgtgcattttagctatttgatttagacattatgagggcagatggttattttgatgtcaaaactgaagtgtagtactttgtaaccttactggttgccaatctgttgaattggccaaaatttaattgtgtggttttattttaattctcatttcagactatcttaacgaagatggatatatggttatcttcgtcatttgtttaacatcttagtatatgaaaggttaacatatttaatccagtaggaggattcttgctataatcactatcttaaggacccataagattaaatagttcttttggtgattcgttttccattttttaaacttacttgacaatttctataaattatgtagctttatatttattatatggtattattttagaaaaataaaacacatttctagaaaggaagaatgaaaattttgcctacaattagtagttgaaattaccaatgtcgattatgaatttttaaaaacaattttttataaaactttattttgagataattgtattgttttttacaaatccatttgaatatacagagagatggtgcatactgtttactcagtttctcccattggtaatatcttgcaaaactataatacactatcac

SEQ ID NO: 44345 - DNA, 1132 bp, Homo sapiens
tccacatgcaaaataatgaaattggactcctacctcatattgcatataaaaattaactcaaagttgacctaagatctaaatgtaagagctaatattgtaagtatcttcaaagaaaacatggcgtaaatctttctgactttgaattaggcaatgatttcttaaataaatgacactaaaaacacaagcaacaaaagaagaaaataggtaaattaaaattaaaaccatttgtgtttccaaggacaatatcaagaaagcaaaaatacaacccacagaatgagataattttttttaaaatcatgtattagttaagggaggaatttgtatttagaatatgtaaagaactgttacaataataattaaaaggcatataattcaatttttaaaaatcaacaagagatctgaattaacagttctccaaagaagatacacaaaaggccaataagcacatgaaaaggttctcaacatcactagccatcagggaaatgcaaatgagatctacaatgagatatcacttaacactcactggaatagatatataatcaaagtgataatatcaagtgttggtgaggatgcagagaaattggaaccctcatgcactgttggtggatacccacgtgatataaaaacaaatgtctacacaaaaacttgtgcacagatgttctttgcagcattatttataatagcccaaaattgaaacagccctaatttctatcaactaacaagtgaataaacaaaacgtggcatatccatacaaggaatattattcagcaataaaaaaagagatgaagtactgatatgcaccacaacatggaaaaaccttgaaaacatatcaagtgaagaatgccagacatgaaaggccacatattatatgatttcatttatatgaaatgtccagaacaggcgaatatatatagagagaaggcagattagtggttgcttaggctgaagggttggggaggacaaaggggtgactgctaattagtatggggtttcttttttggggtgatgtaaacgttgtaaagttgattgtggtaatggtggcacaactctgaatatactaaaaaccactgaattgtatactttgaatgtttgaactgtgtggtatgtagattttatctcaagttgttataaa

SEQ ID NO: 44346 - DNA, 1591 bp, Homo sapiens
taatatggatacaaacaccaagaggccttctttgcagtgtcatttatctcttacaaatctcattttcctttcagatattatcagacgcgacacagcctcttgaaagtcagaatttttctcctgtggtgagagatgtaagttatgagcagaatattttttcataaatgtatttttttactaccatttttgctctcttctctctgtttctctctctctccatctttgtcattctgtcttttctctatcagtcatgacaccttgtttgtaggactaaaatgtggatactaaagaaatgtcttgtgtcatatacatttaggcagtgattacatccaacggtacattacctgataaatataaatatatccagacactccgggagagcaggtaagtattgttcaaatcctcttgttttatacatttattcttatcttggaattcatgagtattttttaatgcttcaatgggagttcttaatattaggtttgtacactatataaattttgataatgtttgaaaatgtaggaaatccaaactaagtggctggctgaaaccactgtgactgtttcccacttaacagtagtatagcgtcattttggctttctaatagcctgtgtagacgtatgggtaagcaagcaaaaatccaaaaggattgtccttcaggtagcttcttgtttttctctagcttttgatacatgatcatgcctcggttattttctcaaaggaaaatgagcacactagcctttctgtggtgctttcagtttgggttttagttgaggatttggactctcttttgtttagtataatgttcagggaagtgaattcgtggttacaaattaagagagttgtgaataaacaattgatgaaagtaagaggtagttttctccagggattcttattagggggaaggtgccaaaaagtaatgtagcaaatctactcaagagaatagttactttagaaaggtctttagctaaggcccttgtttccttaattgattttactacttaaagtttgaaaacattgattttatttttttggaatattctggtctcctccagccaattgcccttgatctgtgtttatatctactctgctggtcttttcacattaaaaaaggaacccatgtactgaagtatcaggagaaaccagagttggaaaaaaaaataacacaactgttttatcttctttttcagtggttctactacaagcagtaaacaaagagatctgcccagatcaagcgtactatagttaggcttttccatatgtgctggtttgattatagttactttttaatgtgtcagtgaaatatactggcataagacactaagtatttactttttttctttgtgaataagagaagctagctctataaccctgtaggagagtttcttacaagtaaaacttcacatctgtttgtttttcatagctctatgttttggttctcatcatccgatggtcttttacactactgaaactagtgacatgtctaacatgactggtcaagatgatatcttctctcttatgtgtcatatttcatgaagcagcaggtttacttggctccgattgctagaacttgctgccctctttcctgatg

SEQ ID NO: 44347 - DNA, 2026 bp, Homo sapiens
gagaactgttaattcactgtgactgttgaaggcaaagccatatggatctgatttctttctgaaacaagagttggctggagttaacagcatgtgttggatctatatggtgtgaatctgtaggctttggcaaagaagagaaaattccaggtgttaaacattaaactaggaatcctgcttctgcttaaaagcaacagatcctatatgattccagttcagtttcttcatctataaaatggggatatgtatctacttaataagatttttgcaaggaggaaataagatgatatccataaagtgctcagcatagagcttggcatgtgatgcttaatcaatggtaactactgttacatttgtttaaataatgaaagttacagaaattattatttaagccttccatgcaaaaagtgaaagtgaaagtagcttcccaaataaactgaagctcagtcccaggcacttctgtctttttccctagtcttccaagatagttggcctttgcaagtatatgtgtgtatgttacaagtgactgtctgtatttgtgtctgtgtgtgtgtctactgctttcccgccctatcccagacaaagaaggtggtgggagaaggagcagggattattactgagtgagggatgagtgaggttaacattcaagcttgggctagaggggagggattaaattatctccacatgttcctcctgatggagtcaagaatttcaactcataataaaagttacaggggtatgtagtcacctgtgaattcatgaaacacagcccctgctgggaagatgggatggtttctggacatttgtgtatgttcaaaggaatcactatctttggaattggttttattagaaactgagggattcaggttctagtttttcttttggcttcgagaagactgaatgttatgggtttgggattgagtttaatgcaatctattttaaaaaacagaagatatgaataaacaaaaaatagatgcagtatataacagtcgtttactgaaatgttgataatctattttgcatgcatattttgccctgaataaaagcctaaactcctaatcatcagcagtttctcttgctgtgtgcagctttttttcttcttggccatcttcctaaagccttcttagctggactcttcgctgtttggtctgttgtctgattctgttgtaaagtgtcctataaatttactgtctaggtagcaagtagttgtttgcccccaggaaatgtacttgtatgcttaattgtttggtcaagccttccccatccatcaagctggtgctcttccaagattgcagtctgatgtaaaataaatgtgtttcatgcaagcttttctatatgttgttagcggtgatgggtagaaaatttctggaaggtataaaaatcattgaatccttatattttgctgccaagtttacatggaaaactaagttttatcattcaaatgatccagcaaatcatcatctgaaatgacatttggctacaaaattgaagttggatagaatccaattgaagttgggtagaatactgttaagcctggatatttatgctttaaaaatttacataagatttattctgcataggaataaatgaacctgtatataaaaattaggagcatctgggtgaaaataaaatgtttactagtgtcactttaatttctttaatttggtttaaagtattatttccaccgtattctacgcttcctccagctgagggaaaaaataactacttttagtagatgatatctttcaatcattctctccttcatatgcagccctggttctgggactagggggacaagacacttcttgtaccaagagaatgctgctttgagtagagtttattcatgagaatataccttgcctgccacattgagagaagcccgttacattcatcatagtaagcctttagtaactatttcttgattgactgaatgagtggaattacacaatcttctcacttgaatagcagttggaaaactggttgaggcaggtcggggtttaatacaacagcagacggccatgtatggaga

SEQ ID NO: 44348 - DNA, 1046 bp, Homo sapiens
ttatgttctacatttctaatgtttttgtaattctcagtgtccagttactactatgcttaatagaatcagaatatcagagcctgaaagggactttagtattatatttttgtctgggtaaggaaactgaagtcaagaggaggaaccctacatctagttatgtgtcccagctcccatgtctaagttttcccactatactgtactatatttcacgacatttgttgatctatgagatcttggaagagaatcaagtttttttttttttttttttttttttttgcagggttagggggatgtgagtctcttattaatgtgtctattttatctgtttgtttgtttgtttgttttcttgctgcataggtctttataatgtttattgaatttgctttttcatttattcattctttcttaaaacacttgctgttttcccatgtgccagtcattgggaatacagagatgagtaaaacacaactcatacacatttgcagtttagcaaagagacagacaagtaagcagataagcattttggactagactccgatttagaactaactttgtattccatttcaatgaagctaaaattataagctagagaccaggagaaatatgtgtcatgtttatggatgactttgagtaggtgatgggctggagaaaatatgaaaattctcagaccagattagttaacactaatagacctcctcccccaaagtctaccactttcttcttaatccagtaaagtattttatagagggtttaacatggaagcattaaaagaatgtacccacgcacaggaagtcaaagtatgaccagtgttaatgcaagcccaagcctagttctagcaagccttgaaattgggagggatttggattagttctaggccatcatctggtgctgtgttaattctggaactcttttgaacctctccaaaaaatattatggtttggatacttagtgtaggccaagactcatagccatagagctgccatacttatttacagacaccagtgcttcttgggaaaccatggattttaatatatacttgtattttt

SEQ ID NO: 44349 - DNA, 1070 bp, Homo sapiens
caattaaaaaaactaataatttcttattaaaaacttacacaggtacatattttatttttgctacaggttgttcaaaaggtaaattgtgtgcaattagtaatgttctgaggggaaagtgaatttgtcatctgatagtaacaacattttgatgtagtcatagtaattgtagtttgaagcaatagccagagtctgtcattccatttactccccagaaatacaccaagaagatgattggcatggacagccacatgaacctatcagtggattccccaagatcatttttgaaatgccaactgagtatatatctatgtacacgcatataatctaagtgagctaagcaaattttatcttctttcttcagaaaacctacagggactttcgattgcagggtgtgttggaaggaacactgaacagtaagacttatgatactgtgcacagacgtttaacagtagaggaggccacagcctctgtttcagaaggaggaggacttcagggcattactatgaaagacagtgacgaagaagaagaaggctgatatcacacagctttgcagaaggaaggaagaccttgatcgacattgttttttatttttttaaccttgtccttgtaattacattcattgtttgttttggccaaataaaaatgcttgtatttctttaaaaagtaagcctgaatgtagagtaaaaggggaaatgccaagattttggggtttttttgtttcctttttttgtttgtttgtttgtttgtttttttggagaagagcatcctcttttgtgtagtttgacctaaaaatgaaccttggctctgcttgtgatcagaacatgaacttttttttttaaagaagatttgagcatttttctgtaatcacatcaaaatgatgttttctgtgtaaagcgagatacatatttctcataatgcagcattgtgagaagtcagttcggaccactgcaccaacactgtcgtatccttgttaaaatggtgtgtaccttacaaattataatttatgtgccaggttcgttttgtacttaatttgctattattgtgatgtgtataaaatctttaatcttggt

SEQ ID NO: 44350 - DNA, 1041 bp, Homo sapiens
catcgctactttaaaatgtaattttaggtattgactacatgacttatagcataacacatcttctttttgatttttatgtaacatgcaggctaatagaaaattttcctttgaaaataatttacctcttttttcctgctgcttggctgtccattcagtcctataacatgtatttaggatcctttgttatttacaaattacaaagcaggccactaggctgcaaagtgcaaaaacactgtttccgtgaatatgttacagctgaaagactgtaacgttaattcatttaaagaacagcctaggtcaacttaacagattttctagcaaagcatacaattctgttaacaggaaattatagcattattgacttcaagtgctgatctgtggtcatttcagagtgttttattaccccctcattatcgaatctgttaaatgaatactgcagaggttgttttctttttttgttctcctcccctgtgccccaattctcccttctagcaatggtacagcagttccatgaaagtcatttgcgtgtggttgactgatagattagacctccaactccatatttaccagctgaagacgctcatcaagattgtgaaggtaaacaaaatgtgtttagatatgaattgcccactaagctataaggaataatggcaagatactgacatacaagaaaactgtatttgatgtaactaaaaagtatcacttattagcaatgatgtgctactgtttacttccacgtttagttagattaataaatgaatataaatttatcttttttgcactaataaaaaaaatttgctagcaaatactcacagtttgagattaaatacataaagccccagcacagttacctgaaggaagtaggttcacaataattttacattaattttcttaagcatatgaatgttttatcataatacaattacttcatatttattaggatcatatatcattgtgagggcttttgtactatatttgccagaagaataaggagagtctcagttattttattatatgctggtacgaaagtaatacattgtc

SEQ ID NO: 44351 - DNA, 1119 bp, Homo sapiens
aggcctaaggtgttctgtttaatcatttattttggcatatatgtcaattttcaaagaattagaattagagcacaatgaaaaataaattaagatttaagactagatggaatataaattctctctttgtatttgaagaacattatatctctacattgccattagaaatggtagcagttttgagtgctggcaagctttatgtatcagttgtagatagctcttatttttaggatgcaccaccacattttgtctctggctttattgctgctgtagttataaatgagtattttaaatgagaaggccctggacttttctacctttgcatggggtttctttggaactggactttttattttacaaatgtttcccaaagaagtcttcataccctcctcgtcctgtacctagaatcaaggaatcagtgctggaccataagtagaaaaaaatcacatatgtagagccccacaaagcagcagcatgaaagggagaattaaggggagattttatgtttgatatcttaaaaaggaaggcacaaataatcttgtatatatcacattggactttgtaacacacatagtttttgtttgattttgaattacaaatggactgtgacaccaaaattattcatgttcttagagattttgaggtttttaattggccctatactagtttattctctccatagaatttcagagttgaaggagacagaaaatggttcatttacttcccttctcagtgcaagtaacccctctctaacatcccttacaaagattcacttgggtgctgtttaattatttcagtggttacaggatgaccatatggcagcctactgttaagtattatgagttgaaattctgtatctttgtgaattttacccattaatcctcgttctaatctctcttctgcatgatagctctttgcatatttaatgacaattttcatgcctcctcttcccaggaggtgtggtggctattcacaggcatatgttgtctgaggaacgcttattttctagattaaacattctcaatttattcactaaacccactacttaaatatttatttagcacatactaagtgctagatcctggacatacatgatgagacgtacatttcttgccctcaaat

SEQ ID NO: 44352 - DNA, 1086 bp, Homo sapiens
cggccaatgtcaagaaactttttccctatgttttattctagaagttttatggtttgaggtcttaagttatttaatccatttttacttgatggtgtttagttgatggttttgttgatccatttgtttatgttgtaagataagggtcaacttttattcttttattcttttgtatgtgtacatccacttttcccagcactatttattgaagaaaccatccttttctcttgacactcttgtcaaagatcagttgaccgtatgtgtgtgggtttatttctgagctctctgttttgttctattggcctatacatctgcttttatgccagtaacgttgtttacattaaaaagtttacttaaaaaagttaacattgtttacttttttgattattttagctttgtaatagattttgaaattaggaagtgtggtgcctccaatttattcttttgctcggaattgttttggttatttgaagctttttgtggttccagatgaattttaggattggattgctttttctgttactttaaaaaaaatgccattaggattttgatagagattgcattaaatatgtagatcactttaagtagtatggacattttgactataataattattgtaattcatgaacatgggatttttttatttatttgttgtctgctttaatgtcttcagtgttttatacttttcagtgtacacattttttgccttcttggttaagtatatttctaagtactgcattatttttgatgctattgtagatgagattgttttctgaacttcctttccaaatagtgcattgttagtatacagatatatgaatgactttttaaaattatactttaagttctgggatacatgtgcagaatgtgcacttttgctacataggtatacacctgccatagtggttgttgcacccatcagctcgtcacctacattaggtatctctcctaatgttagccctcccctatccccacagcccccgacaggccccagtatatgatgttctcctccctgtgtccatgttttctcgttcaactcccatttacaagtgagaacatgcggtgtttggttttctgatcttgtgatag

SEQ ID NO: 44353 - DNA, 1029 bp, Homo sapiens
atgatctgctcatgtgacagctgtgtgaaatgagtcagcagtctcaggccagtccctcagggacagatgtcgagatcacaaagccacctcagtgtttagaatcctcattatccgtaactgcacaaaagcagatgactacctgggctgtaggcattcatcagccctcagaaccacttcattccatggtcccattagttgaggatgaaggtgaaaacacattaatatggcaattcgggggagcaaggggccctacttgggccaaatttgttctcagttaaattaaaatgcatccatttctggaactaacaatccagtacctttaaaatattatataccccaagacaaggtccaaaatcttttaagaaagctggaattcactggcatctgattagccatttcatgagtgtctttgtgtaacagcagtcaggtgaagtggtgctgttcacctgattgtagagaggccaggattttggactgtgtctgacctgtgatttccctgggcttcatgaagtaaggattcctgaatggttatcttaatgtaagttcagaatcacctgcgggaaagcaggcacagtttgcctttgagggcagatgtggagaaacttaacttaagaatgaattgaaatctaacaaagccctagaatctaagattatcaatccaacttgaagtattcgaagaattttattttcttcttttaaatttcaacttttgttgtcgatatgggggtacatgtgtagttttgttacacctgggtattgagcatagtactcaataggtcgtttttccatccacatctccctccctccctctcccctctactagtccacagtgtctgttgttcccatgtttatgtccgtgtgttctcagtgtttaattctcacttataagtgagaacatgcagtatctgattttctgttcctgtgttaatttacttaggattatagcctccagctgcatccatgtggctgcaaaggatatgattttgtacttttttatggctgtctagtattccatggtgtatatgtacc

SEQ ID NO: 44354 - DNA, 1033 bp, Homo sapiens
ggttcaaatttaaagttatattagcctctgaccaacaaatgtccctcatcttggaagaggatgaccatcaagtagcttgcatacagctcaggtgtagaagtagaattcccatttcagcagtgactgtcaaaaccaattgcatgagcatgaatgctctaccaaaaatgtttgttcattatttactgatttataatatatatgaatgaggataatactttacattctcatgttttggagcattttcagctcatcatctcacttggttattgctatatctatgtttatgaacctgattatcagtgaatcacggaagttgtaaaaaacttatgattagttagacaataggtgtcacctgttcattcgtctgtccctcaagagaacttaaatatttttagaatatggccctcagaatcatgtcgctgtgtatgtgagtatgtgtgtatgtgtgtggcaggggcaggggatactatagacactggattgtctccagaacctttaggattatcaacaaagtacagaattgcaaactaatcttgtcttggggaataaataggcacaaaatgtatttcaaagtcagactcactgtttttgctcgtttaggcagccatcctccttttttgttttaagttataaatttttattatattttgagggcaaaagtaataaggccaggtgcggtggctcacacctgtaatcccagcactttgggaggctgaggcgggtggattacctgaagtcaggagttcaaggtcagcctggcgaacatggcgaaaccccatctctactaaaaatacaaaattagctgggcatggtggtgggcacctgtaatcccagatacttgggaggctgaggcattagaatcacttgaacctgggaggcagaggttgcagtgagccgagattgtgccgctgcactccagcctgggcgacagagcaagagtccacctcaaaaaaaaaaaaaaagtaatcaaaggcctcaggttttaataaaaagtagaaaagatataaagaaatcaagccataaatcaaaagat

SEQ ID NO: 44355 - DNA, 1029 bp, Homo sapiens
aaagtagaatcttgaagcagagtagcagtttgtcaggcaaagattcagatagcctaactctgcatgtttgtagattttacaatgcacaattttttttagtttagaatatttaacttattttaaatcacacttatgtggcaatgtagttagtgctaaaatatatgggatggtccattgaagacccattacctaactttatcaaccatacatcatcattctctgagccatgaggtctccaaacctcagagtcatactcctctctggcctgcaaattctagccactcaacaatggctcacaaattctgcctttggagtgtctgtgcatctttcccttcttttctattcctactatcatctttccatagttcactgttctactaaaccagaccctcaggatccatatcagacactttcaccaatccttgttggaggcaaccaccaaaatacattttcctaaaattaatttattctgaggccctgctaagaaacatttgccccaagttattcataggatatagtcatctagtctacttattatcttacttaaagtctcccataatcacccatcattcttagcacattcttactccagccaggcaagtacaagagcccacgtgttcaagtctcaccttcactgctttttagctgttgcatttatctttttgagcatgtttccttatctgtgagttacatgaataaaaaacaaagctgttaggaaaatgtgtgtgctaacacgtgggaagcgccctggcttgtgcctgacacataattggctctcaagaaaatgtaacttttttttttttttttgagatggagtctccctctgtcacccaggctggagcgcaatggtgtgatattggctcactgcaacctctgcctcccaggttcaagcgattctcctgcctcagcctcctgagtagctgagattacacgtgcccaccaccgggcccagctaatttttgtatttttagtagagatggggtttcgccatgttggccaggctggtttcgaactcctgacctcaggtga

SEQ ID NO: 44356 - DNA, 1052 bp, Homo sapiens
aaatgcagtcttgaaataacaaggcttcttcctttcgcaagcaattttatagaatttgtcaatctccagagactgaatttgaaagcaactaactggtgacctctcatttacttactaacaggtgccaacaggtacaccaagagacatagcagcatggctttcatggcaccttgttaatctgagtaggttacatgtatgaaaaagtcttttccaattgtacaaaactagagtgatgaaaactgacaggtttctacctctgtatttatcaacagggtttataagtacccaaagactgcacagatgaaatagtttggcaaattaagaagggttcattacttgtaggccctagctaagtgaccatatagtttcaagcaataaattaaaaggcctaattgaagctttttaaaagacacacatttatattttaatttcaaagaggagccctttaaaatatccatgaggcatcaatgcatgcacacacattcacagtgattggcaaatttgtgatgttagagctgtagaaatattcaaagtggcactaagcccaaccctactctgtaaacctggtcttttacacttgccaattgggagactttctctaaatcttagcatgccctagaagaccttgattatgtatcaaaggaaacaaagacatacatgcagacattgagatcttttgactcatttctcatcacccaaggctgcaaatcttttcaaatgttatatttcatattgtggttactgtctccaaatatcttctctttccttctccttcaattgccttgcagctggcaagtctctggagtccctgtcccctgccattgcccactgaacagaccatcttcatctttgtgccttgctgtgctctgccttgcctgtatccccattgttcacaggcaaacattctccttgagtatggaaaaaagagttaaagcaagggtcaggcaggaaatgagagtggaggcgtgttggtcctccttttatgaataaaacaaatgacatggaaagaatgtattaggtaagtacacttaaaaaacaggaaggaataggca

SEQ ID NO: 44357 - DNA, 1134 bp, Homo sapiens
gttttaataagccctcctaaagattttaagacacaccaaagttggagaatccctgatctacatgaactgacttctgtctccaaattcatcttctgttataacctccttgcctactgtcattctttccttacaccgtgctttctttcttttcctcaaacattgtacactcatacctgctttagactttaggttgttacatgtgttttaatctgaacacacatgtgcacacacacaattggaaaaaattggtgttcgtctctggatggtagagctactggttttatatatgtgtgtgtgggtatatatatatgtgcacacattaccaataatgtatattgttggtatacataatgtatgtgtgtatatatacacatattaagtatatacaaaagtatatacataaatatatatacttttgtgtatatatatgtgtatatatatacacatatatatatctacttttctaattagaacaaataacttctattaagttaaaagaaaaaaccttacatgatctgacatctgtagataaagttttatgaatagtatatctggggagcttggtttcaacatgaagtttttttaattaaaaattcgggtagcatttaaatttgaaaatgaacaacagagcacttaaaataggtttataccacagcaagataccactgtacacctactaaaatggcgaaaatgcagaaaaactgacagtgcttgtgagaatgcagaacagaaactcttactcattgctggtggcagtgcaaaattgtagtcactttggaagacaacttaccagttttttgtataaagttaaacatagacttactatacaatccaaaaattgtactcctagatatttaccaaagggtttatgaaggttgtgtcaacacaaaaatctgtgtgtgaatgtttaaacagctttattcttaatcactaaaacttggaagcaaccaagatgttctttagtcagcaagtgaataaaaccgtggcacatccatacaatggaatactattcaataatagaaacaagctattaattaatgcagtggcatagacgaatgtaaatgcaaatggaagaagtcaaacccaaaagatgacatattttattattccattcattctagaaaattatagggg

SEQ ID NO: 44358 - DNA, 1051 bp, Homo sapiens
cagaaaatccaacatgcaaatgcaaagctaatcattaggcaataaaacatttataagtcatttctaaggaaagcaaattttatcaccatgtgttatttgaaaggtaatacataatcctatttcagttctgagaattgtataatagcctttccatttttgtctgttatagtttttggtgatgtaacagtagataccatgattctgcacaatgacttggaatacttagtgagcgggctagagaagcagttaatgtacgactaccgcacgatattcagagcataaagctgctttttgccaacagtttgatgtttcaggttctggcaatgagttaattaaattagtaagtgttcgctttaattcattcaaacttggggaaccatcatggtctctagtagaaacaaccaggttggcctgaggaattcagattcaatttgcttggccttcatttgtgcattacctttagaaaacattttttttcttctatttaatctttattctaaatatcttataggatttaggattttgccttattataataccaatatgtgacctgttcattcaggaaacctctgttgagatcccaaataggcactgaagatatatgagaaatgttcattttctttagagcaggcaggatagggagatacagagggttatgtgtaacagaaaagaggtgcacagagtattagggggttgaaaagaaacaagttgaagcttctcatcctaacctacaaatccctacaggcctgcccttgaccaatctctcatgacctctgggatctcaccttctccctctgttcccccgatcttctgcagttcatccaccctggacttcatgcagtccctcatacacttatccacccattctcagtgtcgcacttgctttcccgtctgcttgtagtcatcttccctcttatctttgtatagctgctttcttggcattgagaatctcaacttaaccatcactgagaataatccttccctttaacccagtgggaggtgtacattttctggctgaccactttttaattttgggactgtgttaattacc

SEQ ID NO: 44359 - DNA, 1032 bp, Homo sapiens
ttaaggatacaaatttgctgttttggaatgttgcttcaaactgtagagaaattttaaaaggatatttaagaaccttctttgggaaagttaatttttaatgtagatatttaatctgtctgtgacattatgcaattttaattttgattatatgtaaattattttaaaaagaaatatgtgaatgttatattggaggagaagaaaagcaggtggcctgagactctgggactgatctgtgaagtggtgccagatgttccttccaatcccatgaatgaactggtgcaagtgagtcagagactagatgcaggttgacaagagcatgctggatgctttcaaattgtactacacatgcagatttcttaggttagattttgaatgatgtcaagggagacaacagtaaaggcagtgcttttctggagcattcagcagccatttgaaagatggctgctttaggctttcatcctccagccggttctgtgcactggtggtcattttaaactaggcttaatgttgtaaaactatataccctctgtctttaagagagaaaacctaagtgccaggttggcaaacattaaagaaagagccaagaatgtgagggaacaaagtgctctcatttgctgttctggggaatataaatttattataatcttctctaagaatgattcggcaccatctaaatatcaatatttggaacatccttttaattgagcagaagaaacaaatctgattgcagagttaaaattattgaatggcaatgctgatataatttagcaagaaaatagaatcttccaaattgatattgttaatttttcccttaatagtttttatcataaatttccttttgctttaaacttaactttttctaagcctttagtaaaaaactgaatttatagccagaagagatcttggcacattaatgtaatgtgaaaatttactaattttagaaatatgaccatatcactcttcaataatgtgagtttttaatgcctatttatgaaaaagcatactcttccaacaacgcatatctgtggtaag

SEQ ID NO: 44360 - DNA, 1066 bp, Homo sapiens
aaaaagaaaagataaggcaaagcaatagaaatcacagaaactagcctgttctttatagaaaggaatagcctgagaagagaaatagaagagcaggccttggggaggcaggtaggatctaaagccaatggagctgctggaacctggctcaggtgtatgtctgtgagatttaccccaccttctccatgtttcaggaaaagctttgagacttctcctaactgtaacagtgtcacttctgtatgtgtttacccttgtgtggccccttgtttttggcagcacaaatctagaaaatctcaaagatgttgcttgcttaagagtcagaagctcaggatcgagggctgttctggtgaaatgtgcaggatggcagcagccaggcaatctctggcaactcaagaaggaaaggacacgaatgggaagggagccttgccagggctgccacatgacatcgatggccatcgtttggtaatatcctttgttccagagcttcaggattagcatcaggagtggaaaaacaggaaactctcttctgaaaaaggctatttacattactttgagtcagagccagtaacatattaattatcaacattaaggcatgaaggaaacttttaaaacactaagatagaagatagcacataccatagttaagatatgaaattagggataatagaaagacaaattgttattgttatcaagaaaacataaaaaagaataaaaacaatgtaagtagcacctagattagctattgtgctaataaaatttcatactttggattctttgatttgagaacaatgtatctgcagtggtgcgcattcatagaacaaaatattaagaaaaaagtaaagatcaacatgtacagtctaaaatgagtggcataacagtacaagaatctgaaattgttagctgtgatttaattgaatcaggatattataaaaaggaacaggagtgaaggaagaataatctgtcagtggaaagtttaattttggaatattttaaggaaatgcagttaatttcaaatatatatattcttttagagaaacaatgttatataatattaaaactgtatatttga

SEQ ID NO: 44361 - DNA, 1078 bp, Homo sapiens
ataaagcaagaataaaagcagtcttatatggcttatggaggattcttaggaatattgacagcataacagaagtttaatgaatcttaactgatacttagatacataacttagcagaacagagagatttaaggccaaatctctggtgtctcttcccaaatatgaccttattactgtacttatttttacccaacccttgctacctgtctcatgaacatcttactctatggttgtctctattgttgtttttattttattttattttccagtagtaatggacaattagaagtcccttagaggtattgctttccaagcctccattctttctagttatgataagtgtgtgagaagttgcagaggtggtaaaatcagggatggggacaggtatattctagccccccagctgttgggcaattttgagtaaaaattacatatgatgaatattgacttggatattagacttaccctactgttgatcttcaagtccacactcaaataatacatgattctttccctgctgaaaaaccagctagaactctcagacacaggtatggatgttgggttcatatctccagttgttttcctaatcatctttttttttttttttttttttgcttataaacaatggtcatttatttcttacagttctggaggcttgggaagtccaaaatcagggtgttagccaatttggtgtctgtgaggacctgcttcctgattcacagacagctgtcctttcactctgaacacatgtggtggaaggcatgagagagttctggagtctgtgtataagagcacgaatcacattcataaggacatcactctaaaggatttcgttgtagaggtgggagacatacaggtcaaagtaaaccatcttactggtattttttactgtatactgtgtctcctacacattttaaaattttagagagatttggggccaacattatgacattagttaccatgtattataaaacattttgaatcattgtggagtatttggctgaaatatttgtagaaactctggctggattgctgaaagcaagtggtgttagcatctacacctaattgtaattgttttttg

SEQ ID NO: 44362 - DNA, 1047 bp, Homo sapiens
cctgaaatacttcacttaagagttaaattaactaactctggaattctcttacttttgtactttttgagatacctgataataatccctcccccacccccttattgtttaacagggcgttttgagttgaggattctattactttcagtgaaaagcattctaactacattaaaggtgtaagatagaccttaatgtttatcatattgagagtctgccactccttatcctagaaggatggtgcacaaagatgatgagctgaaagtcccttgccttctgctgctacttttcttcttttgcagatagccacttctcatccatgtaatacctggtcaagaaagaaagcaaaaacttcagacatttctgaggaaagtaattttatgtcatattttcttcttctgaaagcaactctgttaaaccacttactgcctgctggaaaaggccattgtgtggcatgagttggtcagcatctttaagcttttacactggctcacagttgtctgctcctgaggctgtcggaatactttgtgataaacataaagtcactgtttcttgcaaatatggcttcagcatatggatctgtgccatgaaatgccagatggtactgaggcacaaagttcttcctgcgtgagagtgatatcatctgcaaaacagagctacccatgctgcatctcaacaaagaaatcctttgctcttcttttggcctcattgagtctgtccatgaacttattatttggacaacatacagctatcttagaattcttttcttaggctttgtctgctccctcctcttcactcacttgcttcagtgctggagtctttgctcaatggttatgacaagatatattcttcaaaaagtaatagtgaatggtgaattttcttctactgtagatgatttacaccagcaaacactgtacttaaggtgggatatattgaaggttggcatctgcgttgaagaaatctgcatcctagtaaggaaaaggccacataagcaagtgacagatgtatgtatgaggtacagaagtggcacaaagaggataagatgacataatt

SEQ ID NO: 44363 - DNA, 1062 bp, Homo sapiens
attgcttttgccagtggatttttctgttaccttaaacaattattcttactatacaggaaagctgttgattttttgcaaatttaactgtatctgttgaatttaccagactcccttattggcaaataattagttactcaggtcattctggttttctgatggaatgtagtatctaaaagtaaagtggcattttaaaattttggtctagctttcagtgggactgtcattaatttttcacctgttaggaatgctgtttatttggcatgtattaacatcagtttatggtttcaaaatgtttggactattgaagtgatatgttaatcacatttttactatgaaccgttcttgaagaaatatgacaatcttagtggatacttattttaatataattgattcacttttaatctttcaaatatttagtgtaatcaccaaatgtggatgtttttataggctactcaaaccctacctctgttcttcagttctcatctaagcagtattacattaacattcccactgaattctaaactttgttttctttcactcctccatgtcaagtgtattagctcaaaaccagttctaacactgaatatatgaaatctcttcctctgtccatctcctccactgttcctcactgttcctcacctggtctattggaactgtctcctaagttgtccccctacctgatttttctctccctaacacaaatctgatcatgccagttcaattgttaaagttaaatgatggtgtcaccttacctcactgttcagttgacactctttttctgtgttatttccagcttggactgttgtcaggtacccacagtttctcttttttagccttactgcattgcttaactttacagaaacaggatatggagtcctcacagcctagaatgatccactgccttgttttcttcgtgaccacaccttccctctttggcttgggatccccctcaccttgggagtgttttacaacactgtggctattcacactgattttaggtgtctttcctttctactcccattgtatcctttacatttatattctacttattgcacattattt

SEQ ID NO: 44364 - DNA, 1021 bp, Homo sapiens
ccataattggtagaacatttataacctatgcttttattaaacaaactgatcccaaaataaatgaaggaagaattcaggcctagaaaactgtcttaactaactttttcttggaaatggttctggttctcatggctaaatataagcctgtgttaacacgttgttccatttatagaaaagaaaaaaatacagctctttacattttaaagaaagtaaattggtttgagatgacttttttgtcagttcttttgtttccagagtgtgtgtgtgtgtgtgtgtgtgtgtgtgtgtgtgtgtgtgtatatctatctatgtctatatatatatatttgttgttgaagagacttgaataaattttagcaaattaatttttaacttcaaaatcaactttcaataatttagacttttagagattaatatatatggcaatagtgattgaaattgaaaatgtaattgaaaagttattctttctcttttttattttaaaatctaaaatgcttgcaagactttagtgtctctgaactacactgatttttctagctatttttcatttttttgtagcctattaataaaaactttgacctataatatataaagtttatgcaagacagaaagctaagcagacataaatttataattcgtctattgtcagaacaaacaaggtgaaggaaaatgtgaatgccaaacatcagggaacaaaactagtaagagctagctgtcttcatttctttaaaatgtgaaaggtaatttaaggaaagctttgcaagaaaactgggatgataatttgaagtacagttatggaaaagtagtttgctacaagtagaaaagaaggttttaaaaaggtactttttatgccaacccttttctgtgattaaagcaatgcctgaaaaagcaatacttgttcactgcacaacataaaggatgtgtgtaaacaaataaaaatagtttgtatgaatcctacagctcttttaggaagccttttttgaacttctggtctgggttatattccttcttttgtgccaag

SEQ ID NO: 44365 - DNA, 1034 bp, Homo sapiens
ctggaggttgaggctgcactctagatagaggaagaccctgtctccaaacaaacaaacaaacccagaatgggctaaatcggattattgatgggacagggtggtggtggtggttcctggaggtattaatattagatgtatagtctaacaaaggcagggtaatttcccacctttttaaaaacagtagctgtgattaaaaattattttattgtaatttatatagttggatgcatatttatatctctagaattatgagtatggagcaaaatattcaaagttgtatcatcagttgttagcagttgcagagagggggatgttgctctgggttagttagaagactcagtatacagaagttcagtaaaggaccttcaatggaatcaagcagaaaagaaaacaagtgcacatggtaaagaatcatgattgtgattatatttatatttttatgtaaaattatatgtgtacagaaataagattttaaaaaatatagtctctcttttggacctctgatttcaggataagttgagactacatacctcttttctcctaaaattatggaaagaaccaaaaattacataaaaattagaaaatggcaacatggaaggatgccaccaagtagcctgagactttgaggaattttttagcatttctgcaacagagagaataagagaaatgcccatcagagctgactggtctttgattcaacacaggcaaggaatggctacctaggaagtcaatggatgggactcatccagaagtaaatagtccataggtatatagtagcaagatattggagcatgatagggagagggggaggacagagcataggacaacaaaatgaagtcccttggaagactcatcaatggattctacctgtgagaatcgtgatttcctgcagtgggctttgcttgctgtgacattcaactttcgaagatgttgaagtactattagaaaggggggaaacaaagtttgtgaaccaagaagtctatactcagttctatattatggatgagtattgtagtttagattattgttcagca

SEQ ID NO: 44366 - DNA, 1094 bp, Homo sapiens
agtagcaaggtttaagaagtgtgtgtgtgtatctttcaaaagagcttcatctcataccatccgtggtttccttagtatttctttctgtagtttaaaatctgaacattaaacaatattatttcatacctaggagggagaataatttattatataagactgtgatgtctaaatgagaacttcagcatgtgaatctcatgcattacaaatagttttattgtacttttcctcgcgccgttgatacaatcttatacaactttattttgttctggtagtcagcatggcccacaacgtttaagaacagacattcagacagctaggggaattgatgtgcctgtgcatactctatgggcacactgcatattgaaatctgagataaaaatgatttgtccctttgctttcgtattttgggtgctaccatttctttatgtacctgatcatagttaatattcctacatccattagtgttgagacgtggtggctataggaaaaattataatgatgggctcttgggagagcttggctgtacagcagcttggattttatgactgtgaattttcaagtggtagatcaattaggcagaactagtcatgcattgcagtatctttaagagctatcttaaaacaaatttcagacctggatggtattcatgagctataatttgaagaatgactgaggctatgagtactagatttaggcactttgaagaaaaaaacatttcatatggattaagttggatgttttattcataagagctggtttgatctttatatgccttgatatttttaagtcctgtagttcctgttttaaatttattactatacagtctttatttgcaacaattaaattggccaggggtaggtggtgattagaaacattttcttggattataggaacattaataaaatcccatttgaagtaaattcactcagaaacttaattcttttctttttttttttttttttttagaaacgctgtctggctgtccccttggctgtcatgcagtgacgcaatcatacctcactgcagctgtgaatgtctgggcccaagggatcctcctgctttagcctcttgagtagctaggaatacaagcgcac

SEQ ID NO: 44367 - DNA, 1050 bp, Homo sapiens
tttttagaaaataaacagtggatttggtgctaagaggcaatagattgatagttgtcacatgtattctcccctgtcccatagattaacacagtctttaaggctgtttggaaatcatgaaacaaaaacaaattttgcaacaacttattttagttttaatataatctgtccttagataataagctaacagatttctatatttgaatattattaagtaatcatagaagaaaagattacctaagtggtaggtctgggggaaattcttagcactaacttcatcactcatggtttagataatctgtattatttgttgcaattactatgttagaatatttcctggactgcattaatgttaagctgtgagagaaagataaaatcattcgggttgttgttaatagatggcaggactctgattgtcaatttgttttttagacatcttaaaatatttaagtcagtgttaaagcagcattggtgttgtaaacccattaattgtccatgccaatatagtgaagtaactaaagagataattaattgggcaataaattgtagattctggcccttatttcccaatcacatttcgttagatttgtttttagttctgtgggtacagtagtagaaaaaaatgacatagatcaaattatgattattaccagttctaaacacttttatttcattgtagaactgagatcatcacaatactgatttattcattctaaagtgaacactaatcttccacatcctcagagatataaggaaacatttagatagtcaactttcctaacttgaatttataattttgtaaattgcttatgaatagcttctaacaatgtgagtctcatctattgtgactgccacattaagaaaatccaaaagcctcaagaaatcagggctagtacttcttatttatattttcagaaatgatcataaaacaaaggtttgcacattcagtgctctaatataaatattaatacatataaaaatccatacctcctacttaacagagaaagggctattttgttggcaagtttaaaaatatttaaaacatccatgaag

SEQ ID NO: 44368 - DNA, 1025 bp, Homo sapiens
ggtattatattgaaacattatttgcaccatgctttttcatttagttgttttccttgagatcactctgtatgagagatctagagcttttcctcattgccttgaatggatgaatcacagtttatttgcttttacaattgatggcatgatatcctcatgcttgggttattttctattttacaaagtgtattttgggaaatactacagatgggatttctgaatcaacagtaaacatatttgtaactttgccacaatttttaattgtggagactttataacatttaatatctgttagggctagacaacctccctcctcatccagttactgcactttttctagctatttttgctatttatttttcaaccttgaactctttattcaacctttgaaagacatgtggattgtttttagtttttggctattggataatgtctctgttacttttttcgtttccttggccaaaaatttagtatatgaaaatgatagcatctcagtcagatcagtgagaaaaagatggactttttaataaatagtgttggaacaaccagatagccatatggagaaagataaaactagatgtgttcctcacatgatatactagaacaaattccaaattccgggtaacttctaaatataaaaaataaaatcatgcaagcacttaggagtggaggaaactctcctgtatatgattcaaaactgagaaacaattaaaaaatcttaatacactgacatggcagaaaacctcataagcaggattaaaatactctgacaaattttggaaaaaacatgcagcctatcatagctaaaggactaaaagtatttatttgtaaagaacttcaaaaaattaggaagatgtaataactaaataaagagcaaaggatatgaacagacagttaaaagaaaactaaatacaaatggccctttatcatatgaaaatatacttaattctcaaaaaaattaaactgtaatgagatatcagattgtcaagaatccagaagtttaatatttgttgctggcagagcttcaa

SEQ ID NO: 44369 - DNA, 1022 bp, Homo sapiens
tatatagtacacctcattttatacataaataggtatctcatctctcttgctcttcttactggacatcacaatgtttggaaaagtggctgcccatttgctattttgaattagcttggcttaaataaattatttgattggtgacttttgagatacaacaccatctttaaggcaccatagaaggatattgtaattaatgaagacttctaaaaataaatattataacatagaggttttatttttacttctgaatgttttcttaaaagacacctttcaaattatatttttacagtggttctaaaacacacttaatacatgaaatgatggaagctgatggctggaagttaaaagtgaagtagactgtgtaactgttgaactatgtcacaagctttttgtatgcatttttcacgatatattttaaaagatagtttaaatttagtttaacatttacctttttttccataggataaataaaagttgatttgagtgtggcttttgcacacaagagtaggaatctgaggagttggtcttataattacctatatataagactcatttctccttgtaaaacacatttgtgaactaaattgatccagcgatgtttccttcaaagtgtgaaggggagagcatttctaatccttttggattctctgcttcatcctaatgttgaaggaaaaatatggcatgtttgaatttattagtgccagtagtataaattttatatattactttaaaatgtggtgagtagaaggttggtgagagtggaggacagtgctttttgatgatgaagataatacctaggttctattattactgacctcaggctgagcacaccctgacaataatggacctgttccttcttaaggaaaaacagaataacatcatcatatttttggtatctgattttgtattttagaatgttcatttagagatgaaacttttaaatatataatgcttttaaaatgatttaaaacattcgcacacatgaggtccagaaaagatggtataagagataaccaaaggag

SEQ ID NO: 44370 - DNA, 1047 bp, Homo sapiens
caggctttggtatcaggatgatgctggcctcataaaatgagttagggaggattccctctttttctgttgattggaatagtttcagaaggaatggtaccagctcctccttgtacctctgttagaattcagctgtgaatccctgtggtgctggacttttattggttggtaggctattaattattgcctcaatttcagagcctgttattggtctattcagggattcaacttcttcctggtttattgttgggagagtgtatgtgtccaggaatttatccatttcttgtagattttctagtttatttgcatagaggtgtttatagtattctctgatggtagtttgtatttctgtgggatcggtggtgatatcctctttatcattttttattgcgtctatttgattcttctctcttttcttctttattagtcttgctagtggtctatcaattttgttgatctcttcaaaaaaccagttcctggattcactgatttttggaagggttttttgtgtctctgtcgccttcagttgtgctctgatcttagttatttcttgccttctgctagcttttgaatgtgtttgctcttgcttctctagttcttttaattgtgatgttagggtttcaattttagatctttcctgctttctcttgtgggcatttagtgctataaatttccctctacccactgctttaaatgtgtcccagagattctggtgtgttgtgtctttgttttcattggtttcaaagaacatctatatttctgccttcatttcgttatgtacccagtagtcattcaggagcaggttgttcagtttccatgtagttgagcggttttgagtgagtttcttaatcctgagttctagtttgattgcactgtggtctgagagacagtttgttataatttatgttcttttacatttgctgaggagtgctttacttccaactgtgtggtcaattttggaataagcaagatatggtgctgagaagaatgtatattctgttgatttggggtggagcgttctgtagatgtctattaggtccgcttggtgca

SEQ ID NO: 44371 - DNA, 1044 bp, Homo sapiens
caaagatgggtgggggcaatttgctgagccaccacttactggacatgagagaaaagtatttattacttcagatcttttatgtttattatcctgcttctgactgatgacagtatcccctcttctccctcatttctgggatttgtgatagagaatgtaggttatttatttggcttatcagcagggaatagtgactaggaagccttatttgaagttttaagtctctcaaaagcatcttgatcttgcctgtactataagcttataggatgattaaaaactagggggaaaaatgcaaaaaaggagccttagaataaaatgattttttttttttaccttttttcattttgatgttgttttaagccacatgtctatctttacatccaaggtttgctcaatctcttcagccttatgtgaatcctccccactcactttgtctctgaaacttaaatatttgcctgacctttttaatcacatcagacttcctggatttcctgtcctttatctgatgtgactttggataaactcttgattgtatacattatacctgagcccctgagcataaactatgtaacttaggatacattactatagatgtatttttaaaaagacttttctatttagttaagcaatattgttttctgtgctaatatttgagtgccagtcttctaaaatatttcctgtgcattaatgtgataaaacaggatatcccatgatatttttaattcctctcacagtttgaatattatagatgttctttgagaaggaaactcttataaaaagtgattgaaaagatatgtcgtttaggtgattcatctcctggaaatgagagttgtagtagtgaacaaagaatcctgatttttaacataacattgagtatctcatttggagtcaagggcaagcgggatgtttttttaactttaaaactatgaaagggcgtgattaccactaattttaaaggataaagtttcatacaaatgtgaaatccaacttagttacatctggattgtgttcctgttcccctagttctttgcctcttgccttgtaaca

SEQ ID NO: 44372 - DNA, 1042 bp, Homo sapiens
agataggagaattgcttgaacccaggaggcggaggttgcagtgagctgagattgcgccactgcactccagcctggacaacacagcaagactccatttcaaaaaagaaaaaaaaaggtatgaatgtgaagaataatggagaagggagacaattgaggtgattagagcagtggctttcaaactctaacatgtgtaaagtcaccagtggagtcctttaaaatgcatgttcctggatctgctgccgggcatactgggtcagtaggtttggtatgaggcctaggaatctgcattttaataagcactccagctttggctactggccatactaagaaacttttggtagagatttgctgcagggtcatgcacagcatggcatacttctataagggagtggtgccagcttgaagatcatctcaggaagtgaaagagagctgttattgtccttaccacttaatcagctttagtacttttgtgttttgtttcctgggacctcatttttgtgtgctcagcctattcactcttccttgctccttatcgagatgtaaataactgggcagcctcttccttaaaattattggctcctatatttaaagagttgccacaacatagtcttctgctttataactaatattgcaattcctttatctgtatattaattttaatgctgaatctgaatataaatatatagttcaattaaataatctgaggtggcatttcaaatacctcattcttggctttagtttgcctgtgtaacaccacttttgtagctaaccaaattcagcctaaagtttacttttgaaatgtacaaagcacactcataaaaacttgcaaaatttgtaaagtatttacagtgattttcttgttatatcagagatttataccttttgctttagtttgcaatttagtgtacaatctttacagctatttttcttgcactgggttgttaaatcagttttatatctttttattccttggagtagagatgaataaaccttgcttactagattttgtaatacctttatcacttaatatttgaacatcctt

SEQ ID NO: 44373 - DNA, 1024 bp, Homo sapiens
gttgtccctttgctctttcttcctcttccgccatgattgtgtggcctccccagccacatggaactgtgagttcatcaaacctcttcttactgataaattacccagtcttgggtatgtctttattagcagcatgagagcagactaatacaggttcattaagtcttagctattatttttagtactggtttacatgctgcaacaaggaagaatgcacccctcaggcttcctgctgtgggaagcataattgatagctgaactgctgctcctctgagtccaccttcactctgaggccatggtttctgtggactttcctgagccagtgattgggcacagaagggacagctagacccattcctgtcctctattgagtgactttaagctcaaggactcctcagtggcccagttgaacatccctggggactgcactgtagtccaattctcatatcttccctctttccttctgtagacatcacacctgcaccttgttctgagagtgctccctgccttctcctgttccctactgcaagatgtcttttgcatgtttaattttgtgtagtgtttgcttcttggcaacccaaatgaatgcacatgatattgaaatattagtaattataactcattacagtgataagtgacatatgtgagttgggagacacaactatctcattgtaggcatacaacttagctggtcttagtgggagtagagagatacttggccagtgcttaccagctgccatatgctgggcagggtaagaatattgctagggtgaacagagaacatctactaaactgggttgcaaagcaggagggccagccccttaaatgctggtgttagccacagggacaatgccagtgccatagaggagctggtaactggggcattattttgatcaaggtgtaatgaatccatgatggaagacacttgataataaggctttgtggactaaaaggccttagctccagcctgctcttctctctaggagagtactagaagctggaggatggggatgggggacccccagag

SEQ ID NO: 44374 - DNA, 1057 bp, Homo sapiens
aatactgtgagtagaaggcagtgaacgcaagaccttcatttcttttttttctgagacaggacttcactgtgtcacccaggctggagcgcagcggcatgatcatggctcactacagcctcaacctccagggctcaagtgattcttccatcttgcttcccaagtagctgggaagctgggactacaggcacgagtcacccaccactcttggccaatttttgtattttttgtggagaccaggtttcgccacgttacctaggctggtgtcaaactcctggcctcaagttatccacccgcctcagcctcccaaaatgctgagaatgtaggcatgagccaccacgcccagctaagaccttcatttctggcagctccgaggacatcgctccagcagttactatggcctggagtctgttggtgttaacgaattgctgtaggctctttgaaggaaggacagggctggcgttttctatcagggactcctccccacagtagaaggagcttctgggactttgccttgggcgccaagtaagagaatgcttgcaaagcgctgaagctttggcatgtactacatgcccctctaccttttctcctgctcccttccccacatccgcttttcgctcctgcttcccctctcttcttccatctctcctgtcactcctccagcctaattcccctgggaaggatttgatatgaatattatggatcatacagaacaatgtatgcatatcttcaagatttaaacagttacatacatgtacattcatttgtgactcttgatgtaagggtatattagtcaggatctagtcagaaaaacaaaacatcaccaagtggttcaatagggggatttggtatagggagctaattacaaaggtattgaaaaagctaaaagaacaaatagggatctgttatatattccagaggttaccaactgcaggtagccattaccaccctttgggctaaagcaacaaagggaggagttgttatcagagccaacaagggagctgcctggtgcgaactcagctacagcacaggagctgcttggtgagagcagaacccggga

SEQ ID NO: 44375 - DNA, 2950 bp, Homo sapiens
agcctacacttttgaagctcttcttttctgactcagaaggattgcatatattctcaagcagtagtaagtagggagattgagataaagcccattcttgttccctcgtccttgctttaggtccactgtgttttgacgtgttttatattataagcttttgtataaagctttctttgacaaaacaaaggttcctataatgaatctcattgtttttaactggaacacctgaaatgacagagagggaggccaaaatgttcaagtaattatgaaaatttaaagttacatgattaaattgtgcaacactgtaagaatccctataaagtttgatcaccatatcttagagtcctaggctttgaactttatcctttttctttcctttaaatcaccttaaaactatgtaagagataagcaatgtggggctatacagattaatccaccacagatcttggtataagaagctgaaatctaataggtaagatgttaactttgtgatccttcaaataaagagagatttttacaagtcagttgtttggagctcaggggagagatttgggcacaagagttaaatttgagtgttgtcatatgtatggtgattggaaccatgggtttggataaggaagcccaagaaaagagagtctagcaaggagaagattttaaggactggtcttaaagaactactggatttaagactggaaagaaggctgagctggagaaggaaatggagaagaagtagccagatgtattagaagaaaactaggatggtccatgtcacagaaactaatgaaagagctacttaacaggatgagtagaaaacaatgtcaggtgctactgaatgatcaagtaagatggagattgaaaatgttaattggattttgcaatatggagattacccttaacattggtgacccagggaactcattttaggttctatttcacacaagccacgttttcagacattgacattcctaaaccgtattttgtatgctgaatctagcctttctttctttagcagaggaacagcttgagttattacttggtggctttgctgctcaacagttaagcttcaacagtgttgtgtttttatatcctgttttttttttgtgggggggaatactgtataaatataaatgtacatatgcatgtatttgttgtgcttttgttttataataattaaaaattgtcagtgataagcatatattttgaatgtggtacaactgagatcaagatcatgaagtatcctgcaaatagaaaatccttgatattgagtacttaagattggttgtttttcatttcatttgagaatgaaaagagaaaactcaacatgtgaaaatgctggaatacataagtcaaaaagtgggatgaaaccagggtgtaatttttttttttttcccagcactgtggcaatctctcccctcctccgttgtcccctgtcttcctttgtttgacttttccattttcagttttctatcttaggaccctatctgcagtaaagatctactcttctttgtcctttctaaattgctgtatcttcatcaataaagtgattaatatttgcttcagtgagatggtgggaagatacataaaataatttctgaaaagcacttagttcagtgtctgacctggactatatcttcaaaaagtttcctgttaacattttgtaataatttacattcagggaaaaatgttccctgctataaagcatattgcatttatcaacaaatattgaggcaatatttgaacagatttcatgtggtaggaactatttcagacactggaatatagacatggacaagatagcgcttttaatctctttttgggtgacaaataattgtgtatgtctggtacaatgtgatgctttaatctatgtatacattgtataatgattcaatctaattaacatatccatcacctcaccaacttatcttctttttgtggtgaggttgttaaaaatctatttgtgtaccaattttgaaatatacaatacataattattaactgtggtcagtcaccatgcaatgcagtagatcactaaaatttattcttccagttcaactgaaatgttgtaccctttgatcaacatctctcctttctccatccctcccactccctccagcctctggtggctatctttctactctgtttctatgcacatatatttacaattattataactttttgatgaattgacccctttattattatataatgaccttctttgtctctttttacagtttttgatttaaagtctattttgcctgatatgtatagctacccctgcactcttagttttcatttgtgtggaatatcttttttcttcccttcactttgaatctgaatgtgtccttagagatgaaactagtctctttttggaagcatatagttgggtagttgcatcttctttttttaatccactaagctgtttgatgtcttttgatcagaaaagttaacccatttattttcaaagtcattattgataggtaaggatttactattaaattttgttaattattttctggttaatatgtagatcctttgttcctctcttcttttgctgtgttcctttgtggtttgaggatttctctatggtatgctttgaatgctttctttttgtgtatctactaagggtttttgccttgtggttaccatgaggctaccataaaacattttatactaataacaggctgtttaaagctgataataactttgatcgcttgcacaaactctatacttttactcttttcccattcacaatttattattcatgacatattttgtatcttttactgtttgtgtcagttagcaaattattaaagctctagcttttaatagtttggcttttaatcttcatactagagatatatttggtattcacaactccattacagtataagtgtgttctgtgttttattacataactacttttaccggtgagtttgatatttttgtgttgctc

SEQ ID NO: 44376 - DNA, 1049 bp, Homo sapiens
tttggactcataataacctttagcttaaaacacaaacacattgtacagctgtacaaaaatattttcttcatgtctttgttttatgagtttttttctattttaagtatttttgttttttactttaaaattttttttagttaaaaactgagaaacaaacacacacattagcctaggcctacacagggttgagaatttcagtatcagtcttccacttccacatcttgtctggcaatctgtctatctatctatctatctatcatctatctctctgtctatatatatcatcatctatcatctgtctctatctctaatctaggtatctatctatacacacacatacacacacagactaatacaatttttggtaccaggagtagggtgctgtttctcacctatatctaatttagatgagacttacactttagaattgatgctgggatgagttaagacctttgggactgtcataatggaatgaatgttctttgcatacaataaagacatgaattttgaggggccaggggtggaatgctatggactgatttgtgcccatacctactaatttgttatgtgaatctctaacccctaatatgactatatttggaggtaaggcctataaggaggtagttaaggttaaatgaggtcataatcctggagccctaatataatagtgctgatgcccttacaataagaggaagagacacaagagctttttctcttcaccatgtaaaaacacagggagaaggtggctgtctaaaagctgggaagataaccctcaccaggaattaattagctggcatcttgatcttaaagttctcagtctctggaactgtgagctgtgagaaaataaatttctgttatttgagccacctaatctatggtatttttttacagtaaccctagcactatatatatgtgtgtgtgtgtatatttgtgtgtgtgtgtgtgtatgtctgtatatatgtgtatacatacatacacatatgaatgcttatatatatacataatatactataacatattacatatatatatcaagtactaaactgagt

SEQ ID NO: 44377 - DNA, 1029 bp, Homo sapiens
ttgtgaaatattattaagataaaaaacctcaccagctaaacttttaaacactatagcctatttcaatcaaatagaagataacaaaagatatcctttcttactcctgattatgtagatgtgagaattaaggtaatttaattacttaatattcaacatttgatggtggaatagattatgagatattaaatgaaagtagtaactaatagttaaatttcagttgttctgataaatatctgttgaagagtaaaatccaatgatcttttaaaaaatttgtattaacaggctgaacatgaactaaatctggcaagaaaaatgagggaatggaaactatgggagccattagtggaagagcctcctgccgatcagtggaaatggccaatataattattaagtgactttggtgtgttcatgggaaactgatgtaattaaatattctgttatattaagagcgtgttcttattactgacattttgtaatcaagaaaagtgatatagaaaatatgtaggagactgttaaaattggtgattatggtaatatggtcatgtgaatcaatttttgatttataaagtactcacacaagttgtttcaaagatgatatttctgtgaacagagaggccatgggaagatttgaaaattattaaagaaaaattcctacagattttcaatgcagagaccataatcaaaaagtaaactttctttagtagtatgttcaatacatcatttaattttttaagttatcctgaagaaggaaaggtccttaattattatagtctaaacaaatttatagattactgtttgaagtaaataatacgagtgaatattttcaaatgtgataaaatagcacaagtggctggtgataaaatttgaaattatggttaacctcagctgtgatcttatgtatgtaaagtgaaatttaaatagataattataggttgattacaaaatccatagtgtcattttattttagtcattattgaattataccatttactctgttttcttatagtcttaattttattatattttgtt

SEQ ID NO: 44378 - DNA, 1026 bp, Homo sapiens
tttttaccaaattgctttttacagaatgacattaaatcctatggtttccaaccattttttatactagcctttttcctcaaattgaaatgtctttcccaatccctacacctgtgagacttttttttcccagactggtgactttattgtttaaaaattctgatagtgtcggccgggtgcagtggctcacgcctgtactcccagcactttgggaggccgaggtgggcagatcacgaggtcaggagatgaagaccatcctggctaacacggtgaaaccccatctctactttaaaaaaaaaaaaaaattagcgaggcatggtggtgggtgcctgtagtcccagctactcaggaggctgaggcaggaggatggcttgaacccgggaggcggagcttgcagtgaaccgagattgcaccactgcactccagcctgggcgacagagcgagactccatctcaaaaaaaaaaaaaaaaaattctggtagtgtcacattcttggcgaagctttccttgatccagagtctgctgtaggtcagggatctatgataaaatgtggttcacaggctgaagccatccaacacctatttttgtacagcctgtgaactaagaaaatttttactcttctggaagtgttgctttccttaaaattcccactgctctgaggtagaagacactttctaattcagcttggtctcccaagcctggaggagagtgccctgtccatagaagccacttgatatataaatgcagaatgcatgaaggagtagtgtaagcttcctccttacactagaatgtaagttacatgaggacaggggttctattgcctttgctcactgtttacctccagtgtttggaagatatctggaacacagcaggcagtcagaaaatatttgtgatgttaagtgcaccaatattggtgccatatttctgagttttgtaagttttagatcaacttgtagtcttttatatcatacatttggcaatttatggaaataaaagtccaccttaagagcttcagagaaacaaggaagag

SEQ ID NO: 44379 - DNA, 1046 bp, Homo sapiens
ataattattttaagtaatgttaattgaaaaaattttttctttttgacaatataaaaaacattttaaatttcctagaaatgtcttcagggtaatgccaatttaagatctctcttaacttgtggccaagaaattctagattttccagctgactttggtataatatatatttatcaggaacttctctcagcagagagtacccattcttcgagttcaaagcacaattttaaacatgtaaaatggatatataatttgccaaaggtaattaatttattctttttttcttaaagaagaaaaagacattggttgttgttacaaaaagtctaaattactgttggttgaaacacagcagctgtggagttcagtccaggcatgaagactaaatctgctttaccaagtaaggtgtaaggttgcatgtttcagtcctctaccatcctgcactgtgagcagcactatacctgtgcgttgtctgaaagccttccgtatattctccagctaaatggtcgtctggtagcctttgcatttaacaaactagcatgaggctttttatatctaaatgctacgtgatagacaatttcagctagccacatattgtatgtatgagattcataaagactttcaatcatttcattttcagacaactgaaattttgtttagtatgtgaattctttttttgaaatgtatagtgaataggatgttgcactggtggcaattcatcatggagcataataaaattaatttgacccaaatagaataaaataatgtgtttcatgtgtttattgttaagagagtaaaataggtttaaaatttttaaactgtatagtgaagggtacagagcgatcaatgataatggttgatgttttcagcagactgcatgccctgagagttagagtgtgccattaaataaacatggtgagcagaagaatgttgcaccctgttctgttgggaaacatgacagctgctcagcagctcccctagaagccactgctgtcgttcacagagcattgacattgcaaggtcaaactgtttggaactcttccacataccag

SEQ ID NO: 44380 - DNA, 1055 bp, Homo sapiens
ggatggagcaggaaaagaagattggggaaggaaataaaagttagaagttttgagtttgagaatccatatgaagagtacaagaaggtagttggatttgtgacagaaaggtcaacccagatgattttatacattaacaggttgaaatttgtcacatagatattaaggaactagaaccattgtcttctaagccctgttttaatctttagtttactatcatactctatagatatatttctttagattcactttaaactgttttagtaactagattcttctgggagtcacattatctgtgtttcaggagttaaataattggagaaaccacccaagaattatgtaatgtcattttatttatgcatatgttttaattgtcttgattttcttgtagatgaagatgaagatgaagatgatgaagaagattttgaggatgatgatgagtgggaagactgatctatatattatatatatatatatatttttaaggtgaaatactaaacactactttctgtctgtggattctgtaaaattatcatgtaaatgttctaccaatttgctgtatatttttgttgccttttttgcttttttttaatctgtgcaatacctcatttaatctgtaaaggtttgtcgtaatcctctacaaagctactccctgttattgtgtgcaagtttacaccaggatgctcacttgatttgtgaatatttttcattccatcaacaagggagtttaaatactatatgtgagactgacaaaaaccttaatgtaatttacttataatgccagaaggaaaacactattttcataccctactttttctgtacctaaattttcttaaaaaaaaatctagtatagcactacattcttttttaagtgatgcagaccttagtttctttagcccctttattttgaatacaatgctacatatgaatgttgaagctgatacattgcacagttctgtagacatcactacaccgatgtagtttctcaaattttagcaatatgctctacataaaatcactacagagatactagtggggaagacgattaacacacctct

SEQ ID NO: 44381 - DNA, 1051 bp, Homo sapiens
gttgatcatctaagtctgtgtgtgctggaataaacagaagtaacccagcaagtattattcaggagagggtttgttatctgaatgtaaacatagatttggaaatgtatttttggcttatacattaagatggaaaggaaatatttttgaataatatctttaaggcagcagtttatttcttgttaatttgattaatcttgtcctgcgcttgccagtttgatatcttttttgtcttttacaataagaagtgattctaagaaagtaggactttctggagacaaagattcttggctaaagatttattactgagttttgctaactttcttttccaaggtggctgatggccaagagtctacaccaccaacacctgcacccacttcaggaattgtgggtgcattaatggaagtgatgcagaaaaggagcaaagccattcattcttcaggtagagagagagagagagagagagagagagagagacagagagagtgtgcgtgtgtgtttaataaatttgaatgtttgacgttctgttatttttatgactgtctttgctagctttctctctgctaattgagtaactactgatgtgggctctaggatgtattttaaaaagttgttgcctgtgtgactagtctctctgagacttaacaaatgcaacaccaccacagccatagccataaattgaaagaacagctttgggaatattgacagttttgtttcctatatcaggaaatgctaatagacttcctagcaaacaacctctaaacaaagcttgagatttttagatctcattcctgtgacattactgtgacatgaaaaattcagggctgggtgcggtgactcacacctgtaatcccagcactttgggaggccgaggcgggtggatcacctgaggtcgggagttcgagaccagcctggcctacatggagaaactccatctctactaaaaatacaaaaaagttagccggcgtggtggcgcatgcctgtaattccagctactcgggaggctgaggcaggagaattgcttgaacccaggaggcagaggttgtggtgagcc

SEQ ID NO: 44382 - DNA, 1076 bp, Homo sapiens
ttaactgctttatacaagtcagccattactaatgctactacttcattgcttaagtgttcactttattgggaaacagtgtaatagggggagtaagaatgctagatttgaagtcacaaattgcctggatttggaatttcagctctgccatttagctgtgtggtattgggcaaattaacccctttagtgtcgggtttctcaagtaaaaaatgaagttatcatagtaataacaaatgaggctatatttaaaagtgattaacacatttcctaacacattttaagcatcaataaatgttttcagtaattattgttatgtgattattgtattagttatttattactacataagaaattacttcagaaactagtggcttaaaataacaatacatgtttattatttccttgtttctgtgaatcaggaatttaggagcagcttagctgggtggttgcggtcaagctgtcagcaggggctatgatcatctacatattattttgaacctaatggttataaattttatattttgcagactatgtcttcagcagtggtgcagttatatgcagcagatcggaactgtatgtggtcaaagaagtgcagtggtgttgcttgtcttgttaaggacaatccacagagatcttattttttaagaatatttgacattaaggtgagttttgttttgctttcactttaaactaggtgattaggttttctatatcaattataatttagtttagatttgtttatcctatatgtgatatttaaatttatacataaactaatattagaagagtgaagcttggtttttagatattgcatacggaaatcatgaccaaatgggaacatgtctgaagccagaatgtgaatagtttcctattttatctttctcctgctaccacgcattaaggctttttttttttttaaattatgcctgttggttcttgggctttctttacactctgtatttttttaatgaaactcttttattccacctggttcattatagaatagcgtagatagtctgttcaggtaacaacaaaataatattttagctcagtatgtactgttatttagcccaggttta

SEQ ID NO: 44383 - DNA, 1099 bp, Homo sapiens
ggttgttctgaaaatgtgaaaggaatttaaacagtagaagtgctgaatgtttgtggtttaagtcttatgcaggatagaacttttaagaaagttggtacacatatagagggaataggaggaagtgggagttttcttagttttgggccattgcagcagtggctaacatatatagaggtagtaatggctctggggagaggaccaccttctcaagattgctgtggttgtgaaagagagctaagggtcatacattttaatgaatcattcgtgcttgttaaagttagaaataatttcatacttaaagatacagtacaaagaacttctatatatccttcatccagatttgccaaatgtttattacatttaccatgtttttttctctatatatatgtatacatgcatgttatttttttctgaataacatgagaataagttgcagacataatgcctctttataatatttcaggctatatatcctaaaatcagagtcattctgttattattgtagtatcattatcaaaatcagaacatgtagtttttaacaaatacttgttcacttggggacaaagtataggtggagtgaaagtacaagcttgcagaactactttaagtgcttatgggaattgcagtctttttagtggttaggaaatcaatacagaaaattattctgatttagagtaagaccagtggaataacagagtaacacaaggtacacaaacaagcacttcagaaatgtgaaaaaaaaaccaaacaaaccaaaaaactccaataaaagtcatttcaacctaaggaatcagagaaatacttctcaactggtgcagagtcaacctcaaagaggtggaagtcccaggcagaaggacagtgggagggaattcacttcctagaatacatcccccatattcttcctgcccttgatcatcatagttctgagaatgaatatgtcattacagttactcagtactgaagtatcaggaatacacaagatatgacaggttctgtttctaccaaagttgatacagtactttttttccttttaattaccagattttaaccttaacattattagggtaataagaaatagatttcccttcctaagcacttg

SEQ ID NO: 44384 - DNA, 1034 bp, Homo sapiens
acccaggctggagtgcagtggcgatcttggctcactgcaacctctgcctcccaggttcaagcaattctcatacctctgggattgcagtcacacaccaccacgcctggctgatttttgtatttttaatagaggcgtggggtttcgccatgttggccacgctggtgttgaactcctggcctcaagtgatctacctgcctcagcctcccaatgtgctaggattacaggcgtgagccaccatggccagcctacaattatttttctaaacatatctcctttttaggttattaacatcttggagacagagaccttcttttaatcatctaagatgattaagataataaataattgttaattgaattaataccctgttcagatttagtctctaggttagccagacattttgtgaataaatacgattctttaaattatttttattaggaacattcctttgtgtagttatcccaactttgaccttctgttgaccttataaattccatatcttgttctaataaattatttgcatgagattatccctaggactttccagagcattattgtccaatagaactttttatgatgctgtccaatatggtagacatctgtgattattgcgcacttgaaatgtagcaggtgtgactttgagagacaacatttttaacatatttgaatagccattgtggctagtggtgaccttattaaacagtacagctccagagagcaaaagcaagatgagtccagaaactaacagtaccctcccgcctgcccctgcccccacccccaaagccacccagctttggagcttacctagagaggacagtaacagtgtaaaagatctgtgtggactcaaagtgaaatcattcccaattaatttatacattctaaaaaatagagaacatttattaaatctcaatcgcagctcactgcagcctctgtctcctgggttcaagcatttctcttgcctcagcctcctgagtagctgggactgggactacaggcgcccgccaccacgcctgaccaaattttgtgtttttagt

SEQ ID NO: 44385 - DNA, 1119 bp, Homo sapiens
aataacatgaatctagtatgtattttgaagagagaataatgttaaatttggaagggacgtttacttacttttcaagccaaaataaatgttaatttttctagctcagtggtaagcttaggtacctatttcagagttatttattttgttttaatggttaaatcgctttttttgtttttgtttttgtagatgcatatccgtggttggaatgcttcatcaagtcatacaatgtcacaaatggaacagataatcaaatttgctatcagatttttgacaccacagttgcagaagatgtaatctaatattgccatccaatttagcatacataaaatgttgccactcaccttccctgtttgagcttcttttcctgacctgagttttgtatcagcaatgttgatgatgttagcatgggtatgggattagaaaatgtccttaccttaaatctcttggcttttactgggtgcaaggtaaataatggctatggattttgttttgctttctgttttgcttttgtacaaagagacctgcttaaacaagtactgctgagataagtgtctgatcaagctacagtgtactttaagtagaaatggcaaagttgctttgttggggtgctgatactgatgattttaggataaattcatttctttaaacttgtaatacatggttttattgcttgtttctctccaggatagtagagatttctctatttcacctcaacctaataaaagtggtcagatttataatgttaatgacttaatattatccttttctaatagtctcatgtaaaatatgccgctattacaacttacaactaattgaatgagatgttaacttagtaaaatagtttgatttttacctgacagtgtttgtcaaatttaaaatcatgaatattcaattttatacaaacatttatatatatatatatagatttgtgtatgttatttgccaaagacagatataaattacctggtttaatattagtgaagaataaataagtgcacacatttcaactgtttcatttatttgccctaagttgagctgaaaaatgatatgaggcaaagaatcgaaataggtgtggcaatgcagcagatgtttagggctgtctacatcccaggtactgtg

SEQ ID NO: 44386 - DNA, 1038 bp, Homo sapiens
ttagcttgtatttaaccagacaattatgtgctgaattatataattgaacaaattatataattttaagtagttttcttatacttatgatacatttctttttaaccattttccccactattttatagcatagatatagctatagcttccttatagcaataggaagatgcccattcccatttttacagatagtctacttgtagccgagtgaaactggaaagaaggtgttaataatttattggtatagtttaatatgatgtttatgttctacttatgtttttgaacctttagtttcaaatggacagaattcaggaactgtttctggttgacaatgactgtaggacacagttactaaattctgagtattagtataattaatatttttgggggaactgttaccaataaaagaactgatgtactttttgaaaaatgtgagttagctctggtattagtatttcccaaaattgttataaattgtttaatttaaaatatttgatatatctgcgaacctgtaaataaggcgggaataaatgaaaaagcctctgaactttgcaaaaatattttttcacaaagcctaggtattgtaagttaaatcaagcatagatctatttgactttattttcctgactcatcaaaagatgcttgtttttacatttctacatttttaaactgagcatggatcttgcagttgatatcaagaaaacggagttactgtttttgagtttcttgttttcctgaaaaagtgtatttttttgagaatatagtattaaaagtgtagtctatgaggaccagggtgtttttagaatttagaaaatagagtatttgtttttcagtggtagaaagtttgcttttcaagtgactcagggtaatcatttgatcttgtattgtcttcaggatttaaaagctttactagcccacttatgtgatctgaaggcccaatataaactatcccctatatttttattcaacctaatcttgtcattacctttgaccagtacactccagccatccaaacctcctggattttcaaatatactgaat

SEQ ID NO: 44387 - DNA, 1048 bp, Homo sapiens
aatgcatctgataatagagagaaatctacatttcagttttgcttgtctatattcttcgtatagacgtttgttacacattttactcacctatttatttctttttaagttttatttctatttattttcctggaattttctttcttattaaataaggttttatgaattacagctggtcttttctacttaattgcatttaaatgattatcagatgcttgttagcattctcaacttattttacatttggtcagttagtgtgatatttcttgtatacttgtatttattaataaagtgctatgatttgatttctttttgacatatcattaatactgattatttccaagctgcatctagttttgacatacttttattgttttgtgtgcttgatatagaaatgttaaatactatgacagtttgctaagttcttattttatttttgttcttacttatattagtgaaatatttttttaagtttcaacattttcttatttgtttgcttaagagatggatcttgctctgtcacccaggctagagtgctggggtatgattgtagctcattgtaacctcaaactcctgggctcaaggaatccttctgcctcagcctcccaagtagctgggattataggcacatgccaccacgcccagctaattaaaaaaattttttttttatagtggcaggatctttctgtgttgcccaggctggtctcaaactcccagcctcaagcaatcctcccaccttgacctctcaaagtgctgggattacaggcatgagcattgcccctgtccaattttaacatttttattaatgaattcttttagctataagtgaacacattagtatctactagggttaaaactaggaaatagcttttatgtatttttcatggttaacagattgttatgtagaatgctcacttttttaaaaaaaaagattgaagtatttgtgttcttttacatatctgaataatttttcagctctctattgtgtacttacccttttctaacctgcagatatctatgttttttgaattttattaaatggattttagtg

SEQ ID NO: 44388 - DNA, 1058 bp, Homo sapiens
ataagaatttcacagtgaaatggacacatgaatatgccagagggtggaggttgccctgtgttgctgagactgtgggaggtgttcatttgaaaacctgggggttatgcataattttatgggtgtctatatagctatgcctatgcagatatgattgagtgtggcttgcaaaattcctttttctttcttagctttctgaaatcaaactaaatctaagaagcacactgaaagacacattataaaatatgttaatggattcattttgtatttataatatagttgaatgtgaaaaaggctaaagaaatcaattaagaaatgctaactctaggaattttgagaatattttagagcccacaaattatttagtcatggaaatgttgaatttaagttagctctacatcaagggctatcatattataaatagctaagattttggtactgaggtacttcacattataaaattttgtattatcctaaatctacatctgaaaatttgctacctgctattctctgtccaagtttcttttattattcaagacaatacataaaatgacaagcctgggaaacataacaagaccctatctctacaataataaaaataaaaaaattagccgggcatggtgtcgtgcacctatagtccaagctgttcaggaggctgagacagcagggattgtttgagcccaggagttcaaggttatagtgagctaggatcatgccactgccctacaggctgggaagcagagtgagacctggtctctaccaaaaaaaataaataaatgcttgagaatgtttaagttttcacattgcttaaattattgacatgaatattaaaaatgaacaaaacttgtatatctctataagaaggctttaaatgttgtattgaccttggaggaccaaagagctggtcagtcctccattttcttttgtactgttcagacaatcagccccatgttatcaacttgaattgtttactacagctagctagcacacacatccattaacccagcagctccttattgagcattgtgtccggcattgaactaattattgagcccatgtca

SEQ ID NO: 44389 - DNA, 1046 bp, Homo sapiens
tatgtaaatgttgttaggttttgaagggaaactaacaaatgtaaactcctggaggccaggagtgcatcatatgcataggtgctgcctttactaaaattaacagtttctgattttttccttcttgttatttctgatcacttgtgttttttaccttgacctaaaattcttcaacattcttacttttcacccactgcccagagtggccgaacttaagtagatgttaggagacatagagtttgcttagatgattcacacaaagatgtagctaattgtaaaattctcttggagtttcaaagttctctacagatcattgttttcagtataactacactttcatttgcccacacctatgagtgcaaagcttcccaaagtattgctgttaacaagaacactgattcccttgatatctttggcagtgggtgtcctgttgcctaaagtgaaactttttttttttttggttcgcctctgagcattaataattacaaattcttgagccattgttctgattctgtcatgttctgaattctagcatccatgggggtctttaattcttggcttattcattctttattccagatcagtttgcgggcctctatttcctccacccaggcctgttccgttggccgcaggtctacatctgtagtaacttctcaaatgaagccaacagctaacagcaaatggggattcttaattgacataatttctaaatataggtgaaataaagaaatgtaagaggtctcatgaaggaggcataattgtgaagaagatatttcttatacctcttcacatcatgttttttaatgccacccgcagttagatctgctttcatctagatgaagaggcagagaaaggggcgttattacagcccttcaatttctacctcttcctgaggaaataaggtgatctgttctttattaataaagggaaaagcaccctccaaagaaaacctgcaaatgcacagccttgtctgatttgatttatatatataatttatatatatgtaaattatatatataaattatatataatatatgtaaattatatat

SEQ ID NO: 44390 - DNA, 1083 bp, Homo sapiens
atattccatggcttacgccctgcacaatatgcacaaagatctctgccctggatacattggcctttgtccacgaatgagtaccattgatgggaaagagctacttggttatattcgggctgtaaattttaatggtaagttacaacgtgtgtgtgtctaaatacattaaaagcgacagggtgtgtttttcctcctatatatagaagatacccaggcagagtggaaaacacaggattagaagcagttctcttctttgattagaagtgtgagtttttccacctgcttttgaatctcaaacatattttttatgctaccattaatctatgcgtgaaggaggcaaaagtttaaaataagcctctgtcaatcaaaatgttttacttaaatatcactattgaagagatcacttagaaggcttatttgaaaccattgacattagatttctttgaaaatgttttgttcatgtcattattagagaagagattgtagacattttgttttgaaactgattttaagcttttgaaacagtaggttgacttgaagaaaatggatgacttggagttgctgtatatttatactcaacgagtgttaagtttctgtgttttctgtttccttatatttttctcaatgactcagtccttcggaagcaaagggatgcacacaatgtaggcaggatttttatactgtaaaagcagaaatgttgtttctgtgactgccacgagaaactgatacagaatatactggattcacagtatttgattgaaaatagcccaactgcctgtctgaagtgatggaattattgaatgctgctgttctttcatgagagttgcaatggttgttgcccatgactttgatcattattttcaaatgaaatgatagaatgctctgagctgtctaatacttttggtttggctttaatccatacaatggacatgccttgagacacgcacagcactgcaccgtctatcataacacactccagtgacctcagttgccagcgtttctcagaaaagcacgaggtcatcttcaatttagaattcaagtggaaacttcttctttattttttttttttttgcatttttcctttaa

SEQ ID NO: 44391 - DNA, 1062 bp, Homo sapiens
ggcattgtgactctataggttaaaaggctactattattctaaggagacttgtgattgctttcaagtcctagttctgtttgttttgttaactttgagtctagtaaatcctcgcagagaaactaggaaatcaggtttatataactctttacagttttcacaatgacttcacatgcatttttaaaatttggtcctctcaggagttgtgtggggtctgcagggcaggagtaatcatgaatcccacttttcaaatcaggggactccagctttgaattttaagtggcctgtgctgataagtctggaagtgctggaatttttccttaaatgtggaccttctgaccgcagtgccctttccactctatcataaccttctcttattacagcaaaccgaactaagcaaaacaataaaatgcaattggtagatattggttcacacggcaatgattacttaatttttttaaagtattgatcagaaaggaggtagaaaaagaggagactttatcacaagtagaaaaagaagacacataatgaagtaaagatttgtaaacaagctgataggaaaactcatgaaaaatcttcaagcagcatgatcatgttcaacacattcttccaactcttttctgtttctggcagggaaaagaaggtacaggggcttagcacaaacataaaagagtgttctgcagtttaagttgtattgcagggaagaatctgatgtacaatctttacagtggacttcagtagagaaggagaaaatgaaagaatgttgaaggaacatgtatcttttgtagccgaggggcagtgcagaaggagccaaagaagaaatgggatcctgctgtggccagtcaccatactgatggtttgcaagtgttcaaaactgttagaaagtgcagctacttctgtttcccatagtcacagaaacagcttcgacaaagtgaatacactattcatgcctgggatggaaaaaaagcaccccgtaacctacacagaggcctttttctctttcattggaaaaacaatggctttattttctggaactgtagatgtgttgcagattgaaactgcttg

SEQ ID NO: 44392 - DNA, 1040 bp, Homo sapiens
ctcagtctcagtatctactctctctggcatggcaatacagcactcgagcaacaaatacgtactgagtactctttatacagctgtgaaaaaaccaaaagtcctgtccctatgggggttaggagagaaacaattcactaaaatggtaaatatatagtatattagctagagagtaatgtaagtgctaaggggaaaaataaagcagggtaatctggaggggaaatgtcaggcgtgggaggttaccattttagacagaaaggctggggaggaacaccctgagatgacattggagtaaaaccctgggggaatggaggaaggaatacatggagatagctggggaagaaattttctgggcagagaagaccattgcaaaggccctgaacagtcatctgggcagagaagaccattgcaaatagatgattttctaggtgttcaaaggacaacaaggaggtgtagctaaaacagtgtgggttaggatggggataacaggagatgaggtcagatagaagatccagaccaagcacatcatagaaaggctcttggctctcttactttgagatgggaacttattcgagggttttccacagatgggtggcatgatctgacttattttctaacaggattattctggctgctgagttgagaatcgacttaagtggagaaaaggtagaatcagggtgggggcagttaggagttattccagtagtccaggaggggcatgatggtgacttggaacagagggatagccctggagaggtgacaagttctcaaattctgggtacatttcgtaagtgcagccatcaggatttgccaaatatcagatgtatgatagataaagtatatacgagtcaagaaaggtttggggtctgaataactggaaaggatggagttatctaaacaaagatggggaagtgtaccccaataagcagattgggaggggaccatcaggacactagattcagatatgttcagtatgaaaagccttgtaggtgaagactttttggctgtcatggccattcatggctataagaactagggatata

SEQ ID NO: 44393 - DNA, 1068 bp, Homo sapiens
cagcctattgtgggaccttgtgatcatgtgagttaatactacttaataaactccctagatagataaatagatagatatagatatagatatagatatagatgtatttatcctattagttttgtcactctagagaaccccgactaataagatgcagtatttatttgtcttccctctgtcaaaccttgagccaaccacttttctcagattgcctgagaaaggtatagggaaaagaacatacaagatagatgagacatggaggaaagaactattaatggtggggacagcttctttacatggtgaagaggatgagaaaagccacccttaggccaaagaactccatggcctctaagagggtgctatggtttaaatattttttccctccaaagttgaaacttaatacccagtgtgtcggtattgagaagtagggactttaagaggtgattggctcatgagagatctgtccataggaatagattagtctatccatggattaatgagttaatggattaactggtggcattataagaagaggaagagtgacttgagctagcactttagcatgctcaacttcctcgctatgtgataccatgcactaccttaggactgtagagagtgtccaccagatatggtctcttaactttggactcaagttctccttaaactgtaagaaataaattatttaaaaataaattacccattttcagatgttctaagcagcaaaaaactgacatatatagagtgcaaagccccagaatggcataggagaagacttgttgcttcagacagggttcttggcataatcaatggtgaggctcccaaacacagctgcaattttagccccagagccagctgtcctgactttggaagtcctagccccaatgaacttggctgctatgccaatatcccttgaagtggtgctggtttggaagctgtgactagggttaagtgaggtcgggggatgtggggctgccaaactgctgaagctctcatctgttagtgtctctggttgcttgagaactactgcagagagtggtgggcttagcacctgacaggtgctctcaaacagag

SEQ ID NO: 44394 - DNA, 1078 bp, Homo sapiens
aattgatataatttatcacttttgggtttttttgcaaagttttctccttttaggagattttttacatttaggtctgtaattgataagttaattttgtatatgatctgaggaaaggtcagagtttatgtattcatatgcatatcttgatgttccatacaatatgttgaaaacatttttcttcctattaaattatcttggcactttgtcagaagctaattgatcatatatgtgtctatttctgacattctgtcatctattgatcaatacatctacggttaacaccaatactatgctgtcttgattattgtagtgtttctgtgagtcttcagatcaaatcatgcaacttagttcttttcaaatgattttggctattgtggatcctttacattttaatatgtatttcacaatcaatttgtagatttcataaaaaagtctcctagggttttgttttgtaaataagggtgttttagtatagtaaaaaaaatataaaatttgctattttaaccatctttaagtattcaattcagtggcattaattacatttgcatcgtcgtgtcaccaatatttccagaattttccatcaccccatacagaaactctgtacatattaagcaataactcctcattccctccagcccctggtaatctgtaatctactttatttctgtgaatgagcctattctagggaaattttccaattctaggtatttatacaccatataagtggaatcatacaatattttctttttgcatctggcgtatgccacctagtgtaatggttcttaaaatgttttttatttttaatttttgtaggtacatagtaagtgtatatatttatggggcatgtgaaatactttgatacaggcatgcaatgtatatcgtcatagtaaatgggatatccatccccttaagatttatcctttgtgttagaaacaatccaattatattattttagttatttaacaatgtacaattaagttattattgactatagtcacccttttgtgctatcaaatactaggtcttattcattgtttctaattatttttttcacccattaacaattcccactccctgc

SEQ ID NO: 44395 - DNA, 1049 bp, Homo sapiens
tcaattctttttccaggttgaggttcttctcttattcactagccttttgggtacaaatgttcaacgagttactagttgcgctaacatccagtctacatttttccatcttttctgtttgggtatgttgttttctgttttctgtcagatgttttgctgtaatgcaatgcatattattgactgcattttataaccaaacagactaataaccccctcaaagaaagttatgaggttgatgtacataatatgatatattaagcagtttagtgggataaaataggtaccacaaataatttccaaagtcagtcattcacaggtagtaaagtcaactgtatttatttaaataagaataaggtctggatggatcccactaagtaattctcattttgggccctcattattttagttttgagttagttttttaatcagcagcgaggcacatcataacagtgaatagtaagaaatttcaggggagtactaaggaagaaatataaagttgtaggtcaatgttgaatgcctgttagaagtaattagatatacaagggtgaagctcttataaaattaatttacaaagcatatgtctatcttttgggtattaatattatcactgagatgggccaagtcagacttagaatcctgactcgtatttagtagtactgtaaacctataccagttaagaagtatctacctctcagagttactgtaaggattaaaagagaaattgtcatttaatgtcactagcatagtatatcaaatagtatgaacttaaaatgaatcctgttaattcagtaagtattaactgtatgctgttatgtgccagatattgggaattttttgtataataaccaagatgaaatgtatattcccccccccctttttttttttgagacagagtctcgctctgtcactcaggttagagtgtaatggtgtggtcttagctcactgcaacctctgcctcccaggttcaagtgattctcctgcctcagcctcctgagtagctggaactacaggcacccgccactacgcctagctaatttttgtatttttaggag

SEQ ID NO: 44396 - DNA, 1041 bp, Homo sapiens
attcaacaaaaagacctaacctaagtatatatacactcaacacaggaacacccagattcatgaagcaagttcttagagacccacagagacatagacttctgtgcaataatagtgaaaaacttcaacattttactgacagtattagagagttcatcaaggcagaaaattaacaaagatattcaagacctaaactcaacattggaccaaatggatattatagaccttcacagaactttccacctaaaacaatagaatatacattcttctcattgccaaatggcacatactctaaaatcaaccacataattggacataaaataatcctcaacaaatgtaaaggaactgaaataataccaaacacactctcagacaatagcacaataaaaatagaaagtcaagactttgaaaatcactcaaagccatccaattaaatggaaattaaacaacatgctcctgaatgacttttgggtaaatagtgaaattaaggcagaaattaagaagttctttgaaaataatgagaacaaacaacatactggaatctctgggacacagctaaggtagttttaagagggaaattcatagcactaaatgcccatgtcaaaaagatctcaaattaaaaacttaatttcacaactgcaagaattagagaaagaataaatccaccccaaagctagcagaagatgagaaataacaaaaatcagagctgaactgaagaaaatggagacatgagaaaccatgagtttatttatttattttttctttttgtttgtttttgagacagagtcttactgtgtcacccaggttggagtgcagtggtgcaatctctgctcactacaacctccgcctccctggttgaagtgatcctattgcctcagcctcccatgtagctggaattacaggtgcctgccaccacaagtggctaatttttgtatttttagtagagacagggttttaccatgttggctgggctgctctcaaactcctgacctcaagtgatttgcccaccttggcctccctaagtgctgggattacaggcatgag

SEQ ID NO: 44397 - DNA, 1054 bp, Homo sapiens
gaatttcagttgggggtctgatattcagtttgaaaatcttgagtggagaagaggccagttggatttatttctggcaaaaaaaaatatgtatatatagaaaagatcaactatgaacctcaaccatgtcaccatatttttaatctattaatttgatttgcattcagagaccacattatcttttgagttacagtgtttcctattatctatgaactgacctctacaaataagaagagaaataggaaaaacgtctgagttgccaggaagggttatttccacctagcttttgatccagtccgaccaactaatgaatcccccgtcaggggctaataaaggaggcttgttgtgagtgatgcagagaacgtagctctaagtggtcttacattaatgtctgttcaccttcatgcttgactttgagtctaatgacatccatgcacaaagaaggcagggtgaggtggtcttaaatcattatctgaacaccaagtctgtagaaaaaaagtccagttttaagttcattaagggatcctgctgaatactctaggatatcaaattaaccatttgaaaaaaccttttaaagttgagttgaaaaactaggacattttttcaaatcttttgtgattccgttttttgaagtgaataaaactcagagctttttaggtattttttttccccagccacgatgaagagaacattaaaggacatttgcttaaactacatacgtcaagtctaagaagttactttggagaaataacttctttggcagtgatgttattttctgtgaaatagtaaggatgatctggaacctgggactcagaaaatgccgtttgcagacccagatatttggactagctagacgatttggaaggtaaaacgaaggtacctattctgttacattatttaatgctgttagaaactgaagatgaaatggcctgtttcagaatttttcttaggcaggattataatatttccaaaaagaaaaaattacctttcttctcttacctagtttaatggctagagattatgggctttgaattcagcaagagacacgttccagtct

SEQ ID NO: 44398 - DNA, 1040 bp, Homo sapiens
ggttgatatcctctgtcgacaatgggtgtctctaagagccatgttgagtcatctttggatcttcacactaagtgtggtcttttcaaccaaggctgtaccgtgcatcatcatatagtcatccccatgacatttgtaccttctctaacaagagttatgattgccctcagctatcatgataatcgccactcttctgtcaggcttgatactaagattggaggagctgctctgaagattcagtttcattctacaaggattattaaacaccaattctatgccaggaactgtgctagaggagctaaaagggaatgatctatgctgctaagcggctatggtctaacaaggtagacggatggtaggacggtggtgtgtaaaaagtgtcatgaaagcacagatggaggagtggaaagagggaccaggaaaggctgccaggggaggtgacattccatctggatcttgttagtgcaaccgaagtaagaaaatgctattttaaactattgccacgttctaaggagggtggaaagaatttggatatgcctaggactgtagttggtatttgaatagacatggctatagccaagtcactatagatcagggtttcccaacctacagccttctcaactctgtgacatttgaggccagataatttgctgttgtaggacctgtcctgtgcattgcaggatgtttaccagcatccctggcctcgacctactacatgtcaagttccggtacctcctcactgaaacaaccaaaaatgtcttgagatattgttaaatgttcccccgtgaacaaaatcccctccagttgagagttgctacttctaagtagtagaacaagaaggatacagaatctcaagcaatcttgaaaggaggagaaagggggagcaagataatgagaaagaagagtaaaaataagttaagaagatggtaaaacttgagttaccaagggggttgttacctggcagagaacgtaattaaaaaatgggcatgtctactggtcagttcgaagtggtttgttttaatgcaaactgactctatatctca

SEQ ID NO: 44399 - DNA, 1023 bp, Homo sapiens
tgttgtctttatatttctcatgttcttttagtgtcatacaaatgaataaatgtgaattcccaagtataaaggaatttagcctcaagtgatagtttgaatctctttcccagagattcccgtacaaatgcttgaaaagggccaggagcttcacatgaactgtgtggtccctgttttcagttatttattattttcctgctacctaactcctattgccaactgtattagtttgctagggctgctgtaacaaagtcccataaactgggtggcttgaataacagaattggcctccacagtttgggagccagaaacctgagatcaaggtgtcagcaggcttggatcctcttgaggctgtgaggaggaatctcttccagcctctgtccttgcttcttgtggtttgctggtgatatttggcattccttggcaagtagaagcatcacttcaatctctgctttcctctttacatggcatctccccagtcatggctgccggattgagccctgattaatgaagttctgtctgacccaagcccatatttgttctggttctttgggtgaattttggccctgggattacccattttctcctgagggattagcttctgtgatcagagccttgccagctggtctctgcatgcctcccaagtcatgacaggaagtgtgcttctctcccatgctcagccccaaagaaatcacattcttttattttcctttccaaagtcatttccttgttaaagccattgtgtttggaaactccagcactagatgagagctttaagatgcaatctgtacttactgtgttgatagaagaacataatataaaaacacccttctgcagaaatgaagcaacatcagaatctatttatgtcattttttataggccttaaaagagttggcctgagaattaggagtgtattttctcagtttacttcatcatgtatcaactaagcaacaaatatagtttccttgaaaataaatggcttcataatataataaaatcagaaggctagcagatgaatagttgatt

SEQ ID NO: 44400 - DNA, 1035 bp, Homo sapiens
ctttgtgaaagttgcagacttatgttcagagctcaggaggaagctaggtgaaattttgatagacttttcacttagctaaaatgttttttatgtccagaagatgtatgtcttgcctacattttatgttaagatcttaactttttttgtatataagaaaatgcctatcagttaacagaccaggaaatatgtgagcactgctctgatatttataatgttttaaaatattatggtagcaagatgaacaatgttgcattttaattttaattttttctctttaaaatttgttttgcctttcctacaattcaaattctattaatattttgaccatctttacaattgatatcaaaatgttttagttcatgcttcaaataatcccatttggttctcacactttctttgttgaatcattgcagattttaaggtaaatcaggcccattggaattcatgtaacagtgatttaacaagtcaaggtgatatttcatggaggtgagatctgtaacaagatgtgactgtttaaattgatctttgaagtgttgaacaactttactgcagcatagtagatattttctcaccttttctttagtaatttttgccattttttcttaacgaaggaaactttctgagcacaaatgtacttagcaacaagttcttgatttgcccggaagttaaatcttaatagagtgcctgatagagtatatgataataacatgaaattataatcatagcagctaatgcctagtcagtacttttatgtactaggctctgtatcaaatgctttacatgtattatttagtctcatagttaggcctactttttggaaagaggaagctaagggataaacctatgaggatgaatggagataataccgaactcacagagataaaatgcggtggaagtagtgtacacacccagaatttgcctggatgccaaagttcatgtgcttaatgagtgcatctgtctcaataaatatacttttcttggcagctagaactgccaagaaatacacttttcctttagtcagctagaacttttagg

SEQ ID NO: 44401 - DNA, 1053 bp, Homo sapiens
tgttgttttccatgttaagatgttccttgattttcttccatgagcacaggtccctagagacattaaatcaaaattagcataaggaggacaggactgatttcattgtctttctctacttcttatataatgctaacatgtgtttccaggctgtttgtgtgcttattttataaacatgtttattgagtggaattttaaggtcttcacatggaaaaacttgtgaataaaacttttgtgaaccgaacttgctatttagttccagataagttctttctgtgcttttctttttgtttcctgcatggttcaatatggttccaattgccacatatccacctcagtccacttggtaactcagcctttcccttctcaagggttgatggtttagaaagacattcagcatgcagatgggtggggtatgcaatatatctctttgacctccctcatgtatttgttcaatgaagtaaatattttggaagatattttattttaaaagatcgatgagagttacgttggatgaatcaaagaaagaactgcatcctatttcaagaaaataaatttctccaaacaacatagctatgattctagagagtataaaagcaccagaaatgctgtgctgagttagatcagaccaactggatgtatcttgctcggtgctccagctacagtggcaaagatacaggtggcacttcgtgagtaagtgtggggtgggcatgccctgctgacaaagtaaatagctctaatttccacccagtgacatgctggaaccatcatcctagattatagctaagtcctccttggaacgtacttatactttcaagtctgtaccaattcttacaataaaacgtttcatgtttgccacctgctgtgtaaagtggcactccttttatttattctacagccaccttcttcaggctttcaggggtgcctttaattctaatatttgtgaatttggagaatgaacagtcttatttccataacccgcatgtcttttgttatattttatacatctttaaatcaatatgaaccttcttgtttctagacagtttgagttcaaaa

SEQ ID NO: 44402 - DNA, 1050 bp, Homo sapiens
ggcatccttgtcttgttccagttcttagagtgaatgctttcaacttttccccatttagtattatgttggctatggttttgtcatagatggcttttattacattaaggtatgtcccttgtatgctaattttgctgagagttttaatcataaagcaatgctggattttgtcgaatgctttttctgcatctattgagatgaacatgtgatttttgtttttaattctgtttatgtggtgtgtttattgacttgcatatgttaaaccatccctgcatccctggtatgaaactcacttgatcatggtgggttatctttttggtatgttgttggattcggttagctagtattttgttaaggattttagcatcaatgttcttcaaggatatcggtctgtagttttcttttttggttaggtccttttctgattttggtattagggtgatgctggcttcagaagatgaattaaggaggagtccttctttctctgtcttgtggaatagtgtcaaaaggattggtaacaattcttttttggatgtctggtagaattctgctgtgaatccgtctggtcccggactttttgtgttggtaatttaaaaattaccatttcaatctcactgcttgttattggtctgttcagggtatctaattcttactgatttaagctagaagggttgtatctttacaataatttatccatctcttctaggttttctagctatgtgcgtaaatgcgtcatagtagccttgaatgatcttttgtatttcagtggtgtcagttgtaatatctcctgtcttgtttcttagtgaggttatttggattttctctcttcttttcttggttaatcttgctgatggtctatcaattttatttatctttttaaataaccagctttttgtttcatttatcttttttgtttgtttgtttcaatttcatttagttctgctctgatctttcatgataacttcctttcttctgctgggtttgggtttggtttgcgcttgtttctcttgctccttgaggtgtgaccttagaatatcagtttgtgctctttca

SEQ ID NO: 44403 - DNA, 1075 bp, Homo sapiens
cttggttagtattccatgtgagctttagaagatgtgcatacatgttaaggattattatgtctttgtggatacttgtctaccttctgcaatgcctttatttaagtatttttcctgaagtttaatttgtctaaaattaatatagttattccagcttccttttggtcagcattagaatgatatgtgctctatccctttacttttaacatatttgagcttttatttatttattttaatttttccataagttattggagtacaggtggtatttggttacatgagtaagttctttagtggtgatttgtgagattttggttcatccatcacccgagcagtatacactgcactatatttgtagacttttatccctagtccccctcccactcttccccccaagtccccaaagtccattgtatcattcttatgcctttttgtcctcatagcttagctctgacatattagttagaacatatggtgtttggttttccattcttgagttacttcatttagaataatcgtctccaatctcatctaagtgactgcaagtgctgttaatttatccatttttatggctgcatagtattccatcatatatctgtctatacacacacacacacacacacacacacacacacacacacacacacacacaccacactttctttatctactcattgatttgtgggtatttgggttggttccacaatttcgctattgtggattgtgccattataaacatgcatgtgcaagtatctttttcgaataatggcttcctttcttctggctagatacccagtagtgggattgctgggtcaaatagtagttctactttaaattctttaaggaatctccacactattttccatggcggctatactaatttatattcccactagcagtgtagaagtgttccctgttcactgcatccatgctgacatctactgtttttgattttttgattatggccattcctgcagaagtaagatgatatcacattgtggttttggtttgcattttcctgatcattagtgatgttgagcattttttaatgtgtttgttggccatttgtatatctttt

SEQ ID NO: 44404 - DNA, 1418 bp, Homo sapiens
tgctactgaggtttttgtggctctttgttatgcagtactattatggaagtagatatctgatacattagttttgcggctctaccatcagaggtcaaaatatgttgacttgtatttttccagcagtggggatgagttgctgtaagctggttgctttctttcaaaaggttctcctaacagtataaatttgaggggactgattggctcctgggggtcacagaatagttttaaccctgtaaggctcagttgttcatgaaccagacagagatgcaggctttgaccttgacttcttttcacccacagttatcagttttacctcctttcctttgtttctattttttcctttttttaattgttcagcaaatattaactaaacatttagtgcttcctatgtcagacagtcattaggccacagactagactgagggaggatttgcaaaatgcacttaatttgagccaattaagaaacaatttaggtaaaacatcaatttggggatatgtgctgaatatttaggcgtacagtccttctatcaggagaacgaaaaagaaactggacctgctgtacagggcaatgagagaattctgcagatcctctatcaaactgaatataatgatgcccatccccctctggccagtcctaaataaagccacttctctgcactggagatgactcattgtattcacaataaggcacttgagaattactgtttacagaaagcatcaccagcagcagggtttaagaataccccacagtgaaaacacaaacacatttgtaatgatgagtgatggaaaaatagctcaaacctgcttaggtctgcaggtcttcctaccatactgtgtatacttgtattaggtggtagggaggaaatgccacactggaaagagaacactgagggtagatgtttgactacaatccaaattcctataaaagacacttctgaagcttctaacttttatggcagttttggatttacgatacaatagaagaagctgggagatggaaaccatgagaaaataaaagttcctttcactgctttggaggctcagtgtttatgtgatcgtttaatacaagataaaagtcacagggataggagtgtggagaactgattggaggagaattgttgtcaactcagccctggtggattgatgggggaggctctgccaggtcaaggttagtgaatgtcatcaaacttgtctggagggtttggatttgactccctggacaaagtgaattgcttgatttattaacaagctttgcttgctatttgataagcactataccaggcttggctggaggtgttcttgatagattggttggggagattaagcatggcatgagaacaagttaaaaaaaattatgtcaaatgtagtatatgtacaaagtaacaatcttatgtacaaaataataaagcacagatggc

SEQ ID NO: 44405 - DNA, 1061 bp, Homo sapiens
ctgcctcctctcaatggattattccctgcacacatgctccagtgtctttcatcttaaccacaccttccctcgtgcacgtcttctccatctgtgaaccatctctcagctctcctttagaactaaactttttaatggagttgtctattctttcctaccgggatattgtgacaccagtcccacctggtctctctgctaccactcttaaccactccaatacgtttttgatagagtggtagcaacaacctttctcacaaattgaattaagcaaattgttgcttttaggataaaatctaaacccctttaccatggctcacatagccttgcacagtctgacccttacttatccttccacccccgtctatgctcctctctttattgcccactcgaatgcagccacactgctttttccaatatgccaagatattttctgcacctcaggggcctaggaaatgctgttgtctctgtttaagctgcttttcacagccaccctctctcccaccacaaccgtatcctttagataactgattaaatataacatcttgagaaagttgttatatttctgcacagagcactctattgaaagtagaccctccctttctgtcctcccatttgctgtatcagtcctttgtttccttcatcactctaatcctgtatctcaacttgtagtgttatttatttttttatttacctttggggggggggtctatttcccatactagaatgtataaaggaagagaccatgtttggatgtctagattcttcaacattgtattctccgcctgtagcacaatatttgacacatattaggtgcacaagaaatatctgttgaaggaatgaatgaacatatttgatattttttctgttgagggttcacttttcattgatttgtaagaactttttatatattgaaaccactaaccatttgtttgttctgcatgctgcagacattttgctctttgtcagatatctatcaatttaatccatgatgtctttgataaacagaaatattgcattttttatttagataaatcagtctttcatgatttctgcttttggtgtta

SEQ ID NO: 44406 - DNA, 1042 bp, Homo sapiens
tatggagatgatgtcagaaaacaaaaactggccaacaaaacatcccaaaaggaaacaacacccctaagtaatgatgtattgcatatatttgtggacatctgaaatatttttatatttattctttggtaaaagtttatatgtccaagttctacttggactttttctttttgcttaggtgactgattcttttaataagcaaaataagtacttatcggtgccattggggggaaaaaaccactttggccttatctgctgtaaaaactaagctcacaagttagtgctctagagcatggaaaaacactatattttgttccttttctcatcatttccatttctaattaaaatggttattgtgtgtgtgtgtgtgtgtgtaatcgtgggattttgctgtttaaagaaggtggacagcaggacagagggcaggctggcctccctgccaggcctcacaggaactttgatgtggccactgctttctaaggctgaccctgattattggttcatccagagaggtaactaggtattagaagactgtatccctttaaccggcttcatagtagtgtataaattccacaattcagttctttaatttgagatgggaagtgtcaggcacaatcatttctcatgtttatggttcagtgcattttctcccaataggcaaatctacatgaaaaataaattataatcagaaggttgcttggtgagcattgaatcagctctcagcaaccagtgtcagtaagctctggtagtgcaacacactcatcttccccataggaatgcaactgccactcagaccagatattgttcaatatgcagagcatcctttctactagaccaggctgcagatgcatggccagcttttgctttcttcatttcttttcttacagaggtattatagactttctcttttgatactttttttctattagaatttaatgcagttgagttgattaatgtatgtaaaacacttagcccaattcctggtatacagtaagtacatgataactattattatgaataagcataactggttttgagtccaagt

SEQ ID NO: 44407 - DNA, 1415 bp, Homo sapiens
tattaattatactttgtaaagctgcactttttggactggtgaatatttaatgaaatgtagatcctgcgttgtcatcctgtggccctcattggtttttcccttttccacctcctttctggaggaagaacctaacgataaaactgtttctgatcttgccatctagaaaacactagtatgaagtggaaatttgtgtctccttaaaagtgaaatgaagcagcctatttaccaccacgtacctccaggccagtgggtacttatgagggtatgcaagatgacttttcagaaatcagccctgcttgggatagaaaccattgatttaataaagaaagcataggtctgtataccactcaagatgccattggtctgtatccaacttttttggcattaacttttaaaatatgcctttaaaggaaagaattcccaggagactttgtcaagtttcaatatagtaaattttatggctgagttataactcctaaaaactgaagtcaatagtagaaatgacagacctgaattagaagaggatagctataataaaacaatttttttattcccttatgatctagagtaaaaaaaacacacacacacacatttttaagttttttgttttaatgctttgaaaatggtttctctttcttgttatttatactttaatcagtgatgggtattagcattaaagcctaatatccacatcaaataatacaaggcacactgctgtaacacacaattatattaaccataaacttttacctgtttccagtctctttttgtttaaacatcattttttttttcctggcaagcctctatattctcattcacaccccagtaaatcactaagagattattgatgaagatatgtgtatttgggtgtttgaaggattgtaacaaaaatcaaaagtagaatagaattttagaatatatgctttctgcattgaggacttcatttgctttatagccttctttatatttgttgatattctttcttgccctgtgccaacattttagaaatacatttttagaaatttcttacaagatttatcagtatgctaccaataacaacacacactctctctctctcacacacacatacacacacacacacagacacaactttttatccatgtaataacaaatatcttgaatttataatgtgtattttgccagaagttaagtggttatacatcattgctttagctttacaaaatcactagatcactgacagattgttcttttggttttttttgttttgacattttttcatatagttaaaacccacagcactcaatttcatcacccaggcccaattcacaaacttaatcaatggcaaagtaaaactggcacctcttgatttcctggtttatgttttttgggtggagctgattcctgagtatgaaaattgtgttaggaaataatat

SEQ ID NO: 44408 - DNA, 2107 bp, Homo sapiens
caacttttctgtaggagagattattgaatctcctataaaggattatatgtaaatatataaattaacatttgtctgttttacaaaatagagtgtctgaaacaagaatacataaaatgttattttcaatgtactagagtagaggagtttggtatttaaaggagttctgtactttggtaaagccaaaattcctttgattacactagtggttggttatttaatcaggatgtgaattcaaattgcctacaaaattttgaaaaaatgcagatgtttggctgactccacatctatcagattgcaatttctagtggtagtgtccaagctcctatatattttgtaccaactacctgggtaatttgatgggttttcagaactactcaactatataaaccaaagaacctcaaaccttaacatatatatgatcatgtgggaccttgttaaaatgcagattctgagtcaggagctctgggtgtgacctgagattttccagttccagcgagctccatgtgatgtccgtgctgatggtgtgtgatccacactttgaacaataaggctataaataataaccatctacattttaaaagatttcctttttttttttcatttaagtgtggtgtatctgtttcctactcttgcttattctataagagaagtgtaatgggctttagatccagtctaaaatagttttggtttggatattgtcttccattaaagtttcagtacgcagaggatgaaactttgtccttcgttttttccaatgaccatcagataaatgataaacatgaatctaaaagtaatttctcatttccgatcctcctgtcagctatggtcctctgaggtcaaataaaagacaagtagaggaagtaagtcatctgttcagagactctattgcctcttaaaaataacactcaactctgaagattacacatgcttaattttcattatgatattgttaggactaggtgtgtttattgtttttaaggcattgactgacaattttgtttttgaataagttctattttaaaaataactttaatttctttacttaaaaatattttgctttcaggtcctctttgctagaattttaatttggtatgttgcatacagaggtggaaatagtgttatagcttttaaataactaaattaactttgttggtaagaattaaaaataacctaaaccttactgggttgatcataggaagctgaagggatgctggggctatgatacatgacaggagatttactgacgtgactgtagttgatttgggggctgtggggtggtgacagctagatttgtttacatgctgctgatgtgtagatggtgtcctaggtatgcaggcaaacaggtatttgctaggttgaattaacccaaattccttttagtctcttgagtaatgcaagcctttgtattacatgttaattaaagagtttattacttgtaagactagttgtgtttgaaatgaggtgtttgccttttaaaggttgaagatttcaacttagcacactttattgaatagaagatgaaagaaattatttaaaaatacgattggggacagattagtaataataagcaaattaaacaatttttttggcagagcttgttcagtatcaaaagttaaagcattccatgagtattcttcagatttcactgtcttacattgacttatttcattcagtcagtaaacaagtaagctcctgcttcgtgcgaggcactgagtcaggtacagagacaagcaatgcagttcctcttcaagtatgatggaagaggaatacattataaggacacagaagtggaatattaaggcacactgaggagttaggaaagacttataattcctaaatttattcttgagttttgaaagagataggcagaaaaagtttccatgtaggtacagagacatgaaatcacatgtagattaagggaaggagtatgagacagggaaatggccaaatcaagaaggcttttatgtaccaagtaaatagtttgaactatatttcaaaattaggagtaccgttgaaagattataaacagggacatataatagcaccaaggggactgaattggagtggaggtggggatgtgggattgtgtgagggaaatcaattaaga

SEQ ID NO: 44409 - DNA, 1026 bp, Homo sapiens
tatatactcttagtgattcctctattcccgaggtatcacttatcacttccataaagatgactccaggtccgttttctagtctggctgttctccttattataagaccatttgttttcaaagttgaatgtcagacatctccacatgaatgtgtcaccagtatcttaaatgcaacaaaaaactcagtaatccaaacttatcttccttttaaaatttcttcctatgtgctccatgtctcagttgttctaacccctacccttccggttacctatgctagttggaatcctggcaaatgccttaacttctttcttttatactctccctaatctgtgatcaatgcctatccatcctgcctctgaatgtttttcacgtttgcttccccttcccatctccacttttagtagttttgttatcacttaccttcactattgcagtagtctcttaactgacctcttttctaatctgtcttccgtgctgttgttagaaatatcttcctaaaacacagatctgttgttactgtatgttcatcgcttgactaatttacttatctttcaggtctctgccaaatgtcacttctaaataaagtatgtctgtcttctttgttgtttgtttcatgttcctttcctactgtcatctaatactgtttgtaattgtgtttatatttgtgcattgatttgtttaatgtctttcttcccactggagagatttatgtaagggactggggagagttatgtagaccctgggcctagcacaatgctcgggacatagtaacacttaaaacatatctgttgaatgagtggatggataatagcaaagtacaggcagtgcaggcaaacagataccaagtagcaaaggcagggaaattacagggtcctagactcttagtacattctcacagaccttaatctgtagtttaaaatagtaatgggcttctctcttttgctttttgcatttatttccctaaggatgagagtgaacaacttactaccccacactgacacttcagtgagggcactgtggaacctttct

SEQ ID NO: 44410 - DNA, 1051 bp, Homo sapiens
gagttgattggttatcatttcatttatccttgcttgcttcaaacttttcacactgttcttaagccttcaaccccatctttgcttcctttataaaagtcagatcttgcttatatcatgacaaaaagtagaagatgtttgtttatgctcttttcacatcaggactattttttatcttctgtctcttctttggaggaagagctgtttttctgttccaagtccagcacttccacccttgcctgtctacttcactggactttcttccaacaactcctcctctttacccctccccagcttctgtctccctgtccactagctcctcttcctcaacctacaaacatgctcaaattcctttcagtcaaaaaataaacttctcttctatactaccttgaacctagttactgccatctagtctgtcaaacttccatgtgctctcatactaccctgttttagtactgattctgtcacattgtaattgtttatttccttgttttccttctatatcagactgtaagcttctgagaaatctgtctcttgatcctggttgattcaccgaagcccaagctagttcctagtgcatcgtacgcattcagtaaatattttttgaatgaatgaacaatgttagagccatgcctctgccattcactttgtgaactacctgtaatttttttctacccctacatttcggttgaaagttcacttgaaggtcaccacataaatgtgaaatctagtggcttctctctttacatcatgcttgacctctgcaaccattagtgcttacaaatttaccttttccacacattcatggtcacgtatacctgggtcattttgggccagtctcagtattgcattcaaaagaagcagacaagccccgaacctttggaaagtaatgaacttctgtaatatattagtgaaatcttctaatgagatagaaatatacaattacataaagctcagcaaacttcaaataagttctttttacccaccttcccatatccttacacagcttggcaccttcaatctctcttttgtaacagttcacccaaaacttgta

SEQ ID NO: 44411 - DNA, 1014 bp, Homo sapiens
tcttttggggaaacagtcatacagtggttaaagcacggattttttaagagtcaagaagacctgaattcaagtcctggcttctttgcttactagctctgtagtgtgggcaagttaccaaatctttctaagcttcaattttcctgtctgtaaaatgattatattagaaactaccttataggtaggtttattgtgggaatttataaaagcttaatgatgtgtatagtgtacttagcacaatacctggctcagggaagagctcagtaaatattattactgtcgtagtgatcactgaacttgtatcggtttctttctgaaatactttctagcacttagcttttggttatcttgctttgccatttgatgtttgttgccttcttgttggcaataatccaaccgttaaatgaaaagtcaaatgtaacatctgtgataaagccaagatacacagaagtttattaagttagagcacttcgttattttatgggcctttatgctggagtttggtgccatttttggtggcaccttttgctaattgttcacgaatttgctgaccttttatgatattattttgtttcttcatgattaatgtcttattgaacaatgtgtagttttgaatagcaaaactcaggacagttttgttttgttttgttttggtaaacattaggctgtgggtacaggaatgtattttgagattacaagcaagaattgtcttttctttgtatcaccaatgcctcatagtgtacctagcacacaacagttgctaagagaatgatgaagaaagaaggaaggcaggaacaacacttcagttatcttcaggcttatcttatcattagtcaacagtctgtcttgggttttacttcttttcccattacatgatctaatctgtatagcttctctacatgtgagattcctcttcatttctggttacttatggtttctgttgcctgccttcattgtgtgaaccttctagcttctgccattgctactaagtaatagtgacaggttcagactcatggt

SEQ ID NO: 44412 - DNA, 1028 bp, Homo sapiens
aaatgttgtggtttgattatcacacgtttttttatttgtgtggaaaacttgagatgaaaccatcttttagaagtaatttactgttgcatagttttaaaaactaggttttattagtaaactcaaaagtgttcatttattcccatttctcctcagataacttcaagtgatgtacgaaaaggtttggagttcatttttgtggaaagactttaaattggtgttagaaccactaaacatcttcaaatggtactatgaggaaaaaaagaaaaacatttttctaaatattcaactataactgctgttttctgactaaaataaccatctaaccacttgtttctaaggcactgcctattccagcactttcaagtagctgtgatattacatgttgtcatcacagtccatcagctatccacccttgaccttgtgcatttggtcgacagtttctacaaaaatgttacaaattttgttttctaaacaatttgttgattaagtgatcaacaacctgaagaaaatatcaatttttaattgacaaagactttatatcttagtgattttagttttgtttctctttatttggcaacattttcatctgaattgtatagatatatgattttctagtgagtgtatgttaggaacaaaagacaaaatagtatcaacacattataaatatttagcttactaaatatttgtaattatttttacatccatttatttctagcttgttctccagcacttcagtgtttgaaagtttcatcctaaaatatatactacaggaaagctgcagttcattttcatgcatggatcattacatttttcacttgtaaatgtaggtttttatgaaaattaaacattcccctatttttctttaaattttatacaaagcactttaatgatagatgcaaccttatttttcagttcctatttttttaaagaccacacatttactaatgttaatatgaaggtaataaatagcttactgatattttatggatgcagacaatccatgcacaaccacttcttatgatactagt

SEQ ID NO: 44413 - DNA, 2560 bp, Homo sapiens
acaagaaaaagatggaagaactaaaaaagtacattgaaacacgaaagaatccaaaccaatcctctaaaggacgcagtaagaatgttctagttccattaagtaggagttgtccagtatgttgtaaatcatttgctacaaaagcgaatgtaaggaggcattttgatgaagttcatagaggactaaggagggattcaattactcctgatatagcaacaaagcctgggcaacctttgttcctggattctatttctcctaaaaaatcttttaagactcgaaaacaaaagtcttcttcaaaggctgaatacaatttaactgcatgcaaatgcctcctttgcaagaggaaatatagttcacaaataatgcttaaaagacatatgcaaattgtccacaagataactctttctggaacaaactctaaaagagaaaaaggccctaataatactgccaacagttcagaaataaaagttaaagttgaaccagcagattctgtagaatcttcacccccttccattacccattctccacagaatgaattaaagggaacaaatcattcaaatgaaaaaaagaacacaccggcagcacagaaaaataaagttaaacaagactctgaaagccctaaatcaactagtccgtcggctgcaggtggccagcaaaaaaccagaaaaccaaaactttcagctggctttgactttaagcaactttactgtaaactttgtaaacgtcagtttacttccaaacagaacttgactaaacacatcgagttgcacacagatggaaataacatttatgttaaattctacaagtgtcctctttgcacttatgaaactcgtcggaaacgtgatgtgatacgacatataactgtggttcataaaaagtcatctcgttatcttgggaaaataacagccagtttagagatcagagctataaaaaagcctattgattttgttctaaataaagtggcaaaaagaggcccttcgagggatgaagcaaaacatagtgattcaaaacatgatggcacttctaactctcctagtaaaaagtatgaagtagctgacgtcggtattgaagtaaaagtcacaaaaaacttttctcttcacagatgcaataaatgtggaaaggcatttgccaaaaagacttaccttgaacatcataagaaaactcataaggcaaatgcttccaattcacctgaaggaaacaaaaccaaaggccgaagtacaagatctaaggctcttgtctggtgaggaacagttaacagagttttgcttttttccccccatcgaactaaaaaaaaaatcatttgaccataatttatagctggttccattttaacacgtttgcttccatatatctcatggcaatgggaactgcaagagtaatgtgcatattgcatttacctcttcagtgacctttattccagtggcttgggaacaaaagttaacttcagaacttatcttccacaggacaatgcaatgtagttgtaggtagatggcacagggtcagtgctttccttttaatgttgtaaaatatatacatttatattggcttatgtttacaatagaagtcttctgtttaactaactttgcacaggtttaatttgattcagtgacttagtctactaattaatgaattgtaggaaagttaaatatattagaatgaacttgtgaaggcgataactataggaaaaaatcttttgaggcactgtaattattgtaaaaattaatctgtgacggctaaataaaatgctgcactcagaaaaaaaaatccccgaattgaattaaaaatgattagcatttatcatttacttttaacatagtgcttccaggcaaagggggaaagttggtggtaaatagaagtttggattttttttccttctccttgggagtgtgtgttagttactgttttttagttttgatctatggaaacaatgcttatttaggtcccaaatgcttcccctctctttttaataaactttttggtgatcattttaacatagttaatattattaactagggatttgttttttgtggttgtgtgtcgtaagaaaagtaaaattcatatttggaagaaagaaaaatactacttttttttttttttttttgagacggagtttcgctcttgttgcccaggctggagtgcagtggtgcaatctcggctcactacaccttccgcctcctgggttcaagcaattctcctgcctcagcctcccaagtagctgggattacaggcataagccaccacacccggctaattttgtatttttagtagagatggggtttcatcatgttggtcaggctggtctcaaaactcctggacctcaggtgatccgcccacctcggcctcccaaagtgctggggttacaggcatgagccaccgtgcctggccaaaaaatactacttgttaaagaaggttttggaacaaatgtagatttttaaaaaatgcaacataaaatgagtagactccctatacttttcgcaagtctatatatattttaaaagttcaccttctatacctgtgtcccctgtattaaggcatttaatgtatttaatgagtattaaattag

SEQ ID NO: 44414 - DNA, 1060 bp, Homo sapiens
taaagggtgtaattattgtacaaggaaataaaactacctatggtttttaaataaatctgtatagtttttaattatttgttttagtaaaattgtgtcatgttaagaagacatgtaataggactgagtttagcaaatacttctacacatcatcccatttatgtttacatatttgcttacaaatctttcattttcataagatgctcaaatagactagattagattagactattatggattaagttaatgggaatgctgttatgttttctaaaaaatgccatttttatttatgtagtaacatttttcatgctgttttatcaattgagttacgagaatttgagttgcctttgctagtctaaaacattcagactaaaaatatgaaatatcatttttattatttaggacacctaagtgcttatatattttatattaagggcatttgaagcaaaagtagcccttcagattatatatgttccttaacatttttgtgtatcatgatgagaatttaaaggaaattttagtttaatagtagtctttatctttgtagaatactgaaaagtagataatgctcttataaaaataaactggtaatatgatatattctgagatagaggttcataatatatcttaaaatattagagggctacagcaggctaattacttcagattaaaatgttgttttttccttaacagaccttcctgatgtaaatgataaacaaagccaagccataaatgatctcctagaagccatatatccaagtgtggacaaacgagaatatattattaagctagaacccatagaaactaatcaaaatgcagtatttcaatatatttcgaggactgataatcctattgaagtcacagagtcaagcagtactcctgaacaaaccgaagttcagatacaggaaactagcactgaacagtcaaaaacagtaccggttacagatacagaggtggaaactgtagagccccctcctgttgagattgttacagatgaagttgcacctacatctgatgaacaacctcaggagtcgcaggctgacttggaaacttctgacaattc

SEQ ID NO: 44415 - DNA, 1832 bp, Homo sapiens
atatcagcaaatttgccttttgagttattttttatttaggcaaattctgaaaatactattattttaattttctgagtacccaacagtttaagttagaggtgatttagaaatatgctgagtggtacaaagaaactaatcttggattaaaaaaagaattattttacttcattactgtatcctgtaactaagaaattttagtttcttcaagatagtaatctcttgcatttctggttaatctaatgtctactgtggtagcccttctttagcactaaggcatttaagttgagactgactaaaaccttgggagaatggtatggaagtctggactgtataacttggggacaaagatcccttctagctctgaggctctgttcttcctattccactctactcctaagcacaccctcaatgactcatctatttctaggctctttccattacaattaggtcacacacgttgcatttaaagaactatcctggtggtgctatatatctttgacagatatttgaagatagaaccctgaagtccatgcttttgctcttgttaacctgtagggtataaatcaggttgaatggtagtaatatgttaggttatctacctttatcttcaagctcagatagttatcttcaactgctgtatcatctccttttgtgtctcaccttctgcctacactgggctgtctatgaccaggtattaattcctatgcaagctggaagttcataaaaagttctgtcttatgaaggagttgactcatttttaatgtccaccacttgatgtgtgctatactgactgcttgaccagttttaacccatcctgtttgcctgacatttcagcttttcctttgaactgttttcttggatttaaattacaaattcttattgacttctggtatatctttattagtctgcttaacttgcaaattaagttaaatgggtttttctttttataataagtaatatgtgtctgtggttttaaatagtaaagtacaaaagggtatagaggaaaaaataagtttctatactattctgtccttcagttcccctttgctcaggcaacgctgctacatggtttatgtgtcttcttccagagaccttttatacatatacaaacatatatccctcattttcttcttacacaaatggtagctgactctacgtactcttgtgtacctttgctttattaactgtagattcaactatttattgttgacatcagtccatagatagatgcctcattttttaagaagcctgcaggttttgcagctgcaggttttccacttggaaattcctgatgattggctgacttgagacctgctgtttgctctgaacccctggtttcttctactaccttgactgtgccttaccctttgtgtagtttggctttggctgtgtcattctgataggatcatgtttctaatatggtgtcttcaaatttccctcctctctataacactttcagtttatcttccttcctctttgacctctctccccaaaccaaaacaaaattttaaatagcagataaaaagtgtactacctttacatatttattaaatatcttttatgtgtttattaaattggtttagttgagttcaatattctttcagaatttcttagttgtgtgctagaggcaaaggaactatggaatgcccctatggttagaaagagaaaaatgaggggaaaagagaaggataattttgtctggtattcaagactggtctttaatatgaagctgacatcttctttttaagttcttgaaatatataatattgtaagaagagaaatatataatttgtagaaaaaagattctacatgtagaatatgctagagcagta

SEQ ID NO: 44416 - DNA, 1029 bp, Homo sapiens
gtgaaccatacttttgagacacctggggcctaaatcactcaagtcagcagcccctgctcattcagccctgaggatgactctggctgtatctggatgtatctttcaagttgtggtggctgacttggccaacaggcccagagaatcagagcctgatttcccagccagaggagattcgctaacccagtatgagtgatgctgctgtacccgtctctcctcctccctccatttcagcccttttgcttctccaatataaatcataattccttccctgaagttgtttacagtctatcaagggtcacagtatgtgcatctagactgcaatcccaggaggcctctgtatgctgagagtggttgatcaatggatcgtatgagggtgaggaggcagggagtgatccagtgcaatgaagaaaggcttcaggatatgaacctgtctgtgagtgatgatctgacctgcataatatggcttagatagggaagtgcatccaccgcagcagaaaagcatggaccaaaggcccagactgtgcaagcccattgtattaatagattggatattgagggagaataacatttgtggaatcacgggatgttagatctgaaagggatattacagcatgttcggtcatgcccctctcttaataaaacaggaaaccaagacccacacaggacaaattggctctatcaccagtctggcttaggagtagagtagaaactcttgtccagagtgatgggtcatggctggatggctagcacagtaggatgccaggttcactgggggtttgggcactgtcagcctgggtgagcagagtagcagtaggcacagagggagggggacagcaaggcagcagctccattgatgtgccagccttccctttcctcccctgccacagctcctgggactgttaaagagatacaagaagagaggccaggcatggtggctcacgcctgtaataccagcacttagggaggtagagccgggtggatcacctgaggccaggcatttgagaccagcctggccaacatggtgaaacc

SEQ ID NO: 44417 - DNA, 1077 bp, Homo sapiens
attctcctgcctcagcctcctcagcctcccgggtagctggaaatacaggcgcccaccaccgcacctggctaatttttgtatttttagtagagacgaggcttcaccatcttggccaggctggtctcaaactcctgacctcgtgatccacccgcctcggcctcccaaaatgctgggattacaggcatgagccaccgagcctggcccatctgctgctctttagatccaggctggagggcctcctgagccaagattaggcctgcccacagccctctgatgacatcaatggggagaacaaagcgagtcttttgtatgctactgtgaattaaattcaggtaacatggtatttgctattaattatgagggaaaagctttagctagtctgagtcctctccctatacacattctcctgtgggatcccctcctgttcttccctcccacccttccttccttcctttcttcataactccaagttggaagggacttggggatgagaaaagaacaaaggaggaaataaaggcagcgaagtttggatcttcgttctccaagttgctcagaatctagtggaacagacaggaccttgaacaactcattttaacacaacctggtgggagttatgagggaagaagcatagaacccaaagaacaaaggggaagagggactccggggatgggaggagagctttgcaagggaggcagtgtgtgaactgaggcctgaaggacaggcgttccccaggggaaagaggggaagcagggcattccaggccaagctccggagttagggaaagccatagttggtttgggaagattcaatatggtagaggggtggagtgtgtgaggctggagagctaaaattttgcgggcttaagtctgtttagtagggacctcctgggagatctaacctacccaagagacacacatacacacacacagacacacacacacacatacacaacccttgatggctatgtttgcatttacactccagcccccttggctacaattgcctggccagtggtaggcaagagacgaagaggctcttctctcctccctttcctcctcccttccttctcctgaccct

SEQ ID NO: 44418 - DNA, 1075 bp, Homo sapiens
tggccccaggtaaagttgtgtggagcaaaactgccctgctgagccctgaccatttcttggcccacacaatcatgagaaataatgaattgttatttaaggccacattttagggaggtttttaatgcaggaatacagggaaatgaaacactttctggctcactctttttcctacatcatctgtcccagtttgtggcaccatgatccacaatcatccacactagacacttcggttgtaggagacttctccgctctcacctctatgccatgtcactggccaagctctgccgattcttggggagggtgtaaaatgttactcctaaataattcctgagaccgccccacctcgacctgcctgttgccagcacatttgcccagattctcaatcttcttgccctggacaggtgccatggtttccacaccagccatctcaaactccagccttggccagagtcacctccctaacaggcatgttgccctctccctgacctaaagcctcatggtggctgcccatcaactgtggaataaaggctcaactttagcctgatgcactaagaactctgcccattgggtccacgcttgcttgaccaaatttccctgctcttctaacttaaaacttcaggcttcagcaacagagagctctgctgggttttgccactcatatgcgatttctcctttttgtgcttctctccagaatgccaccttctctctcctccttccagctgattctcagctcagcaatcacgctttctggaaacctttctcctttcctcccccagcatctaccacacttgctggactggggggccctttctgggagttcattgccatcagatttgtgtgtcaaagaaacagccacattggaaaggagttttacaccccttcccaagctagactgggcggggactgggggactgtgagatggctgccaggcccagatggaggctctcacgcagtggaggccctaggaaggagagggaggcttctggccttcatggaattgaattgaattcatcatacatttctcctttcctcctccctccagccccagctgacagcggggccgacaggtgaattc

SEQ ID NO: 44419 - DNA, 1003 bp, Homo sapiens
acagactgggaactaattctgagaagagaactgctgagttactgaaagaccttttggaccacccctaaatggagcatcttgatagatggcaaatccagtgtttcttaaacttgtccatgctgcccagagcccactgccttttatcagatgtgagacttcactgccacagtgtcatcccacagtttccttccctggacatttgataaagggaaaatcatttcttgtcctttaaggcagggactattattttttcacttttccacataccccacaacacctaacattgatttactcgtagtaggagtttcatactgttgaactctctaaaggccatttgttccagggcctagctgggcttgtgaaggacaacagagtcatttcctaaggaccccaaaagacagcatgaaggaaaaaataataataaactgctgttcacagtgccttgagtgtaccaccgtactttctgctatgccttgtccattccaatctggacagtctctgtgcccctcctttccactcaagtgttatccagcactcaagttctggctcaaggcccaacatctccgtggggacctcagccatcccagggcattgtgaccccttcctctaagtccccggcacactcgctgattggtaccctctcattcgacaaagcatatgccattgtggcttacttgtcatttctttaggtcttgccttcccaagtagatcatgagccactataagaactagctcccatagtcccagcccctgggcctggtacatggcaatgcttagtgattggtgattgaggataatggtggtaaaggatgtaccagacagtcatctcctgaagagatgccgaacaacctgtccttgttttatgtattttctctttctttcctgtccagttttattcctctcatagtaactgctaaaaaaatatcagttcctgtcactcttccaccccttttctccctctcccctgcattgtggtctgggccttggtccactagcaactccc

SEQ ID NO: 44420 - DNA, 1090 bp, Homo sapiens
atataagcagaaattattgggaccttctaaaggagcacctcttgcaaagaggagcaaatggtttgatagttgatgatggcagcaggctgggtaagaagctgggttgtgtactttctggtgacactcctgggctcctccccatcccccgtgtctctcactgagggaaagaaaatccccaagggcactgccactgtgctcggaggtgccctggactgtgtacatctgaactttggtccatcctttgatgtgtggttcgttagccacaaagagaaatatctgaaagtcaacatgatgcttcttgcatattatccagattattgtatgaagttgtgtctataattattaccaatttttattctttatttctcaaatggaaacacctgaaaaagcattctggagtgctgaatttttaagatgtatattttgttaagcatattctctaaatgagatattgtgtggctttttagtaacaacgtcatttctaatatgtgtgactcctttattatgtatgaacattctttgacattcctaattcagctctgtagtcttacacactgcaggaactgtctaagcgagagcagagagaaatgctttctaacctaatcgctgcaggcggagacacttggaaaagaatggggggaggtggggcctgacagagagcagcacttatgtgtttgtcagatgaggggatttccagttgaattggcctgcagtggcctaaagacactagcctggttagcgatgacctgcatttctctcatagagcacctcccttttcatcgtatccactagctctctaagtcctccttaatgaggacacttgatcctcattaagtctgccccttaagatggcttcacacctactgaaaaactccaggggtttgacatctcactttgattgaaatcttgtcttcctataacatttgattccctgggctcttcagccctatcacctctgcttgtctttatccactctcttcttcattcacttttggctacacaggccttccttccatctcttgactcttgaccacctcagagcctttgtatccgttccctttgcctggagagtttttcccttgcatctttt

SEQ ID NO: 44421 - DNA, 1034 bp, Homo sapiens
tggctcactgcaacctccacctcccaggttcaagggattctcctgcctcagcctcctgagtagctgggactataggtgcctgctaccacgcctggctaatttttgtatttttagtagagacagggttttgccatgttggccaggctggtctcgaactcctgacctcaggtgatcagcccgcctgggcttttcaaagtggcatgagccactgcgccaggcttatctttatgtacttaagaagttagctctttgtcatgtggcttacactaatctctttcagtttgttgtttttctttttaccttagctgtgcaagtctcaaacaaaaagaagaggaaattaccctctgatgtgaatgaagggaaaactgtttttatcaggtatgtctttctgcctccagaattgcttttgcgtggtcttcatagatctctcttccttcttcttctctttttggcactagttctgttacctagcccagaaattagatcaagcacatctggtcccaggaacatactaaacaatgagaaatgtaggacaatcagaactataacacagaagacagatagcatgggtcctgacatcacgttttcatttagatttcatgctttgtaattgggttggcatcatttggaagaaatcagttcaactgttagaaacatcttgcttccggcctttgttttagggggagtgctggagaggattgacactgcttgtctcaaatgatttctgtctttatgcctaacttatcttctgatgcagtgtccagaataaagtaaggcatctcatctgtttccaggaaaactaggtgggagtgggggtggcaataggctttatttcgtgttgctgttgtgttttagctctactgactgcaatagattgctgcttttatgaggtcaggatgtcttcagtatacctcaggcctgccttctagtccttaagtaccagtgtactagggtcatttgcatccgattttagagttatatattttatcttcttgtacaatcttttagaattattttcttgggtgcggtggctc

SEQ ID NO: 44422 - DNA, 1065 bp, Homo sapiens
aagcagtgatcattctgaggaggacagtgacctagaggaaagcgatagtattgatgatggagaggaactggctcagagtgataccagcactgaggagcaagaggataaaggtttgtttggattttcataaatgtctttagactttaaaaaagttactgaagttacggaaatgagcatcagttctgcttagatctctttttaaataggactctaaggtgttctatcaaatttatgtttaaatgctgaaaaggaaacctttatactcctttcttccaaaggtttttttgttgtttcctttttgtttgttttgttttttaagtgagttttggagtggtgtttgagggttaagattcttagggaattgaaaacctagcttaatgctgaggttctacctctctctggattgtccaacttgatagaataaccaggtaaacagcatcttatacagataatatagatgaaacagatgatataaccatctcaacatcaagctagattttaaacaactccttggagttgagatggggataaagaactgtttagtcagtttggactgacataacaaaataccataaactgggtggcttaaacagcagaaacttattttctcacagctctagaggctagaagtcccaggtgccagctgattcattttgggtgcagctctcttcctagcttgcagactgctgccttctcgctatgtgcttgcatggccttttctttgtggcttgacgaggggagagagagaacaagtaacagtgaactctggtctctcttttcttataagcacagcaatcctatcagattagggcccaaccttaagacctcatttagctagcctcagttacctccctaaagtctctgtctccaaatacaattatatttggggttagggcttcaatgtatgaattttgggggaacacagtgcgttccataacaaggacctctttgaacatgttgtaaaactttagccaatccttattgctacctttattgagaataaattcaacttgtttattgaggaaggcaggtcattacagaatgagaaatggctaataactggtt

SEQ ID NO: 44423 - DNA, 1032 bp, Homo sapiens
tcttgtgggcctgaattgcagtaatttacttcttagtattctggctacctcctgctgcctctcacttctttctttgtgcatttgcacacagatgggaagatgcgcggttttggttttgttcagttcaaaaacctcctagaagcaggtaaagctctcaaaggcatgaacatgaaagagataaaaggtaagctttctatacccatatcattgacccagatatttctggtgttttggtgaattagtgtagtaacccactttctgcattttcaaaagatgtttgcattattaagagtctcattgctaatacggtagctatttaggtgaaatactctagaacttgatcttggggttaaacttgaaagaacccttgccagtattctttcttttatctggtgagagtgtccttttaaatccctagtgaaaaatgtccctgagataattgctgatagatgcaggttggtatctagattcctccttggttatatcactgttcagcatctgtgggctatttattaaactgactgtgatttatatattgacttatcaagtactgtgcctaaagaagttattgccggccaggtgcggtggctcacacctgtaatcctagcactttgggaggccgaggaggcaggtggatcacctgaggtcaggagttcaagaccagcctggtcaacatggcgaaaccccgtctctactgaaaatacaaaaattagccaggtgtggtggtgcatgcttgtaatcccagctactcaagaggctgaggcaggagaatcgcttgaacctggaggcggaggttgcagtgaactgagatggcaccactgcactccagcctgggcgacagagcgagactgtgtctcaaaaaaaaaaaaaagaagttattgccgtagagatgtcctagcttccaggtagggtgcagatgattccagaatgcctgttttgattcctgatagtctaactggaaacatagttctaattctttatttttttactccatcttatcccaggtgtggtggctatgtagaaaggcaaaat

SEQ ID NO: 44424 - DNA, 1030 bp, Homo sapiens
ctgattggcaggtacagtgatcagtttgatacaggttatctcatttaattttctcagcaatcttaccggatggagagtcttaatgtcattttacagacaggaatccgggatttaggggaatttagtaactttaagtttgtacggctgttaagtagtggacccccgatttgatcctcagacctggacatcttagccaggatgctatccacttgttcattcatttattcagcaaatacttaatacctactgtgtgccaggaagtgttgtaggtcctggggatgcagcagtgcacaacaccaaaccaaaaaaatctttgattttatgtcttcaaggtggggaagagagccaataaacgagccaataaacaagccaaccgtgaaaatgatgtcaaatgctaaggagaaaaataagccagggaaaggggttaggaagtctatgtgcatgtgtatagtggggagagggggtgaagagtggcaatatagatagggtggccagagaaggacggactgaggtgagagagtgaacacatgcctctccggaggaagaacaattcaggaagagaaaacagcaagctcaaaggtactgaaacagaggtgtttttggtatattggaggagtagtaaggaggacagggtgactggattgaagtgagtaaagggaagagaattaggagatgagatctagagtagcagatcatgtaagatttttttttttttttaaagactgcgtcttgctctgtcgcccaggcgggagtgcagtgccacgatctccgctcactgcaacctctgcctcctggttcaacccattctcctgcctcagcctcccaagtagctgggattacaggcgagtgtcactacacctggctaatttttgtatttttagtagagacggggtttcgctatgttggccagggttgtctggaactcgagacctcaggtgatccgcccgcctcatgtaggatgttatagaccattgcaaggactttggcttttactcagagataggaagccactgattttaagcagagagca

SEQ ID NO: 44425 - DNA, 1049 bp, Homo sapiens
ggattcatttagtcaatgaatatctgctaaattccaactgtgtgacagaaactaatttaagtatggagattcagatgtgagcaaagaaacaaaaatccccgttctcataaagcttcctttctggtggggggattgaactggagggggtgtctaaggctccttccagttgtaaagttctgtgacttcaaagaaaaactctttaatagaatcacaaacaagccaagcagggagctggggggccgaggcagagcgcgagaagtaggagaaggaagaggggaaggatgacagctcaaactccagcgaagacattgaataggggcgcgggggagggaaaggtgagaggccaagaggtggggtgagtctcatatgtaagacaagtgtgtcctggatacggtaggggactctgactggcattcaggctactgcttgtggggtgggtaaggggagggctgcatcattgcctcaagccaaacgttctttgcccacagaccccacagtccccatctctggcccagatgacctctctcctcccgccagcctcgggaacccttcggggcagccagagtgtgggccagggtcctgcagcgtgggagaattgcctgaacgcgaggggcagcctcccgaggcgccgaggcccctctttttcctgaccctggaggccgactgggcagaggccagggctcgctgggggctggcctgggaggcccacgtgtacggggtaggcgcgctcttcggcctggttgccttgctggcgctgctggctctggccctcttgccctggcggtgcccgcccggcgccccctgcctggcgctgctggacctgctgctgctgtcggccgggaccacgcgggccttcccgctcttctacgacgcctatgggcacagggatcgactgcccgcgctcgcctggctgctgctgcaggaccttccgctgccctgcttggctgccggcctggggctggcctgcctgctgctggcccggccgcgcccgccgcggtgccccaccggcctggctgcgctgctgctcctggggctggggctggcggccg

SEQ ID NO: 44426 - DNA, 1051 bp, Homo sapiens
gtgggccgagattgtgccaccgcactccagcctgggcgacagagtgagactctgtctcaaaataataataataataataataataaattaactcttgcttactgtaacttttttactttataaactaaattttttttaactcttggactcctttgtaataacacctagcttaaaacacaaattgtacagctcattaaaaaattttttctttatatctttataagcttttttctattcttaaaattactttattttttttttttagcttttaaacttttttgttaaaagctaagacacaaacacatattagcctagacctacacagggtcaagatcatcaatatcactgtcttccacctttttacatcttgtcccacttagaaggtcttcaagggcagtaacacacatggagttgccatctcctaggataacaatgtcttcttctggaatccctcccgaaggacctgcctgaggctgttttacagtaaattttttttttttgtaagtagaaggaatatactctaaattaatgataaaaagtgtagtatagtaaatacataacccagtaatatagttgcttatgatcaattattgtatactgtagataattgtttgtgttgtccttttatatgactggcagtgcagtaggtttgtttataccagcatcaccacaagcatgtgagtaacgcaacatgcagttgttcatctctattatactcataggatcactgtcatacatgcagtccatcattgaccaaaacatcattgtagcacataactatagttctaacattcatggagctttttcgtttttttgagacggagtcttgctctgtcgcccaggctgaagtgcggtggtgtgatctcagctcactgcaacctccaccccctgggttcaagcgatcctccagcctcagcctcccgagtagctgggatcacaggtgcccaccaccacacacggctaatttttgtctttttagtggagatggatttcaccatgttggccaggctggtctcaaactcctgacctcaggtgatctacccgccttggc

SEQ ID NO: 44427 - DNA, 1034 bp, Homo sapiens
tgggagccgtcacagtgacacacaaacaacttacagacttccacaagcaagtcactaggtgagtgatactgggggttcttaaggaggtgtgggatgtgggaagaaacatatctttatttcttatgtgcccttgggaaatggacaatttatagtttgtttaaccttgaattgcacaaattggcattggaagccaatctggtgggaaaacattcaccatgctgtgtatgtatgtacatatatttaacatatgtgataactggtataagattttttaacggtaagtggaggcactgtttctcccaaaggaaaatgcactgagcagctcactccccgtcaggagatctgtctatatttttctaagtccttctgagttttcatccacattcgggggtcaggaatgtaggtacctgagtaaggcaaagcattggttataaaacatcagaaagtgatgtagatgacagtgaattggagaatgttcaccatgcctaaagatagtcaaattctaatttcaaagaagttgtgtagtccaaacagaacatctgcctgggatacattaggcccatgaggaacttacaatctctggattacagcctaaaatgtaaagtgtgtgtgttttttttactgtgaacatataaatatttttaatacagttacatagtcttcctaattattgttttatagccataaaggtgttacttgatttccttataatgcctctattagtagacatttagatcatttttcagttttttagtattacagataatgtcaaaaatagagccttttccttctactgaatattttcctttaaaatgtaatcaccgaatcaaaggttatgagacttatggtcttaatggtaatgacagcaacttaagttggattttatagctaagtgttcctttgccctgatagtctttttgtatctagagtctttagagttttgtctaaattttagacaatgacttataatcatacagtgtggaaagatatatgggtcaaagaaggaatgttatagcaaggttagtagtagtgaa

SEQ ID NO: 44428 - DNA, 1084 bp, Homo sapiens
aatggtgtgatctcggttcactgcaaccactgcctcccacgttcaagtgattcttctgcctcagcctcctaagtagctgggattataggcatgtgccaccaccagcctcccaagtagctgggattataggcatgcaccaccaccagcctcccaagtagctgggattacaggcatgcgccaccacgcccggcttatttttgtatttttagtagagacgggttttcaccatattggtcaggctggtcttgaactcctggactcaggtgatctacccgccttggcctcccagagtgctgggattacaggcgtgagccaccacacccagcccatatttgggtttataaagggaaaaatggaaaagatagccatagtgcctcacagcccatctacccaaagttggattgaatttgcgtgttctattggaagtgacttaaaggtggccaaaaaatgataggatgatttaaaggatgtgcttataaaggtgatgtaagtaaatgactttatcatctggttttctttatttggtgaaaatgatactaagtaagcaagcagggatcagggctctgggtcctcagtgaaattggtctttgttcactattttgggctgttgtcttttcccaggcataccaatcccattgtggaaaatggacagactcatccgtgtcagaaagtcatacaggaagtaagtgctaatggatgcttgtggaatcaaggcttgcttcttttttccttacagggctttgggtaactcacctgagaagatactgtcttccaagttcatagggagattcagtttgttgatgtggtttcaatgaaatgagggacagagccatccaaatgtcttttattttagatttgataacaaaacaggctgcaagggaatgccttgaaagaccagagaagtggtagaaagagattcactgtgtgactcctagagttactaggaggcctgatcaataccagcagaatatttttgacaaagctagtgacttcgttttcctcagtgatgacatacttcccctctacttttttcactgaaggttatgtgaggatcaaaagtcatgttttaagaattgcttttgag

SEQ ID NO: 44429 - DNA, 1026 bp, Homo sapiens
caagtatattaatatacttggacttcctttcttctgtcttctgagaaggaaaggtggttttttgttttgttttgctttgttttaaaggtagcttccagacccgaatatcttaaatagccttctgtgggaatgagctggtatacagtcattcattaacccctcacttctcttcatcttagcaacctagcattctttggagcacaataataaagacagtcatcttcaatgtaggtttatgtagtagatgaagctttgaacttgggaaattttcctgtgtagtttatatctgcattgtaaccacaaatatcactatttagatcttatttaataatacattatgggatttcacccccactctcatgcctcctgaaccccatggaaattatatttctaactcattgcttgcaagagctttttttaaaacattctttgcctagaaaaagatgcattacattttactttggaaaaaatatatatcacaaaaacagactacaaggagaaacattgagttttagtctaattctgttttatctcttttatagtatttatagtagtatcactttctgtgggatgacatgtttattattctattgccaaagctgaaacattagcttttcttgtggaaatatacagtggtatgcctagcttactctagcttattatctattctgtatcaaccaggtatataagtaagtaaattacttgtaaaataattttttggataatgcagaagtgggaactaagaaattagtaagttatttctgaaacaacttgggtaagtctgtaacctctctctacttcagttttcccattgagaaagtagagacaataatagcagctacctataaagttgtatttggggattgtgttagtccagtctcatgctgctataaagaaatacttgaggctgggctcagtggctcatgcctgtaatcccagcaccttgggaggccaaggtgggcggattgcctgaggtcaggagtttgagaccagtctggccaacatggtgaaacccgtgtctactaa

SEQ ID NO: 44430 - DNA, 1042 bp, Homo sapiens
agcctaattgttttacattccagtagataatccctaccttaatcaataatttcattatgggccaggcaatgtggtttatgcttataattccagcacgttggaaggctgaggtgggacggttgcttgatgtcaggcattcaagaccagcctgggcaacatagcaagagcctgtctcaaaaaaaaaataatacattaaccaagcatgttggcatgcacctgtagtcccagctactcaagaggctgaggcaggaaggatcacttgaccccaggagttcaaggtggcagtgagccacgattgtgccagtgcactccagtctgggcaacagaacaagactgtctctaaaaataataataatttcatcatgggttgcaaaatgatatttgactatttctgttatttcttgtacatataagttggcattcttatgagctcctactagaaaggtaggataaatcttaattcttttcaaaatgaggatttattttaaagctgccttgaatttttttttttctggctttgtctttttgaagtatgatggactcatgttcatttaggtccaaccaggtgtctcctttccaagtttcagaatcccattctttaccagtcagtttcctaactttcacatgagaagtgtggagggactgtaaattcacctgttgtttgtaattcagcaagtcacacaactaagtttggtatacgagtttcagcagtactaactttgtagctacaaaaagtaagagctgcttttagactgggcgtgaaagctgtggtgctcagactgtggcctgaggtgagagttaatggacttgaatttgtcattttctttttgtaagcacttgtgaatttaaaataatcccatccacatgtattttgtgtcatggttactgccacagcagtcaactacagcagccacttgggcattcaaggcacgtgcctgacttagcacatcatgacaatcaatcacaggtgatattttgaggaactgtgatgcagtctgaaaaatatatttcctgtggtgcttaaaaatgtctctaattttgt

SEQ ID NO: 44431 - DNA, 1063 bp, Homo sapiens
gagactaaaaccacacaggtcttacagatgtcactggtttgtctccttccacttatattttggggttcttgtagatacccttggagataactagacaacacctagttttgttgctatctaatgctctgttttttttgagggatttgtggagattgtataaagcttcatagaatctttttgctatttaaaaatatatcagctaggcatggtagctcacgcctggaatcccagcactttgggaggccaaggcaggaggatcacttgagtttaggagttcaagaccagcctgggcaacatggcgaaaccccatctctacaaaaaaatacaaaaattagccgggtgtggtagcagacacctgtagttccaactactagggggctgaggcaggaggatctcttgagctcaggaggttgaggctgcaatgagctgagatcgtgccattgcactccagcctgggtgacagagcgagaccctgtctcaaaaaataaaataaaaagatattaacatgagcaaagtaaagatattctgatggtctattaaatcataggtgtgcttgggttactggttaatcaatggctaaaatctttggaagatttttttacttgagaaaggaaaattggtgctattagtactacattaattaattaaacatttgttgaatacatttaagacacgatgtttggactaaaaagtacaaaaattagtaaaatatactatatctgtaaagaagttaacacctcatgcttactttgcaccccttatttcattgaaagctaaggttggggttttttggtggggggcgggaggggtggtttttttaaaaacagggtcttactctgttgcttgggctcaagtgatcctctcgcctcagcatcccaagtagctgggatcacaggtgcatgccaccatgcccagctaattttttattttttattttttaagtttttttagggtctcactctcacccaggctggagtgtggtggtgtaatctcggctcactgcaacctctgcctcctgagttcaagctattttcctgtctcagcctcccaagtagctaggatt

SEQ ID NO: 44432 - DNA, 1050 bp, Homo sapiens
gtagcattcccttgattttcctatctattttgttaatctttgccctaaatctttattatttccttctttttgctagctttggatttagtttgttctttttatggctccttaaggcataaaattaggttgttgatttgagaccttttttcttttttaatgtaagcatatatacagttatacattttattcctcttagcacagtttttgctgcattctataagttttggtatgttgtgttcttatactagttcagtttagttcagttttatactagattttatactagttcagtttaatatgcaacattggggtttttgttctgttttattttctaaacataaacacagaaacacaatacaagtgtataacttagtgaattactatatgtggatgtccttttagccaccacccaagtcaagaaacatcttcatttgtctgaagatgttttctgatttcccttccttgacccattggttttttgagtatgttgtttaatttccacatatttgggaaatttctagtttcccttttgctgttgactcctagttttatttaattgtgatcagaaaagatgttttatatgatttcagtctttgaaaatttattaagacttattttgtggcctaacgtatcagtctttttaaggagtggtatatttcttgtttccttcactgggtcccaactcaagagtttggagtatttaccagggcttctcttcgatatttctgaattccagtttttatttccccagtcttgagaggctgtccagagcccttcagcttcttagcctcttgtcttccactttcaaattggcaaatgccatgaggggaaaagtggagccaaagagtgaactgaactctctgctcttccattcccttctttctgggaactgtggcctcatattttagctttggtgtctttaaaaaggttctttgtagggagtatttagtgaattttttgtgttgtttttttttttttttttttttttttttttttttgagacagtcttgctctgttgcccaggctggagtgcagtagtgtgttcttggc

SEQ ID NO: 44433 - DNA, 1021 bp, Homo sapiens
gtgaataaaaatccatataaaacaaatatttaaatagtttccatagtaacacaaataatgtgtgacccatatcctagtcttccatattgccatgtccatgcgaacccaactcttacgaaatcccttaattcaagctggactcatggttaacaattacaagagtgatatctacatattaatactagcagaagcacaagttgctgattgatgtttcattctattttcccaagcagaagacacaggatgctaatgtcctgttcctctacttggggtgggagatcgtgcttctagatacactgcatgagtttcgatgctggtcctgacatcacatgtagattgttggcctctggaatccattaaaagtacaagtagcagcaacagtgtcagcgcccatgtttttaaagagcatccaattacctacatatattttgggcagatcacagtgctcaacaatctgatcaaggccatcacatgttcttcccatatactggatgaataatacttctcactgatctaggtctcttttgcagcaggggctttacatgtgcatgatcataaaggattgattaaatgatccatatacttcatcattcatgtaatacataaaggtctgttcgcttgactcatcttcctcttcagagcctgtctgttcttttttttctttctttctttttgagacagagtctcgctctgtcacccaggctggagtgcagtggtgtgatctgggctcactgcaagctccgcctctcgggttcacgccattctcctgcctcagcctcccgagtagctgggactacaggcgcccgctgccgtgcctggctaattttttgggttttttttttagtagagatggggtttcaccgtgttagccaggatggtcttgatctcctgacctcatgaactatctccctcagcctcccaaagtgctgggattacaggcatgagccaccgcgacggccctgtctgttcttttaatatgatttttttggcaatgaaagctgatgccacatgaaatatctgc

SEQ ID NO: 44434 - DNA, 1057 bp, Homo sapiens
ggccaattacttaagcgactcagttataagtttttaatttaagttgtaagtaggagataacttttacagagacaatctttgggttagatattacctcaaaagttttatagttcagtatggaaactgaataggcatgcttcagcatgggtgtatgcagctttttgatggaaagcatcaaaagcacaaagcagatgaagtaaagtcatgctttgatagactaagttggcattgtcatgtttggtttatcacatgtccataggaattttcttcttagatatcatatcagaaaggtcttgggttgatatggtttggctatgtccccacccacatctcaccttgtaataataccccccgatttgtggcaaggtggggccaggtagaggtaattgaatcatgatggggggttccctcatactgttcttgtggtagtgaataagtctcacaagttctgatggttttataaatgtgagttcccctccacaagctctctcttgcctgccgccatgtaagacgtcgctttgctcttccttcgtcttccgccataattgtgaagcctccccagctatgtgaaactgagtcagttaaacccctttcctttataaattacccaggcttgggtatgtctttattagcagtgtgagaacacattaatacatgggtcatggaatatcagcttcaaacttctttgctagtacttttcctttttggaatttattgattctttagcctggttataaaacctagggtttttggcttttctctggtcattactgatttatcttgaaagtttaggcattttttgtgtgtgcttatgcttgcaccttccagtcaaaacatgcttttgaaaggaaagccttctagaaaatagaaaatattcctatacaacttcagtagatgagttcagtctaggaatactctgtgccttgcactgatagaaactgggagtatgtaaataatgaaaaccaaagatctttctcccagagagtgtaccaatgtagctgtgtcatccagtgtagtagccaccagtctagtgtgactatttaaacttaaaattaag

SEQ ID NO: 44435 - DNA, 1956 bp, Homo sapiens
actcttcgattgtggcatcaatctaatcttgtttaagttctccctttgccgttgcttcttgggccgtgcttttccgttttgtcttcctcccaccaaatccaaccccagtgtttctccaccttccgcttaagaaggctttattcgtctcccctccgtgtccaagacttgcatctggcattttgctcccagtcgtagccttatgcctcactctttttgcctattttcactccagtttgagtctgttcttctcgaaacttctcaggtttctagattcttactcatgcgagttttccccttgctttggagtggcaacataatatgaagaaaaaacagtaattctgctttcagaaaatctttggagttctcattttgtttcatattaatcctctaaccttgttatttctctggcttttagatttttatttataagatgggtatcactgctgctttgattattccatataaaactgtgtgtgcatccggtgagatatttaattgtagcttatatctgttgtatttctgcattctttgattcatgttttatgcttcctgccctaattttcacacctttgctgtgcttcatttctgtgtaaatgtgtattcttggttatctggctgacttaggttctaatgtaggatgtactttaaaaattaagtactttgaaaactaaagaggctttttttacaggctgacaaaatactcacctttacctttatttttgcattttatactcacaaccatattttttttggcccccttccctttattttaactcataactgatacttaaaggtgctctgccttattaaatcagctcctaggctgcaagtgcataatatttaaaaatttgcaactttgactttttaaaaatctggtcttggtatggagcaactttgccttttttttttttttttttttgagacagagtctcgctttgtcgcccaggctggagtgcagtggtcccatctcagctcactgcaacctcctcctcccgggttcaagagattctcctgcctcagcctcccgagtagctgggattacaggtgcctgccctgacacccgactaatttttttttttttttcttgagacagagtctggctctgttgcccaggctggaggagtgcagtggtgctatctcggcacactgcaacctcctcctcccaggttcaagtgattctcctgtctcagcctcctgagtagctgggattacaggcacacgccaccacacccagctaatttttgtattttttagtagaaacggggtttcgccatgttggccaggctggtctctaactccgacctcaggtgatccgcccgcctcggcctcccaaagtgctgggattatagatgtgagccatcgccccccgctgcaactttgactttgaatattaaacctaaaaaactggcacccaagtcctcttcagaaaataaaggaatacgactcactgtaggctacacaagaaaatcattcacatatggtctcatttagtgtttctgtgatctctggagagtcaacaattccctgatctttgtatagttttctaaagtgtaattaggagaagtgctacactatactaaaaaagtaatctctttctaattaaacctgcttgttgtgtgtattttaaatcaatatttgagtgcttaccatgtgccagcaactatgctgggtgtttggatttggaaatgaaccagacaaaaatctctgcttaccacagaaggtagttgtgattaaatgagttaatattctacgaagaggttagaaaagttcttggaacatagagattaaaatgttagcaattgttatttaagtattagtcacttttctctccttactttccaatactctattacaaccttacatcatcttcaccatcacagttaatagtcagagtccagacaggaacagatggcacacttgacaggataatctgagtttattttataaagatactat

SEQ ID NO: 44436 - DNA, 1041 bp, Homo sapiens
gaattagctaatgaagaaaattagtttaaattgcttttaaaaataaataagtatgagccgggtgcgggggctcatgcctgtaatcccagcactttgggaggctgaggcgggcggatcatctgaggtcaggagttcgagaccagcatggccaacatggtgaaaccccgtctctactaaaaatacaaaaatcagccaggtctggtggcaggcgtctgtaatcccagctactcaggaggttgaggcaggagaatcgcctgaacctgggaggtggaggttgcagtgaactgagatcacgccattgcactccagcctgggtgacaagggcgagacttcatctcaagaataaataaataggccaggcacggtggcttacgcctgtgatcccagcactttgggaggccgaggcgggcggttcacaaggtcaggagatcgagaccatcctggctaacatggtgaaaccccgtcctacgaaaaatagaaaaaaattagccaggtgtggtggcgggcgcctcccagctactggggaggctgaggcaggagaatggcgtgaacccaggaggcagagcttgcagtgagccaagatcactccactgcactccagcctggacgacagagcgagactccgtctcaaacaaacaataaaaataaataaataaataaataaaataattaataaataaataaataaatatgtaatcccagcacattgggaggtcaaggagggtggatcatctgaggtcaggagttcgagaccagcctggcccagatggtgaaaccccgtctgtactaaaaacatgaaattagctggctgtggtgctgcatgcctgtaatcccagctaccaggaggctgaggcgggagaattgcttgaacccgggaggtggaggttggaggtggaggtggcaatgagctgagatcacgccattgcactccatcctgggtgatagagccagactccatctcgaaaaaaaaaaaaaaaagacataaataaataaataaccccaaagcccaaatacgatactgaagtatggagctgagtgaca

SEQ ID NO: 44437 - DNA, 1051 bp, Homo sapiens
gctccagcttaccccgccgccgcgtcgcgtgcacggagcgcttcagaggtttggagggggccggaacctcaaaagcaactggatgagcacaacgcggacgccccggagaagcggcgcaagcgggcccaaaatggttgctgatcagacgagtggcatctctcgcccccctaccgcgggaattgggacctccagactgtgcctgggggatcggcaagtggttcccctctggttttttcggcgctgccttcccggtggtatcctcactctctctctttgaaatgacctctgctttcctatctctaactcttcccagatatttgaaagcaagtttttgtacaaagcaacatatgaatgtattcagccattcgatcgttcggcgaacatttctaggtgtctcgtgctgtgccagatattgttctgagtgcgctgaagatgcacctgttagcaagacaaagtcctggctcccacggagcttattcgaagcaataggggcccccaagcaggtgcctgagaagtagggaggggtggacagtgggaaaacaacctaacggtggagacacacgaggggtctttttttacttttagaaacgggggtgggtggtcaccctatgttgcctaggctggtctcgaactcctgggcccaagcgatcctcccgactcagcctcccaaagtgctggtattacaggacaccatgcccggcagaggggtcgtttttgttgtttttttagtgtcgtcaggagactccctccatcagaattactcaggctgattgttttgagtcctgggacccagttggtatccagaatcttggcttgtttgcctaggaacctgcattttcacatccccatctccacacccctggtgattcttatgcatataataatgtgaaaagcattgcattgaagaattgctaaagggtgtcagaaaacggattaacaaaatcaggaagctttaattttcaagattctattaacctcaaaattcaacatatccaaaaattgaatgtctttttctccagtgttttctaggagagtgccaacactagccacc

SEQ ID NO: 44438 - DNA, 1002 bp, Homo sapiens
ttagtaaatagcaaaacccagcccacattagccatctcttccccagcgcccaggggcagggctctctggcctggcttgtgctggttcccagagtccctgctgtcaggtgctgggagtggaggtgccctcgggttcccttgggagtggtgaccacagctcagggcctgggttggatcctggtggctgccctagggatggtgtctgctccatgcctgcccacaggaactgcaggttacagatatgaggggaagggaggagaggagggggctgaggagggaccgggaccagcaggaagggggactgtggggttgggcctccacaccagggcgaccctgcaggaaggaccttgtcgcagttgcggggatgggcgcctctgtcctggccctgcctggaccatcctaactgtctctgtctcttcctcagcacagaccgaggcctccccagctcctggggggagctgcttgcctccccccgtttttggcaatggtagaactcacactggtgaggtaacaggatccggtggttctagacttgccaactatggggcgaggactcagccggcaccctgtgcacagccagcgagggaagggccggccatgctggacctgctgttctccgcgaggaaggaggggactcaggtcccggactgctgggtagtggcagagggcaggtgcagctggaagtgacactctgtgtttccctgcatccccctgaggtcacaggtcctcaagtcagctgggaagccgttctctggccctcaggggtgctgccaagaggagctggggtccagctctgctccaggctgtggccctggagtctgaatcgaggagtgagggaactgggggatgtttggtttcagggctttggcctggctcctctgggtggtgaaccttctcaccctctcccctgaaaggccctgttcagggtgggctctagggccccgagggagggtctcctaaccttccacaggtcactaagagtggttccttcctgggctgctgg

SEQ ID NO: 44439 - DNA, 1549 bp, Homo sapiens
gcagagtcacatcctcatcctagtgtttggcagtttgagaccgctaccctgaacttaagagctttaaatatgagggttgtgtttctgggggggttatttttttggtgtgtgtgtgtgtgtattgtgcttagaaaggttgcagatttcatcttcacctaccaagaggcggccgcctccttggacaagccgctcatggaccattagacttgagaagacgacccacgtggtgactgcaaagccctgggtacttgccttcatgttctggtttggttttccctttttctgctgctcttggcagcagcctggtcatcatctgcttgtgggagtgggaaatgggtattttagacccaacacaggttctaaatttaaaacaaataataattggaacaaataaaggttcttgtacccagagtgattctacatgggaaaaacaaaccagcttttttcagagagtgaccgaataggaagaagggattcagaaatatgatgtagtagaacatgccctgcaggaagaaaatgttttctctcctgcgtatgttaagaggaaatcagtttaaaatgcctgctaatcaaatgtcgactcagctaaccatatgtccaggttgctgcagagtttctttcaaatctgagtgttgcctgctgaactcggaggggagtttggagaaattttagacagcagctctgtgttctttttttgccgcagccaataagataatagcagaattagccaatcctaaaaccttctaaagacgatttttgagcatcccactgggattatttaatttttctttttgacgtgtgtttttagtttagaagtgctgtattccacaaggtttaagtcagtgaggttggaagataccctatcttttttattcaaaaagcacaatcaatcttttgtttgaaaatctatataaagtacaacttgcttttagcatgattattttcctaaataaaaagacaaagaatttacttactttatgttaattacgggcatgaagcaaaaggttttctttaaaaaaaaaaaaaagtgcagtgatgtagggctgtggttagttaaccgtactgagttatccatctagcatctgtggcttgctggaagggtagtattaactatttaacatgtaatggtgtacttcactcttacctagcacgctgtcttctcattgctttgggggagggagggtctctctgctggcactgtctaacttgcttacctgctgactttgcagtttgcttgtgctatgacatttattgtaggtgctatttagggtaggcttaaagtgctgggtggtgatttgagttcaaacaataaaaaattgtattttttcaatattgtataaacaatagtgttctaattaccttaaaaaaaaataatgaccagttaagaattgcttttgatcttgtcaaaaaactgaatagaccccagtttcgggaaggtgtgtgagcagtgccatgactctgccccttacctaatcccacatctctctaatgataagacattggctcgcctctgaccagagccccagcaccagagagcggaagatgcaga

SEQ ID NO: 44440 - DNA, 1028 bp, Homo sapiens
ttttttcttgctgctttgtaataacttatttttaaaatccacatttttgtcttcctagtttatcatttgtcttttacactatggaagtgttttccatgtctgttttctttaagggctgtattgttgatatttaattttattttaactggatttgcctttttttacgtgacacaaggatgctttttttaaaaaagttttaaaacattttaagcatgttatgcttttacttattacattaacgttaactttggaatattttgcaggatgtcagagggtgactggtcagagtaggcatgcatgtgtcatttgaccaagcaagaaataaagccagttttcctatgtggacagtattgaatcattttagtgtgcatgtttctaaggtagtaagttatcgtttagaaaagaattagatcaaattagcctagactgaactatcttatttaaatatctcttgtggatactcagggctcttgagcaaggactttaccaaaattacacctggcctcttgcagtcagttctgtgtctcattggacacgggcttggagtgccaaatatttaatttcaaatctttaaaaatatttattctctatgagattattaaaactttttaaatgtttctgttttgtattaacagtatataatttgcactgctgatggagaaatatgagaccaatctattgtgttttcctttttaatgttacagtgggatttgagagcttcccaaagcctctgtcacctaaaattcctactgagaatcatttttggattttaccgcaaagcagatacatagaacagattttaaacgagtagtcctctcttctaatatgaattaatttggtttctagaattgaatcttagcaccttaaaggggcaagaatctcaggggtaggtaagttttagaggaagggagcacagccatgttacccctctgtgattagagccctggagcataccaaaccttgaggcaagtctgaagaaggtggagtttggggggcagtgaaaacagatgctatggataagatctgaa

SEQ ID NO: 44441 - DNA, 1047 bp, Homo sapiens
gtctcccagcctgaccagcacatccagaaatcgatcattatttttgtcattttaacctgccttcttagtgccttccttgcccttgactttgcagcagagaggagaaagaaactcgtggtctctcccataaatacacgtggtaacagcagtgaagtaattattatatattttgtggcaagtcattcattcagtggtgatggaatggcttatttttaatgcagtgtttttctttggactaaacctaaattcttttttctatctcatttagtgcctgtccattccaaggcagcataaagttagcatagcttctcattttactggtttggtaaaagttttaaaggtttagttcagtttgcttttgggttttcatatgaggtagactatgagaactctttaatttatgatgtgatatataattaaagacaatcccattgtagctggcatgtgggctattactggggatcatgggaaagagaaggcttggaggatcttctttataaaatacacgtaagtatggactgaattccaaacaaaccgcaaaatggaaggaacctcgttttatcgcatccaggtaaaggatagaaaaggtatcttcagttttcccagaagcaacatccacaaggacaactcgtaattttaaatgattaaaagtaattgcagtagatcagtgtcattcatagcaaattagttctgattgatggagaatgctgcatctgtggatttttatgttataaaattaatttaagacttcttttgttaaactcgtttaatcttctgcactactccgttctttcattatccttgtcagttttaagggctggaatatctttgtacaactaaattcagttgacttcttctggatacccaagttgaacagacacatatattagtggagctctggttggaaagaggacaccagtacacactattagtagcctactgcatgtggtttgtgttttttgcctttttttttttttaagagaagttctctctctctcaggctggagtggagtggcacaatcatagctcactgcagcctcaaactcc

SEQ ID NO: 44442 - DNA, 1032 bp, Homo sapiens
attattttatttttttgagacagagtctctgttgccagactggagtgcagtggcacgatctcagctcaccacaacctctgcctcccaggctcaagcagttctcctgcctcagcctcccaagtagctgggattataggtgtgtgcctccatgccctgctcatttttgtatttttagtagagacagggttttgccatgtcaggctagtcttgaactcctgacctcaggtgatccacctgcctcggcctcccaaagtgccgggagtacaggtgtgaactactgtgccaggcccaaaagtaggcttttgattaaccctttaggagttaagagagtaatatactatttagctaatatactgctaatttatatacatgcatttgtacattatgtaaatttgtaattttcagttgcaagtaagcaaatatgcactattgccataaaacagcaaagcagtcaagtttgtttattaaggagctattgatatttcatcgatagccttctagcttctaaatattttaaagtgcgtaactgaagttggaatttctctcaaaatcttattttttgttttgactatatttccttgctctcaagatggtatcattatttttccctatttcccttcacttttctctctctgaaactgtttctgcagttggatcatttctgactttgactatctgactttgtaaatctgcttttaaaaatattttgttggggatgggggtgtggtacttagatttcttatctttctgataaacctgtcttaaaatgtttctatgagtcttaatttttctttgaaaattttttactctattatttggaagtctggaggaataatacattcagggaaaagccaagttatagtgatgattttcctatttaagtaacatttacttggtttttgcctatgtttggcttgtgacatagaaactctaaatgaagcataacactagagaagaaaaatttcctctcctaaggctagactgatttagtctgctaggtggtaatgaacatgcttgccatttaaccttact

SEQ ID NO: 44443 - DNA, 1051 bp, Homo sapiens
cttaactgtatgttaatcatttctgttggtcttgagctagcagttttgctaatatggcagggtggctttttctctgagatctatcacctgttagtagtatgatgctgaaaatagctctaccactcttgttgtatcacattgcacacctagatacagtctactttcacctcccttgactttccagggttttcttgcttatttactcatattggtgtgattttcttatggtagggtgtttctttaacagcaatttttttccataaaataattcatttcttttgcttattttcactatgggtttttttaaaaagcagcattccagtttttgttgaaagttttttatcccacttctttcatcctaaatgttgataaagataataaatacaggcagcttataatagctatttgaacgtattatcaaataaggtattttcctgttaactacacttctgtatagtttttaagcagaatttcaatcaagaagacactatttttctatatctctttagattactttttgatttttttaaacactgtttatacaagtttttatcaaacttccaacagataatgggtactgcctctcataaatcttccaaagggacaatggaaactgggcccagttgaataaagccatattcatttgttttggaacgcagagttctctgcatgtagattgcatttagcattctgtctagtgtatccatctgtagttttgcttttttcagaataaaaccttgacagtaattttgaacctgttactttatttctttttgcatgtattgctttaaaaaggccgaagtctagtattctcttcccctttttaagttttatgaaatcaaggttaaattgatattagtgccacttaatatttgacacctgctatgcctaatgaacttgaagtagtaaagggagcagcaggggtcagccattcatattatgcaagataactggagaacgagcagactatgattagagctttagactagtgggttctaacctctttataagagcaaattcattatttatatgtgcatatgtgttacctttt

SEQ ID NO: 44444 - DNA, 1061 bp, Homo sapiens
ttgaaagataacctagaacttattattttttaagagacagggtgtcactctattgccgaggctggagtacagatgccagcatagctacctgtagccttgaactcctgggctcaagggatcctcccatttcagccttctcagtagcttggataacaggtgtgtaacactgtgctcagctagttttgttttgttttttaaataatagagatggcgtcttgctttgttgcgtaggctagtctcaaactcctgggctcaagcagtcctcctgccttggcttcccaaagtgctgggattacagacgtgagccaccacatgcagccatagttttaaaatttttgtagatatggcgtcttgctgtgttgcccaggctggtctcaaactcctggcctcaagtggttctcccacctgggtctcctaaagtgttgggattacaggcatgagccactatgcctggccgagaatttcagtctttatgtgaaatatatcctacaattacagacactcttaggatgttccttttcttgtctgaattcctatccctcaggagcctggaataaagctatattgagagttttctgtgtcttattgagaattttcacatagtcttattaaccgtcgttgcattctgctggttgatctattttagcacaactgttgaaataaatactgttcatttaatgccacatccttatctgaaaatcagttcaaggataagcacagctgagtcatttaagcttatatgagtacagtttttgaactttgtggattgtgctttaaactagtgtttagattctctgtaggtgcaaggcttctttcctcccttgctctcacacattctgtgcccttggctgcactaggttgcatatgcattattgaggttaatgggaagccaaatgcagagcagggagccacagtgagtagcagctctacgactcaatagcagtccgaccttggacggggttgcagcccgacagtgtattcattttttataatggaaacaatacttgcatgatagggttgttgagaggattaaacgatgtaacatatgtaagacactaaca

SEQ ID NO: 44445 - DNA, 1827 bp, Homo sapiens
ttgttgccaggccggagtgcagtggcacgatctcggctcactgcaacttccacctcccaggttcaagcaattctcctgccagtagctgggactacaggcacctgccaccatgcccagctgtgtttttttttttttttttggagacggaatcttgctgtgtcgcccaggctgaagtgcagtggtgtgatctcggctcactgcaagctccgcctcccaggttcacgccattctcctgcctcagcctccagagtagctgggactacaggcgcccgccaccactcctggctaattttttgtatttttggtagagatggggtttcaccgtgttagccaggatggtcttgatctcttaacctcttgatcccccttcttggcctcccaaagtgctggaattacaggtgtgagccaccgctcccagccgcaaatggaacttttgcaggtggtttggccattagccgtgtacatgcttagagtgtgtttaggctagtggacaggatgttctctgtgtgtactgtgtaaccttgaggctttgcgtctatttctatttccctagaaatgaaatctaaaacaggctgctttccttccccctagctttccaaacaaaagtaaggcttgtagatgtgaactagactgttgcaaagttctggagaggatggctgtggtttgggatttgatttttggtaggcttttttttttttttttaattgttagaacttgagtgtgataaatggcttctttttttttttttaagtgggaagaaaatacaagatcattaaccacttgtgcatattctatttcaaatggcttagaaatttaaagcaaacttgttaaagtttgtagaagctgagttgttgatttctgtggtggataaaagccagtgctgtatctggaaactgttttcctgtttttcttagataccccttgaatcggatctgtttaatggaagaggatttttctgttaagctggttataatgccggttaaactttgtgtttaggatgttaaagtcctggaatgaatataattacctgcctatataaaaaaagctgaagtcatttgacgaaaagttaacaagtgcaggcatgtgagctatttgaaaatttaaaatgcatctgagagagctttctaagattcagagggttttatggattttttctggctttttaataattgaactttatatgaaatgtacattttagctagatggacttacgaggcagatagaggtcaaggaatttttaaattatagattgtctttgcattgcctttggtctgtttctgtattctgaactgatgattgaaagaacgatctgtggtactcaacatttttatggattttgagatacaaagggagctcaaaagcaactgcatgctggggatggtaggagttctcttgaaagacaggcagagttaggagggtctgggccacttagcccgtttgcttttgctttggccacaggtacgggcaggctgttttacaaggagttaaagttctgcttctaaacagatgcctttctgtttcagtgtttcttcctagtgctctgaaaaccatatgtggggaaaatagttcgttctgtttagaggttaagggtgttgcctgcctgaaagtaccagtagtagtatttagtatttatttatttttttgagacagagtctcgctctgtcacccaggctggagtgcagtggcgcaatctcggctcactgcaaactccgcctcccaggttcatgccattctcctgcctcagcctcccaagtagctgggactacaggtgcccgccaccacacccggctaattttttgtatttttagtggacggggttccactgtg

SEQ ID NO: 44446 - DNA, 1032 bp, Homo sapiens
tttttttttttttactttgtttttgtttttgagacaaggtcttgctcagttacccaggcttgagtgcagtgacacaatcatagctcactgcagcctcgacctctcgggctcaagtgatccttctacctcagccacctcagtagctggtactataggcgtatactaccacacctggctaaattttgtatttttttgtagagatggggtttcaccatgttgcccaggctgatttcaaactcccgggctcaagtgatctacctgcctcaacctcccaaagtgctgggatcacaggcaagaaccacagtgcacagccttctttcttttctttcttacatgttaaacatatacatagagaaagggtctacattgtataggctggttgtgagctcctggcctcaagcatccagcccatgctccttagttttcagtgggacaacaaatggtcttcacaggtgttttttattgtcaaatatgaataggtatagctttgtacaggttggtaattttaagaatttggattttggggccgggcacttgagcctgaccaacatggcaaaaccctgtctctattttaataaaaatacaaaaattagctgggtgtggtggcacatgcctgtaatcccagctactcaggaggttgagcatgagaatcatttgaacccaggaggcagaggttgcagtgagtcttgattgtgttgctgcactccatcctgggtgacagagcaagactgtctcaaaaaaaaaaaaaaaagaatttggattttttggacaatgtctttcatgaggatactttcagtctttatctcttactcttgctacattgtatgtagcaagtatggatatagttaaaagaacttcctttagaaagctggagtgcctcctgttaatcaactgtatgtgcgtgcatgtatatataaaggtgatgatatgagagattgctttggacttcttgcagcttttggcattcctgggctgccagtccctttttaataggagcatttgtcttgctttaagacatgaaagtttgaggcc

SEQ ID NO: 44447 - DNA, 1044 bp, Homo sapiens
cttgaactcctgacctcgtgatccacccaccttggcctcccaaagtgctgggattataggcgtgaaccaccgtgcctggccatttgtgaatatcttatgtctttcgggttctgctttgctgggggactgggcttatgtgataaaattacttaccttgagcattaaaggaaaacaaaaagttaaacttttttttttttattcatagtttagcttgtaccctcaacctttaactcagaggacctgatttgggagttcagcggtggttgaaggttggtagaggagaggcagagtgttgggaggaaaggagactgcctggaggaccgtccagggctttcgtccttggctctgtgcggctcagagaccttggggctttcacttccttcttgggttatctgtgtccttatctatcaaataaggagttggtttagatgattttaagtctctccaacttgaatattctgattttatatgtagacattatacatgcaactcttattttctgtgtgtgtgtgtgtgtgtgtgtgtgtgtgtgaatgtaaaaggccttcacaaccatatgtatacctggtattgccttctagggaatacagaattgaagatagagttatgacataaaatctcattttgaatcttattctctttgcagagaaatatgcacagtaaaactagataaattctgcaatttattaccttcttggtatgaatttttactagggcttttttagaagttcaaagtagaaaaccttttaacaccttcatttggaattttaaaatgtggcagtgaaatatttcacattcagaaacctgtgttaatgttaactaggaaaagtctcagtcttacgccattagtaatgatgtgttgttatcctttcatttctagaaatggatccctggaattagatggagtattgtgaaagtataattttaaacaaatgtttttgtagagacagggtctcactatattgcccaggctgatctctaactcccaggctcaagtgatcctattactttggcctcctgaagtgctaggattgcaagtgtgaa

SEQ ID NO: 44448 - DNA, 1050 bp, Homo sapiens
cttggctcaccgcaacctctgcctcctggattcaagtgattctcctgcctcggccccccaagtagctgggattaccggcatgtgccaccacgccagctaattttgtatttttagtagagacggggtttctccatgttgttcaggctggtctcaaactcccgacctcaggtgatccgcctgcctcggcctcccaaagtgctgggattacaggcgtgagccaccgtgcctggcccctaaatgttactcttatcaggcacttaattgactctgggcaattgacagtgcactcattgttggaatattctattcataaagcagttatctttatttcaagcaagaaaactagatttcaatgctagaattcaagtcttttaaaacaaagtgtaaaactcatatttgtgtatcttttttaatatgcagagccttttttctgtttaaccatattgttgattttctcctctttatatatgtatatatatatttagttttaattgacatatttatggcatacagtgatacttctatagatgtattcaatgtgtaatgatcaaattgggcatatctgtcaccttatttatcacttctttgtgttgggaacatccaaaatccactcttctagttatttgaaaagacaaaatatttgtttttatttatttatttatttttgagacggagtctcgctttgtcgcgcaggctggagtgcattggtgcaatctcggctcactgcaacctccacctcccgagttcaagcaattcttctgcctcaggcttctgagtagctgggattacaggtgtgtgccaccacacccggctaatttttgtatttttagtagagacgaggtttcaccatgttggcgaggctggtcttgaactcctgacctcaaatgatccacctgccttggcctcccaaagtgctgggattacaggcatgagccaccgtgcctggccataagttgtgtttgttttttgtttttatttttgtttttttgagacagagacttgctctgtcgccaggctggagttgaagcacttctcctgcctcagcctccc

SEQ ID NO: 44449 - DNA, 2077 bp, Homo sapiens
ggagtgcagtggtgtgatgtcagctcactatgaccctcgcctctcgggttcaagcgattctcctgcctcagcctcctgagtagctgggattcaggcatgcactaccacgcccagcaaatttttgtatttttagtagatacagggtttcaccatgttggtcttgaactcctgacctcgtgatctgcccacctcagcctcccataatggtgggattacagatgtgagccaccatgcccagccttaaatttatttttaaaagttatatatttatctatatatatttctgcttctatgtatacctctatatatacatatgtttatttttacctttcacctctattttgtggtgcatatatatatatacacacacacacacacatatacacacacatatatatacacacacatatatacacatatatatacacacacacacatatatatatatatacacatatatatacacacacacatatatatactttttgtagaaatggggtcttgtcctgtctgtttttgaactcctgacctcaagtgatctggctaccttggcctcccaaagtgctgggattacagggtgagccaccctgactgttttttaaaatttttattttatttttttatatatattttccacttcagaattttctaagcagttgaaattactcctttaaatgagaaaaccttgatgatttttggtgtatgtgtttttatttcagcttttttttttttttttttttttttaaagacggagtcttgctctgtcgcccaggctggagtgcagtggcatgatcttggctcattgcaacctctacctcccaggttcaagcgattctcctgcctcagtctcctgagtagctgggattacaggtgcccacgaccatgcccgactaatttttgtagttttagtagagacagggtttcaccatattggccaggctggtcttgaactcctgacctcaggtgatccacccgccttggcctcccaaagtgctgagattataggtgtgagccaccactcctggcctcagctcatgtttttgttgttcttttttgtttttaaagcaaggtcggtctgtgttgcctaggctggagtgcagtggtgctttctcggctcactgcaacctccacctcccaggctcaagcggtcctcctgcctcagcctcctgagtagctaggagtacagtcgtgtgctataatgcccggataatttttgtaattttagtagagatagggtttcaccatgttgcccagggtggtctcaaactcctgagctcaagtgatctgcccaccttggcctcgcaaagtgctgggattacaggcatgagtgactgtgcctggcttgtcattgctctataatgtacttttcattctaatacatttcacgtttatccttgcagcatttttgctttgagatgttatggcccactttttgtgggttaaaaatctggaccacacaggtcagttaaaggtgctgagatcagagtaagtccttatcacagtggatctggggctaactatggtttcctaagcttttgtcccttatagctttgcctgtgtagtagatgctcagcaaacacctgttaaacggattagaataaattatatactactgggttttcaccaagtccttaggtcatttttagactaaactttggcacctgcaattgaaacgatatggaaatcttgcaggaaagtgttgaatcttcctccaatgatggggaattcaattcttttctgtgtggatgtcatttgcctttttatgtagtgttcattttcccacatgtaacgtgtgtttgttttcttaaatggtcctaaatgctaataccttataggttattcaatgccgttttcagatggttgagattgtttgattcctggtgtttaagataaaaggaaattaaggttgtgcattggggaaagaaacagctgaaacttgctttacttcatttgtaaaatagaataccttaaactcatccaaattatggagctttttagtaccctgttttataagttgcaaagtgtttccagttcctccttacaaatttagaagttctaaaaggggttttccttaata

SEQ ID NO: 44450 - DNA, 1048 bp, Homo sapiens
agtgcattgtagaaacttttgaaaacacagtagtctgttgagaggctgttgttgcattagtgattctcaattgggtatcacattggagaagaattaagcttttgggggcccaggtactatggttattgtaatttcttctctgtacctcaccagatgcttggggaaggtgtctggttgtttataggctggtgctcaagggggtatctgcccatgaccagtagaacccaaatcctcaagagcctggggaagccctacatggcagccatatgcttaagagggaaggaggatcctttttgcctctccctgctttgtaggtatctaggacgttatgtaggcagtgtgaatagttgctgctgatcttctgacctgtccctgcagagaagtcagagagaggagtaggtagcccttgtgaagggagaggcttggctggactttgccattctctggaagactttgccattctctagaagataggcatggttggcgggtctgtcagtggactcaaaaaaggcacctgttctgtagcacttggaggatccatatttaggatatcaattaattgagaatgtaatctttgtctttggttcaatctcctggtttctaacttttaaaccatttttagggaagcattatatgtgaaggtaggagatactccctacatacaaaatcatgttattaatgttgtgaattatgcatttcctttttagtattaggcaactttttttcatatatcaagttatcatgtacacttttcaaggttttttggattataaaatcttagttgaggtaatataaatagaaaactagatacagagtgcgtgtctggtttgtgttacctcagaagcaattgggctgtcacttagcctagcaaaaagtaaatttagttgttttgtccaaagggtgccagtataactttggtaatctggattttgcttttctttctttctttctttctttttttttttgagatggagtctcatgttgtcgcccagtctggagtgcagtggctccatctcggctcactgcaatctccgcctctcaggttcaa

SEQ ID NO: 44451 - DNA, 1005 bp, Homo sapiens
ctgtaatcccagcactttgggaggccaaggcgggcagatcacctgaggtcaggagttcgggacaagcctggccaacatggcaaaaccccgtatgtacttgtactaaaaatataaaaaattagccaggcgtgatggtgcgggcttgtagtcccagctacttgggaggctgagtcacgagaatagcttgaacccatgaggcggaggttgtggtgagcctaaattacaccattgcactccagcctggacgacagagcaagactcttatctcaaaaaaaaaaaatcctcatatgtttgggtacttgctttgtgccagcattgtgctgggagtttagtagtgaaaaattcagtatgggtggtcatggtgcttatgcaattagttaaaacttttttagtcggaaaggacaggctgtgttaggtcattgctgtgtgtagtgcctttttgagtaacttgtatttacttagagtggacttttcaaggaatagaaaggttaaaatgaattttgtgtgctaggatgtatatggggatctgtacacctgtttaaaaaaatttcaaaactaaaatattaaaatatgtagccatttgtctttgacttaactttggtattttgctgttaatcagtagttactctatccctaagttagtagtctttgttactctttaatttgtgttcaaagggtagacagttccctaaatcttttaactagttctagtgtcaattgggaacctgtggtttgcctctttatttccagtggactctgttttagtgagatgatgagatgaaagttggcacagctttatggtcttcaagctaaaagttaaagatttggcaactctcagtgttctgaatttgtcttccctgcctagattttggtgacaaatataacatactggtacttattttggttaggcaggaacctacatgagtaagcattcacagcttcagaacatctgattcctgcagtgcagttctagtaaattacacgcaagcctaaaaattcagcttt

SEQ ID NO: 44452 - DNA, 1178 bp, Homo sapiens
atgagatagacaataaaaaagataaagtactttgggccaggcacgatggctaacacctgtgatctcaacacttggggagtccagcgttggtggattgcttgaacccaggagtttgagaccagcctaggcaatatagtgagaccttgtctctactaaatagaaaaaaagaaaaaaagtgaaccaggtgtggtggcatgtgcctgtagtcccagctgcttaggaggctgaggtgggaggaggattgcttgagcccattcgattgaggctgcagtgagtggtgattgtgccgctatactccagcgtgggtgacagagcaagacactgtctcaaaaaacaaaaagagaagaagaaaaaaagtacattggacagtggttagtgctaaggaggaaaaaagcacaggagggtaatgttattaatgtttagagaggaggggtgaaatttgaggtagggtcgtcaggggagacgtcattgacttgtatgaagacctgaaggtagtgaggaaccagctgtatgaacacatgagaagagcattttaagttcttttggaaactcacttttagaataatcagtgttctctgtgttttatgttaacagaggctagtattactagcttgaaacaagctgccctggttaaagcgcctctcattccgactttgaacacaatcgttcagtatctagaccttactccaaatcaggaatacttgtttgaaaggatcaaaggtaattattgatttgaagagaaaaaaataagagcttttttactatgctggaattttatcagtgaagattaacaaggaaaaacttttaattaaaagtataacatgtcttataaatacgtattaattatagcttaataactttattttgtgtaggaaacttaaatatgagctaaatgggctccagtgactatttcactcatttcctacttttagactcataagaatgggtgccattatgacattctttatagttccggtgtgctgagccttatttctcttaatttttataattcctatttaataagtttcttccttatatttctgtgatattcttattatttggtggaagatgtgctctcctgaggagactgacttgagaatcaggaaatgtaggctccctgacacccccatacaccctctgtgcctctctacttacagagcaattcataacgttagaat

SEQ ID NO: 44453 - DNA, 1018 bp, Homo sapiens
aggtacagtatgaatggtacatatataaggataaacatgactgttactatatggtatttattttcatgagatttttttcttcctccatatttagtgaattgttatgttttgagaagataaaggaataatatgtttagttattgagatcctcccttttcagttctcagttttattttccaaagagcttttctattggagccttttatttacctagaattgtgaggggaaacaaaaatgaggtccttgccctcagaaaacttaaagagttagagagataagacaacatatgcttgaagctatttcaaagtagattatgatttctgtttttctagagaagaaccctctaatcttgggccaacttttccatatacagagtgagtgagttccctatttccaactccacgtcttcctcccaccttctctagtacctgtgtgttctgggttctgttaggcatatggacttccccttccactatacggagctccacttagctctgaaggggctactacttctgttgtttcatccttcaacattcatccatccactctgcatcttctagaactattttgaaatcacttgtgctcattttttatccttttactcttatttaaatagggcatcaaaatagaggggcaaaaaatggtagcctactttattgaaacagaaacctggatggcattttatggataattcctgaacccaatcctagacttactcaattagaatttataagggtggggcctagacctctctctgggacacgttaggtaattttgttacagccaaagagtacagctgtactcttttgtaccatttgtcacagctggcaaattaagatgcatgtagtaaatgttggaaggatgaatgagtcaaatcatctcctgaaactggagtttgttgtagtttctgttataggctagtctaaaaatgctaacatgtttaaaatatgaagtcttagtcagacagagtattagctacttagaagaaatacaaatacatttcctcatctgaagtccc

SEQ ID NO: 44454 - DNA, 1029 bp, Homo sapiens
ccgggttgaagggattctcctgccttagcctcctgagcagctatgattataggggcccaccagcatgcccagctaatttttttatttttagtagagacggggtttcaccatgttggccaggctggtctccaactcttgacctcgagtgatccgcccacctcagcctcccaaagtgctgggattacaggcatgagccacctcgccctacccatttttgttttaaaaaataaaaatagatgtacccagaattcaggtcaaagttaggagagtacaacaaggaggatacagaaaaaatgataggtgtatggtacaacatggatgagtcctgaaaacactatgctaatgaaagaaaccagtcacaaaagaccacatattatatgattctagttacatgaaatgttcagaatgggcaaatctataaagacaggaagattagtggttatctaaagttggggtgggaaggaaggagaaaaggggattgattttagtggaagaacaagaatgttctgaaattgattgtgatggctgtataatcctgtgaatatactaaaacattgagttgtgcactttacatgagtgaattgtgtggtatgtgaatttatatctcaataaagctatttttaaaatgataaaagcaaatgttaatgaactgttatctaagagcttttttctgtgtgcatgggaaatcccataaaatagacaaatctgtcaaatcagcagagcaaataagacatagacttaaggagaaattgaaatggaagatttagaaaaggatacagagaagtgtaaaccaaaatgaatatttttacattttatggtaagagcagagaatagctattaccataatgtttcatgtgtctgtgttgttactgatctttttaagttattctgtctgctgaaaacactcttaatatcatcctttgtttaatgatgataaaacataccatttttaagtgcatagttcagtagcattaaatgcattcaaattgtgcagctgtcaccatcatccgtctctagaacttatcatct

SEQ ID NO: 44455 - DNA, 1067 bp, Homo sapiens
ttcaatctaattatttcttcatttgtaaatattagacaatgattctgcagcttcagaccctgatgctgaaaccactgccaggaccaatgggaaaggaaatccaggtgagcagtcgccgagccctgagcagttcataaacaacgcaggagcaggggactccagccgctcaactcttcagaggtactcgaagctgattcatattttcactgcattttgcctttatattaatctagacgccaatttcagggatcttttttttttcttgccttagaaacagaactggcaggagtaaagtctcacattttaatcccagccttctactttatctttatataaatgctacctcctgaatctttttcactgcattcttactgagttaatgtgagaatatattaataggagagtttaattttcatttctcgttccattcttctccctcctacatataagtttgttatgaggaattagctttacaaatactatcttttgattcagagagtatgatttttcccccttttccgactgctgaagcttataataccctgtccggaagtgacagtgccacacatagtgctctgatactgagtaggtgcaaaggaaaaagcagtacttggtgtttattctaaagctgaatgtggctgttccttctttttattttatttttctgctccttcttctaaggcatgggcctccttattccaaggattacatggactttagtccgtgtagtactttctaactaatattaactgttgattatagggcagtactgattttcagcagatgtccatccctttgactgataaaatagttctggagaaattagttctaccagagaaagaattgctatcatcatcccaccattattattattcttttagctttatattattatagttacttttgcgagaggactctaaaattgcactcaagaagagataggccaacaggacttccactgaggatgcagtttcttatcaaacagatgttcttctcctttggttcaacaaaatatgcactatatagcatagagttatagtgtttattggatttaaatgcagaatttg

SEQ ID NO: 44456 - DNA, 1025 bp, Homo sapiens
  misc_feature (1)..(342): n is a, c, g, or t
nnnnnnnnnnnnnnnnnnnnnnnnnnnnnnnnnnnnnnnnnnnnnnnnnnnnnnnnnnnnnnnnnnnnnnnnnnnnnnnnnnnnnnnnnnnnnnnnnnnnnnnnnnnnnnnnnnnnnnnnnnnnnnnnnnnnnnnnnnnnnnnnnnnnnnnnnnnnnnnnnnnnnnnnnnnnnnnnnnnnnnnnnnnnnnnnnnnnnnnnnnnnnnnnnnnnnnnnnnnnnnnnnnnnnnnnnnnnnnnnnnnnnnnnnnnnnnnnnnnnnnnnnnnnnnnnnnnnnnnnnnnnnnnnnnnnnnnnnnnnnnnnnnnnnnnnnnnnnnnnnnnnnnnnnnnnnnnnnnnnnnagtcaactttaatgttttctcctattccttttctccttgttacctatcttgccctaaagatgtacgctaccttatcttcagcctcccttcttttagctgctgtccatatttcattcagatggactctgtctcctcctgaatggcacttcctagccaaattctctctagtgtctgtctctcatctgtagaaaatcttcacatgacagagtaacttctaagagtaactttaataccgcacttacatgatattcatttgtttctcccctttggtgatttgccctcccttaattatatagagtaaaatttcatctaccatctgtacctggaaacaaagaagtttcacccttgagatgggtttccaacatgatctccagccactcctcttccaatattagtcatccattctacaaactactcaaagatctatcctggtgtctttaagtgctgccctattagggctcatcttaatccatctccttctaatccttctcattaaacttctcacaaaagcttcgcattacttttcaagcacttgttcttcttccattgtatctactgcttttcaaagtctgcaattaagagccaacatttgactgaataaacccacattttttaagggtttacaagatttcccattctgggaaacactttcctcattttacctgtccatgccactccaccta

SEQ ID NO: 44457 - DNA, 1047 bp, Homo sapiens
cttgtcattgtctgtcttttttattatacccaccccagtaggtgtaaagaggttgtgtgaatctagttgtggttttgatttgcattaccctagtgatcagtgatgttgaacatcttttcatgtgtttattgccaatctccatatcttctttggagagatgcctatttaaaatctttgcccatttaaaaaattaggttgtcttttattgttgaattgtattagttctttgtatatgttggatactaaacccttatcagatacataatttataaatgtttcctccaattctttgggtcatctcttcactttcttgatatagtgttctttcaaacacagaagttttacattttgataaagtctaatttttctgtgttttgtttgcttgtgcttttggtattacccctaagaaaccattgcctaattcaaggtcacaaagatttacacctgttttcttcaaagagtttattatagttttacattttacatttgggtctttgatccattttgagatcatttttgtgtatgctgtgggatagagattcaacttaattctttgcatgtggctatccagttgtctcagcaccgtttcatgaaaaacgatttgttctccattgaattgtcttggtgtgcttgtcaaagaattgtgattttaatttctaatttcctaattactaatgagtttgacaacttttttctgtgtttactatccatttggatatcctttctattgaaatatttgtttgagttttacccagtttttaacttggttttctgctttgttcccattgattttctaggagttctttatgtcttctaaatgtgagtccgatgttgattgtatgtgttgcaagtagcttttcccatactctagcttgtctcttccctttcttggtgtcttttgatgaacagagctccgtaagtgtaaggtagtcacatttatcagtcttttactttagaaataatgtgtttggtgtcttgcataagaaacattttcttaccccaaattcacaaatatatcctctgtactattttccataagcattatag

SEQ ID NO: 44458 - DNA, 1031 bp, Homo sapiens
tctttctctttcttttctctttctttcttttctttctctctctctttctttttctttctctttctctttctttctctctctctctctctctctttcttttttttatttattttaaagtcttgctctgctgcccaggctggagtacagtggcacagtctcagctcactacaacctccgcttcctgggttcaagccattcatatgcctcagcctcttgagtagctggaactataggcatcccagcactttgggaggctgaggtgggtggatcatttaagatcagatttcttataagtctcttcaaaactaggcttcctccatcatgctcctcaaaattcttccaagcttccacccagtgcctaattccagtcagttctacaatttgaggtatttgtcgcagtaacacttcacttacaggtaccaaaatctgttagttttttttattgttgccataacaaattaccattaaatgtaatggcttacaacaagatccatttattatctcagatctgtagattagaagtctgacacaggcctcatggggctaaagtgaagatgttggtggagtgctgttgcttactggaggctttgaggaagaatccacttccaatctcatttaagtcgttggccaaattcatttccttgagactgtaggttgtaggtctctgtttccttgctggctttcagctggaggttagtctgtgcctctagaggttgcctgtattccttctcatgctttcaatgagcaactaaaggcctctctttgagtcccttgcatgttgattcatacgtgtcagagccagcaatagtgtgttgagctgcactttgaatctctctgatttgcctttctgccacatttcttctgcctcctctttcagcacatctgctttaaagtgctcatgtgattagattgcacctacctgggtaatttaggtgacaatcttaattatatcagcacagttcctttgccatgttgtaacgtaacatattcatcagttctaggaatgaagacatagacatctttggggagcc

SEQ ID NO: 44459 - DNA, 1129 bp, Homo sapiens
ttctaatgataagtattagttacatcagtgtctactgcacctttataagcagtgtctagcaaacaatcaaaaaatacagaggcagtgacatgtaacccataaacaagagggaaaaaaatagtcagtagaagctgacttacagatgacccacatatagaaattaggaggcagtgactttagaaattactaggcagtgacttttaaacaacttctctaaagtgaacaccaaaggagttttgtaaagtgaacttttgtaacttttgtaaattacatctttccactaaagagtggaaaagatggacaaaatgtgtaaatgggtaaggaattcaatagataaatagaaactagaaaaaaaatcttgaaccaaaaaatacaatatcaaaaataaaaatttatttgaagcacttaatagcagattggacacagtggaaaaaagattagagaacttaaagacaagtcaatagaaattgtccaaactgaagcatagggagaaaaataagaaaagaaaataaaagaatagaacatctgaagcctagggaatatatcaaaaagtctaatacttgtgtaatgagtctcagaaggaaaggaaacagaatggaatagaataaatctttgaagagataatggatatgttagtccattttcatgctgctgataaagacatacccgagactgggcaatttacaaaaggaagaagtttaatggacttacaattccacgtggctggggaagcctcacaatcatggtggaaggcaaggaggaacaagtcacgtcttgaatggatggcagcaggcaaagagagagagcgcttgtgcagggaaactcccatttttaaaaccatcagatctcatgagacttactgtcatgagaacagcatgggaaacacttgcccccatgattcaattacctcccacttggtccctcccataacacatggaaattcaagatgagatttgggtggggacacaggcaaaccatatcaatggatgagaattttccaaaatgaatgaaaggggctgggtgcggtggctcatggctgtaatcctagcactttgggaggctgaggcaggtgaatcgcttgagctcaggagttcaagacaagcctgggcaacatgacaaaaccccatct

SEQ ID NO: 44460 - DNA, 1048 bp, Homo sapiens
tcatgaggtcaggagatcgagaccgtcctggctaacacggtgaaaccctgtctctactaaaaatacaaaaaattagctgggcgtggtggcaggcatctgtagtcccagctactcaggaggctgaggcaggagaattgcttgaacccgggaggcggaggttgtggtgagccgagatcatgccactgcactccagcctgggcgaccgagtgagacttcgtctcgaaaaaaaaaaaaaaaaatcttaatgaggtacagcatacccactagaatggttacaacaaaaaagcttgacaatacccaaataaaaaagcctattccaatatcgaacatttggaacaattgaaactcccatacactgtagataggaatgtagaatgatacaaccaccgtagaaaagttttggcagtttcttataaagttaattatatacctgccctgtgaccagtaataccccttctaggtatttactcaaggaaaatgaatacatatatggccacaaaaaagactgtacaagaatgtcataacagccttatgagggttcttcaaaaagtttgtgggaaatgtgtgttatgaaaaaatatccatggagtttgtattagtccattttcatactgctataaagatactacctgaggccaggcacagtgcctcacacctgtaatcccagcactatgggtggctgaggtggggcggatcactttaggtcaggagtttgagaccagcctggccaacatggggaaaccccatataaaaatacaaaaattagcttgatgtggtggcacacgcctgtagtctcagctactcaggaagctgtgacaggagagtcgcttgaacctgggaggcagagattgcagtgagccaggatctcaccactgcactccagcctgggtgacagagcgagattccatcttaaaaataaataaataaataaatatatatatacacatatatatatatacatatatatatacacatatatatatgcatatatatatatacgtatatatatatacacacacaaacacacactatccgagactgggtaatt

SEQ ID NO: 44461 - DNA, 1053 bp, Homo sapiens
ggagttttagaccagcctggtcaacatagtgaaaccctgtctctactaaaaatacaaaaaattagctgggtgtgctggcaggcacctgtaatcccagctacttgggaggctgaggtgggagaatcacttgaacccaggagggggagattgcagtgagctgagatcgtgccactgcactccagcccaggtaacagtgcaagactccgtgtcaaaaaaaaaaaaatcaggttgtcatcttactgagttataagtttctttatgtattctggatagaagtcctttatcagacagatgttttgtaaatatttcctcccagtctgtggcttgccttttcatttactggactattattttttttttaagtgtagttttacatgcggtaaaattcatcctttttagggtatcattctatgagctttgacaaacacatatagtggtgttatcaccaccacaattgaggtttagaacatttccatctcctcaaaaagttcccccgtgtctctttatcatctgtttctccttgcctccctcagcccctggcaatctatctcctttctgtccttataaatttgccttttccaggaagtcatatgaatgatatcatactgtatgaagccttttttgagtttcttttcagttacttagcataatgcatgtgagattcatccatattattgtttgtatcagtagtttatttttattttgtcatcgtattccattgaatggatgtacctctgtttatctgtttgccagttgaaggatatttggcttgttaccagtttttggtgattataaacaacattgctataaacattcatgttttgatttttggatgaacatacatttttatttcttttggataaatgcctgggagtgggattgctgggccatatgtaggtatggtatgtttaactttgtaagaaactaccaacccatttttctaaaatatttgtaatcattcccgccatcactgtatgagagcagcagtttgctctgcattctggccagcactttgtattgtcgtttttatttttgtttttaattttagctatt

SEQ ID NO: 44462 - DNA, 1028 bp, Homo sapiens
catggctcctcattttccaggttccagctcatgtctcaggaggccgctaagcccactcctctgccccagcctgtgtctgcgcacgtctcttctcccttcctcctggtttcctctggctgatacctgctcacctgaaagtcatctcaggtgccacctcctccagggattcctcgcattagattagcttccttcttccccattcctagctgacttccttcattatgcctcagatcctttttttggaagaaaaagaaagaaatggaagacagactggccagcagggggagagagagggagggagggcatatcagagaattcaatatgctgcgttttaaccagatacttttcttcctctcccacaaggcatcagagtagagactgcctttcatctctctcccccttgtgtaatagcacagtgtctggcagataactgttgcttgctaattattagaaggaagaaagggagggagaataaaagccagcatcaccatgtgatcttcctaagtgcgacagatgtgagaaaagaactaccttaagctccaggggccctagaggaacggcgctgcgtgctagtgcagatggtagcaaacgctctcacctggcttggcaacacttcttcacctcttctttctaccaccacagcgactgtctccctccagcccatcctactgccaaattcatcttctattaagcatagcttcaatcacatcatttctttatcaaaacacttctacagaggagttccaaatgctttagccgggccgtccagggcctccacaggatgaccccagcccatctagttttctaccactctttatgtgtttcctaagtaccattcattattttaggacttggtatttgctgatgaatttacttacttacttgagagtgtggcaaaagcacatcctaaactttcagttaaaaggagtttgattgattgacctgctctgagtttaaggcacgtgctggtcactgtgggagccattaaagaaggtattgttctgtggccgccaggaacagatagccca

SEQ ID NO: 44463 - DNA, 1033 bp, Homo sapiens
gtggagttttttcaaggtcacgagttaagcaatagagtagaatatctttgcagctgcaagaggaggtgcgagcagcttgttcacaaggtatattttgcaggagtttccccttacaagatcttatttgcttgagagtagcgttaaggatttctgtgccaacagttagctggatctctggggttgaatcgttatcaccaatctatagttaaaataagcattaaaaaaaaaaaggagtctactttcaaagttttcccgaagtgccagtctgaagcagctacctttaaaagctgttcttgaataataggttgctatatcctagtctgtaatcttggactaatgtctgaggaaggaaaaaaaaaaaaagaatattctctctttgtccgattaagaagtggaggtagacagcgattcgacatgttgtatgggcgaggctgtgctgagcttgcgtctgggacaatgaccagacagatgaaaggagaagtgagagatatttttagcacatcaggactgctttgaaacattgattttttttccatctcctcccaccccccataattccagcaggaagattcagtggcaggcactttaattcagtgtaaaaacatcttctatattacacactaaaatattcatgaggaaagggagttgctgattttaaggcgtagctttaaaacccacgtctgtcggcttgatggtcagtgtcccgccacacagtctggaagtgtgacgtggccaaggaggacccccagaaggatcctgtgtcttccgtggggactactcctttcctcagaggagcgggttcacaggaaactggagcagaaggatgcctttagccccactcctgttggtcctcagtcccttctcctttgatcaggtggttcaagcacgccttgaagttccggtgttcaaacaacgtgacctctgcaattacgttctaatacttgtcggtgcccaacttaaaccactagcaatgttagttaaaaacatcagggaggccgggcgcgtggctcatgcctgtagtcccagcactttg

SEQ ID NO: 44464 - DNA, 1538 bp, Homo sapiens
tgatcctcccggcaactctgcaaaatagatttctgcagccctgttgtactgaccaggaaacatcagcctgccctgatggcagggatgtggttagcaggtggaaagccaggactcaggctcaggtcttcgaacccagattttatgccctatgtaccgccatgtggatattctcaaggcaactctctgaaatatttccagaatctttcacaaaagtcctgtgtcgtccttgtcctggccaactagactcagagggaggactgatggattttcatctccctcttccccttcgtcttttcttctcagcatcttcctaccctccccaccaccgcgcttctccaccaaaagtctgatgctggcatgtaatggaccctttccaagtttcaaggtgttgacagtaaatcttttgtatttagaccgggccggctgctttccttttcttgtgggtagaactctggaaaagtggaggggggtgggtggggcttcaggtaaagtacgtcagcaaattggataagtcggatcttcgttgtgtgagtgggtaagagatgaactggggggaggggtgtgtgtttgggcagtgagcaagccggcaagagaatgtgagtgggcggccagttggttggcaagtgagaggctgtggagaggttgctgctgggacgggctgtgcaattaaacagttgagcagatcttaatagcagactggggcggtgctctccgcaggcctgcggggagcagggagcaggggaagcaagcgagctggaagcatcttcgggcacagagctagatacgaatttcagaagcacataacctgaggaatagaatgcaaccagaggagggagaaatagagattccaggcagcgtttcctaaacttaaaaagttttgaatacccagttttgccttgttctggggacctctggcaatgttgttcaagggaggaatttttaatttcatagaaaagtgaattttaccaccacaagagaacatgagaccaaggtcataaatccctttgtttggagtgtccgttctgaactccttgtatacttttatttgcaggaagaggctataccagcaagtattatggttttactgggtggggcggcaaggccaggaagagatggagatgctgttaaaggtccttgctccagaacattcagagatcagaggaactcaagaggtcaaagtaggctgatgtcattgttcatccatttattcagcaaaactttcttgaacacctactgtgtgccaggcactggttggcagtgaggtgaagacgatagtgatgaaaacaaaggcatggtctctgtcatcatggaacctaagtaaacacataccaaaaaaaatggcccaagaaaaatcatgccctgaggggaaggcactcagatgaaaaggaccttcttcccagtggtcccctgaggaggtgatttccaaggtctcagctaagggatgagcaggaatgtgtgggtgcagggggtaggggtgagagctctcggcatagagagagcagcacatttcaaaggccctggagtggggaaggaggtgg

SEQ ID NO: 44465 - DNA, 1051 bp, Homo sapiens
gcttttcaaactgctgtgatgacttacacagacaattcattttagataatggtgagttaagcctggcagcctctgagcgttttcccctcatttgttcaaacacctgcagttgggtactgatgcacatgtttaattgcttaaacttaaattataaaatccctaaaaggatgtttttctcctagaaaataagtcaggtctcttgcaaaggctgcctgctttcatgagcttcttgtatttcccgggatgcttatgcgccagcccctgttaggtctgcttttaaacacaggaagttgagcccttcagggaaagtgccgatgtctgaaccatcagcaaaatcactacacccattccctgggaagtctagttcatcagaaacaagtttaattcgggaactgtagtttatccaggttccgtgaaggcaattagcactgggcaaagggctgtttgatcagcctagagagagaccgcctttacgcctaaagctccagtcatttgtctctactcccgccgactcgcagcggccacagaagacatcagaactggatgaaaatggccctgcccctgcgacagagcagggcgcttctggcttgcgccttgttatttgtccctccagtggttcctagctgttgtgacgtcaaggctgccattcagagcagagaaaaaggaaaccatggcctctcttcgcatcagtagcccggacaagctgttgtttctcaggcatccaaagcgctttctgtctggcagagctgtgcattccatgcctgggtgacctggttaaatggaggaaaccaaatgctatccgctgaatgctctccaaaacaagcactccgccctgcgcgtctcaagcacaggcttcactgcctccgaggactgtgaagggaacagcagcactgcctgcatttgctgctggcatattcagcttctggtcagggtcttaaaggagaaaataacatcctcaatggcctcgattaatgcacactcaccaacgtgtttgtgctgcctttggggtcagtgctacaaaatccttttttaaaaaaggattcggaatcac

SEQ ID NO: 44466 - DNA, 1053 bp, Homo sapiens
atagaaaagaaaggttgtgtgtttatctgtggctgggatgatcaagaaatgcttcatggataaagagcctttgagccagacattgaaagaaaggtaatgttggacttgaggtcttggagtatcctcgttgaaggaaacatgagcaaaggcataggtagggatgggaaatgccggggtgcagagtgggcaggaatcgatttgtagttgctgggcaatgatgtgtgtaaaccactaaggagaagatcaggtagcaaaggtccttggaggccagaacccagagggccttgaatggcacgtgactaaatgatttaaacttaagttactggggagcaatggaagaatttgagtggctagagtccccatcctgaagaggccttgcggggatcagcatgtgggtgcctctggactgtgaaatagccagagctgggaagccttttagagctgctgttgtggtccaggagggaggtggggagggcctgggtgaggggaaggccactagatggagaaattgaatttatgagatgggatttaggaactgcctagataataggggttggccgatgggaagcaaaaatgcccccagagctttgaacccaggtgccattcattatttctatgccatctgccaggcattgcatagctattatctcatttaatctcctcctaatcttgtgggttggtattttcatccttatatcagagacgagaaaactaagggtcagagaaaattagcaattggtctaaaattgtacagttgtaacaggatctagaacagggacttcagtacaggcctccctgacccccaagcctgtgttctttctactgtactaggcttggaagacagcgtacgtgagagcaaagacaagctctgtccactctgtgcatattcagtgtaggtgctggtgagattcccgccttcaggtgtccagcaagtggttggagacatggagccgaatctcaaggacattgggaggattgaaggtcaaggcttaagaaccatctgcatcctcatttatttattcagcagctatttgttgtgtcttcgtggaccag

SEQ ID NO: 44467 - DNA, 1045 bp, Homo sapiens
cttacaagaagacctgtactataagaagaagcagcttgttataaattaccccgtctaaggtatttcttcacagcagtgcaagaacagactaatacaacctcatctaacatagttgtggctcacagttctggaggctgtacaggaagcatagtggcttctgcttctggggaggccgcaggaaacttacaattgtggcagaagtcaaagggaaagcaggcatgtcttacatggtcggagcagaagaaagagcagtggggacagaggagtgccacaggctgttaaatgaccagacctcacaagaactcagtcactgttacgagaacggcaccaagggggaaatccacccccatgatccaatcacctcccaccagatccagcctccaacattgtggattacatttcaacatgagatttggatggagacacagatccaaactgtatcattccacccctggcccctcccaaatctcatgtccttctcactttgcaaaacccaatcatgccttcccaacagttcctcaaagtcttgacttttttccagcatgacctcaaaaatccaaagtctcatctgagacaaggcaagtcccttctgctcatgagcctggaaaataacaaacaagttagttattttcaagatacaatggaggtacaggcattgagtaaatacttccattccaaaagggagaaattggccaaaagaaaggggctacaggccccatgcaagtctgaaacccagcagggcagtcattaaatcttaaagctccagaataatctcctttgactctaagtctcacattcaggacacagtgatgcaaggggtaggctcacaaggccttgggcagctctgctcctgtggctttgcaggattcagcccctgtggctgctctcaagggctggtgttgaatgtgtatggcttttccaggtgcagggtgcaagctgccagtggatctaccattctggggtctggaggacagtggccctcttctcactgctccactaggcagtgctccagtggggacactgtgtaggggctccaatcttacat

SEQ ID NO: 44468 - DNA, 1686 bp, Homo sapiens
ctttttattagaacccccaggaggaaatacctgttaccttagggcccagcacacatatttgtacatgtgggtatgtggtttcctgaagcttactttatgcaagctgggatagagttttttaattctatcactttttcttttccctttttctctctttttattgttcatcataaccagcaaagtggatttcttaacctgctagtcagtcggttgtcctttgacaagcttgcagtatttcagtgctatggtagggacgcatggtttcttgcccttctccctgtattcttcagtaacttctacagcatttttttacccctaaaaatgcctcaaacctgccttaactttattctttatgggccgagctctctccttccttttgtaataagcttctgtttctattttctcacctactgttcccttctcaactttctgtctgaacttgaacattcttctcctcctgatcaatacctaagaatgcttttgtttaccgtttcgaataagatcaatccttctgtgctgttagatacctggttatctcttggttggtgccatgggttgtagagagacatctgctggcccaagtgtagtgttgcattgtttttctgtgctgaatcaccttgtcattttttagtaccttaaactttcatagtgtgcaagtgagcttgtatattggaatgtgttgaagtcatctacctaatctcttcaagcatttttagcatttagctcaacatctaattaattgaaatgtagtcatacattataacccagtttaaggagctgcaatctagtaggggaaaaggatttcatggtaaaacctgagtcctcaccttcatgtattttttaatgagactgaaaaatgacagttaaataaaggttcagatccatttaaaacttttggaaatgataattcactcttccaagataaatgagaactgaatttttttatttgtataaatttgaaaggtacaagtgcagttttgttacatggatatattgtgtagtagtgaagcctgagcttttagtgtaaccatcacctgaatagtgtacattgtacccattaaataatttctcatgccttacccgcctcccactgtctcacccttccaagtctccagtgattgttattccacactgttatgtccacgtgcacacatatttagctccacttatcattgagaacatgtagtatttgactactcacttctgaattttttcacttaaaataatgacctctagttccatctatgttgcagtagaagacattatttcattttttatgtctgagtagtagtccattgtatatatcaccacattttcttcatccagtcatcagttgatggacacttaggtggattccataactttgctctagtgaatagtgctgtgataaacatacgagtgcaggtatctttttatataatgatttgattttggggtgatatatacccagtagtgggatggctgtatcaaatggtagcagaacttaatttttaactggtgtaggtttgcagcttggtttcttatgtgagaggtatggttggtgctagctataaagctagtgctggaaaaagacaaaatctgaaatctattgcttctttactttgaaactctagttagattatcacagtgattctgtaccatccttgtcttagcaaaattctcactgatttcagatgcaagtttata

SEQ ID NO: 44469 - DNA, 1130 bp, Homo sapiens
gatcttgtgatgaagtgatgctggggggtgttttctgactggctcctgacatggggctatgccagagctcaatctggttggattctggatcctgttatgccatatccacttttttttttttttttttttttttgagatagagtctcactcttgtcacccaggctggagtgcagtggtgcaatctcagctcactgcaacctccgcctcctgggttcaagtgattctcctgcctcagcctcccaagtagctgggattacaggcgcctaccaccatgcccagtatttgtatttttagtaaagatggggttttgccatgttggccaggctggtctcaaactcctgacctcaggtgatctgcccgcctcggcctcccagagttctgggattacaggcatgagccaccacacccggcttccacttcttagttcagtcccctctccttggttggaacatttaggttgcccctatagttgcatgcttggttcatctggacatgctcagcttacatgatgttcaacctgggggcccatggcaactgaaaaacaactcacaactttgttacagaagagatgaaccagattggtctgacgtggttaaaacagcagctttagctgtgattgaaaactggaactaatttatgtgtctgtcagcagatgaatggataagcaaattgtggtatatctatagaatggaataatactcagtaatgaaaaggaatggactattgatacatacagtgacatgtatgcattgcaaaataataacatgctgtgtgaaagaagccagacaccttttcctacaaaacagaatactgattccatttaggtgaaattctagaaaatgcaagctaatctgtagtgacagtagatcagtgcctgcagatcagaggatggcttgggagaggagggagaaagggattccaaaggaaagagcacaatgaaacgtttgggggtgatgtatatattcattatttgattatgtctaatgatttcatgggtgtatacatatgtcaaaactcattgtatatttaaatatgtgcaatttattgtatatcaagagtaactcagtaaagttataaaaactaaaactatgcccattcaaaaagcaaacagatgttcatagtaccattat

SEQ ID NO: 44470 - DNA, 1049 bp, Homo sapiens
tccacagtttgcagcctgaacaactgagagtggaggtgcctttgctgagataggggggtggattgtggagggaccgattggaggcagcactaggagctcagttttaaacacattacatttgagattcctctttagatatctaagcagaaaggtcatgtaggcagagtctggacttcagtgggaggtcaggattaaaaaggcaaatttgaagtcattagcattgaactgttgttcaaagtcataagaaggattgaggccaccaagggagtgagaagagtggtctggggcctctcctggtcccatggagtcagcagggcagattgaggaacagacaggaaggtgtaaatcgtgatactctagacaccaagggaagcagtagtaacccaccttgtcagatgctgctgatgggtcaggtaagatgccagctgaaaattgatcagaagatttagcagtgaggaggatgttagtgatcttggcgagtggtttcagtgaaatggtagagacaaaagccagagtggagcagattccagggagaattggaggaactggattgaagagtgagtacagacagactctcttttgagtaacttgtgaagtccagaagagtcaaggaaagttttggttttggttttttaagatgagagaaattacatgtttctcccaatgcatgtgttagagagatttcaagttatttttctgaaatggcctactagatttatgacatttaagaccaccacctgtgtgtgttaggggtggaggtgtagtgcttccctcctaagatgatttcatagaattgtgttgtggaagaggcagaggggtgggagggatcgggggagagacagagaaagagagagaatgtagagattggcattgtatgttaaaggtggcttttgcaattgttatgaaatttggctgcttcttgctcagtgtctgcattcacattccgggaattaaaaatgttaaggtaacaaatgttaagactagttctcgtcaactgaaaatgttgaaaaagctgatgtttggggtgtaatttcttttccttacttttg

SEQ ID NO: 44471 - DNA, 1070 bp, Homo sapiens
aatgtacctttgcctaagggccccatgtttgtgtgaatagtagtaatgtttgcctgagggccagcttgtttatgtgggtacatttctactgttaagatttttgtctgaaaagctttgcttgtataggggaggaaaatcgtggtgattctttaaggcctgtaggcgaccttttccagaagtttattgtggatcaaggagagaggggatctccgtaatttgaagtgaataggttctctggaagtttcttgttttgtttttgagacttgagcatttctataatgtgaaggggagagtccggaagaggcagatattttccaagtatttacatgagcaaccacaagagtactttaggttgctggatgcgatacagttgtggtgtggtcacagctggatgtacccagaggtgcggtacagtacagagtagcagaagttctgccattagcattttggagaaaaaaaaaaacaactagtctggagtagagaaactttgccgttacatctcttttctccccttaatttgtttgatttgtctcctggtcagataaactgttggtgggacgtttagatgtgggagtagtccatttcattagtattttctgtacagagattccaaagaaaactcatagtaaacagaggtttctccctgaaaacaaatgatactagctacagtgtatttgtgaccagtatgtattattaagaggtaccgtgtcacaaagaactttatattcctgttgattgctgtcaaatattgttacctctatggcaggcatgggtatattatttagcatactttagggattggttttcatattacttgcagttttgatgaggaaggcttatagacctactcaggcaaacctgactggaacgtgagtatctgtggtctggtgtggaaatagctctctagccccatctccctcctcccattgtccacccccatcctccttaccacgaaacacatttttcaccagcattgccaaaccacttgggattcctgcgcatggctttgcttagtttgctcttctgcttcttggatacctccttcaggaaatgttccctgatttctcctc

SEQ ID NO: 44472 - DNA, 1036 bp, Homo sapiens
gcaggactttgggatgggaattttgctctcctttgcgatctcagggcgtgaagaaggcgtcccctccgctgccggcggagctgatcggctggctagtcaatttccccttagcacgccccgtgcgcccaccctcgctcagcccggggccccctcgccgtcccccggaaggggtctgcggttcctggccaggacgttcggaaggcgagcgggggaaggtagggctgtcgcgggaacccggcttgtgagagcgatttcgccatgtttgtgttgctaagagcactttttcccctttgctgtggcttgatgccacatggctcctccggagctgctgccgggctgagagagtgtttttttttttttttcaatgtccgcattccagctaatgttgcgcagataaaattcaaacttgaggtaaacagaagaagaggaggaggaggaggaggaggggaggggggaggaaggggggactgtttccatttcgagatcccacctcttccctccgcgcagcccaacatcccgaacctagagacaactcttgcctttctcccacgtcccccacctttgctgtcaacaagaaataaaggcggggcgggggggggggttggaggtagggggtggcgtgcttattaattagaaaggacgcggtgtctcggttctccactggaatcagcaactccctggaactcgggcctctggccccgtccctcttttctccggcagggacgcaggatgccttggtgcactctagagacggggaccggagggtgcagcgcgcctgggtggggcgaagggcgccggtctcctcacgccctctgactttaggataccagacagtgtctcttcaaccccaccccaggcgcaggtttccagaaggcggggtgggtggggcccccgatttccagaaggcgagttacctagcaggtgtgtggggtgggcattgctattcggtaagtctgttgcatggggtaggatgacgtggggagcttaaaagctttaaagccagcgcaaaggtagagctgcgtctgctgtttttgtt

SEQ ID NO: 44473 - DNA, 1045 bp, Homo sapiens
gaaagtttcccattttcccagatttctctcttttgttgtcactgtattgctcctcctccacccctgcatttccatgggcacctcattatttaaagccactgctaaaaagccaaaaattagtagccaaaccatccaagagctgtttcctcacagtgaaggcccaggggtttcaagtgtatttgttttaaagtttgaacatagtaacttcagtagactccccagctttagagcattgatgggatctggatttccagtggaaaataagacaagccagaaaaatgtgtacatctacagcccttagtccaggaggagctgatggccagacacacaaaatcgaacctttccagctgccactctgctggtttcactaacctatgcacatccagagctacggaggcctggcaccaatcatagaatcttagggcatgaggcactaagacctggaagcctcttcctttccttcccttcctcttgacttctccagaccttggagagaacattgcaagactgagtcctctggggaaaggtgtacttggcatccctggttgctggggctaaaggtgaacttagcaatgaagttcagctagagactcatgggcagccagggcttgtcttgcctgctctactggttttatcattacttctactgcctgaccacatcatgccctggccatctcaaagcttggaattagtgcccgtgcaaaatgggaataatgatatttaccaacgacatagtattttgaagattaaaagggataatggatggtaagccctcagaaaagtgcctggcacatagtaagtaataaatgtttggcattatatagttggcatagcattaaattattttatggttttgttaataaatgctggagaaatgccaattttcaaggcacttccatgctctccacgccaggccctctgctgaacccacggacaaagattatcttctttaagcctctcaactttccttatttataggtgagaaagttgaggcttccagatgttgcacaaaattatactgttggtgagtgacagagccagaata

SEQ ID NO: 44474 - DNA, 1063 bp, Homo sapiens
ggataaaaactttcagaatgagcaaaacaccatcaacgttaattccagagatggaacattttttttcctagtgagaaaacaacccatttgaagagaagaccactaatgagaagaccactaaagagagacatcaagaatggattcagcagaatcatttcacgttttgaacagcagcagtttgaagggccaaagccttgatcagggatcagtcattaaaggacactcttgagtattagtaaaccctcttatgatgattaaaagagaagggcagccctctccaccttttggtactttctattcaacttgcactgaccataaaatgtttctcttctgaacaagccccatcatttggtgaacctccaccctaacaaagtaggatggggttgggggctaaattaattggagtggggcgaggagagagccagaaaacatagatccgagggcagcagtgctgggtggagagagccagaaaacagatctggaggcagcagtgctggatggaattgtctaggctgtggcatgttggttttgtctttcttttctcctttgattatgtaagagctatttcattataacttattatggtgattatacaggcaagaagacaaaaaggagagaaaatgtacctcttctactggaataatgtttatgattacaagtgagataaggtatttttatcaatatgaaggcaaccttggctgataaaacctctatagtgaatactcacatctttacttcactcactatcaataataaatatattttctgacaaagactggcattgtagctcctcacacattcctttggctgggttagatgtctatgcttacgggaattgagctgatttatattgttaataatttgcatttgtgctgtacctttcctctcaaaggctccagagcatttcgtggagcctccgacaggcaagtgatgcttataacttgcctatcaggtaggtagaattcgggaagatctttacaaattgtgtgaactttcctttctttgggatgacttaagtcatcctgcctggggcaagaactagattagataaccttggttagga

SEQ ID NO: 44475 - DNA, 1045 bp, Homo sapiens
ttggtaggtggaggagagggagaaggaagaatgctgttgactcctgggaaagattggcattttgcaggctattcattcactagaattcgtgtagatgaacacaaaaaggaggcagctgaggcagatagactatttgaaagttaagtaatagtagtgtatgcttgaagtgataacttagcctatggtaaggatatgggaaactgaggaatgttaaaagtgaaaggtattttaaaacaggaactaacaatctcagtgacttcttgaaaataaagaattagccggtgctgtggcttatgccatatcctagtactttgggaggccaagaagggcagatcacttgagcccagaagtttgagaccagcctgggcaacatggtgaaaccccatctcagcaaaaaaaaaaaaaaaatcacaaaaattagccaagtgtggtggtacacgcctgtagtcccagctactcaggaggctgaggtgggaggatcacctgagcccaggaggtcaaagctacagtgaactgtgatcacagcactgcactccagcctgggtgatagagcgagatcctgtctcaagaaaaataataatttaaaaaaaggttttttgttcttgcgatagtttactgagaatgatgatttccagtttcgtggggggaggggggagggatagcattgggagatatacctaatgctagatgacgagttagtgggtgcagcgtaccagcatggcacatgtatacatatgtaactaacctgcacaatgtgcacatgtaccctaaaacttaaagtataataaaaaaaaaaaggaaaataaataacaacaaaagaaccaaaaattgatgtatgatgatgagctaacaatattgctgttgatgaaaagtaggaggaaaatcttgtttggataagaaaacaaataataaattgaccataaccagttgatacttagagtcttagaaggaatctaaaaggatcgtcagatgtagtccctggcttcagatggctaagattactgattgtatattttatagaagaactgaagactaaagaaaccta

SEQ ID NO: 44476 - DNA, 1078 bp, Homo sapiens
agagaagacagggatgccctttgtgtctcttgtctgtttttcaggcagccacatttgtcatagttgaacctacttccattttgatattccagggttttttttcaggcttttgtatgccatttattgaattctggcaagatttggccgttctcggatcttctttatctagggaaatcctttgtgcaaatgtgggaggcaatcctctcaagcaatagaatgaaaaaataccagcagaagcatgcattagttatcactggtagcagaatatggccctggcccaagcaggttgcatctaatagcctcttcttgcctggaagtcttctggttcctggaatggcttggagtgatcaggcaagccgctgccataaaggaggaggcacagcagcagctggggagaatcacatttggcccacaatggcagtaagatggtgcctgggaagccctgctctcggatttggggggagctaaattatgaaggttggatgtgagatggtgtcattaaggactttctggagagatcgtgcaattaactatgaagccaaatgagccagtgggttaatatatggggaaggtactcctaaaatgctcataaaggcaatctagtgactgtcataaaactttcttttaaacagatactttttgaaagggtaaatgctaaatctgaacctcaaatcagctttaaaaacagacatagctaagatcaaggctcaaacattaatagaggccaactcttttactccagaaagtgaagaaagagactgctaagcccagatgattttttttcctggctttgcttcccttttagaggatgtggattgagccagaaaggggcattatctgatctctattattttcagaaactgtggattttgtatggcaaggtgcttattggaagagagccaggcttctcatgaatttcaacttgacaaaatgcccagtctgaactacatgaccataagaaagtgccgaaccaagaaagtccaacccaatgctaaagatagaacactagggaaaagtctagtgcaaggaaaggcaaataaattttgtttcaggcaccaactccaattgatcgtggtgg

SEQ ID NO: 44477 - DNA, 1052 bp, Homo sapiens
aagcttatttttatgaatacaacatttaaaaattaggggccaaggatgatggctgcagtcctatatcagtcccaacagccaaagttatgtgtttggttgagtgttacgatgatcctgatttgtggtgataagtagtggcaaataataacttttttttttaacagcttgccttgcaaccacaagatgctcatccatcaatctgatccaaatgattaaaagcgaaataagtttctgcttcaaagttaaataatcgacattatctaataaatcataatatagaagttgggacaaacagccaaaactttaaatattaaaccacattatgaaaataaccttggatacctcctgggctgatcttttgccatcttttctcatgcacttcagtgttcattcactaaagggagggaaggccttccgcactcacgctttggcccggctcacgctgcccccgcagcacagccacagcacacctcaccttcaccaccttcctcccgataaactcagccttttgttaggacctgtctcatgtgttaattcctctgctttctctgtaaagtctttctagacacctcccttcctactaaaaagccataattaattaattgttccctgtgtgtttatgtcactccagcccttatgacaatgtaagtggcatcagtgttgcctgtgccccatctcccttctcaagtgtgaaccgtttaaggtacaagctgtatctgagccagcttgatgggagcatgcctctctctaacaggtgctcaattagtatcaatatttccatctactaaattgaactcttataaaatgtccatgcttcttaacttagactcctgcagttcagaatggaagactagaggttaggggcaacaaaaaaagcaaaaagaaaaaaaaaagtgcgttttctcgtgtgtgtgcatttaaactacattctggatttaaaagcctgggctaactcactcacaggtgcaaataagagtgtttttactctgaaagggatctaatatagctctgaatttacactagaggaaactgttgtctaaaaactaagaatt

SEQ ID NO: 44478 - DNA, 1027 bp, Homo sapiens
gtttacaagcatttgataaaatgattaaaccctaaggtggaattactactttctgctacagtacaatttgtgtgttaatggatattagtgttattgtaatgtggattaaaataaaattttttaaaaattaaaggtagtttgaggtttatttaaagagccaaagcccttcagccttctgtagtgaactatctctttagaggcagcagagagagaccttccaaggatgggccacaagtctcactattagagattaatgtgagatcttaagaatttagacatattaatagaactggttatagattttttaagttactctacatatattattttaagttaggtgtttatttttctccctaatgatataatgacttttttttaggtggtaaacctttttttgtctctatcccatgagaaccttcgagttggctccccgaatatttctttattctaagacaatagctataaaaacagctaaatttcggatacattagagatcaattttgactagagtgatctgtgaagttttcataaagaagatgactttttagttgagcctttaagaagagtattgagtaggtggacgggaaagatattcagaaggaaaactgtgctctgtagttggtgggtgacaaagcagtgtcttgagtcagaaagactggtgcaagataaaactggaaaggtcagtgggtcattagctgctgggctgtgaagtttggtcttcattgagcaatgagtcatgggaagatgtttgaccagatgagcactctgatttctgggctcctgaaggaaaagtaacctggcagtggatgtgaggtttagttggagacatgaaaaataagaacttgaagaatgagataaggtcagctgtggtggttcacacctgtaatcccagcattttgagaggctgaggcaggaggatcgcttgaggcctgaagttcaaaaccagcctggtcaacatagtgagaccctgtatctacaaaagaacaacttaaaaattagccagttgtaggggcatatactggtggtc

SEQ ID NO: 44479 - DNA, 1031 bp, Homo sapiens
tccagccaagagctatggttttttaagaacttgagtctgggccgggagtggtggctcacgcctgtattcccagcactttgggaggctgaggcgggtggatcacttgaggtcaggagtttgagaccagcccaggcaacatggtgaaaccttgtctctactaaaaatacaaaaattagccaggtgtggcatgcacctgtaatcgcatctatttgggaggccgaggcaggagaatctcttgaacccaggaggtggaggttgcaatgagctgagattgcgtcactgcccaccagcctgggcaacagagtgagactctgtctcaaaaaaaaaaagcttgagtcagattatatcgtttctttgctgaaaaccgtccatgcttttccatagccgttagaataaaatccaaacccattacatgcctgttaaagaagaaaggaagccaataaggcctgaacatggggattgtctgatgtgctggactggatataagatggtgtaagaaagaaagatgattcctgtatctctggcttcagcaaatgtgtgaaagatagaaccagttactgagtctaggaagaccaagaggaataagtttgttcattgaaacaaacaaaaaacaatgtgggattgtgttctctctctctctctctctttctctctctctctatctatctatctataaaaaaaaatctgtttatttttgagatcgagtctcactccatcacccagactggagtgcagtggcacaattttggctcgccacaacctcctgggctcaattgatcttcttgcctcagcctccagagtagctgggactacagatgcgcgccatcacccctggctaattttttgtatttttttgtgtagacatggttttgccatgttacctaggctggtcttgaactcccgggcccaagcaatctgcctcactgacttcccaaaatgctgggattacaggcgtaagccaccgagccgagccctgtgttttaatcaatttaaattttaggtgtttctgatacaattgatttcaataaaac

SEQ ID NO: 44480 - DNA, 1025 bp, Homo sapiens
agaccagccaatgcgtattttcctattttactgactgaaaaattaaagtacatgaatattaaattttttaaaggaaattgcagtgcttctgttagaaagtgctcttcaatcccagttttatgttcagaccatgagacagctgtgcgtctgtaaggattacgtttcaacacattagcttcagttaaaaagatatatttggtcattaaaacatttgcaaataatattagctcataacatcatcaaatagaagtgcccacatctgaatttggcatataaagcaagtttgcacagtaaggttggcatttaatgaagggaacctaaatccaatttgtccgtgtagactaagataggattttaactttggtcattcttatcagaattttggggactagagggagtccttggcattcaccactcattcaaaaacacatttattaatctcctacagtgagccaggctctattcaaagatataatgatgaatacaaatggcacaaaagcccattggtatctggcacggagctttcagttgacacagtggcgcaatgggcccatggaggctgtgtgttttgtgaagaacactacctttttactacctttgtcccttcaagagctaaagatcatgggattttggggggaaagttagtaggttagagagatccatcaggttaaattatcagatgaagaccccaatacattggttgcctcaagtagttctttctgaaaataaacattaaataggtaagttcctttgaggaccggaactcattcccctttaatcactgtgatagtgcctggcacataataaaccttggataaatttttttaaaattaatgtgttcgtccaggaatggggtgggttccatggccaaataattttgaggaatgttaggtttcacaaagctgaacagatttcttttctacaggccttctcagaagttacgtacacttagagcctccaggatgaggatgctgcatgatgtgtttcaccattatacccaaaacatggaattgttctgagatgaa

SEQ ID NO: 44481 - DNA, 1059 bp, Homo sapiens
gatcagggcagattccctgtggtttctatagttaccgagagctacacaaacagagatgaggttctgtagtccacaggtttggatgttgaagttaatagaagcctacaccacttttaattgtaatgtcacaagcaacagaggttttattaaagtggcttggattgtgtacattgagttactctcaattttttttatcatcaacaagtaatgatagtttaagtaaatgcacttagatgttaattgttctgtagaaaaatgaataaggcccagtatcagcatatcttttgttaacataattgacacatttataacttaggtgcaaagatggaaccattttacaatctacctgctttcctaaaggaagtttattattgcagatattccaaaagtagcaagcaagatattttttttccctagtttgtgctctggggaaaaatatcaatacagtatagtaggatatgggggtcttatccttaattcattattcaacaaatcctcaaaatgcgttggcttttctgttaacctctctgaaatttcgaatgggaaatgtggtttaggtaaccttgagctgcttttcaaatctggctttagggatatgagacttactttttttctagggtgagctgttaaaagtgcatccaggtaaaatgatccctttaactggagtcagtttttctatgtctaactttagaggaaagatttgcaaatcatgggatcagcacttaatttggggctctatttaccatgtaggctgtcaagaagtattaaccttaaggtaagatgagaacatggagtacaaagctgtgagttgatggcatacagtacagcggtattaaatagcattatccatcctgcttgctacagtaaataggatttcactattatgatgtgtcagggctttcagtaaaatcaaatttacaagacactaaactgccatcctctctgctgagcagctttattctgggatcttgctttcatattaatcctgttggtaggaaatacttgtaccaattgtgcatggaaattataatttaatgatctcttccttttctttattca

SEQ ID NO: 44482 - DNA, 1010 bp, Homo sapiens
atctgaacataagttaaatggattcaaagtcttatatgtgatagaagctttgattctagttttaccagaagttgtagaaaagaacgagcttttgtacatattttatatattttctcactggggaatgatttcattacattacaaagatttgagccactctcattgcttttgtaccttacgcctttgcaattcaacccaaccaccagatgatagataacacaagcagacccaaccccaatctacaatatgtacagacatttattgaacaaaactttattagaaatccagtacaaaatgattcatatgacccgttttgtaaaactcaatgaagttgcagttttctgttcttttaagtattttctttgcaagaaagtttcacctgagacagatgaggctttttgtatttgatctcaaacaaccaacaatcctcttgtagtagtctgttcttacactgctaataaagacatacctgagactgggtaatttatgaagaaaaagaggtttaatggactcacagttccacatagctggggagacctcacaatcatggcggaaggcaaaggaagagcaatgtcacttcttacatagtggcaggcaaagagagcttgtgcagaggaattcccctttataaaacaatcatatctcatgagacttattcactgtcatgaggacagcacaggaaaaaccttcccccattattcagttacttcccagtgggtcccgtgcatgacacgtgggaattaggggagctacaattcaagatgagatttaggtggggacacagccaaaccatatcacctcttaaacctgtggttttccacagaaggcgattttgcctcctaggcaacatttcgcaatgtctggagacattttgcttgtcacaactcagagtagggggtagtgctgctgggctgtacggattagaggccacgagtactgctaaacattctacagtatgtaagatctgtctccataacaaagaattatctggtccaaattgttgatagtgc

SEQ ID NO: 44483 - DNA, 1036 bp, Homo sapiens
tgtaaacgcaccaatcagcgccctgtcaaaacagaccactcggctctaccaatcagcaggatgtgggtggggccagaaaagagaatataaaagcaggctgccccagccagcagtggcaacccgctcgggtccctttccacactgtggaagctttgttctttggctctctgcaataaatcttgctactgctcactctttgggtccacactgcctttatgagctgtaacactcaccgcgaaggtctgcagcttcactcctgaagccagggagaccacgagcccaccgggaggaacaaacaactccagacacgccgccttaagagctgtaacactcaccgcgaaggtctgcagcttcactcctgagccagcgagaccacgaacccgccagaaggaagaaactccgaacacatctgaacatcagaaggaacaaactccggacacgctgcctttaagaactgtaacactcactgcgagggtccgcggcttcattcttgaagtcagtgagaccaagaacccaccaattccggacacattagcatctgcattccagaagacctgaaccgacatagtatacaggtggatttgaagttatttttagtgtagtgtgcaataatggttgcagaaaatctttaaaaacaaatctttatgttgaatagggctgaaaattgctacaaatgtttgattagtaattttttacattttcttctcttaacttcaagccagcatgagaagaaataaagtcagagcaatgggaagtacactgctgtcaagaggcaggagtcccagaaccaattctctttctgaccttcaagaattcccttagcagacaaagagcttggagcctcgcttacttcctagaaaatgaactgagtgatctctggatgttttcttcagctctgaatgtgaaacagattgcaagaaaagaggttgagtggccaattggtcccaatagtgtgaacattaagtctaaatttaaattgaacaaatacaagttagtacaaagaaaaggaattcagaagttgtgcggtaattgtctc

SEQ ID NO: 44484 - DNA, 1011 bp, Homo sapiens
tgggatggctgggtcaaatggtatttctagttctagatccctgaggaatcgccacactgtcttccacagtggttgaactagtttacagtcccaccaacagtgtaaaagtgttcctatttctccctatcctctccagcacctgttgtttcctgactttttaatgattgccattctaaatgagatggtatctcattgtggtttttgacaagaaatggggaaaggattccctatttaacaaatggtgctgggaaaactggctagccatatgtagaaagctgaaactggatcccttccttacaccttatacaaaaattaattcaagatggattaaagacttaaatgttagacctaaaaccataaaaaccctagaagaaaaaaccctagaagaaaacctaggcaataccattcaggaataggcatgggcaaggacttcatgactaaaacaccaaaagcaatggcaacaaaaaccaaaattgacaaatcggatctaattaaactaaagagcttctgcacagcaaaagaaactgtcatcagagtgaacaggcaacctacagaatgggagaaaatttttgcaatctacttatctgacaaagggctaatatccagaatctacaatgaactcaaacaaatttacaagaaaaaaacaatcaaccccatcaacaagtaggcgaaggatatgaacagacacttctcaaaagaagacatttatgtagccaaacagacacatgaacagatctgatcatcactggccatcagagaagaacaaagctaagtctaaaccagccaggcctgaggactgagtcagacaagaggaccccctgcctccctcctgtggcctttgcctttgcctcagggtggcttctttaatgggcagatgatggcatgtctctcttcagtcacctccatcccggcactgaggtggctgatttccatcctatcttgtgtgcgctgttgctttctattcagatgactcgtgctttgagcgcattctcttctttccattgctccctt

SEQ ID NO: 44485 - DNA, 1040 bp, Homo sapiens
aggagtgagaaaaatcatcctcatctgccctccacatgccacttccagaactttcttatggttcccggcctgtgtttctgccccctaactgggctcagtctgttttaaggtgtttcccagttgtcctgtccctgaccccatgtttccccaaagtccgttcctccttaccatagctcgaaatccttgccgctctcttccagtggatgaccttgagagcttgttgaggtaaataggattgcagagtgtttttttgttgatttggtttttttttttttgagatggagtactgctctgtcacctaggctggagtgcagtggcatgatcttggctgactgcaacctctcctgcctgagcctccctaatagctgggactacaggcgcctgccaccacacccggctaatttttgtatttttggtagagacagggtttcaccatgctggccaggctcgtctcaaactccggacctcaggtaatctgcccgcctcagcctcctgaagtgctgggattacaggcatgggccaccacgcctagcctctttgttgaacttaatattattcttctttattttcgctttctcagtgaagctttcttcctcatcgtttccaagttgttgtgtttcggtaatctgattatctgtcatttcagagtccctgtcctcccactgagccacatgcgcacacacatctctgtcaggcacccctgtcatgtaaggcacgttgggtctgccagagcggcaccccttgttccaactttcaggtttaatgcttgagaacatttgaaggctgttgtctggaaaagataagtgtttttatatttctttgaattttaggagttgtctaccacaacaaataaactagatcacactttttaagttcaatacttattatcctcattctgtggaaaaaatatattttctattaatcatgtacataatagtactaattatgggccactttggctgaacacagttttatgcttaggcttacataattaaggttgtaatgttatttctggatctttgaggcattagtagagatca

SEQ ID NO: 44486 - DNA, 1028 bp, Homo sapiens
cagcgttcacccaggcctcatagaattctttcactttttatcctttatccatgatgtcactctcttcatgttacaagtcttggctggcctgtccccttcctcattctgactaggaagatgggattccctctgaatcaggcctggactccagcctccaactagagtccccagcctactctttagctggggtttagtggactctcttctggaacctggctcggttctgtgcctcgatgagagaaggaggcttgggttgccttatggggcctatttcacaactatataaatcaattttttttgtatgaataaatgaatatgttaggagatccttcagggtaaagatgtctttaggagtaggttgagatacttcacaggtaagatggtcccttttaaaaaattaaaaggaagtcttaaagacgtctgacagatttgttttctgtaaggttagttttttcttgctgaaacctacttatgagtcctaagattgtgttcctccagtgcttatgaaatctgttctgactttctgacagtggaaatggacatctagttccaagaataggcttaaattaaagattgtcaattttaaacagtttaatagatatgtaaggaatggagctattttaacagcgtctttcattttttgaaaaataacacatgctttagaaattcaagctgtttttaaccaatcgcttccatctaacttaacagcagctgttgcacactattataaaaggcctgggcgagatacagtgttgaaaacttggtgagtctgagatttgttacatattttatcaagttacctgctgtccctgcatttacagatatgctagattgtttgatgtctacttttctggatgaggagcagatgtggttgacggctgttaagttaggaatgcatgcagaggttcccgagacttggtgtgtatattcaaagaacagggactttctcatttagcttctttgtgcctaataaacacagctaaggaaggaatcagaagcattagtagtttgtagaacatttatggttt

SEQ ID NO: 44487 - DNA, 1046 bp, Homo sapiens
tctttttcaagaggtatttcatttaattgacattgatattgaagatgtaacttagcatttaggcatctgagtaatcatcatcgaatataatgattagtttacccacattaatgcctaaaattatacggaaggctaaaaagtactgcattttaaaatctagttttaatactttgattagcgctttatgttctagtataagaaaaacaatacagtgaccttaacgagatcagctgttaccagtgagcaaaccactttcatgtttttgttgcttctagttcctgtagaaaagtacttcatcatttatagcaatttttcttttgtagaaagataagtttgggtcaatcttcaacaaacattgtgcaaaatgtcttgataacaatactgtcttatatttgtttgcattgtactggttttccaaataacttttatgtatgttatctcatgtggtccttagaaaaatccaaagttaataattattatttaacatttattgatgaggggaatgcgaatcaaaaagttcagtaactggatggaaatcactgctgcaacatacgtgagtagatcgtgacttgatccctacttgtcactcttgttactccacttctggagtttttccacaagagtgtgctgccctctatgtggtgagtgctgtattagtgcttccggggttacaaagcaacctcaaaacttgaactctcttgggtcttaaattctagttagaagactgatacctgcatatagatagaagcacaaagtgcaaaagggctgagtaattcaggccctggagatgggactgggccataggggtgaatgaggagaaaacctggtacaatttcttagaagagtaagtgtcagagctgcaaggggcatagggatttgaaatgtgtctggcatccatcttgagagaaaagctggatcgaaaaggtatagcgatgggagaacatgggttctactttaggatgttgagtaacttaatgttgcaagaacttagggtgctggggtgagggagggctgataacaggacaggtgtggagggtagagaacag

SEQ ID NO: 44488 - DNA, 1030 bp, Homo sapiens
aaactgttagtttaactgcaagcaatgggggcttcaagcatgctattgatgagatgccagcaaattgagccctttgccactggtgacacttgtgtcaagaataactttagcacgttttatcaagaccagttggagaagcaaatatagtaattatccacatcctttttggatattaggtttaataataatgagtgctgtccagctttccagagtttctaattaataattggttcttaagaacacagcatgtggtttctcacagtttgaataagattgggaaatagggcaagcttaaggtcctgcatacttttatgggcctgatagaaaaggcagtttaaaagaagagcaagttgtaggaagacattcaggtgtgctggtgtgaaaatttaatttgtgcctttattgacctctgctccctgaccttgctgtgtcttaactttgtggcatttccatgagtacactgctcttccttcttgcccttttgcaaccgcaagcttttgatttcaaatggactcttccagaattagatgaatttctcagtttttactttggtagcagctacagtcttttgctcacttgaaaatgatcttatcccctgttctttagtactttatcattgaaataatggaaaataagcatgttagacctgcatttaagaggggacaataatgcctgtcatttatcgggtgcttactcatgccgggcactatactaactccacgtacgttcttaaattgttaaagcatgaggtggttgtattcttgtgcctatgcaatggttagaatgtcccttctaaaactcacatcaaaatttaattgccattgtgagagtgggcctctcagtgcactcgtgaatggattactgctgttatctcaggtgtaggcagttgtccaggcaatggtctcctgatgaaaggataagtttggcccccatcctctctctgttttgtgtgctcacttgctcttctgccttctgccaaaggataatgcagcaagaaactcctcaccaaatgccaagcagatgctggcgc

SEQ ID NO: 44489 - DNA, 1030 bp, Homo sapiens
cacagtgtatcaagggataggccttggttatatagaaaatgcacttaaatggaacaccttatttcccagggatgccagataattgagttatacctaaaatcttgaactgtctgactagcacacatgcatacacatctagcttctgtgtgctgagaggtgttaaatggtttggaaactgtaattaagtagctgaaattgtgctgcagaaccactataagcattgcctcatgtagtatttcaaccttaagtgctaaaatttcatctgagtagctgtgactaatctagtctttatttgtaacacattcaaattaggaggtgtatgttcttgtccatgtactttctcattagcactaatattgctaatgggagtgacaaatgtattatgttttttccttcgatcactcacgccttttagataactagctttttagaggaggtaattttccttgtgatacatttatggagctctgtgtttaacagatttactcaaaagaatatgtccgtagggactgtttattagttgataggctccggggaaaacaagtttggattaatcagtttgaatcacagaagaaattgtgatggcagttagtgtaaatgggaatagcacatactcatttgttcctaaatgtctttccagcattttccgcctagtttatttgaacttggaaggttctttcctaggctgtttactttgacacttgaacacaccctcttcattcttcctttccaaattttcgtttgttcaaaggactccttaatgtttagagagtcactgaacagtgtttggtacagtcataaataacaaagaagatacattctgaaaaatgcatcattgtgtgaatactagagagtgtacttacacaaccctaggtggcatcggctactacacacctaggctaaatagtatagcctgttgctcctaggctacaaacctgtgtagcagattcctgtacttaatacaattataacacaatggtaactctttgtgtatctaaacatatttataaaggtacagtaaaaatatagc

SEQ ID NO: 44490 - DNA, 1057 bp, Homo sapiens
tatgtgttttcttcagacccctcttttggtcttttccattctcatgcttcctacctatcacttgtaaagaagtttgaggtcatttaatcacatctaaaccattttaacttttaatagacaataggaattcattttggtgcttggcaaccccattgatatgtacttgtgtgaatatgtttatacatatatgtacaatattaaagaaatctcatccattcttttatatttatttaccacaaaaataaagttctggaataccatgccttacttgaaaagcattatttctgagtattttcacatttatttaattaattgttttaatgttaggtagtgctggcttaaggggaacctttttgaaagctgaatttttaaaacaatgaaaacccaagaagtcttcatgatttttaatggcaattttaaaaaagcactctcattaatgtcaggaacagattaaaatatgcattctttatatttttcaggaagtactaaccaatgccgttagacaagagaaaaaagtagaagggaaaacatggaaaggaggaagtaaaatttccattatttttagattgtatacctgcaaaatgaagaaagccagctgacaaacttttataagctgagagaattcagttaggtaactgcctataaagtcaataaagaagttctttatgtactcataagtaacgagaacaaagaaagtttagagtaggctttcattttggaataataattttgtaacatattgacagttatattaaaacaaatgcaaatgtttattatacaaaatgtttattatacaaaaatttgcaccagtagatttgaaaacgtaaaacatccataatcctaccactcctgatgactagtgttaatacttgctgtttgattcctgtttttaccatgcatatatacttctggggagtgtatggataggatggaggaggtacaaatttcggctcatattttactactatttatacatttttttttacaacaatgtaattattttattacaacaatattttttacagcaataaaaatgtaatatttctattatagcaat

SEQ ID NO: 44491 - DNA, 1070 bp, Homo sapiens
cgttttaattacagaaaatgtcttcaaaatctgttttgccattttaaagttttggctgtgaaaaagtcaattgtcagtgtgtaatggtggaaaaaatatcttaaaaagccattgatatagtatgttcagtagacatgtgttacttgaacactagtagttgattttccatagaaactttttcctcttgagtttgggtatcgttgttggtaataaacatccctgcagaactgactgcgatttcacatgaattgtttaaaaataaaccaaaattacacattatatattccctctcccaaaggaatctccttgggaagctgttacgttttctactatagctgcccttatcgaagtttcgatcctaccctcccttctccttctccgtccctcactcttccaccattttcttcccctctttcttttctttctgtctatcaagagttgcatgaaaaagcacatctctttgaccagcctccaaggtgataaatcttcatcagctgagaataaatttgatttttggaaacagccagcagtcagagtcaaggtcagtgggtaataaaactatagtaacattttgagttagagatggggagtgactgtaaagtagtgagcccatttttcttgagtttttggaaggcaaagaaggaaatcccaaaacaggaaatctcagtttattgtgtatatttgttaaaaacaaaagaaaacaaaacaaaaaactagtcttgtttgataatgacattgcaagttttgtatattatttatttatttttgtatttgtgactttttccccccaatggttgtgtctttcaactgactgtgggatccttgtcacacttttattttatgttgataatccttttggcattttaaatgatatctgtatgtcatattgaaatacagtaattaaagtggcacaacataggaggaaatcaaatttcatttaatgtttaattacataaattgactacctgatagatttttttttaaatttggagtttaacatttgaaaattggcaggaaggttttaatgcttgttttaaacatagtcatcatctagatctgtactatcaaat

SEQ ID NO: 44492 - DNA, 1028 bp, Homo sapiens
attatttttaaaaatttaagtagagacagagtcttgctatggatcttgaactcctggctcaagtgatccttctgccttggtctcccagggtgttgggattatagatgtgagccaccatgcccagccacatatttcttgttatcatcacagaactatgtagtattttctcttcttttcttttttttttaaatctaaatgttaaaaagaagtctcaatttacttacttaaggcaatatttacttcaaaattcttccattactctttggacagatgttttattgagtgcttactgtatgaaatttactatgttaggtactaatgatctatgaataaaagacaaaatcttgtccttgaggaataaaaggtaaaagatacactaaaaataatgtttaaaaatgctaagtctgttatagagccatgctacttatagtcttgtgaggattcccacttttgggaaagccaggactttgtctttcttttaactaattgctatgtttgcatttatttattcaacacgtaattgagtgcctaatatatgccagtgctgagcaaacagtaagcagtcaatacatatttgttgattgaataaatgactgattgcatctactgaagccctggaaataggaggagaggaaatggggaagaatagaaaagattttctggggaaaggacccctgagctgactcttgaagtatgagtaggatttgctcccaaggttgaggagtgggatgaaacagccttaggtattgcaggcaaaagcttggaaacgtggggatagggggacactactagaagttgctgagtgggaatcattgtggcagttagaacatagtctgttctttaagtgggtgtgtgtgtgcaggggattcacgacttaacccttgcctggcctggccctaggtcctgtttataattggtacctgattgccacaaaaagcctgctttgtcagtcttgtggtctctgttttaacgttaatgctggtcaatggttgtatctaaactgtaaaagagagggtgtataaagagac

SEQ ID NO: 44493 - DNA, 1034 bp, Homo sapiens
ttgtctaatgtcagttgtgttctggcactgcttcttctacatcttctcatcgtctggcgctgtttcgaaggcactcatcaccataatgtcgtccatcttctgttaattcgtctggtgtggtgtctgttagttctggaatttctccaaggtccatcttgaagcccttcatctcccaccttttttggttatattcacaatctctttcatgatttccctggttgactctgttgtaaatcatgtgcaatatctggacacagtttcctccaggaggagtttgttgttttgggcttgatgactttcatggctttttctttaacaacagtggcatcttcatgaggtaatcctttcagacttcatgatgttctctctgtccgggttctcttccatagtgttgacagtccttttcatagattatcatgtctgatgaagaaaggtccttatgatcccctaatctataggctgaaataaaaacattctgtttgggggtaagtcaccactttgatgtgttcaatattgaagtcatggggttctgggtggctagaggcattgtccaatatcagaagaactttaaagggtagtcctttactggcaaggtattttctgatttcagggacaaatcattgatggaacctatctagaaaataggttcttattgtgtagaccttcttgtacaaccaaaagactggcagctcgtgtttatcttttccctatgaggctcaggggttagcagctctatagataaggacaattgtgccataaactcaactgcatttgcacaaaactagtagagatagcctatcccttcctatcttaaatctttgtacttgcttctcttctttactaatgtatgtctttcatgccatttattttctagagtagggcacttttgtctgcattaaaaatctgttcaggcagttatcctttcttctcaatgattttcttaatggcatctgggaactggtttgctgtttcttggtcagcagaagctgcttctcctattatcttgacatttttaagtaaaacctctttctcaa

SEQ ID NO: 44494 - DNA, 1101 bp, Homo sapiens
gcctgggtgacaagagcaaaactccgtctcaaaaaaaaaaaaatctttaagatatctttcaggttcaaaattctaagtgttgactttctaatggaaattattttcatcaggaccctttgaagttttaaaaagggttaatgttagggttaaattgatttataaagatgatgtcatatgtttcttttcaaggtatttttatcctccgtgtatttttatctcagcagctatgtttgtagtaatagaacaggtgggttaggaagtagccagtgaaaggtggcagatcactttgggcaagagcttgagtcagcattgggcctcggcaagtgtaaaacagaagactgtgtaaatttgaacatggcaactgtaaattgcaatgcattgtcatagtaagaaaaaagaagtaaaattggtatttacagccaaatggtgcttttccactgtcacatatgatggacagtgacaaaattatcatctcagctatcacacttttgagtcatgccagatctttaagttttctgtgtctcatacagataaaaataaaggcttgattgtggcatttgttattcttgtttgcttttaaaactagttgtctatcttcttgtcttctcctgggattgaccccaaacccagaaaggttaatttactattggaagcccatttttacagcacacaggcctcaatttattttaagagcatgtttgccaactctgtgctgctttagccctgtaaacatgagtcttaagggaatttttaagaattggcaatagtgggagtttcacattctgctagcagtcttctgcaagtcgtgtttcacattgtctctgaaacatttatctgagacactgccttctgaggttcatcttgattaattatatatatgtatatagatccttaatgctttcaggatttatttttcataaactatccgaattgacctccttggctgcttacattgttttccaccccatttccttcctcataggcatgtatacatactgcaactcctagacattcaaatacatgttttatttttcaataacttgggcatttcatttcaccctggaaaatgtaatcaaactacataacagtgtcattcatttt

SEQ ID NO: 44495 - DNA, 1089 bp, Homo sapiens
tattgataaagaatttattttctgtcacctttaaggagagcagagggtggtacagcctttgtattattttttcttttttaaaaaaagttttgtttgaagcctccttcatgaaaacttcagctgtcaaatcttggcaaaaaatgtgtgttcatctatatgatagttcttaggagaatcaatagctatatttttctttctttttttctaccagagaagaaacttcagaaacagcattaagaaagttttgtgtgcagtcttttagcagcaactttttggagtcacagaacatgtatacgttattgtatgtattgcctgaattgaatcgagatttataggcagttttagaaaatagctcctcttgcctttgtactgttactcatatggtatataccctgcgtgccaagttttctcttttccctccaaatgcacacaaacctgttgaccagttctcaagcacttcatagctggacatacgcatctacgtacgtacattttgaagaaacttgttcgagaaggactttgtaattaatttcgattgtgatatttttctttatagaatatctattatcattgtaaccctttttaaatggaaattttttgtttgttttttgtttttttttgagatggagtctcgctctgtcacccaggctggagtacagtggtgtgatctcagctcactgcaacctccacctctggggttcaagcaattctcctgcctcagcctcccgagtagctgggattacaggcgcccgccaccacacccggctgatttttttgtatttttagtagagacggggtttcaccatattggccaggctggtcttgaacttctgaccttgtgatccacctgccttagcctcccaaagtgctgggattacaggcatgagccaccgtgcctggcatttaaatggaaattttaaagctccatgaaaaatatagtatagtgaatccccatatcccatgacacagttgtaacaattcttgtttcatccacatatctagtcactctacatatgtggtgagtggtgaggaaaagtagtacaattttaaacaggttggtgaattttatggcagggaaatattccaaaa

SEQ ID NO: 44496 - DNA, 1032 bp, Homo sapiens
ctgattgttgccattattaatactactaacaacagctaaaagaatgttcattgaagtgtttttgtaacagtagaaaattggaagcaatccaaaccgaccatcctcgaggactggctgaattaattatggtacatgcctgcaatggaacactagaccatcagttatagccctgtgtgctgattcaaaaagatgttgacgagctatccactgaaaaaaacaccatgaaaggattttaaaaaagcattttttttaaatactactttttgaagttttagagtaggtacttattcataaaaagatgggaaaacattttaatctaagataaagtgcttcccatctgtactatttctggagtttgcacatagcttagagaattatgattacatgatcatgtgaatgtctttttactgtgagcaccaaacacatgcttgccactgagcaggtgcttagtttgtatttgttttgttttgaactgcccaactattttgcttgagagatctagaggtaaggaatctttgaattggattgtagtcctcactggccataggaccttcaccatataatttaacctctttgagccttaagtatttcatctttaaaatgagggttgtgaaaaattattatttaatatttcttttgacaaactaactcccaatttacacaaaatatacagaacagaatatgaattttagattaagactgctattttcttaggaaatagagaaggcttatgacttacaatttaaaaaatcaagatttaattagtactgccagaaaggtctctgtatatttccacagtttcccatgcagtgctttataattatttaattgggttaggttgatagactatataattagatagtgaagtttaaatattccaaaaaaattcagaatcaatttttaaaaaaagagaatcaatatgttatggtagaatttcttgtctttgaaattttgttatttttaattgagttttattttaataggggttttttggttagattctcatatttagtttgcttattatatttcaca

SEQ ID NO: 44497 - DNA, 1032 bp, Homo sapiens
aggtgttttttaaaaactgaaattatgcctcattatgcattgtttaaaaataacttttaaatgattatgaaagtaaaaatgtgttcttggtaaacactgcaacgaagtataaagagagaaaggaaaatgatccatttctcccaaatataaaggtaatcattagtatcattttggcatatgtatttatgtatgtatgtatttattttttctgagacagtctctcgctctgtcgccaggctggagtgcagtggcgtgttctcggctcactgcgacctctgcttcccgggtttgagcaattctcctgcctcagcctccctagtagctgagactacaggtgtgcaccaccacgcctggctaatttttgtacttttagtagaggtgtggtttcaccatgttggccaggccggtctcgaactcctgacctcaggtgatccgcctgcctcagcctccgaaagtgctgggattacaggtgtgagccactgtgctgggctatatgtatgtatttctttgtgatggtgtccttaggcttttttcagtactgtacatatagaaaacaaaatgaagaccaaatagtgtgttcagcctggtatcttttcacttgtgagaaatttttcgtggggtttaaagcatgttttttaatgttagcattgtattatttgaccatttcactgtttttggacatttaatttgcttctagtttttcattgttttatatataaaatgtatattgttctccctcattgtctaaatctttctctttgccacactacacttcatgtttcttaggaggaagatttaatagtcttttaagcttgtcatgaagatgaatttttagaaaatgcttgatcaacatcaattttactttaacctttggtctcgtcatcattcatcatattctattactttagcagcattcaaagataatgaaagagattcagataaattcttgttactctcagatcaaattcatttacaataaatatgtgaatcttgatgatcagaagctaaaatacttattgaacctggacatca

SEQ ID NO: 44498 - DNA, 1145 bp, Homo sapiens
actgggtccaaaactgaagccactgtctgacttttgggattatctgtatctctcctttcttcctttttacctccaatctctgaggattaaagattttttttgtctgcattagctgagatattagtttcataatgtagccaattcatttactatttttaattcagaatgacaaataaactggatttttttcacctgtaatttgatctgtgattgttgaaacacgtaaaacatatttgaacaaaaacattccaacacagtttataaatgtgttatcctctgtggtaaggacaaagtcatgagactcgtttttgctcaaggatataccacatttgcatcttaaatacaactgttaatattctcttcttgttaattcaggcagggtagcttttcctgagtgacagaaatgtagatgattatgtgaaataatgagttgattggttcatatctgggttgtcattttggctttttggattgtcttatgaaaattttctgagggcagtactcttttttgtagagttgggattataaaactgtgaaatgttctcttttacctttgtcttgcctctgaaacattttttgggttaaattctttaaaaaaaaagaagtcccattgactgtgtatgtgctattaactctagcatcgcttccatgatctggtgttgtctaacatttgattcgtccccttttgtacattagcatatcccagcagctcgtggaagcatttgtgaacgaagaaaccgaggctatgagagattaagtgatttactctagaccacaggtaacaatgtctgatgtaagtttgggtcttcactccaaacctgtacattctactggattaaaggttcttaacctgctttgtgccaagttgcactttggcattctggtgaagcctgtggatccattttacttttaaatacaaaaaatatggccgggtgcggtggctcacgcctgtaatcccagaactttgggaggccgagacgggcagatcacgaggtcaggagattgagaccatcctggctaacacggtgaaaccctgtctctactaaaaaacacaaaaaattagccgggtgtggtggcgggcgcctgtagtcccagctactcgggaggctgaggcgggagaatggcatgaacctgggaggctggag

SEQ ID NO: 44499 - DNA, 1120 bp, Homo sapiens
ttcactctatcttctcctgtgtggcttttctcgtgtctgatctcagcttctcacttgaggatcatgacttattttcttcttgaaagagtggtctttctgccatcattcatttcctcaagcctctgaggcctgctctttgaagtctagggactttggtgtctggaagcccaggaaggttgcggtttggtttggcttctgggtaggggttggaaggaaggtccaatgcttgggccagtcctcccagtgtggggacgactgggagatcagggagctagctcagggagctccccgtgtgctcaaacacacagaagcatctgaggagccctaactaataaagagctaagaaaacctctagaatttgctttagctcatatgggcttttacccagtgcttccttttcacctcatcaccgtgtgctacagtcacagggaatgcgtataatgatgtcggattggcttcatttggtagttacgctaaattcttcagatgcaatttgtttttttgttgacatagtggtcatctcatgactttaaacaataagataaaatattgattgctgtgtgtcagttttgagaatggatctgaggaatgaaatgaaaatcagttattaaaatcaggataaatttgatttaaatcaaaaatattaaagcagcatttaaggtcaacagctcccccaaaaacattgttttgttatgcaaccagctaggttacggattctgaatatcatccttataatcatttaaacaaattattttaacaaaatacctctggcagccctcaattcatttcccttcttgaaacttgtactttttggtgtgatggctcaggcctgtaatcccagcactttgggagaccaaggcaggaggatcccttgagcccaggagatcgagcttggaagtgtactatgtttgcatccctgcactccagcctgggtgacagagtgacaccccatctcaaagaaaaaaaaaaaaaagaaacttgtgcttttagcaagaagagatggctttaactgtgcatgcatacttacagtaaaaaataaggccaatcacctgtttctttttccttggtaggaaaaatgaggccagctaagcagcttttgtttaattttgtgggacagcaa

SEQ ID NO: 44500 - DNA, 1046 bp, Homo sapiens
gagggaaggagctaaggcccattaatgcatgaataagtgtgtaggattaggggaggaaagttgaagtttatatagcatacatttccccagagattacaattttgtgcatagtataaaatgaagagtgtagttatttataatgaacaattagcagtgcattagaaaaaataaaggagtagtgctgtggggtgcatctcgaaatcttaaaattattcttccttctggttttatggctgttagatttaacctaatttctttagggcattcgtcatatgtatggatatggatgactaaattacttggatgttattgcactggtttttgatcttgctgttttataattgattttattttgatgttgcttttccagctttcggaaaatgtgattgatcgaatgaaggaatcctctccatctggttcgaagtctcagcggtattctggtgcttatggtgcctcaggtattgctgaattttaattttagggtttttaggagataaattataagtggaaaaagttgactcaatagtcaagttctctagcattctgtctttcgttatttagatgtttagcttttaataaggaatattagaaatcagtattggggtttcttttaaaatgttttgtactaagaatgaaactattttcaaacagtctttgaaaattttgttttctcttcccactcttgaatcctctactaggctttggaaagttacttcatatctttttgtgtaaaatggattgcttatagggatattagagatttaggaataaatatttatttaaaaaatcgaacttagaaaatattgatttgctattttcaaattgtgaagtattccaaatgattttattttctaataaatttcttctaagtttataaaaggtttagtttgtcacagtcagtcttagttattgatggaaatgtggtggtaaataaaatccataaagaattattaagcctaattttatctgtaggtcctgctggataagagacttaatgctgtttcttctcccttttctctctcctgccacactcatctgtttatcca

SEQ ID NO: 44501 - DNA, 1054 bp, Homo sapiens
cagctggctctggcattttcaaatagaaagtcttcttgtcttccaagaagggagtcgtagttttttccttcaaagagcacacacagcatttgatctgtagcctttcccttttccatcttatttccattctggtttgggccctgagatacaagtaacagttgaggtatagactatttagttcactgatgtatcacagggccttgattagtgcctggcctgggagacatttgttgaatgaatgacttaatatataggagcttgcaatctagtggaaaggcagaaaggtgaatgtggaaaggctaattcctgttctttcattgagactgtattggaagtttgagaaaggaacagcaggcacaaggaatggtagctttaggtaggcagggttggaatggagtggacaactgttttggtcagtgaaggcttggatgtttagactgcgtcttgaaaggtgactccctcccaatggtacaggagagagggcaatgtaggcgtgtgtaaaggcaaggagatggacgtagaacaggatatgtaatattaaggaaaaaaactgtagaatttgaggttggagagttaggccatcaccaaatgatgaagtcttgaatgctgtacaaagaatttgaatttttctgtaaacagacagtagctattgaagaatttgaagtagggagttaccattatcacatttgcattttaagcggatggtacaggaattagggcaggagaaatgggatgagagaagagaggaattcattaaatatttagggattgatgaagtcagagctaagaatgagagagaaagaagagttaagaacaagccctatgtttgaatttaggaagctgggtgttggtggtgtcattaatgaggtaaggaaggcaggagaaagaggagatatgcggcaaacgtgagatcaattttggacactttgggtgtgaggtgcttctggtttgccagaaggaaggtgttcattaggcacttcagtgtggagaccgggcttctgagagataggtcttaagctcgagtgaatgcatttattaatggaatttattagtt

SEQ ID NO: 44502 - DNA, 1484 bp, Homo sapiens
actcctacttaactggaagagaaatgtctattaaatgtctctcctctttctctgggtcaagaccatgtaattttatgcttcagagatgaagatactgtttgtttacaaagagtttagtttttaagacatccaaaactctatgctagagcaaaaatcaaatagcaaaggacactagccagaaaatacagtgtgtgtgtgtgcacctgtgtgcctgctgaacaacttgacagtgtaacagataaggtaactgaagatggtggatatttgaattgtattagcttaatgtctacatatctttggccaaaactctattgtcatattagaaacatgttatctttttcatgtttattagtaatttatttttgattctttgttttctttttcgtccaactaaaacaactgtaatgtacttgatacatttatatcaagttctaaagtatttagacaaatccaaatactttgtttttagttttttcctcctttccatcctgttaaccacagtgaaacgctgcagtattttgatttggtcagtgctacggaggaagaccatgaaagctgaattggtctgtgccacccagagtaaacctcttctcttcttctggaaagatggcgtgatgtttttcaaggattctaataaatatcccgcagtcatctcctgagcagctttcctctgtttcacttcagaactccttcccccactttcttcactccagtttcttcacttgcagcgttttctgctaagaaagacttatcatcttgtatctgtttatgcctctcttctttggggcccctggatgtttttgtggatttttacagagtatttatatctgcacagcgtgtattttgttatacattcttacaagcattgatattggggggtacattcataatagtgagaatatctggcagaatgtgtgaatgccatatctgtagatgacgatgaatgtgaagggttaatgtagaaatgtttgtttattctgttacagctcaaaatggaggctgagaatctctaccaccattcccttctctatttgagaatctctaccaccattcccttctctatttgggaaacaatactctcttattttgctatttttaccttcccattaactggcttcactcaacagtgccagatacctatggagaggggaagtaaaacaccttaggtcaggaataataaaccaatgagttagctcagggccggtggacatgttcactggtggaccagttggcattgacctaaacggacagagaaatgcacatggaggagaactacgttgaaatcaagatcctatgtctgttgtattttctctttgcctggagtaaatagcattataagtcattccacccttattagataaccaaagcatattggtctcaatagctttctcctgaaaaatgtgattgaatcttacctgtagcagttcactcttaaggttgaaagaactgtcaatatagataaaatccattccttattattattg

SEQ ID NO: 44503 - DNA, 1026 bp, Homo sapiens
caggatttgaatatcaaatttatattcaccttacccatgcctttattattatttttggcctcagttgtaaacctcttcagcgtgatctttgcagactgaagaggttcattattttttaccgtacctccgctcgtacctgcttcctccccaaccgctctctagcgtggtcctcttggcccttttagtccctttctctgcccattagctagttctgctggccttttatgaggtactgtgaccaggacaatactatgtatttgagtagaaaacctgggatggttcatcttcttaatttcttttaatccttgcctgaggccttttgcttgatcaccaaaaatctgagagggtgctaatgatactagctaatgtgaaatgctactgttattacagcccatagttctataatctgaatatcctcccccttatccaactatgccaacattttaaaacaatgttaagtcattcagagatttaaaaaaaacaagcctcccccagagaatggatgattggattattttctgagcattgaatcctgctgcttgcacctgatagcctgtttttccactcgcacagtgtgtcttaggacacagatttggtccccctaaagacaggaaaagcaacagatcctagtaaggactgggtcagcctttcatctggactcttgagagcagaatgcaacatcacatctggtctatttctgtttttgtctcctgatgaaataatcgattggtcagcaaattgttggagacagactaaacagtactaaggaaaagtgttggttagaaactagtcagtatcctgattcattcatatgcatacttctgtggactctgctggaaagtaatcctgtctgtcatactttagtgatttgtactttcatgcaccatctgactgtaaatatcactgggaaattcatatctgtgctttcctaaggtgtttttcttcttttttttcttttttgcagatacagtatattcaaatatacctccattgccctggtgtctgtggggatatttatttgcactt

SEQ ID NO: 44504 - DNA, 1095 bp, Homo sapiens
gctggttagtttcttcagcttgaagactcttatattttagaacatttgcatccattccaaagcttgaagaagcagtctcccacttgctgctgagaggttttatgtcttcattctttatggcccagatttgagaatgtttattcttcttggggcctttgagaggtgataaactttccaatgacctgtggggcttagactggacccattctgaagagtttgccataacatccccttggattacaaaagggtgatttctgggtgctgtccaagatgtgctgtatttctttatatttctgcaagtagccggatttagtctagaaaagaaatgaaatacgtgaatttttgtccatcatggacctactttgtagtcctaggtatgttgtcatagtataaataatatttttccttttagtaagttcataacttcttaaagtttaagaattttaccatcatttagaagtcttcatctctgatcatgattttttttttagcactattccaatcctgtatttctaaatgcctagaggatatgtttatttggatacctactctaacctcagccttcctaatataatagccactctgggccccagctccttacctatatatctagttaaagtagatggtcactaaaaagtaaagtagttgtttgctctaaaaatctattctgtttattctattagaatggattcagtatatatgctatgagatttttttctataaccagtaaaaaaatcaacgtgagtctaagagagggaagttttcctcgggggagcttttgtaaactaataattgcagccacttaaaatctctgtttttttagcattccattttttaaccatagaatttcagctatactttcaattaaacttttaaattttgagataactgtagacttaactgcatttgagagaagtaatacagagagatcccatgaactcttcacccaatttccccaaaatagcttgcaaaaccatagaacaatatcacaatcaggatattgacattgatgtagtcaagatagagaacactgcccccatgttgccctcttgtagtacctgcttccctcctttcccatcccctccttaattcctg

SEQ ID NO: 44505 - DNA, 1026 bp, Homo sapiens
gcagtgctctgggaactcattactgggtcaagacaagatgtcacctggtgatgaaatcccatcatatactcattactttaaaaactaatacatattttttcctgacaatggtagtatgaattatagaaaacttagacgtttttgtttgtttgtttgtttttgagatggagcctcactctgtcacccaggctggagtgcagtggtgcgatcttggctcactgcaatctctgcctcccggggtcaagcaagtctcctgcctcagcctcccgagtagctgggactacaggcacccgccaccatgcctggctaatttttgtatttttggtagagatgggtttcaccatgttggccaggctggtcttgattgaactcctgacctcaaatgatccacccaccttggcctcccaaagtgctgggattacaggcatgagccaccatgcctggccagaagatattttaaaaataataataaaaaagataaccttttatcccatcatacacataaaaccactgttaatattctaccaatattttcttcctgtactgatgtatttttacataatcatgatgttgaatgtaatgttttttcactagatttagtaaacatttttcaaagctgttaaatattcttcaaaaacatgatcaatggctgtgcaatagttcatgtgggatcatccattacactattactagacaaattgtttccacttttcaccattataagtgaagacgctgtgtgaatcgtgtttggaatctgatttttctcaggtgatctacctataagtgcaatcattggatcaagggtagaaatatcttttagtgatcttgctaaatactgcctaactggcctacagaaaatttgctaatcatagtccctctaattgtatataaaagtgcccactttgttatactcttttaaaaaattcttttcactccgttttaaatcagaagggctttgtccagttggtctctgaaacagtggtctgcacactgtattttacatatgtgtattttccagtatgggat

SEQ ID NO: 44506 - DNA, 1049 bp, Homo sapiens
catcatgagtctatcaatgagctcccacctctccagccagcctagaaagcaaacgagctgcccacagttctctgccctgtctgggaggttgaggccacagtgtatagactggtaagccagacaggcctcctcccgcaagctgctaccttgctttcacctgtaccttggtccccgggcagctagctataaagcaagagggacaggagcccagaagagacactgaggacaagagatcacaccagagtacatgtctctgcctctgttttcagtgtggctttggacaggaatatatgaataaatcactgccatacaggttttccaatacacaagtgctagaaaatacacacaattccccaatgcgtaagttgtgctaatgtctttccaagttctgggttgggaagtggagggtggcagcgtttgtttgtgtgcagccgtccagtcctgttcacagcgaggatttggagtcctccagggtctcatcatgggagtgatttgtcagcggacgcctctgccctgtctggcttcaggtccagggaagctttgaagcagtcaagccttgtctttgtaccccatgtgtcctgtctttgttgagtcactcagagatcactcctggacctctggggttggagttccagtgatggcttatggcggcccactcactatggtgggctgagtggaagctccttaaccatgtccccagagacactgaggtgctcgctcttttaatgtcctcgtttgttgccgtaagttctttgctaggtttcattttggcatttggcaaatcagcctggaagtctggccccatgacagcaatcactccctccccaccctcctgaagctagaggaagatttgctcagatccattaattaaagcaggaattggtgtgacaatgagctgcatggtttagggagtctttgggagccttggaagtcctgaaggacagacaatcttgtactaagaagtcacaggtgccctggctgcccttgctgcccctcggcctctttgacacaggggccccacctcctctgtagtgggttccatcgctgga

SEQ ID NO: 44507 - DNA, 1065 bp, Homo sapiens
tcagcagggcctgtgtggagcaaagtctccaggaaggggctgtcaggagggcaggccctgcactctcccagggtgagctgagcactaccctcgcaggtcagagctctcctctccactctgtaattaccgagaaccccgcaaaatgctgcagcctaggcctagaccccctgcggtgtacaccctggtgtgggggaccctttcctggctgacttgtccccaccctgcttgtgacagtgtgcagagaagaaaccagaagccagtggcccagaggctgagccctgcccagagctccacacggagccagtggagccactgactcgggcatcctcggcaggccctgagggtggaggagtccgccccgagcagccctttattgtgctgggacaggaggagtacggggaacaccactcatccatcatgcactgcaggtgggttgggcctggggccaaggaaaccctgggaagctcagattttcaggcagtacacgtggaggtgtggccagcaggagatggcggagaatgggggcttggacgagggccacagtcatggcagtagagtcatgggagtcggttggagctgccagtggactggtcagcctgtctgcccttttttttttttccttattgagacagagtcttgctctgtcacctaggctggagtgcagtggcacgatcttggctcactgcaaccttgccctcccaggctcaagcgattctcgtgcctcagcctcccaagtagctggaattacagatgcctgccaccacacccatctgatttttatatttgtagtagagacggggtttcaccatgttggccaggctggtcttgaactcctggcttcaagtgatctgcccatctcagcctcccacagtgctgggattacaggcgtaagccaccgcaccgggcctctctgccctttctaattgtgtttctctcagttttaggaacaagttacactttattttagccccccaaactcactcaattttaatttgctttatgatggtacttttaggtaaatacctgatttgtaatttaccatttgtaagtttttacttaagcaca

SEQ ID NO: 44508 - DNA, 1064 bp, Homo sapiens
caaaggagagaagtctctctccatcagtctactgagtgttttctcagtctttttactcaattaccagagacagcagaccctctatctgcccaataactactcttactcacctgtcagcttattccaaactgcctttgatcctaaacgagtatattcttgtttttttttttttccttctctctatttttattttgtttgagacactctcgcccaggctggagggcagtggtgcgacgtcggctcactgcagcctctgcctcccaggttcaagtgagtctcctgcctcagcctcccaaatagctgggattacaggcatatgccaccatgcctggctaatttttgtatttttagtacagacagggtttcacattgttggccaggctggtctcgagctcctgacctcagatgatccacctgccttggcctcccaaagtgctgggattacaggcgtgacccactgcgcccagccttctctctcttttaaatcaaaacaacacatttaaacagaaatcattgtctggattttggagcagattggggaacgactaatgcactgtaaaattttgaatcaataaagatttttgacattgtaaaacttgggcattactcagttcccccaacttctaaggcaattctagctcctataaaaagtcacttaacacttctcaacaatatgactaaaattcagagttttacaaatgtgtttttaaataaatttttttcagtaaaacagttctagttcagtatacagcactagcatatctgaagtaagaatattgctgtttctgatttgtatttgaaaatattttcatctagtcttcttttttgccttccttcttttgaaataagattcaatattgactgagaattggttctgtcaagattgtctctggcaatctgtccctaattcaactataaattattgctaaggatgaacacttaaataactatatattttaaatgatttttaaactacggccccttagtaatgtgatgagcatataaatttttgaattcagggtcttttgaaactctggagtatcatatgtatgtataggtctgga

SEQ ID NO: 44509 - DNA, 1029 bp, Homo sapiens
gttttaaaaaaatattctgccaagttgtttttattccatgatgttaaaaattatttggaaaacataagtcagtaagcattgttgtttcaagatatacctcaaaaaatatttgaaactgtttaggattggatttttttttcatgtttttgttaatttaaactttacttttgagagggcatttttctttaaattttctttgtttctatatgaactgttttaacagtgacttgattgaattttgagtcatgtgtgaaacaagtcacttgtagtcaaataattttcagttataatcaggagaaccgatctcattcatctataattctctgacctagaagtagtcatctcattttcagtcaattggatcattgtactgttaacattttactatttttcaattacttcaaaggtaaacttgaattttcagatgctgtatgttaatttactagttaatatttatagctttcatttttttctagtacataatttatgctttcaaaacatggatttgtaatttttctcttttaaaaatcagttttcacttctgtaaatcaaggtttaattttttcacaaaatactattaatatttaccatttactaggagtatctataagggtccaattggcttggaaaagaatggctttcctggtctttttttttttttttttttttggtagtatgtttataatctaaatctattgtatttgttcttatctctgaaacaatattactcaggatatatttagaatataactactttccaagtacttgataagtttatattttaaaattcatgtcttgtttcacacctggattccaaacattaagcatgtattttatatatgtatcagtattccaaatattgaaatcatttttaaagggactgttaacaaatctagtcacccataactagaccatgactgacttttccacaggggaagaagaggtgaaggtttcgaccatgccactgtcaacctcttcccattcattacaacaaggacagcagcctacaagtctccacactactgtggc

SEQ ID NO: 44510 - DNA, 1052 bp, Homo sapiens
ttatccctgttccctttgggaccgacaatatttcatgttttagacgagtagctaggttaagagaatatagtttgtggctgttgacatagtgaaatttaccgttgatacagtgaagttaatttacataagcctggtagcacgtaatgtagttatttgcacagtgttgggactcttatttgttcatttaattatggtagttagtaggtaaccagagtgacatttttcagtcctcttcttctacatgatacttacttgtgaaacaatgtgttcagttccaaatactccttttatttccttccattcaagatagcatattagaatgtaattttctttgattttactttgctttaatcattgagaaatgtggcattttaattactagtagtgtatctcataattgattataacattcattaaaagttaaagttaagttctcccaaatcatcaaaacatttaaagattagaccaattacagtgaatatgagggtttctatttgcccatcaatgaattaggacatgtgggacatattaaagaagtttaagatatggataaaatttccacatacttaaagtatagttgaagagactaaaataatgtgtgaaagtggtaactatatgtctgatactggaatctgagagacatcaatgtaccctgtaattcttggggaggcttcattgaataagtaggaattgatccctactatcatatcttagatttgggttagcagcaggggaagagaaaaggccttttatgttgatggaaacctcctgagtaaaggcatagaggcaggaattagtatgtcattacactgagaagtaatacagctacctcctataacaggaggtgcttcttaaattgtatagatataatggatgagaagatgagaaactctgacaatgaggcaaaatggcatggacttggtatgataggaagtaggatgcctttatgggattctagttattagctgtcttctttttgtgcttttatttgacttattacatgacgatctttgattttcttccaatttcatagtcatcatattatcccttaa

SEQ ID NO: 44511 - DNA, 1043 bp, Homo sapiens
tgtttacctttctgtccttaccttccattattattccagctatcccatttgttagctaaactaaatacttagctctgccaacactgtctccgacattttgacccttgacacaggaggtattcctacctttaatgctgttctttcccctttccccctttcttctcctgctgagtaaatctttttaaggacctacttaaatttgaactcccctaggaaactttccctaattgccccacttgtagtagctttgctttcttcttaagatttatggcattgtttttgtttgtttgtttaaacaattcatttgatagcaagcactggctgatgtttgtttgtacttaccttatttgtgcacttatcttctttcccccaaatacttctaaacttagtgggctcaggtctatatctttaaactgtttgcattacccatattacttaatattcattgatttattgctattttatgaataataagtaaaaatgctcttcaagtaaatttcaaatctgtttgcttataatcaagaacatctggcaatgtctgcagaagatgcacctgggattcagattgggtactaacccttgttagatattttttttagagcaattaaatatggtatcagtaagttatctgtttgaaaggggactttgtgtatattttcagggaataaaataattttaagaaatttggaatcttaatttttttcctataacacagtatcagaacaatacatttgagtaacgatagtcatgtaccacatatcaatgttttgttttggtcaacaatggctggaccacatatacaatggtggttctatataattagaaataacttttttactgtaccttttctatttttagatatatttagatacacaaatgcttacccttatgttacattgcctacagtattcaaaacagtaacatgctgtacaggtttgcagcgtaggagcactaggcactatatagcctcagtgtgtagtaaaccatgccatctaggtttatgtgagtgcacactttaatgtttccacaatgacaaaatcacc

SEQ ID NO: 44512 - DNA, 1072 bp, Homo sapiens
cttatagattgaggctctaagcttaaaatgtgattttctcttattttcaattaagccagagtacaaatcttaagattaccatagctattaatcctcactgaaccctgacatggtccccgatgcacatatatgttagtaagtgaatttttctataatatattttactcttatttcacctagtgagcagaaaattctaaaaaaggaatttgtcatctgctccccttcattattatgaattcgagagtatatcagtcttaatgagttttgaactatatatgtgctatgaataagttgctttgaaatgatgaatacaagtaatgagagtgggaagtgatgaagccttgcagtaatgatgcttaaggactggctattttattatttttaagtttggggctttgaaatatcttcatttagattgagatgctatttaagtaccaactgtgaaaggaatagtaactaggtaggctgctgtgcccaagacagtgagcaggcctagttacaagaattgtggggtatgcagatcactcggtgtaaatggttatgacttgatattgtggctgaaacaagccatcattgaggaaatggagatgttcggctttagatttaggtggagcgagggtggaataaaagttttgagtcttctgtgttcatttaatatcctcagtaggcctgtgtggtatatattgttttcttactacgggtaaaaaaacttaagtctcagagagtttaaacagtttaccagtatcccacacaaataagcagtagataagattctgaccaaagtctctgtgactttaaagcccaagctcatccctcattctcccactcttcagtctagaagaggtaaaattcttaagagcagctcttaggaaaaactttttaaaacataaatcaaatttgcttaaatgaaactgtgccataactatatgtagtttgatcttgaaaatatctggtgcttgaggcttgttatctgaagacagatgtagtggatggattgtaaattccaaggaattgatgttatttttagcaaactttccctgagccacagattggtggcagtaatggattagct

SEQ ID NO: 44513 - DNA, 1036 bp, Homo sapiens
catcccaaagctgtgcacgttaagtgaattgacatgtccaaattgtcccattgtgagtgagtgtgagtgtttatgtgtgtgaggggaccctgccaaggttggttcctgccttgccctctgatttgctaggatgagctctggccacctgcaaccctgaaccccagtaagtaggttggaagatgaatgcatgaataaatacaaattattgtaaaatgtaaatttgtaaagtgttagtgtattttcttatacactaattccttgcattgtgtattttcttagtcttttttcttcttgcgaatgcctataaaccattatacacagagtaccttggtttgttacatttgaaaacctaatacatattattatgaataatttccccatgtcactaaaacataattttttatggctatgtagtatttcactatatgttcatattttaaatttattaagccaaccttctgctattgtatgttatgttgactttgttgatattattgataacactgtgatatgaacatctttacatataaatgttatatggttgtaacatataaatggttatagctttgattgttcctacaagtagaactgctgagtcagaatatgagagtacctatttccttgaattgggtatttttttttgccttctgcatacttgccaatttgataaacaaaaaaagctgtctcattttaacttgtatttgattaacagagtgaactttttatgcactgtgagtttatgtttcccatgttttatttgtgtgtttaaaagttttatatgagttacagagatctgaacttccccaatcagttgatcaattatttgtgtttcaaaatacattgaatttgtaaatcagtattggaagaatttatattctgtgacactgaggccgggcctggtggcacatgcctgtaatcccagaacttcatgaggctgagacaggcggatcacttcaggccaggagttcgagagcagcctgggcaacaaagcaagacccctgcctctacaaaaaacaaaaacaaacattgactcctc

SEQ ID NO: 44514 - DNA, 1023 bp, Homo sapiens
ccagtagactctcccagtcactttaacagtctctcccaataaaagtttccacaaatttccagactgccccttgagtgcttccctcattgagaactactgccttaaacctatgatgctgatgcaggacaacctgtgaccggcctgactgaaccctttggagcaggtatcttagctatgacgctggttgctgagttggtatgcatccagctggaatattgaatgcagttccaaactccactagccagaaagctttttcaaactctgctcttctctctttatcaaccctgagactttgctacggatgacttaagggtcattgtgttagccactgttactatcatatccctcaggggttttgggtggaaaagagattgaaactcagtgtaattacctcaccttctaatccattagaattggctacagcaaacataacagttaccttatacttacaagcacctaaaataaaatataagattaattactttctattaattaggtagaagactaagaattaatgatacacccgccgtagatttattcatgaagctttgattctatcaaatgcagaacataatagctaaattataagtctgtaagaatattatcaaatatgaatgggaagaaatactttacacacacttgaatagttacatgcagaaagctttcatttgcagagagcttgctatttggagagattgtaggaacagtaggtctaaagatacattctaggaaaacagaattttgaggtagttgcaaattatgtgagatgtctttttatcaagttacataccggtcaaattagccaaggttaagtttgtaagagaagctgaaagaatgcatatagtgttcacaaagtaaaggagatgaggtacgtaggtaccaccaagaagtaaccaggtaataaagaaagaaacgtgtaaatttgtttccgaaatgttacgtaccaggaaaagtaggggaaaaagcctcatgagacagatgagaaatggtaaaactgattgacataggaaactgtatgcacaa

SEQ ID NO: 44515 - DNA, 1024 bp, Homo sapiens
aatctagagtgttcaagttaatatggaaagtttaaattcattgtttttcccttgcctgggcagcctatttcttatcaaccgcttgccatttgctaatactttgaggcccactattgttacaaatccgtgtaattctttttgtttaatgctaagatagttcagtttttcagtaagcatttattgagtacctgcaatatgccaggcattatttaagacactgagcatatactgataaacaagtagtagtagataaataagtagtaccttcctttttacgaaagtaacaatatgagaagtgttgtgtgctgtaaaggcacaagggatagcattccaccttgggagggaggtacgtacccctctgctgtctttggggtaaagtgcttctggcacagcaactatacaaatgcttctggatgagaaagacctcaatctgcaagtgatttgtttggctggaagattagattgcagtggtgagaaagaaggtgccaaggtaagtggtaatggatcatgaagggctttctaaccacgctaaggagtttgcactttatcctaaaggcagtggaaaacttttgaatgttcttaagaacagagtgacacggttagatttgtgctttgacagtaccattctggctgcagtgtgaacatgtcatcataattacataccaatctcatgttgttataaaggtgttacacccaaacgttggccagaaaacatttccataaaccagtggccttcaaccttatccgactcagtgtccactttttaaaaacgaatgtaacaccccttgactttcatgaaatgacttcttgataatataatttgtctacacacataatttgaaaaagtatatataaacaaggaataaaaggaaagtaattataaaaagactatttgtacatataaatgcttgtacattcctactctagaaccttgctattcaaggtgtggcctctgggcccataacattaatatcactggagagcttattaggcaaactcttcagccctgcctcagatctgctgg

SEQ ID NO: 44516 - DNA, 1048 bp, Homo sapiens
ttgagcccggagttcaagaccagcctttgcaacacagggagaccccatctatatagatatttaaaaaattagctgggtgtggtggtgcacacctgtggttccagctactcaggtggctgaggtgggaggatttgctttataaagcccagcattttgaggctgcagtgagctatgatcccaccactcactgcactgtagcctgggtgagagagtgagactgtgtctcaaaaacaagaaaccaaaagtgaaaacataaaatatttgtcctcttgttactggcttatttcacttaaagcatagtgttttcagggttcattcatgttgtagcatgtatcagaatttgattccttttgtgactgaatatagtctttttttattattatacaacattttatttaaaaaaattattttcatagaatacattttcacattagagattcccattgtgcgaaaataacaatttattacttatagttttatatttgtggacagattgttttagaacaagtagaacacatttgagaaataaatctaagtttacaattggtaatattttgatacgtctacaaggggaaacttgcccttaaatggaacttctctatattcagaagcactccaagcatttctccctaggatttagaaatttataatgtgagatatcagcacttcctaattttaaaatttccctggtatatgtaaccatcagtaggtggtatctactgactagagagggaagttttcgaaaattaatcactgtctaattttctacaaagtttttattcatgaattaagagtatttccctttgtccattattcccagggcaaatatggaagtttgatcatatactaatagtaataaagctggattctctttaagagattgataaattaaaaggcaaaagctcatatatcatgtttagctatactgtgagtcttataagaagctgggaggcaaccccattaactcaccagaatacagaactcagtctcacaatttcttagatatagttcctctcaaaccttttcctcaaagattaaattctgaaaa

SEQ ID NO: 44517 - DNA, 1040 bp, Homo sapiens
ctaggcataggaacactgctcaaggtgccaatatattggctagcggagtgccaagatttacgtgtataacgtaagacacttatggaataatacaagtcattgtatatacaggagctgtagagttcagagaacggaagagtgtatgggtcaatagtttactttttattatctccgaccagctgataaaagacaataattaaatacatacatatatacataaaatagataatttactttcaaggctgctattctgcctataattttatgtcttgataatcttgcttcccaaaacataattttatcagatttctttaaacttagtctttaacttgattcttttatgcatacttattaccattttagttaggaagatgctacttttaggcatgtgtcacaactcataataattgcaaaatattctacagtttaatggtttttttgaggaccctcagattttataagtttataataaagtgtcttaagtttcttaaaagtatcaactgttttcgtttgtttgagtggtctctgaatgaattggcatgcttagagactttttttttttaatcagaatctcttatctctgtttccatactgtctcccagtcttctcactgaaggtttactatgtaatttagcataactgttctgagtataccagagtttagagttgcaaggtatgttctaaaagactaccttttctccctcaacccactgttgggtgcttccctccaagtcttcaccaccagccgaatagtggaatgaaattacatatagtaggcttaactgtaagggttctgcagacatggaattaagtcgagattttgttcatggcttaaaaatctgttttaagtttgaggtcaattatatacaatgaaatacataatcttaaataagtgttagatgagttttgacaaatgcatgcacctgtgtaacccacatctttatcaagatatagaacatttccatcactccagaagcttctctcatactccttcctactcaatacctgtctcccagattcaacctttgttctgattctgt

SEQ ID NO: 44518 - DNA, 1024 bp, Homo sapiens
ctttatgagtgtcatagtgggttgctgtgggtgaggagaggagaaaacgactccctgtttgaaaaatcttttccaaactgttcgaaaatttgagattaaattgaattaatctcaaattattaatagtttatgttttttttttaattcatacagtgcttgggaagaaattggttttctgtgagtggccttgggggtgctttgggtgctttccttacccaggaaaagggaggagaggcagaaaataaagtggggaatagtagctgctgtggatttttgcctatggcattgatggcattgtttttttggctgcctttatctacataccttttcttttctagttaggctgtcattactagttggagaggctacatacagtctagccttttccaaatcaaactagcatccctgtcctggtttgtttgttttaatctctccgtctcaaaacctgacaaatttatgtcttttctctgcctgaagagcaggggaaactggaaagagaagaaaatgataatgttgtagttaggcactccctatcttttaatatgtcaggattgttttatgaaaaaaacctctgcctttggattttaattttatgtaatcagttataaaataattgaattctctatgagtccttagaaaccctttaaaagatcctttagccgtaaagttggtgataggttgaagagtacctatatgagttaaatgctttggggattttttttgcttctcctaaatttttttctgtcatacaggacctagtcctacatgtgaattttgcttccaaaaagtaaagctggcagtcttttaatcccagcactttgggaggccgaggcaggtggatcacgaagtcaggagttcgagaccagcctggccaacatggtgaaaccctgtctctactaaaaatagaaaaattagccgggcatggtggcatgtgcctgtaatcccagctactcaggaggctgaggcaggagaatcacttgaacctaggaggcggaggttgcagtgagccaagaccatgccattg

SEQ ID NO: 44519 - DNA, 1035 bp, Homo sapiens
tttctagctaccaactccctttaaggatgaataaaggtaggtccgcaggctgaggaagtatacagggagattgtgaaatgaaaacttatcctttcatttacttcgatatctttgttttgcacaggtaatattaaaaaacaggtctggttaaacatcagccgtatatgttttggttggaattttttttttaagttctgtgaactttgaagtttttttaaaattctttgttttggtttgtagaccctgcattaagccaactttctggatctgttgtgtatttctggatagcatactttgttttgtgaaggaaaattttacattttattttaaagctgggggaaaaaagtaggtttcttgtttctcgctttgtaaatgaggtagatgaataatactgtattgccacttattatcttcatgcttccttcaatgtctcaggtattcctctactgtatgtagcatgtggatctcaaagtttcccacagttgagtctgaaaacatctcaactgtgcttataattttaaaattaaacttaattttaccattttctttattgttattataaaatataggacctatcataatgccatgaaccttttagtgacttgggaaatagtgattaagatgatgcaacatagtacattattgggaaataatctgtttttcgttggcatcgcctctatccttagacctctttcattctagtaatatgacagaaatatttttgacattttaaaacttcctcatttagctgatcgtgtgtgctgttgaaaatgaacactagaatagaaagccattgccttctccttggggggtttgttttaacaggggttttcatgttttaattttggatttgagatttgagttgagatatccattgtgtagagaatcttgagaaggattatccatctttcttgctgtcaccagtgtatgtgggagggaagaaaatatcaaatatagggtatacaggagaaccttagtatttgggaatatcttcagtgatagctgccaaatccagtgttttccccaggaaatttg

SEQ ID NO: 44520 - DNA, 1048 bp, Homo sapiens
ccgatttgcagtctttccttccaccacatctgtcatcttaaagctgccccttaagtatctagattatgctcctcctgctaacccacctgtttctcagccttcttgagaattgtccgttccttccctctttcctgtacagatcctttcaatatacacttccagaaaaagggaagccccgtggtggcccttgaaaagtaaaaggaagttgggaagtgaatgaagtgaggtaggatactattaaacgttatgagtgaagatcttttattcaggctactccggagaggaccgttttcgttttgctttctgtgatctatttgtcgcttattcgctctgttgtgttaggacttggctttttttcttttttttcgttttggaccggttttatcatgctactaagcgttctttggattgcctctccccaggacacttagtgtgggccctgatttataccaataaatattaaccccagcattacaaaataagataaatctggcgcacatacagaattcatctgtgaactccgctagcaaatataagtgatattttgattacatgtgggttatgtgtgggttctgtattgaggcttgatttttgactgagttttattgatgttcagcttaattgatgacattttatttatgatttgagtggaaatttcctctccagttaatatcagattttcttcttatttttggatttgggaagttctcttgacatttctaggatgatagttatcagaataaattgtcttgtcttgaaaatccattagttatgtatgcaaaagaaaaatcgacatttttatataaacctaagttcctcgtatttttctcatagaaaagaagggggctgggaaaagaatgacaaagctgtgcacatacatgcatttggtggaactcactgtcattgttatctacagtaaaaagcagaaaactggaagcaagaggtggcttatgatgtccatgttttggtgaaagcaaaattaagatgtactgactaatggtaaaatgggaagaagcagccctggctataatcagaccactgtgagata

SEQ ID NO: 44521 - DNA, 1039 bp, Homo sapiens
ctttaaaaatgagtttcaaaggtatattctggccaaaagaagtcagggtgaaatgtaacaatggttccaaaggtgtaatactggtgaaaatgacccttagttattcttaggaggtttttccgccttatgtccccaaagctggattcctgagactcaagccttacccttaccttacctttccttgaattccaaagtaaagtggaaggtggaagccaggcacagtggctcacgcctgtaatcccagcactatgggaggccaaggtgggcagatcacttcaggtcaggagtttgagaccagcctggccaacatgggaaaaccccatctctaccaataatacaaaaattagttgggtgtgatggcgcacgcagctccttgggagggtgaggcacaagaatcgcttgaacccaggaggcagaggttgcagtgagccgagatcgcaccactgcactccagcctgggcaacagaatgaaactgtctcagaaaaaaaaaaaagtggagggctgggagagacatgtaaagaattcttgggacctatgacatgaactgcagtctcatgctttttatatgcaggtcattgtggggtgcaggactggcaggcagagccactctgggaggaagtcaaaggctgctttctcagcccaatgccccgtttgctgtcacagtgtgctgtgaagatggattccccactgcagtgggtgtgctgctggcttggaaacagcagccttggggtggccaggttccctggagtggagtgtcccaatttctctgcacagtggagtggcttttgccctccgtttttctttatgggtggccactcatcctatccaactaactaggtcctgtgtcaggtcaacgatcttacccagataccagccagatcatcacacatcagccatgggatatttttctccaaggcttttacttccttaaaatatgattgctgattgagaagagagaatttaacaacagctttaatagcacctggccctcaatagacatttcactgtgtttgttctgaatgatgacgtaaaaccatt

SEQ ID NO: 44522 - DNA, 1039 bp, Homo sapiens; identical to SEQ ID NO: 44521

SEQ ID NO: 44523 - DNA, 1063 bp, Homo sapiens
agactgttatctataggcttatcgttcaaatacagcacttgaatatcccaagtagttcttctacgcatagctcacctttctaaacccagttaagcatggaagagaggtagtaggtaggtgcagtgtgtggaagctgcaaacaagtaggccttttattcattgatatcttttcccaagtactggattttaaatctgtatgtatctgtttgatttttttttctaatatttcagttgagctgctgttttcttccatgcaatattgtatactcaattgtgtatagaagaagctggtgagagtgccctcctacataaataagcaattgcagtgttttgcatgcaaaatataaaaaatttaaattgtcctgattctattttgtaaatggagaaacaatcatatctttctaagcggtaatggaggaagactagtgctttgtgcattttgatatatttgagttcattttttccacaatgtcatacttttgacgcagttgggtttctcataagtatcctagttcatgtacatccgaatgctaaataatactgtgttttaagttttgtgttgcaagaacaaatggaataaacttgaattgtgctacagctaatgtgtcagcagcatttttctcagttattatcaccttccttttgtagtcatctctacaactataccagaagcttgattgactcaaacatttagttaatcttatcccacttctagaaaaaaatgagtggagggaaaataaaacataaagatttaattgaaataaaccttaccagtctttgaaaggatttgcttttgtgtcagtctcctgacattgttttactgtaacttcagtaacgctcctggttgacggggagcagggtgtagccagcacatcccagatcgtcaggatcttcagggggcttgaagaaaatggagtcgtggttaaacctctgatcctttcattgctcatctaagttgctccacatttcttggagatctgcatttcccaaactcaactacgagcacttttttagagtgtaattttcaggatgagtgatcactttgaaccttaaaactgaacaa

SEQ ID NO: 44524 - DNA, 1619 bp, Homo sapiens
aagtgtttcaaataagaaaaaaataatttgtcacaggaatactttagcaaagtgatttactttttccccgtttcatactgcacatagggatattatttttaaagcctaattagataaatatatctaacttgctcaacgtgctcttcctaatcatctcatccatgatagtataaataaaagccagtgattgcctgggttacaattcttagtgcctgaaaaataatgtggcatttttataattaatccataatgttgccaacttgtttgtttttctgcagtagaatagactccactagtaaaggaatttttaattcttgatgtaaacattaacctgtgccatgtgagctagtcttacattcccttcccccagttgtgggctcatttaatgagccctttcctctcttttccagggtgctgataagactgtgaaaggcccagatggactgaccgcctttgaagccactgacaaccaggcaatcaaagctcttctccagtgatggatggatggactgataactccggaagaatgactctcctgtggcctcacactgctgcctgtctgtctgtcactctctatctgccagcttcttcagctaaatactttaagaggggtgaggggagagagaaattcataacaaatccgactaccagaaaaaaaaaattgttttggaggaggggcaaaaggaaccatgatcaggcttttactgggattcctgatcaagtaagcctcttccctttctaataaaatatacaccttatacccaagggagagcaaagacaaaatacaccagtaacatttgaccttttcagctccctagctaatttattagattgtgttgaaggtctgattctacaaaggccaactctacatatttggtagccctaactgtctgagcagtagtggctgctgtgatgtaaacttagggtgctgagataagcaattagctctagccttctgccttaagaatgcactctactggggatttcctggcatagttaagagcgctgcctataaggttggtgaccaaatctttcctcggtgactttaagctttatgtgaaagcttagttaaggtgaggaggggcacactcctaaattgctggatgactgaactttggattttctctcccctttcacatggatttcatgtctctttagataaaactgactagttttatttataaaatcttaagttttggaagtctaaaggagaaaccattccagtatgcatatttttttctcctctagattcatacatttatatagcattgaaacactttcaaactcctgctggtagtaaaaggggatttaaaaatagaatcatagccataagcctgttagtatcatatgaagagagaacagttatcttagtacctatggattttctttatttgctgtttgaatggattgaccttggttatgtgttgagaattaaggaacattctttgaaatgcctctctcagacccatcttggaggctgattacttactgcaccaaagctatcactggggtgagatttactgtttggacaaatttagccccatcccttcaaaaatacacttgtaaccaggtttcccagagttgttgataggcttctgctgaacatatgccaacccacc

SEQ ID NO: 44525 - DNA, 1086 bp, Homo sapiens
acacacttttaagcaaccaggtctcatgagaactctactctatcacaagacagcacaagggggtgaggggtggtgccaaaccattagcacccgtgatccagtcacctcccaccaggccccacctccaacattgggaattatagtttgacttgagatttgggtggggacacagagccaaaccattttaattcattagtttgtgggactggggaaaactcaggctgttactgtaagtgttaccttctgattcagtcatttgtgaggattgcatagggttgcaatattggaacaacagagagaaaatgactagtcatattagtctgctaggtgccaccaagagcagtatttacctagaaataatttgaacatcacttacttaactataagaattgataaaaacacagtttttacagaccagaatataaaagttaatcttgacaaaatagaaaagctggcaaattaggaggtggagggagtgatgggaaggttgagaaagtatcttataaaattacttcatgagaattgatggaacaagaaatacaggtttaaataaatatcgtttacatttataaagaacaaaatattttaagtataagaaattgagaaggtctggggaagggtggtagtggtgagctaaaggcctatgtatgtagcaggaagtcgaaagataaaatctaaagttatagctcaaatatcagcatgagtatattatttaaagctatgcaaataattaaaaacaattaaaaaatggtttcttcaaggaagggatagggccaaatatacttaaattcttcagttacttcaaaactggttcatcttttttttttttttttttttttttgaggctgagtgagtcttgctcagttgcccaagctggagtgcagcatcacgatctcatctcagctcactgcaacctccgcctcctgggttcaagtgattctcatgccttagcctccgaagtagctaggattacaggcgtgtgccatcacatgaggctaatttttatgtttttagtagagatggggttttgccatgttggccgggctggtctctaactcctggcctcaggtgatccacctgcctagg

SEQ ID NO: 44526 - DNA, 1086 bp, Homo sapiens; identical to SEQ ID NO: 44525

SEQ ID NO: 44527 - DNA, 1091 bp, Homo sapiens
tcccagcattttgggacgctaaggtgggcggatcacaaggtcaggagatcgaggccagcctggctaacacagtgaaaccctatctctactaaaaatacaaaaaaatttagtcaggcatggtggtatgcacctgtaatcccagctactcgggaggctgaggcaggagaattgcttgaacccaagaggcggaggttgcagtgagccgaggttgtgccactgcactccagcctgggtgacagagcgagactccatctcaaaaaaaaaaaaagaaagaaatcattgcatccaaatgtttatacctgaactaaaaaagtgatggtagcaatggagaaccaaggacagatgggaaatcttaatagtatggtctgaagacttaagtaaacaagaactgcatactgtctccacatcttctggaagatggtagtgttcttcaccttgttggagaatattgaaaaaggagcaaggtttataggaaaagattacagattcattttgggagaggttgaattcaaggtatttatggaacttaaagtaggtaagtctgaaagccagtcctcagaatgaggacaataaaggttggacatggatgagatgattaggaagagcacgttgagcaagttataaagagtgttaaagacctgaatcctgtataaaggacagccagagaaagtaaaggaaggcaggggagagtagaaggagttggtgtgggagggagaggcaggctagacaggagaatgtggagataatactgtcttgagagttaggaccataatgagttaggaatatcactgttcagatactatatatgttgactagacttggcatttacaggacgttagtgacttatttcaaagtgttttcagaacagtataggtcaggttgcaaattgtctgtcatgtctgatttttccttgtgctttagaaagaaaaccctaggttgtagttgtccacatggcagcctaggtaatccttgtgtctcagctttccttgcagtaattatggctgtgtgtctaactaacttttaggctactgggatatgcacaaatgatgtgtgtcacttccaaatcattacaaaatatgaagccacttgct

SEQ ID NO: 44528 - DNA, 1091 bp, Homo sapiens; identical to SEQ ID NO: 44527

SEQ ID NO: 44529 - DNA, 1045 bp, Homo sapiens
tttaatgctttgtagtgtcagcttcagtaagatacgaagaaaattgggaaagaagatagcacatttatctcttaacactttattgacaactttgtaaagatatggttctaaaagcagttaatttgggtcctctaaatagagctagggttttttctatccatagcttcatgttaaccacaattactggatttctttaaatatgtttgttgttgtttgggtttgggttatatatcaagagcaatttttataccttactgataagaatgatgcatttgtccaaaagccaaaataaatggaaatattactctttgccgctagtggatccagcatctgtgatagggtgtgctcgcaaagatttccagtcactgtctttctctttactgttcatccctccccaagatctgcgaaaggattacaaagtacctttgaatactgctagataatttcatccctgggaaatatttttgcttactgtatcaaaaacagatttgctgtttatgaaagatttatataatttcaatattgtattagttaggactctgtcttgcaagtaactgaacccagctcagacaggcttaaacagtaaagagatcttattaatttatataactgtacagttgaggcacagcttgaccctggatttaagacacatgaccatgatctgatttttttatttttatttttggcctgtcccaggtctcttcctcagcattggctttatttccatggcttcagcctatctgctagctctcaaaagaaatggaggactccctccttacccttcgttcccgccttttccctgaccttttttttacccagccaagggttttgttctctgaaaataaaaacctccatgggatcattttttgcttaggtcccttgtcatttactaaatgagctgccctaaatgtactctttccttctaaccatatctcaaactgtagatcagaacaatttttctttgtgttagacctctctgtcctcctaggaaaaacaaaacaggatatattttttattctatagagaacccaaaccattgttctgt

SEQ ID NO: 44530 - DNA, 1045 bp, Homo sapiens; identical to SEQ ID NO: 44529

SEQ ID NO: 44531 - DNA, 1045 bp, Homo sapiens; identical to SEQ ID NO: 44529

SEQ ID NO: 44532 - DNA, 1047 bp, Homo sapiens
ttactaaatgaagtaacctaagtaattaggatcagaggaacatgttttttaactctcggcctggtgtgaagttgaagaattcattgaccgtgaaaagagtaccgaaaatagaaatagttaaaattctgaaactgagtatcacttcactgtggtgtcttaactttgggtgtggcctttttcctttcccccaccacaacaaatacatatttgcttcaagtggtaaggttgtcaactggcatctgggaatgtttaaggtatctgaatagtttttaaacaagcatgttaacttcagttattccattcttctccctgatttcacctgaaatgcttacatgtgtagtaaatagcaatgcagtttagtggcagtgtatttggggggtaaaatcatgatgaagaaagacaaactcaaacctcagccccaaatataaaactgaatcgacattgtggcagagtgggaaacttaaaattccaagctagcctgtctttccatcctgaaactgtgcctttgtaattatgagagaacttaacatgtgattttaatttagtgataatctaaaatgaatcttccaaaacaagtataattttatgacaaccacggatggcatcttgctcaccttctaaaagtgtgagaacccagtctagattttaactcttcaaagaataggacctgacctgggtttttgcttcagaggctgtgttaggaagcaagtaagcgaagcagtttcttaaaacttacaggattgtgcaaggcaaactgctgaaggtttttactttatttaatgccattacaatttagactttttggatgctgcttacctgcttagttttttgcagtggagttttaggacaggctgtcttctcgtcactgccttctcagctggtagccaactgaaacttgacttattggctatttcaatataaagctaaaaggtagaaattatttggtacacttaccagtggtgggacactgcaatactctggaagtaagtgggcttttgttttcctgtcatggtggaacctaggttgtttgatatacttgaaatacaa

SEQ ID NO: 44533 - DNA, 1047 bp, Homo sapiens; identical to SEQ ID NO: 44532

SEQ ID NO: 44534 - DNA, 1047 bp, Homo sapiens; identical to SEQ ID NO: 44532

SEQ ID NO: 44535 - DNA, 1058 bp, Homo sapiens
tatctctgcctgcattaaatcttttatatggaaactaattcatttttctactcctggaaagcaggattgtttccattgcatggctgtagcaagttttagggttacactcatttcttaacaatgcctctggtcaaatgtaaaaggagccatcaggggggtgataatgatttcattcaaccaccctgtcctctcactggagctgaatttaaggaactcagaaagtccaaattgattatacagtctaacaaaagaacagcaagtgagtccagatgaaaaagccagcaacagctgtagaagctccaatatacagtaaggccttatatgagtctcccttcaccctttcctatagcctttcggtggggaatgggaagtagagtatggcataagaacccagccctagctcttctcaaatttcttgctgagcttctccccatatctccctaaatctgttctgcatatctgcagaggttatgactttctctgtgttcccatataccttcctgatctgtaagcagttgccatagaataagtgtctggctgtaagtattgaccctgcatgcaagtgccattgttgtatttttgctgagacaggtctcttttccctggctactggcaccctttttattgtttgcaatatggtttggctgtgtcctcacccaaatctcatcttgaattgtactcccataatttccacgtgttgtgggagggaccctgtgggagacaattgaatcacaggggcagtttcccccatactgttctcatggtagtgaataagtctcacgagatctcatggttttatcaggagtttccacttttgtgtcttcctcattctctttttgcctgctgtcatccgtataagacgggacttgctcctccttgccttctactatgattgtgaggcttccccagacacgtggaactgttaagtccaattaaaccttcttcttgcccagtctcgggtatgtctttatcagcagtgtgacaacagactaataaaatttgtttgtttggttttaccctgaggctaatctactattctggaatttccaaatgatcct

SEQ ID NO: 44536 - DNA, 1033 bp, Homo sapiens
ttttatggaactcatccaggccttcttcatagagtgtttactgagtgtaagtgtggatactgagcaataaatagagaaaggaagagacatagaaacacaaaaatgtcacataaaatgtggaatcatatatcctatatatggatgtatactctttctcattacaagaaaataacttgaattatcaaaaagatatgaattttgagtaatataagagcattatctttttcatgtatgaaatacaaacaatgtaaaaagcatcgctatttttgtgcactcatttctgaacttgtgcaagttggaataaggcggagactggctggactgatttaaattgggaaggacacagtaactatagaagaaatgaccttaaggggagaagggagtgatgagggaaaccaaagtctgtgtggtggacttgaaattgagggatcatttgagaaagagatgaagtgctttctagggcaggtgataatcgagctctaatgtggtaaacttactttggggagatagatgagtaaaaagagaagttatgaagtattggcctgtgtatgaatgaaatgaaactctggagaggatgaatgaaactctggagaggactttcatataaacttcaattaaaatttaaatagctgttcaatcatttttgaatattattagactgtcatttcttttaaattgaatgtcaagctgagacaggttagtagattaaagacatcatttctttcttttctgatcaatgaaaatatttataaaagagaacaaacaatttgtaaaaatctagtagaaagagcacttagttgggaattacaagatatgagttctagcacgggttcagaaggaacaattttttttctacctctaacctgctaagattccattttattttagttgtaaaacaaaaataaaagcatacaaaattatctatcatcaggttggcctgatgctcttaccatgcccaaactcaaattgttcacaagggaatactgagtgaggaaatgtgcaagatatttctaaataagtagtgggtcttgat

SEQ ID NO: 44537 - DNA, 1027 bp, Homo sapiens
ggttgaatgggcttacaatttagtcaatgatcatccagctggagattactacattccacctagaaaaaatccttcagagcgaggaaaacaatgtcgccccagatacactggaagatttcgtttaatgctgttctagacccctgggaattcaggaaaacagtatttactctaacctttcacagtccattgagaaatcagaaatttgtgggacagggcttttctttgtaacagaaaactgatactgactttccaaatgcctctgatgaacttcatctcaaagatttttcaaaggttatctactcctaccccctcattttcagatgaggagactggagcgcagatgaatgggatgctctctctgaacaagtctactattgttattattttcttttagaaaaaaaagtaaaggcaattgttcacattgttcaaatgctttcatttcctttttgcattatatgcaaataaaatttaaaaacaagtctgtataacactaccgaagcccttgactactagaagcttaaaatatttaacgtaaatagtatattcaaaaacacgaacacagaaatgtgtttagaaggtctccccaatccagcacacaccaaatatatcccaagctcccaggcagaggagatgatcaatgtatcaaattcattgatcttgctgatggtctgaagcatcaaattttacatacctagaagccgagctttgtatttctaaactttctgaaatcaaatccttattttctatgatggtaactatactgacaacaaagcgattggccaaaagaatcattttagaagcgaggagtagggtgaggagggtttagtagcaagaaagtttaaatgctgtaaatcttgccattgcaaccaaaaaagagagaggagatggataagctaagactgaaatcccaattggttgctactaatgaattaatacatttagttttggataaaccatgctaagaaatataaactgagtcatagaaacagcatggccaaaagagcagaaacaccaaaaaaggttcata

SEQ ID NO: 44538 - DNA, 1033 bp, Homo sapiens
ggaaagttagaacaatattctccctacaaacagtgcatagtccagctgaaatgtggggaattatatagtaatggttcctgtgaatggggcctgcaccatggggttagattattcttttccctatgaattcaacaacaatatataagtacccacaatgggacaggcttggaaattgacagaatttatacaaagatgaataggataatataagctcctaatttatgtaagaaaataagattctccaatacgcactttcactatttcaaagaaccaaaaaaaaaaaaaaatgtttcttttcaaaatgcttcctgatttggaaaacataacttgtgcttgccatattttttattgtttggagtcattatatactgaattcactgaggttggcgcattggcagtgtggacaagagttctgtcacaaagaataatagtagacatttttctgttagccttcctttctcagtattgctaccaacataaccctctctctcaatttagtaattgtgagtaggcattggaactagttgatatatgtaagtctagagaagaaattctagttgagaggttataagattcttcaatctccctataaactagaacatgttccaatacttcaaaattcttgatttcttaataatatatataaaacataaaatgggattaatatacccacattactgatcacttcaattaaaacctatcagtcaattcaaggaaggtaaattagtcacatcaatgattcattatagtctcaggaattggaaattaaatagacttttctcagtgagtaaattatgcagtaacaatctgatggtgtgcatgcacagccttaattaattagttcagttgaacccaagattgataatgtaagactgtactttataactttaagaaaattatttaactttactaaatcatttcccctaatagttgcctttcccttaagtatcaaaatgagacttgccgtagctacacatttctcttcctaaatatatccctttaatcctgaagtacatttcttaaccagaatgat

SEQ ID NO: 44539 - DNA, 1055 bp, Homo sapiens
catcccctgggagcttcactacattgcattttctaatcctataagcatttttgaagtagtatgaaatcctagttattgagaaacattgaggaatacagggaaaaaaaagaccacgtcaccatgagataaatatctagagaaataaacaatccgaaggtcaatgaccactttgactgaagtatacataagaacccaatagagctgaaagggccaaaataataaaagttaaggtgggtaacaagtcagaagaagcttagtgcaggatgtgaaacaaatagaatcatgaaagttgagtgggtgattgcccctagaaatggagagaaagggctttctggaaaagtagaacaccagagacatagacctgtacaacaccacggtacattgggggaactatacatgggtttatagggtcacagaattaagcatggtagggagagagagaataaactggagtggtaagtagaaacatgattttgaaggacttattagaatatggacttatcctataggtaacagaggttattgaagaattctaaacaggagaacaacttgactaggtttgcaagttagtaagagcatattcgcttccttataactatgaatgtgagatttcaagtaatttgaatactaattaatattctaatatttattttaattatcaaattaaggtaaaccatattcactagagctttagaatgtatgataatatctaacatgtaaagaagtacttctatctgattgaaaagtttagtaaaagcatcttgaccttagtatggtcgtatttaagaaattttaaatttaaaagtgcataccaccactttttggaaattcacttctatactgtgaatgtcatttcttccccagtaatgccagacaaatgattgtcttcgtacagtgtcttgaaccaagaacaagaaagataaaatattataacatgtcttaggggtctccaaaagttgtctattcaggataatatagagaaaaatggccgattcttttctgccacgttgcactttagaaatagctagctacacaaaagttccaaatattaattg

SEQ ID NO: 44540 - DNA, 1130 bp, Homo sapiens
cccccactcctctgaactgaagacaggtatcatgggaggttccatggaagcctgtcattgcctcaactaccctgatccccactcccacccccatcccgcagggacaggagcatcctggagggggatccatccccattatgatttgtatctctattgtcctacagggaccttttgcctcccagaacccacacttgtcctgatgaggaacgagggcacttcgtcttcttgatgcaaactctacatttaatgagatgatcttaataaaaagaacaatcaccccaatagaaaaatgagcaaaaatccccacaaacaggagagaaaatatttatgaccaataaaaaagagatgtttagtttaattagtaatcagattattagtcagaaaaatgcaagtgaagaccaccatgaggtatcattttactcccactagagaggcaataacaacaaaatattataataccagatgatggaaagaatgtgaataaatgtgatcctgtctacattgctggagaaattttcccctgtggaaaacagtttggtcttatctcatgaaggtgaatagttataattttgtacctactaattccttagagcgcaggcttatgctatagaaaaaccattatgtttgaatctaataaataagtaaggtggagcttgcagtgagccgagatcgcgccactgcactccagcctgggcaacacagcaagactctgtctccaaaaaaaaaaaaaatcaaatactgttttaaaaagttgatgttattgctactttttcaagataaagaaatataaattatttgactcatatagagcaagtatacctccagagccagatgggaattcttttcaatacaggatcttgttctatcacccaggctggaatgcagtggcacaatcataacttatttcatccttgaactcctaggctccagcaatcctcccacctcagcctccaaagtagctaggactgcaagtgcacaccaccatgcctggctgatttttttttttttttttttagttttgcagagacagggtcttgttatgttgcccaatctggtcttgaactcctggcctcaagtgatcctcccacctcagcttcccaaagtactgggattacaggtgtgaatcatag

SEQ ID NO: 44541 - DNA, 1115 bp, Homo sapiens
aaagtcttctggagagggcatgtttcagacatgctacaactatttgccaagggtaaggaagagtattctgacaatttccactggaagcctgaaatctaaacaaaattccaaagatcagacaagaataaattctttcttgtacagtattatgttttgtgttgcagagcagaattcattgccaatgacaggtgcattgagtctcaaagatgctgtatctttctttttaatttaaaaaacacatgagattgatcttccatatgtatttgctctgctttgaaaccttcatctgcgtttggacattaaaaagtaaaaattatttctttttctgattttcaaattagaacatttagagaagtaaaccgaagaaaaaatattctcgatcatttatatttgactcacaagggccatccactttacctgattattcaagagataagtttcttctagccaacttcaggggataaaacagtgaagagtatcaatatattttccattgtcaaagactgtgtagcatggttggaagcaactgtgaacttttactgcttttgaaatcttgtttatcttcctacacacatacatgagcatgcaatacactcatacacatatacatgtactattttaaagttttagattacattgtatatatcaatgcattatttcactggggccaggcaagggattgaagagcaaaggaaggaagctggcataagttaacatatgcacactgtacagctggtagtccttggagggggagaatcagaaaagctgtcaactactccactgttgagatacagctgggtgagaatgtggacacagagttgtcacatatttagaattataaagaaacactgaaaatctggatttttatacttaactcttcaaatttttaaatcttggctcaaagtcataaaatactgagaagccagcaaaacatgtttgtggacagctttggcctgtaggctcacactctatgacctttgctgttagtactgggtaataacgttttcaaataaagataatcacagacattttcctatgacattcgaaaacatctaatgcatcatttttatgggtacatgatatttagttttgtggcatactataatttcattaaa

SEQ ID NO: 44542 - DNA, 1031 bp, Homo sapiens
gcatggcaacagccacctacctccttctgtcagattctgtaagctcgtttggcctctatttagttagccactacatttctgtcacaaagattactataattctattgataagagaattttgaagttaaataatgttagggagaattgacaatttgaggaatatggaatatgtaattgtttcagtaatagtttttaaaatatcgttttttcccctttcatggggtcataggataattgcagacatcctcacttggttataatttgaatatcatcctttagcaggcattggatagaaggttctattctctagggactggcccagaaatcactggtgctatgtgagtatgttaatcctgtttaggattccaaataaataaaacagcattcctttctgctgagaaagtcaggagttcattttctataagttaacatttcatacatgggtcaggcaaattcaggttgaaatagaaagtcctaaacttctattttttaatcttaaaattcacctgactttaataaacttggtccaactagatagtccattatttaatttgatgaaacctcaactttacagtgacgatggtttcttaaacaggtttatgttttaggtaggatattctgttgatataaaaggctatttaggagaaaatcagattggtttaaacatttcgcatataggattataagtgcactaaatccttatagaccttgatatccccaacgaatgcaaaggacacagtgaggaggggtgaaacgtccattttcatggctgtctctggctagctttagtgaaagtcctgtaggttttccctataaacaatatagaacagggatgtacaaaatagtggcataacaagaagaaaaatggtgtgacctagttggggtttctgtttgtttgctttctcttcatggtgggaaaaagaaaggcaaaaaataagcatttattacattccaatcctctaaataggaccgtaacaaaagaataaaatatgcttaacactccggagacaatttctgcatccttctttgat

SEQ ID NO: 44543 - DNA, 1044 bp, Homo sapiens
gcaatactgaaggcaagaaagaaacagaaagagaaaacaaaacaaaaaatcaaaaacacacacacagaaagtgaggtgatagaaagaaatcctaatataccagttatttacaataaatacaggtggactaaattccttttcttcatttcactttacacattacatttctgtaaagagtggggattatgggagctacaactcaagatgagatttatttggggacacagccaaaccatatcaatattgaaaaagaaaaagtaaaaaatacctctattcccagctgacatgatttttttttctttcaaatttttattttaggtttagggtacatgtacagctttgttacaggaataaattgcaagtcacaggggtttggtgtacagattatttcattacccaggtgattaacataatacctgataggtagtttttcaatccttactgttctcccatcatctaccctcaagtaggtcctggtggtttttgttcccttttttgtgtctgtgtactcaatatttagctctcattgataagtgacaatgtgtagtatttgattttgtgttcctgtgttaattcacttaggataatagactccagctccgcccatgcttctgcaaaggacgtgattttattcttttttattgctgtgtagtattgcatgttgtgtatgtaccacagtgtccttatcctctccactgttattgaatatttaggttgattccatgtctttgctgttgcgaatagtgctgtgataaacataggagtgcatgtgactttatgataaaatgacttgtattcctttgggcatatacccagtataccatattgctgggtcaaatgatagttttattttaattctttgagatatccctacactaaaactttccacaatggctgagctaatttacattctgactggtagtgtataagtattcccttttccctgcaacaccaccagcgtctgttattttttgacattttaataacagccattgtgaatggtgtgagatgatatcttattttggttttgatttgcatttctct

SEQ ID NO: 44544 - DNA, 1057 bp, Homo sapiens
gagttagcatggcatagtctttacattcatttacttattttatttttgtcttatatttgaagtgcattgtttttttgcagaaagaatataattgggtcttgctttttgttccattcgaaagttactgcctttgaattggcagttacaccatttatatttaatgtaattatttataagattagatttttaaagagtatgatctcactatttgttttctgtttattccatctgatctttgtttacttttcgtttttttcttgactttgagtggattatatgaatgtttgtattattccattttatctctttaatttgtttattagctataatttattttgcatgtttagtgtccatagtttgtatctatgatttaacacaatctattttcaaataatattcatgtgttgtgtaagaatattacagtaatacattgcaatttctcccttcctgatgtttgtgctcttctagtcatatactaaaccaaacactgcattgtcattctttttttccccattttttgactgttattttaggcttaggagatatatgttcagatttgttacatgggtaaattgcttgatgctgttacaaattatcccatcaccaagttagtgagcacagtacttgataggtagtttttcaacccatgcccctctcataccccctcctcaagtcatttccagtgtctctcgtacccatctttatgtccatttgcactcaatgtttagctcctgctggtaagtgaaaacgtggtatttggttttcgttctggcattagtttactgtggacaatagcttccagctgcagccatgttgctgcaagggaggtgttttttttttatttaatggctgtgtagtatcccatggtgtatgtaccacattttatttatccagttcactcttgatgggcatctaggtggattccatgtctttgctattgtgaacagtgttgcaaggaacatatgagtgcatatgtctttttggtagaaaaatttattttcctttgagtatatactcagtggtggtattgcggggtcaaatggtagttctgttttaa

SEQ ID NO: 44545 - DNA, 1062 bp, Homo sapiens
ttttatatggcaatcaaagcagactaaggcaggaagcatttctttcatttaaattttcttcaagagttggtgtataatgggtattatttatttgaaatgtttggttttcttctccagtgaagctatctgtatctggagtttttcttgtgagaagttttttttttttcctacaaatctaacttaataaattgatatcaatatattaacattatttatgtattcagttatcagtgagcacttatactttgtgactttcaagaaatttatttgttcattttatctaggtaactgaatgtatggtgttaagactataaaaatatattttcttatcattcttttaatgtctgtagactcttcaatgatgtcacttctaattcatgatatttctaacttatgttttctcccattttttccctagtaagtatgactgaatgtttatcacatttattactcattctaagaacgaatttttggcttcatttattttttcttttgtcttttctattttattgattgtcactccagtacttactctttcctttctaccacaaattcgagctcttctttttctagtttcttaaaataaaggtgaagtcattaatttggtacctttatagtatttaatgccctaaattctcctcttattaataagtactgctttagtggcatcttataaattttggtacattgtattttaatttttattttggtaaatatttttgacccactctcaatttcttcttttatctatgaattatttagtttccaaaatttgaggattttttaaatatttgactgttattgatttctaatttaattttcttgttatcagatgtcattgtatacattaaccctttaaactttatggatagaatatagtccatctttgtaaatgttctctgtgctttcagaaagaatgtgtattcttccgtttctggttctgtgtgttttataactcaattaggttaagtcagttggtagcactgttcaagttctgtagatgcttaataattttctgtgtgcatttaatgtcaattatagggggatactgaaatatctgac

SEQ ID NO: 44546 - DNA, 1030 bp, Homo sapiens
gctcttggccacttgaatagccactgaagctattcaaaggtgtctcagttaagagcttgcaggggatttctgctgttagttggaggtttgaggatatatatgacaatatttatgaccagtaatttcaatgaggaagttgcacaaccaagagacaagcaggtgacccgcctctgagtctctgagtctaatgaaaatagacacacaccttcaaacaattacattaccatgtgttaaggaataagcatggagcactaaaacagaacaaaggaagagcacctgcgatatccacagtttacctgtctgataggatttctttagctccattgctcatttttgttcttatttggaatgtcaccctttagaatgaaaacaacagaaaaccttcaaagtatttattgtcctgcaacacattctcttctcccaaatcttattctggcattccgtacatttctttctcccacaaacccttcctgggctcttcctctttaagtctccccacctcatattcataaagaagtagaaggaaaaacaaaaatgcaaaaactaacctacatcctgttttctctcaaggccttcattttttcttaatagaccaaatgtcattgtttgcttaggagtaggaaacagccattttgggcctataatggagatctaaaatctcttttgccaacagctttttctagttatgtgacgttaatatagttttattttccccgctgatttctgagcttacattttgactggacttgaatgttctacagctgctttgcttctttggaaaaaacacaaccagttttctagctttattcccaggttgtatgggtatccagtcctatcctgtctctcggactgctactcctctaggtgttcagtcataggggccacaccataacattccattttggaagggacagagggaaattatctgtttctcttaacgtaaccatttaatttattgttttggggggatatttgtgaagagggtgacttggctgctgatatctctctctgtaaaaaacatatttctagc

SEQ ID NO: 44547 - DNA, 1046 bp, Homo sapiens
tttcttctgctctgtcctttgtacttagatgatggttccctcatcagtgctcaggtacctggagccaagctcctgctgttgtctgaagccataccttgtcctctaccttcaccctggacagtggcgtccctaacttcccttgctgtgttttgaggacccatggcaataagtcaaaatcaagacctgccagcacctctaaaacgttgctcctaggaactaccaagagcaaggagacttgctcccttatcaccaactagttctagaagctgaaggccttgctttctgttcttattatttctcatcatttaaaatttctgagcacaattcaccagcattaataatactgtcataatagctgatacttattgagtgctttctatacagtggacagttcaatactagaactttacattcagtgctgggttaaatgctcccaacagccctatggggtaaagactatttttcttcctaaatgagggaaatgtatctcagaagtaacttgtccaagatcaaaagctagtaaaaaatagaactgagggtgtagtccaaatatttctaaccacaaaattcttaaacgtcatactcttctacctccattcccctattcaatgtcaagggtccagtgagtatttgaagatattctggttcatgattcctttcttccctctagccagtatccaggaatatttcttcatattatgtcacttatttctacctccttatgatcaagagattaccgtgtcttggataaggaatgttgctgttagattaccctccttgattgcatatgattgcccattgtttaattcccattgttttctcaaacaccagttggcctggcatggtgtttcaacatgcctgcgctgaggaaagggaccgctgggagtacaagcaggagggtgtctaggagctgctcaatctgtttctccagcctgccatcacctgactaaattgtttgttggattgctgtgttctatcccttggggaggccacagtgccgggtttgtttgtgttgagagtctctggctttgattagcagctagctc

SEQ ID NO: 44548 - DNA, 1029 bp, Homo sapiens
caagtttcccatttccctttcttagattgcaccagtgaaggagatgttttgcaaagattcagagaactaatttttcactggataagacctgagtaacccagaccccccaccgtggttcttttcacagccctcgactttgcacttaaaaagggatattgtaaatgaaaggctgcagtgccagttttaagaaagaatttctgtgaagtgtgaggactctggagtctagctcacataaagagagtgttatataaaaatccgacagctgaactaggttgctcttttttggcagggagtggggatgagatttgacaccaatatgggcaaaattagataaccttttggttaatataaatgattttgatttggaggcctaatttgtagattgtgaaagcagcttttagtttaacttattcacagaccccttataattaccatgtttttttttttcttcctaaatctcttggttcagcttgtgaatcttacgtgcccgtaaagttgggatgttgaattggctcttctttgttctggcagtgagtcaagtgtccagcattttttcataagtgttttttaaaattgttctccagcattttatggctcctccctcccatgtcctcagacccagcaaaagcgtagaggcagaattagaggcctctccaggccagctcctctgcccacatgtcatacaaggtgtgaatttgagcacagtccagaaatggagacatcccacccccagttgaataatggcccattcatgccaaccttgccaacacggagagggcagagatgcactagaagaccttcatcctccccttcctctgccccaagtcactacagttggttctattgaagccagtctttaagaaacctgggttaaagacaccagcacttctgcttgctgggctggctggacctgtgaagccatgggcaggtagtgccctcttgagagtcattttatttggccaccttcaggtgagactatccatagacacatgctaggataggccccgctgggagggcagttacaggaga

SEQ ID NO: 44549 - DNA, 1046 bp, Homo sapiens
acagacatttcagacaaccttgctggctttccacacctgcctggccccctcctccctccacacttccactttgtcctcctcgtcccctacctcaacaaagcagggtggggtaggtgacatttgtgtatccacattcttacctttggtagtcaggtttggctactttgcagctcgcccaaagagatacaacctaatccccaacctacttttagtttttttgttttttttttatggttaaaagtaacttttgtagtttaaaaaaatctttcctctttcatataaataagaagtggaaattgcctttttattgtgtaatgtagaaaaccctcaagtgttttttccgagcttgggaaagattttgtgtaggaaatgtgcatagagtttgtattttatttttattagcagctgaaatgcctttggttttggcttctctctctccctctctctctctgtctctccttctctctctccccccaccacccacccccacacacgtcatctgcattgttattggagcctgtacttagagggattaagcccacaccctggcttccattccatatcaggtacaggatttgatgttattaacatttgtcgtcatacctcataagtcggtccctgccttgtctgtctaggcccatttggggctccctgtgagtgattcccctctctctgctatgctggagacggttccagcctggaaagcggccaagttcatcttctcactgtgagtggaagctggatcgggcccccgtagtcctggcagccctgttgtctggagggttcttgttgtccctcccattagccagggcggagactgtctgagctgtgcaggaggagggttgctagtaggttctgcttctgcttctctctgctccactgtctgcagcccagatcctgttgggcctggctggtgtctggtaaccatgggcctccactgacccatccctctcttttaaactgtcaggtcattatcaggcataggcagcctatagggcccaaagaaggcaaaaagataagatttactcaagtagcatttgggcaat

SEQ ID NO: 44550 - DNA, 1021 bp, Homo sapiens
agagaggccacattcatgtaacttttattagaagatatggttagaattgttctattttattattattgttaatttcttactgggcctaatttctaaatcaaactttatcataagtacatatgtataggaaaaggcatatgaaccctacatgctatatgcccatatataaaccctgtatggtttttcccatacatatataccttataccatatatatagggttcagttctatcttcggtttcagccgtccactgggggtcttgaaatgtattccccatggataagggaggactactgtactggatttgggatagggaaaattttgccatcttgaaacgtctgtggtcttcaccaggcaggtgtgtctctgccaggtatgacagaagtgctagcattccaattaaataatttcagtggcctgttgagaatttttccccccaaggaactatctctctaaatttaattggaagcatagtttctatgtcatggaaaattgctacagagccatctagctgtgtgactgtcctacaaaacaaaggagattgtctctatcctttgatttatggctttggctttgtgtctcctcttccctttctaaatgagatgccctgtacctcatccccctgccagacctactcactgggaatgctgcttcttttagctgggtctggacatctccaagtattccactcccattctccatgaatcattttccctagatggttatgggtggtaaggggggagttttatattttcaaagcagtgggggtggtagtttgccttgtgtttatttgcttttctattgttcttccagcactgtataattggtataatttttcaatgcacaaactccgaagctctaaagtctttatagaaagccaaattctgttggcacccatggttctgggcaacgagaacacacacattgtcatctgccaccagccctgagcacctggagtgagggaatgtgttggacccctgtggtcttttgctaacaccttattattctgctctgtcctcag

SEQ ID NO: 44551 - DNA, 1033 bp, Homo sapiens
ccgggagagtagatgaggaagtctttttcatctttcttcagtttttctctgggagactctgggaacagagctgaagtggtgcgaaagcaccttcacacttcctttgctgaggtgatccgctaattgcatgctatcaggaaatgtgtaagatgggagtgagatggtttcccagggggcccttcttcctgtgctccatcaagaaatacattttcacttgctggtgtctgagcagtgcctgtgtggctgctagagaatccttctggcttttctaagtgaatgcacctctctaagctgcaagctttctggatggccccaccctggtctcatccctgagaaatcttgtcattttttcccactggtatagttttcttctgcatgagtgatgcacatacactgcccggcccattagttgtaggcgtttgtggctcagtttgctccatttatttcttattttgttctcaggcatctttagggctgtgagctacagcttttctccttgagcatggatttgtagaatcataggagcttagacttgagatacaccttagatatcattgtattgaactgctaatcaccttattttacagaaggagaaactgaggcctggtggggttaaagtcatcttaacatttagaggtagaatggggacgagaacttggtcacttaacttttgaactggtccttactttggtttctcttgctgctatacctcttgctccttcaaggaccttgccccagcaagagccaactttagacttggacacaagggcccttgatttggactcagtgttttagagggccctgtgctggctctccttcagccatgtccccctccatgggatgtgtagttggcaggaccaaggggatgcatccatctggagctctcaccctagccctctagaacttactccagtacctaggatcctggaattccctgtccaaaggtcttagctcatttccagggcctatgtggacttctaccccaaatctgttctccgaagggcaaacctggtgaccagtgggcacccctgaa

SEQ ID NO: 44552 - DNA, 1033 bp, Homo sapiens
gacctatgtcataggaaataccttttatattttaaagaagcaatttttggtgaacttaaaaattactctgagattaatttctttgatgcctaaaggtcaaaaacagtttaagccttttctgtgtgtcatatgactcttaacccagaaactcagatcagacatcaagacccctcgttcatccctcccatacatgaggacaccataataaagaagaatagatcgttaactccttattgttctaggagtgaattgatttctatgaaattttaaaaattataatcagctattttgaattcacaatctcacaactagaaaatttaaatgaaatgagatgttttaaaattctgtaagtaccatccgtccattaattaacataactttgaaaatttgtattgattctgtccctgaaagttctagatctgcaaccacattcttaaatttcatcgttactgaggacaagggaattcacccttccactctttcttcaccttttcaccttgaacctgacttcactccttggattactagaatagcttgtatcctatatacctgtgtgtactactatgatctgtccattctacatgtttatggaggaactcttccccatgtcggatgcttgcccaacaactatgttgtatttccctgttacttgttggtaccaagccctgacacctttactcattatcaggtatccaaccctccgctgcttcaagaactccttacccacactaggcagtggcttcttcagtgacttttcaaaatactgccttttgcttagaatgcactcctctctcttatgtaaatcatcccctttctttcaggaggcccaattcaaatctcatctcctgccctaaacgtttcctgatcacacaactcatagtagtgttctcttacttcaaatttttagtacacctttagctaatgtattagtccattttcatgctgctgataaagacatacccgagattgggcaatttacaagagaaagaggtttaattggacttacagttccacgtggctagggaaacctcac

SEQ ID NO: 44553 - DNA, 1050 bp, Homo sapiens
gcataccccccacctcattgtgcagccccatccccctggagcattccagagaagctctgctccctcttgctgctgggcactaattagaccctgactgctggcaggtgagcttactgcccaagaactaaagagagagagctcttcccccaaaagctgccctgtgcctctgtactcgaaacctaaccctttgttgacttcttttactttttatttttggagcaaactctatttttggagaatacatgaaacgagtggctgtcttacatcataaaccagaaaaaccactgtgcttattaaaggcatttcggagtattctcaagattcggactcaaagcagacaatagtagaagctggcttttctgcctctaaatggagggctctggcccccacattcattcatccctccttgagctaaaccactgcctgcctggctaactgatctcaagagcaaggctgggactcatgggtatatatttttggtctgtgacttttttcctagttaatttctgtggggtctggactgttttctagccccatacttattattttttcttgttctctacttcctggttctcccacatgactaatccttctctacacccatgttgaattttatttgacctcatttgatatgttttctctaagtcacttcagtcctttttaaaacttggtaaacatgaatccattttaaaagcacaggccctcatagaatctgggtttatcctcaggctaggtcactgctacccctgaccagtccccaaagaatgctggaggcctttgccatgctccaccttcctattctccacccaggctcccttttcctcctctcctttctctccttctctttccctttttgtctcctttgctctcctctttctttcattcacgcaggccttcccctcctcctctgggctttaactctgccggttttcctagagctttgctcagtcctgacaggtgtgaggacctgaactcagggcttgggatcttatctcaggttctcctgctttattgcaaggactcggggtcctcagcagatcttggcattct

SEQ ID NO: 44554 - DNA, 1032 bp, Homo sapiens
accagctccacggaagacctccagcctggccactcctcggcctctctcatcaaagcaatccgcgaggagctcctccggctctcccagaaacagagcaccgtgcagaacttccacagctgatcggcctcgcctcgcagatttgccaagtatccgcttcctgtggaagcaagaccaaaaggaaatcaactgagtgggtgtttggaagaggaaggagcaactctcgggcagcctgcccaagggagggagcaagttgcaatttagaagatgccatacgtcgtgtgacagctcatgagcctttcactgggctggcaattgtctgaacacttgggttcagttgaaatatatgtattttggccaaaagccagcagcacttcacaaaaacaaaacacaaacctaagctaacaaaatgactgcattcgtctcttttttaaaggtagagattaaactgtatagacagcatagggatgaaaggaaccaagcgtttctgtgggattgagactggtacgtgtacgatgaacctgctgctttgttttctgagaagaggtttgaagacattttattaacagcttaatttttctcttttactccataggaacttattttaatagtaacattaacaacaagaatactaagactgtttgggaattttaaaaagctactagtgagaaaccaaatgataggttgtagagcctgatgactccaaacaaagccatcacccgcattcttcctccttcttctggtgctacagctccaagggcccttcaccttcatgtctgaaatggaactttggctttttcagtggaagaatatgttgaaggtttcattttgttctagaaaaaaaaaatccctcccaaagtggggcaaaaagctttatatttatttgattatccaaaatacagatcaaagtttagatctacattcttcattgtatttgctgtttcttaattgggcacacacaactcctggtcatgtcccagttcagcaccgatcgctaaggccgatcctgtagaatgcggctttcaagaggtccta

SEQ ID NO: 44555 - DNA, 1027 bp, Homo sapiens
atagaaaagtcccttccctcagggagcaggagaaacatctcttccccttccaggagaggagatggctaagcaggtagacaaataagtgttaccttctgtaaggttgggggtggacctcatggaataccaaggccagggtgcagtggagtcctgatgtgctggtttgctttgccttcagaccaggttttggccccggtttgctgcagtctacagagctggtgccccctgaccctcagcagccacaggcctccgccgaagccccatttgctgccagagggatctactcggaggagatgccgtcggtggcccggcctcggcctgtcgggggtaccacaggtatatgtggctgtttagcttccatttctgagctacgggacatttacttgaaagaaactttattttaggtgtctcagagtgtcagtgtgcagaggcctctgccactgctgtttcagggctgtttcccctcatatcctgaccgagatggaggcggagagagaggcggagctcccaaagctgctgtctgctgattggctctggaaccaggcccttcatgtgaaattcacggcacgcttcctccaggaaaaacgtttccaaatccttactgtaaatggaaagatctaggtctgagcactttggatggcatgaaaacaagagttagttttcaagaaggtgcttttttcagcttgtaacgaacgactctcaaagtctgggtgacagagcaaaactcttatctcaaaacaaaacaaaagcaagtagtttaagccaattccaaatttgcaataattggtggatattttttcattatggtttttctaggaaattcttttattttgcattgtctattactcagcaaaaaaatagtgtgtcctggaatcctgtaggttttcctgaactttacaggtgctttgctttgcagtgaatcttgattcccctgctaattttaggtatttgaacctccctacatggcatgcgtactaagcaaaattcagatgtattaatttttagtttaaaatctgaacgaatatag

SEQ ID NO: 44556 - DNA, 1033 bp, Homo sapiens
ttttggagtactgtaccatttataaaatgattgagatcataaagtagaattcttatcttttcatgaaggcagattcctagagaccttttcaaggtaaaattttataaacatagtggagatgactgtagtcattgagtcatccgtttagcaaatgcttgctaagtgcctgtggtcaggtgctggtgatatacaatgaagatgagataaatgtgattgctgtctcacaggatgttaacgtgggttgcgcacattagtaaagatgtggttttccagcctgggctacgtagcgagactctgactctacaaaaaaaaaaacagaaaaaattagccaggcctggtggtgtgtgcctgtggtcccagctactgaagaggctgaggtgggaggatcgcttgagcctgggaggtcgaggctgcagtgatctgtgattgcatcaccacactccagtctgggtgacagagcgagaccctgtctcgggggacaaaaaaagtggtttgactgtgtttacttgtagataatgaaataatatttctttaaaaatgctctcttgctttgtcattttagtaattcaggctgaactattctctttcattctgctttgttgacattatcctgttctatacaatcccatatgctgtaattttttattttttatttttttgcttacccagtctcgagtgcagtggcacaatcacagctcactgcagccttgacctcctgggctcaagcagtcctctcacctcagcctcctgagtagctgggactacaggagcataccacgcccagctaactttttatttactttttgtagagacgaggtcttgccatgttgcccaggctggttttgaactcctgggctcaagcgatcctcctgccttagccttccaaagtgctgggattataggcatgagccactatgcccagcgtttttctttctttttaagatttttatttgtattttaactgatggtaagaaaacatataaatttatggtgtacaacatgatgtgttttttgcttttattatttttagttg

SEQ ID NO: 44557 - DNA, 1034 bp, Homo sapiens
ctatattgggtagccactgaatctggcagcttttcagttcaactggagtctagacaaatatttaccaagcccatagtaagtagtagtataacaatagaccttgcagagcagagcagaattgtcttactgggttgccatatcatcacaggacctcatttatcaaatagtagtttttaattaacaaaaatgtagcctgtttgatagaatggtcagtgttattgatagcatcatagcgataaatcattcaactggaagagaccataggagagcagatagagggagacgtgctgccctctgcttgagcatttcatcttctcggcttccatggtattatggagtcatcactttggttaacattttcaatttcattttaaaatttattttctgagcaaaatcgcctctctctagaaattacatagccaattagagaaattttgaaaaacacattaaaaaatgtgtaaagaataaagtgaacatcacctaaaattcaaccaaccaaagaagatcactgtaaacatttcagcatatttccttccattcttttttccccatgaattctctattaacctttggatgacactgcatacatccttttgtagcctctcttcacttgagcttttttctttctttcttttttcttgagacagagtctcgctctgtcgcccaggctggactgcagtggcatgatctcagctcactacaacatctgcctcccaggtgcaagcgactcttttgcctcagcctcctgagtagctggtactacaggtacccgccaccggagacacctggttgtctcatattatcctaaatcttctttacttggtaaactggcagacaggttacaaaagacagatttgtttgaattgaaatgcgacccatttaaaaatgcccatactcacagaaagttggaggttggggctgtcattaatttccatctccatatgaattatgtggatttttttctttaccaactgctgacttgttgaactatgaaaatgggatatttagagctatgacatttcagaaacaggaaa

SEQ ID NO: 44558 - DNA, 1030 bp, Homo sapiens
tttcctcttttatcacgtcctggatcatttccttgtggttttgataccatttttgctttgtgttgactatgctgtttttctgttgtttgtttctgacagccaagtgtgtggttgtcatacatctcctccgttaattaagttagtgtataccactggtttaaaatcaatttcttatttactttggaattttggtgggaggaagtcgatgccttaaaatgagtactttgttcaaaaactaactggtacagccggctgtcctacttcgtttgttttatatgccccttgagcctttttggttcttcataaaacacagtgtattaatgccttgagttcttgcctagatctggtataaagtttaaccttctgaatacttcccagaaatcctgaacctgcaactgttctattttgttcgttgtagtttatattgactttactcattgacagccttcaggttcctctactccctcttccaattgtgttcagttccccgagaggaaaacaagatatacctgtagaatgtgtaccctatcaggctgggtaaaccagcagtgctgtggaaagtttccaaatctcagtggctttccgcatgtgacttctgcctcccaccagcagatcttgcccttcatctctctcctgcaccttttgcatcttgtctggttctgggaagtgtgcttgcctgggtcctgtttttcattcttccatctttgttttgggtttgccagtgccagaaggcatgcctgcaggcaggccagttgtgtggtagttccatgcccacatgtctgcatgactcagccaacattgatggagcactcactgccatgtgctgagcaccgtgctggatgttgggatactaagagaaatacggcagtcagtcacagccctctagcaactccgtctacaaggggaagttgttctgtacgtaagtgactatccagtggcatgtgaagtgctattgtagaggactgcggtggtgatacaaagagggcagtaactgttggtggatgtaggaccgcagaactgtgggggatgt

SEQ ID NO: 44559 - DNA, 1034 bp, Homo sapiens
gtttgagaccagcctggccaacatggtgaaaacccgccattactaaaaatacaaaaattagccaggtgtggtggcgggtgcctgcaatcctagctattcggggggctgaggcatgagaatcacttgaatctgggaggcggatgttacagtgagctgagattgtgccactttactccagcctgggtgacagagcgacactctatctcaaaaacaaaacaaaacaaaacaaaagcagtggttgacaatttaaggaagtagaaggaaggacctcatggctaatttaccaaaagtgaggaggttcacctgggcaggcaggaccaccctaagaagagttaggaagaagtaatgttgggagaaggaatcggagggactggtggaaggttgggagtgaagtccaaggtaatgggggtatctgtggtgatgttagggaacccaccgtgtgatttttgtcctctagcacttgacgttccagtgtgtctgggaaaggtgagccattggcccgagtcagggatggggaatcacagggcaggtgtgaagagccaaaggggattgaaggagctggcaagaggtggtctggatgaggtaggaggtgaaccgtggctggagcagtgggaaagggactgggaggagggggtgcagctgagatcccagggcaggtgttgagagagaggtgggggagggcgggagggattggggtgtcattgtgccgagtttcagaagtgggtcatctctagttttggtcttgggtaatgaacagggtagggtgtagtggtgggaatgagttgttgaagtggaacatggaggaaggctttggggtgaataacttctgtggatgttgaacttgcctggagagaggaagaaaggactgtgagccaggcaccagcccctcagtgagtgaaagaaagttcccagaggactgtgaatgggaggggaggaagtccgtcttgaatgtttctgctgtaccatcgctgccaccactgccctcattcaagctcccatcctcttttctccaggtgactgtcacgacctctact

SEQ ID NO: 44560 - DNA, 1097 bp, Homo sapiens
aacttacctagaagtgtttggaggaaatgggaaatgtagtaaccatcttaagtgacatatgataggtgaaattaaaacccatcagtttcttacaggtctatcctatgttagaattcaaacaaatatttatcctaaaaaatgaaatgttaggctaggcactgtggctcattcctgtaatcccagcactttgggaggccgaggtgagtgaatcacctgaggtcaggagtttgagaccagcctgaccaacatggtgaaacccccccatctctaataaaaatacaaagttagctgggcgtggtggcacatgcctgtagtcctagctactcgagaggctgaggcatgagagttgattgatcacaagaaggggaggctgcagtgagctgagatcctgccactgcactccagcctcagtgacagaggaaaactctgtctcaaaaaagaaaaaaataaagcactcagaaatgtaggaatagaaatgaactttcttaacacaataaagggaattttaaaaaaagaaaatatagattccagattatataagtgtgatataaaaaaactgatgcaacaaaaacaaaaatggacaaatgagatagcatcaaactaaaaagcttctccacagtaaaggaaacaattaacaaagtgaacagacaaacccacagagtgggagaaaatatttgcaagccatacatctgatatgggattaatatccaaaatatgtaaggaacttaaacaattcaacagcaagagaacaaataactcaattttaaaatgtgcaagctgttcccataagtggcctgcggtgatctgtgaaaatggttcactattcacttgacccagaaaactccatgaaatcatgcaaataaagaggttcaaatcttcatgttcactctaaggacacccatgaaactgcccaggccatcaagagtacgcctatatgaaaagccagcaaatgtctgaaagatgtcactgtatggaaacaatgtgtaccattccaacgttacgagggtggagttggtaggagtgcccagaccaaacagtggggctgggcacgcagtttgtgaccccaaaagaattgaattcttgctgtacacacttaa

SEQ ID NO: 44561 - DNA, 1368 bp, Homo sapiens
tgtctggtgtagggaagcttgaaaggatggtgtcttgttatttggctgccccagctctcctcttttaccatccaacttggatttaaagatgagattaattcctgaatattcattcactcctttgctttgagccttctactaatggcagtgaaggatacaagtcttttactgtgagcaattctcatcccaaaggattttctctattcgtatacatacaggtcagtcttgaatatttgccgtgtaaatagcctctgcaaaataacaagaagtcattttctagggctgatcttgattctcactgcttttatttttttttctgtccaaagggatgattcagacaaacatagcttccaaaactcaaaaggatgtcatcagaagaccaacatttgtgcctcagtggtatgtgcagcagatgaagagagggccagagtaagtgttctgaagcagctgtttgctgacagatgcttgagatgttcatgccctgggctcatcaagtcactcgtgaatctggagcctgttttcctgaaaagttcctgtttgcattactctgcagtttccatttgcattatcgatgagtaagatgcttgttaagcagcatggtgtgactgaaaggatactagatcggaaaatgaattttctttctgaaagggaagtctgagcgagtctcctaaatactctgggctttagcttctccagctgtgaagagctggattgatgcagtacacctaaggaataatcatatatactgggtttttgttttgctgtggattcttttttttttttttttttttagagggggtctcactttgttgcccaggctggtcttgaactcctgagctcaagtgatcctcctacctcagtctcccaaagtgctgggattacaggcatgagccaccgtgcctggctttgctgtggattcttttgggtgtcttttgttttcctacacgatttatagaggatgaggggcggagaaagagatagaaaaaagggatgagctagctgttagagcaagggttttggtgagagataatattgattgaagggattttaaaggaaatgttgctgtgggggattcattgtaactctccttgtgaactgctcagtaaactctacattgttcatgaacatttttggagttggatattttttttctgggtgatgtgtgattacataaaacaggcttcaagagaagtataaaatcaaggtgttctaactaggttcttttggttgtaagaattcaagctatttgatgaaaaaggaagttactaaaaagataaataactatgaagtcatatggaaaacaactcgcaagaatctaagaatggaaactgagctatatcagggcctcaggaaggggagttgcttcct

SEQ ID NO: 44562 - DNA, 1050 bp, Homo sapiens
tacaatgagtctgtactcactgtcaccattttctagccagtggaaatgtagagaggaagtaaatggaaggcaagcagtttccttttttaaaagatgtgacatggacattgtatatggcacatctgctcaatcacattgaccagagattattacatgtcacacttagctgaaagggagtctgggaaatgtagtttctgtctgggtaaccatgtgtctacctaaaacttgggagcttctattactagaagaaagacggggacaatggtggataattaacagtttcatccactcaggaatatagacttaaggatcagagaatactgtttaagcctggtatctggctggataaaatccatgaatagagaagttagcctcacagttaaagagaggcatagaaacataatgggtgagtggaagggatggagaaaatgtaagtaaagttgaaattcagttgcactttttttttcttttttcttttttttttttttttttttttttgagacaggatcttgctctgtcacccgggctgtagtgcaatgacatgatcagggctcactgcagccttgacctcctgggctgaagttatcctcctgcctaagccccccaagtatctgggactacaggcatgcaccaccatagctggctaacttttttttaaattttagtagggacagggtctcactatgttgaccaggctggtctcgaactcctgagctcaagtgatcctcctgcctcagcctctcaaagtactgggattacaggtgcgagccactgcacccagctcagatgcacttttatacacaatgagatagctgttggggacttctggaggcttaaatactttttgactctgaactcagtgtgtttccctaagaacttaaaaatcttataacatgagaagtgattttgagttggccactgagctcaggagagatatgaatgcaagacacattataaagacttgttgggggttgggggaggaaaatatgtcccatttgctctccagccccgtgcattcttctatctagatacttgggtttgtttctctct

SEQ ID NO: 44563 - DNA, 1020 bp, Homo sapiens
aaaaaaaaaaaatctggaggtgatgtttttcagtgagcacagattactgtgtaaccaggaataacatttattttctaaatgttccacaaataatatatgctgtgaatgggggaatatgccagggcaccagtagcctgtgagggcaagaggagctcagtagggatcagtttctgctcagcgcctgggctgggccctgaggtgttggcgttgagatgggaatgggctgtgcaaagaaagcaccccaggctcctgtaccaaacgactcagactggttgtatctgcaaattgaaggcctgtaggaatgtaggtgggaccaaaggtggtctctagagtgcctagagttagggccaggagccaagcagggcggggatcatattgttgcagggacatagttcatcccattacttacttatggaatcccatcgcttaagactgatgaacatagcattttgtcctgagacagacagattgagcacagcaaatgccaacaggaagccagtaaaacgggcctcacatcagacaggttcacctcagatgagcttagaactccttgttgccaatggggggaggtgggtttaactatccaaattggaaacagaacctgagataaagaatttaacaaaaaaatgcatacagcatcaatcatttgaaacataagtaaatctgcagaaaacatatcatagtctgggtaaaccccttccctgcaaaaagaccaacgctaagattcaagatctaggcagttaaaatctggaatataatgattgtggaactctggaattttcctgagttctggacaaggaccggaagctcctgcaggtgctgaggcagggtggggaggacaggacacacacgcagaagcagcgcgcacaaaccccaggaacgcaccagggccagggtgcccagaggtacaggatagacgtggctcatcttcccagaagcctgttttgctcaggattagtgaaaagtaggaagttgtaagtgctcaccattagtttaataacaactttgctttgcagagtg

SEQ ID NO: 44564 - DNA, 1032 bp, Homo sapiens
ctgtgcctgcagcagctccacctcagcaagcctaagaaacgccacatcctgctgggactggggtttcccagccttctgacactctttttgtcttaaattatggtaaaatatacataatataaaattaccattttaagtggactactagcaacgttaaatacgttcacattattgtataggtgtcaccaccatttccagaattttttcatcatcccaaacacaagttctgtccccattaacaactccccatttctccctccacccggtgcctagcaaccacccttctactctgtctccatgaatctgcctatcctagatatttcatgtaagtagaatcatatatttgtccttttgtgtctggtctatctcacttagcataatgtctttagggttcattcatgttatggcatacatcagaattccattccttttcatggctgaataatattccattgtatggagagatcacatttggctgatccatttatctgttgatggacatttgagttgcttccaccttttggctgttgtgcaaatgctgctgtgaacattggtgtgcaaaagatctgttcaaatccctgctttcagttcttccgggagtgtacccacaagggaactgccggatcctacagcaattttaagattaaccctttggggtcccatcattctgttccccacagcagctgtaccgtttcacattcccaccagcaatgcacaaggtgtcctgtttctccacccagcactcatcctggcttccatttccaggattttcaagtctggggagctctgggttccaagccctcggtcttctgtgcctctgggttggccagactaaactccacagcccttccctccacccaccttttcccctacaccctcagctcacagccttttgcctctgccacaccccctcgcaatggctcagtgattctgctgtccacctctgctccgagggctgctggggaagaccaccaagccctgaaaacgaataacctccagcttcgccaggtcttctgttccagcagcaacttc

SEQ ID NO: 44565 - DNA, 1066 bp, Homo sapiens
ggtctgttgtgttccttcaccgtacggtttctgtaataaaaagtgttaatccatgttaatctgtgtgaaaattattgcgtgcaacagtattttctcgtgtacctctttttcctatgtgaattgtccctcttttttatttataaatgtctacttttgtttttttaaagacaaaccaatgtgttgtagacctatatgtaacctattccttagtctcatattataggtatgttataagaatggatattttacttggctttagaatgttttacaagaaaactaattcttaactgatcaagtccttgctactaaaatgcttgtgtttttcatcatgacgtcgtgtgcttctaaattaatcattttcgttgtagaaaaatggagtgaatttatattagtcttggaaactaataatagcattgtaaatttatgagatgattttaacagaaaaaatatagaagaatatagttattttaattgtaatattactaactgtagggtgagaaaaaggggggggggtcccattgtggtgaactatgttatagcttgttactcatagtttctttttgatcattttttcggtctccgaggtgaaatgacttattaattaaaatttgtaaactcacatatgcatattgtatatgtgtagaaatgtaatcacactttgtcttggaattacattaaactgtttgaaatcactgtacacctgcctggcatgcttatttatcctggaaccagacctgtcataaaagcgaagaggttattgttacaagtaacatatttggggtttgtttgtttatttagatggagttttgctcttgttgcccaggctggagggcaatggcacgatcctggctcactgcaaactccgcctcccaggttcaagtgattctcttgcctcagcctcccgagtagctgggattacaggcatgcaccaccacgcccggctaattttgtatttttagtagagatggggtttctccattttttggtcaggctggtctcgaactcctgacctcagatgatccacctgcctcggcctcccaaagtgctgggattacaggcatgagcc

SEQ ID NO: 44566 - DNA, 1618 bp, Homo sapiens
tagttggaggttgtgtctcccccaaggcaagtgtgttgtcccagactcttctgtagtccagcatgcgcacttccctctggattattactttccacgtgaactcaagagaacatgaaaggcaatccagatggagggaaaaggtgtgagtccgcagcccgggccagatgcgaaggtctcatgcgtgtcgtctaaacacttgtcttcaaggccttctctctgacatcttggaagagtcattgagaacagataacctggttcattgatttttgtcttgatttgaatatttaacttattaatagatccactgatttccaggcaccaggcagtagaagagactgggattcaggtgaccatgaaggcacagctgctacttctgggccgggggtgatattttgatcagcgttttgtaggggaggaccatatacccctattcccatggtcgctggctgggttttccatatatctgctgtcatttattcgttttccccttaaaagcaaaatcaatgtaaaaggctatgtttacgttttactcattgtccagcttagactcaaagtctagttcggtgggagggggaccttagcatcctctcagagatggtcagggctgagcaggaggaggcagagacagaggggcagctcagcctggtccattgagacccactctaaacagacatcatatttggaacaagaagatgcttcgagacaggaatgggccccactgtcatgcagaaacagactgggggaatggcagtttccctgagtcttggtttcttttatgttttctcttgtgccaccaccaaactgcagaggacctgctgtgacctaaagggcattcctttagcagataagaccttgaaaactgcaaaacacctgggaccagggagcttttaaaaaatacaaaaaaataccacatttgctttttccctgtgaactgtattgacagcgtgttcttaggacagtcttttggtggaaatgttactgtaaaatagttttcatctcacccctcctaatcatactcccactttcctgtttgtgtggtggtgttgctgttttttcctttacatgaattaaccaaatgaattttgtgtcattgtttttggggcttatatttttaaaacatagaaattgccttttgttcatttgaaaagtaagtatgttgtatctgaaaaagggctctgcctctgctctccctcgcttccttgtaaccaatctccaaacgaatctctcctggcaccgcccccttccttatatagggtcactgtccccggggccacctctgcctccaccctgctgtcaccactgccctgggccaaggcacccaggactcccagaaagcgcgagagccagcaagaaggccccactcagccttgagactggtggtcacacctccctgtcagagtcgcctgctgggctgaaggggcaatggattgtcattgttgaaattgtttggctcaggttataaggaggaacttgggaagtagaaagtgacttgaccatgtgcatccttggtagcttcctgtaactaacaaatggaacagagagcacacccccgccccgccccaccccaagcagatgttcccgtcagcgctgccctgagtcagtcggtcccccgtttctg

SEQ ID NO: 44567 - DNA, 1035 bp, Homo sapiens
gccccacagctgggtcagcctggaaaatccatctattagggactttttggcagccagatggcagcaatagcccattaggtctcatcccgagttccaagtcttggctgcaaatgagcctcagttcgccttactggagagcacccccagattcctgggcacagttcatttccagccctttctagatctgatcttttagggggaaagacagcttaaaatgttcttttcattttaaagaaaattattctgtctgcttaagttggaggctacttactctttcacctgacattttctttccttttattcttccagatcaggaatgaaatttccatgctgctcataaagataatattattgtactaattatttttattaccattgtaattatgatcattatgttgatattttagtcagggttttaaatgcacatttattccaagtatctttgtgttttctctttaatatttaaacttattctctctgtgagtatataagtagactggagggacatccagatgtccagttttgtcaggcaaaaaaaaaaaggaaagacttaggaagtaggaaaattgtttctgtcatctctatcccaacaagagacgtcaagaaagatccaccacagaacaaaagtttaaagaagaatcaaagccttgattgggcttctgacaacatggtcaccatcaaggttgtcattttctagatcccagaggcctgggatgcgacgtcaggtggcatctcatgggctcggggaatgtcgagtcactgactgtccagcccttagccagcttctctcccacatcctcagagctctcctgtgcttctgaaatctgttaactaaatctttggcttgcctctggtatttaagcaagaaaattccctcccagaggtgaccccatccgcttccccacaatccatccttttgccatcggcgcacctggggcgtggcttaggttcttcaatgcagggacatttgccccctcccagaagctgctgggcacagtgaggtggcgtaagagtgactggcaggtggtaccttcc

SEQ ID NO: 44568 - DNA, 1120 bp, Homo sapiens
cgtctggagatggggacggcgggagttgagttgtggcagtagttgagttgtaatttgtgggcggaggcccagagagactccccacccttcacccctgccccactctgtccccagttccgccatttgtgaggccagaggtttccggactgttggcctcgccaggcagccgtctcccgccccaggcggcatcccccagtccctcccgcctccacgagagcctggagctctcagcctcgcccggggctccactctctcctccggctccctgggctgttttgctctaacgatcttgccagatccctccctctgtagacaaccaccaacctctgtttgctgttgaattctctcctcacattacccaggtctgctcaagacatgattttggttttggtttctgagggttctagtgggcagaaggttggagggacacttatgagggtggccgggggtctgacgctgcactttggaaaaactcacacagttgaatttccaaagaaatctgccctttgccctctttgcacctttgatacattctggaagttttctcaggctttggacacttctggggatggaggtgtggagaagtggggagttccctctcttcatagtaaataactctgaaatatgtgaatgtgaatggcaggagaatctggccaaggatggggccgaaaagggtggttctaattgtttgcttctgatgttgagtctttagctgaccccacaggcaggtttccaaggtgcaaagagatctttcccgagtcagcggccccatcctcatcctccctccctttacttcctcactgtgcagtctccctcaaggatctactgtgaaaggtgtgtttgtagtgatatccaacctaactcagtaacgaagtcgttacttagctcttagctgtgaaataactctggaaacttccccaccccaaccataaattcttacttataaagaaacaggtccccaaactggaaacagcttagtccaggcctcagcgagaaggaaggacaccatgactgctccatgctgggcacagccgggcagtcttgccaagtgcctgctggaggctgtgccggcaagaggcctgcagcaaggagattcccttccctcgggccattatcaata

SEQ ID NO: 44569 - DNA, 1044 bp, Homo sapiens
ccctgtagtaccccgcgtagatctccgagatatcatgagttttaattttctttgatttcaatcttctggtttattcataaactagaaaaaaggaaacttttccagcaagtccttaccctgatagaattctctttgcctaaataagttttttgcaaacctgttttcacatgttaactaaggtaacacaacttgtaagaagaagaagaatagcagctattatggaatacttaccatgtgttgtgtatcattgaaagcacttgtattttctcacttagttctcaaaacaagcctatgatataggtacaattattacctaccttttactgatgaggccactgaatcactgagaggttaaatagctgcccaccgccctgtcaccagcacatgccgaagttagacagctgactccaaggttcgtgttctcacccacgaacacggttaggcaccctgaaccagagaggacagtgtccagccactggaagaattatccagcctagatgtcaggagcgctgggcgttggggagcagggccagcgcctcctggggactgcaccccccagatcccccagccttctgtagctcagcagacaggctctgcttctgtccctcctgcctggctgctgtgggctctggaatttgcccacttccctgctgcctctagggtggtggagatccatcatgggaagagcctggcctggctgtgtggcctcaaacaagatacccgggaggtggctgtgactctatgaggctccgtaaataccagctgcttctctcatccaattagctggaaactgaccagttgcctaggcaatttttatttcttaaaaataaatgatcaatatataaaaatagatgcacattcattttaaagtcttaaataagcacacaataaacaataaatttcacatccatcatgccagcagcctctcactgagtttgaagacaaacagaagtagttcccaaagtaaccacactaacttaaatatctctgaacaaacatgccggccaagagctatccaaagccagtgcctccctattgtatgaa

SEQ ID NO: 44570 - DNA, 1007 bp, Homo sapiens
cattgttccagccactgagggaattcaaaagaacattaacacttcctaacaccagaagcatatggctcccaggcttcaaagtttgtttttcacgtaaagtataatttcttctttaataaaatggtattgctaagatatcctgcctacgtcacagagtggaataaaataacccattgaagacactgtgtaaattccgctttttcttcatttaaaaattttttttataaaattaaggtgaaactttttttttttttttgagacagtgtctcgctctgtcacccaggctggagtgcagtggcacaatctcggctcatgcaacctctgcctcccaggcttaagtgatcctgccacctcagcctcccgagtagctgggcccataggtgcaccccaccatgcccagctaattttttgtatttctggtagaaagggggttttgccatgttgcccaggctggtctcaaactcttgagctcaagccgtctgccctcctcggtctcccagagtgctgggattacaggtgtgagccaccatacctggcctgtaaattctaaaatagaatattgttcaggataaacacctaggtgctcagggactttaaaagttggagggaatatttatctccagtccctagaacttaaaaacttggagccggtgtacttggcattcttcccacttgaaagtcctctttctcactcacagccagttatgtttcacctactccttatgagtagaagaaacccacccgttgagcacacatggccaggctcatcccttcagcagctgcacagctagtgagataaccaactgcagtcagcgtttaattggggaggaagcttgatcttatagaggagctctacttttagaacacctctaaggcaccttgttgtcccggttgcctttcagaaatacgcatgctcacggaagccattataatcccatcatgcagcagcctgcactattgaccggtcatgtgacccttccagcagcacagcccttaaatgtgggtgt

SEQ ID NO: 44571 - DNA, 1048 bp, Homo sapiens
ctgagattgttggaagaaacttgaatgttcgtcagtaagggattggttaaataagttgatgcacacgtaaaatggaacaccatgtagccattaaaagaacatggtagacctttgtgtcttgacatgcagagatttctaagatatattaagtgaaaaaaatcctgccctatccagtatcgtgttgtgtctttttgtcagttgctttttatttttctctctgcttgtcacttaatccatgccaatatgttagcctgttgagatgggctctctcctagatatttttaaacattcccttcaaaggacaaaaataagttaatttataaaactcttatggtggctataaaaaagcacaattaagcatttaaactgaaggcttcgtttttctacagttaaatttctaggcaccaggcagaggcattccaaatcctattatttgacataaatgtattcaaaaagttgacattgttctttttctctaaatactgaaaatcttttaaaggattttacttatgaacacttagagatggagtctttgaatccactcctcatgttaatttcattttctttgcccttttcctccccacctcccagcagcatcacataaaactttcagggaaacaggcctctgtggggcacccagaggatgtgtgcatggcaggtggaaatggtaatcattctgcttatgttagtgatatgggagtgatctttgtggatcaccttgcaacaaaagcttttttggtactgcctaaaaggagctgtcaactccatcctcccaagccccatgccacagctagcatcttggccaccaacagaaattgtgaatgagtaggtaatagtggagagatgggaagcacagttcttgattgagacagtattgaatttatctgacttgtcaaatgtcaggatctaaaatctcctttgactagcagggttagagaaatcactgtagactccacccttccatgaagtgttttgtgttcttctagccaatcaaatcatatcacctgaacctctttattttttacttatttactttatttcttgggct

SEQ ID NO: 44572 - DNA, 1054 bp, Homo sapiens
acagcacacagtaggtgtcctgcctgatgcttcgtaccagggatcggcaaactttaaaggcccagacactaaatattttaggttttgcggccataaggtcttggtaacaactactcagctgtcactgtagctgaaagcagccacagatgcaatacataaacagatgagtgaggctgcattctaatgaaacatttatgaaagtgggcagggctgggcgtggtgtctcatgcctgtaatcctagcactttgggaggcccaggcaggtggatcacctgaggtcaggagttcgagaccagcctggccaatatggtgaaaccctgtctctactaaaaatacaaaaatcagctgggtgtggtggggcgcacctgtaatcccagctatttgggaggctgaagcaggagaattgcttgaacctgggaagcagaggttgcagtgagccgagatcgcgccattgcactccagcctgggcgacagagcgagactccatctcaaaaaaaaaaaaaggaaagaaaaaaagaaagaaagtgggcagtggctggactgggtccctggcctgcagttggcttcacactgaaaaggagggaagaggagagcacagagctggatgaacctgactctgggtatctgtgcaggaagagaggtgcccgaaacggtagtctctgtagcgcaaaactagtctcagggccaaagattgctcccagaaccttcccagagtggacccagtctagtttgggtttggatttgttcattcatttcttcagcgtgctgtgtgccggggtacagtggtgagcagagcagacggccctgcccactggagcttgcagtccgtaagagagagaatggtataaaacaagtgatgcccaaatcaccaggctgctatgaggacaagtatcaggtgtgatgagagcatacccacaggggagcctcattttggggcaaaccaggaagactcccaggaagtggcctgtgaaggatgaggaagaggatgggcatgagcaggcagggcattgcctgtatggacaggacactcccccatgggcaggaccatgcaccc

SEQ ID NO: 44573 - DNA, 1043 bp, Homo sapiens
gtattacatcaagctgcaaccacccagaagtttgggtgtcgtgtctgtccccccagctctccttttggagttggaaccctgttcccttgcagcagctctccaccttaatttcttcagcttataaccaggcaaaagtaccctgctgcagagtgcacagagatcttggggtccacggtgtttggcttggccattccaaggatggctccgtggaagccagcgcaatgggtgggccccttgtcaacctcccccatgttttgctcctagagcttcatctctgggtccctttttccttttgcttgtctgcctatcaccctaatcaaagacaaaactatttctctttgatctcctgtttgcctaggaagctgtgtgtctttttaagaatccaatcacaggttgacctgggattagctcacctcaatggccatctacatctccacttggaccttctggatccccctaggcatggtgtggattcatcctgtggggaggctgcccctgttttcccagcaggcttgcctgtggtcacagggcgtgttgtctctccatgcagctgccccgaggtgctttccagcccttgcctttctggctgtcttctgtgcagctctctcttacctctggctccaattcctctgaaatagcctcctcctcctccctgctcttcagatttctgccactgtttcttgggtcctgtgctgcttcactgtaatccctcgcctcccactcccggtcaccagctcaaacagcggctcagagctcaagacagcaatgcaagtctccttatttttgcagtggaaacataagatttaacaacccatctgaaatacagttttacattttgattgcttctgccccagccatactgaggttactttcaatctacatatatttgtgggaacggactttttctctgcagttcgagtacaccttataataccagtgattataaaataccatggactaatagagtgtcttgcttccaaggagtttaaactgttttataattctgccaaccataatttatcttcataagctgccgtagagac

SEQ ID NO: 44574 - DNA, 1043 bp, Homo sapiens
aacctcaggtcaaccccacccaatcggtcacatgctaacttcctctctggtgatctttgcacaaacatataactcacagcatggtgtctggttcttgctgacatcaactttgtaactgttttcagattattttttcttttctccacagtaactctcaggcttcttgaggtcagaaccatgcattcttgttttgctgccacctccccacctgcctgcccctcatgctgtgtcgagtccgcatgtgagaaataagatgagagtcactggcagcaaagtgagtgccgacatttaaatatggaagcaagtctggggccccagactccaagcgcctagtacctgtggccttgctcactgtttttcatatgctgtcctctggtcttgtttgtaaagtgacctgttgcacaacctgtcagtaccctgaaggtcagtgactgtgtccacacctctttgtgttctcggtggttagcataatatttttaacataacggactctttttaaatgtttggtgatgacacagtcactgagcaggatgtgctgtaagaagaaaacatactctccctcattctgtgaattagtcagaatatatcaggttaataacggtaagagcaagcttctgttggtctgatgcaccagcatctattggatcaagcaattaaacccatgtcagtcattttggtacaatagaactaaaattagacacagcataaatacaatcaagacgtgagcacgtttcccagcattagccttacgatgacaaaggcaaatgcagaagtgtgcgaacttccaggacaggtccggagatggctgttccagagaagagccagggtggatggcaggaagcggcagctgggatggaacctccagtccatatgtggcacctcttttacatcttcatcgtaagcgctaccaggagtttgaaatgcaaaagttttagaaatataaaccaggctttacttagtaatattcattaatgacctaaaccaagagagaatctcctacttaatgaagtgattaattagctctgggaattgaagtcgaaaac

SEQ ID NO: 44575 - DNA, 1155 bp, Homo sapiens
ctcatttcctatgcgcagaaaggtctccacaggcctgtgctttcaccaccaggccccgtgcggacagacgggtctactgctgcccctccacttgctctccactccctcgtcctgaccaggccatccactctgtgccccgctggccccagagccaatggcagggagaagtaagcccagggcaggagcctccaaggaagacaagaagcctctccttgtctccagaggagaaggatgggcaatggttgagtgaatctggagggttgggtgcccggtaccgacagcacatattctctgtagagagtgcctgggcctctgaaagccagctctggtggccgtcccgggtaccagccccattgggggctagctggtgctgtgctggctctgggaggctgctgtgccacttcgtatttaggttggtaaattcagcatgccaaaggctggctctttctagttcttggcctgaattcagggtgaacagcccctgacttggctgctagggcttttatgtagttcatctgaattgctgcatcatgaacacgtaccagtgttattaacattcactgaaagctagcatggcgacttgtaaaaagacttcgacaaactctgtttaaaaggcagcacatccttagagcgaaacttggtgaatcgagtaagctgaattggggattcttaagacccccttgtcatcttgccttctggtgcccatgtgacgcttcctggagccctccctgcccatccccttggactctgcgagtttttctttgctttcctgcctggtgctggtgcccctagtgctgaggagacaggtcgcaaaatcggggatcctagctcaggaagcctgcggcagcagtaaaagtttgcctgtgagggttggggagggctgactccttcacctggactcacagcgatcctctcctgcccccctctgtgggtgagatcaggccttttggacgcctctggtgggtgtggtaggctggtttgctggcggttcctgggccctcaggagccctcttttccccacttcgtgacaggcacagtcacatctggcccctgtgtccccacatccctctgaaggaccctccgtttagttgtgatagtaccctcttttcacccctgaaatcaccattgcctaaaattctgagcaagaaggcctct

SEQ ID NO: 44576 - DNA, 1054 bp, Homo sapiens
aactgaaaatagagccgagttccaactgggacatgactgggtacggctcccacagcaaagtgtatagccagagcaagaacatccccctgtcgcagccagccaccacaaccgtcagcacctccttgccggtcccaaacccaagcctaccttacgagcagaccatcgtcttcccaggaagcaccgggcacatcgtggtcacctcagcaagcagcacttctgtcaccgggcaagtcctcggcggaccacacaacctaatgcgtcgaagcactgtgagcctccttgatacctaccaaaaatgtggactcaagcgtaagagcgaggagatcgagaacacaagcagcgtgcagatcatcgaggagcatccacccatgattcagaataatgcaagcggggccactgtcgccactgccaccacgtctactgccacctccaaaaacagcggctccaacagcgagggcgactatcagctggtgcagcatgaggtgctgtgctccatgaccaacacctacgaggtcttagagttcttgggccgagggacgtttgggcaagtggtcaagtgctggaaacggggcaccaatgagatcgtagccatcaagatcctgaagaaccacccatcctatgcccgacaaggtcagattgaagtgagcatcctggcccggttgagcacggagagtgccgatgactataacttcgtccgggcctacgaatgcttccagcacaagaaccacacgtgcttggtcttcgagatgttggagcagaacctctatgactttctgaagcaaaacaagtttagccccttgcccctcaaatacattcgcccagttctccagcaggtagccacagccctgatgaaactcaaaagcctaggtcttatccacgctgacctcaaaccagaaaacatcatgctggtggatccatctagacaaccatacagagtcaaggtcatcgactttggttcagccagccacgtctccaaggctgtgtgctccacctacttgcagtccagatattacaggtaagaccgtccacaaggagacaggagctgctgaatgcc

SEQ ID NO: 44577 - DNA, 1052 bp, Homo sapiens
acagactgtttatcgtgaagccatccatttctgtctccactgccatcccttgtctgggggttggcaaactttttctgtaaaggtccacgtggtgcatatttgaggctttgcaggccatctggtctctgccgccgttactgaagttgtagagtgaaagctgcacagacaatacatacacgagtcacgtggtgggaggggcgtgtgggggggggggcgtgttccggcaaaatcttactcctaaaagcagacttgggtttgaatttggtgtccagtctgtagtttggatccctgtagctagcctaagccaccataatgtctcatctggactggcttcctgacttgtccctccatgcctgttcttgaccttccccagccagtttcccatagtgatattaagtgcacattagattctgtcactgccgtacttcagatgtccaactgctttccatcacacttggaagaaaatcctgaatcctgaacagcatggatcacagcacagtcccggcttgcttctctgatctccctggacaccagtcttcccctctgtttgccccatcctggcctctttcagttctgtgactgttcccagctgtttcctgcttcagcaccctttcccacacaacagtcttcccttcctggaatgttctcctgcctggcagcctggttaattcatgctcactctgtggtcacacctcaaatgtcacttcctccaggaggctttccctgatcctccagtgtaaatcatattcccctcttctcatctcagagcaccctcttcttttccttcatgacacttaacaattttcatgaacccacttatttgggcatatttgttttccacctgccttccccattaggctgcaagctccatgaagatagaaacccatctgtggttgtctctgtgttctctaccccgttaccatcacgcacattatagacacttctgaaaacttggcaaatcagtgaatgattgtacaacatgcttttgttcatacagatttttgtatgaaactgcaatcgaggaaattgccacccttttagagtgtatagta

SEQ ID NO: 44578 - DNA, 1031 bp, Homo sapiens
ctgtgccattttcccaggaaagttatttgtgggagttctttgaggcttaggatgaaggtatatgtttcatgccagcagaaacagaaggtagatctatttagaaagaacagtgtattctgaaacttaataggaatgatttgtaattatagtttcacagtccttgttcctgaacccttgatccatatgtcttttgaactgcttttatttaatttttagaaagataatgtgatgcttgtatcacgtgacactctgtattttagcacattaatatttctgcagtaaacaatatgcatagtcagtttaagaaggatagatacagatcacagtggcctcttactaacttcagtcaaatttctactgccaaatgacttttgatgtcacttttatgtttttcaaaaaatgttttatttcatattttctcctgcttttcctgagctgtataaaaagttttaaaatgtcaattatacctcatcgaggccttaaaaaaatgtctttagagctcttagaatttcagaattgtggataaaggtttatggctgtgtgtgtgctcctttaaccatgtactccatcccttttatcccttttgtgtggtagttgggacacaggcgagaaatagatctctcaggactgtttggagtttggctacataggcaaagataaaagtgctctcatgttgtgaatatcgtgctaacattcttccttgccttctacctgctcttgaaatatgatgtgctgagactcaagactggtgatattggctagcagagaccacctatggtatatttgctttgtgtaagaataaaatgtctacgtgtttttgtttacatttttgtagcaataccaagtttccaggcccgaagagcatcccagactattgggactcctctgccctgccagacccaggctttcaggtaggggacgcatgcgcctggggctggacaggaaggtgttctgtagaagtgggtgtgtgtgaacagactgtgccattcctcaacactgaagaagctgtaaggctggggctaattggggca

SEQ ID NO: 44579 - DNA, 1031 bp, Homo sapiens
cagagacgctcctcacttcccagacggggtggcggctgggcagaggctgcaatctcggcactttgggaggccaaggcaggcggctgggaggtggaggttgtagcgagccgagatcacgccactgcactccagcctgggcaacattgagcactgagtgaacgagactccgtctgcaatcccggcacctcgggaggccaaggctggcagatcactcgcggttaggagctggagaccagcccggccaacacagcgaaaccccgtctccaccaaaaaaatacgaaaaccaatcaggcgtggtggcgcgcgcctgcaatcccaggcactcggcaggctgaggcaggagaatcaagcagggaggttgcagtgagccgagatggcggcagtacagtccagcttccgcttggcatcagagggagaccgtggaaaggggaggggaagggggaggggcgttttctatattttcaatactatgttattgagtacaaattctaagtggttacatacgtctttctggtgaattgaatccttggtcattatgaaataaccctttattagtgacagttacaccccctttcttttggaagcttggtatctttttcccatccttttatttgaaacctttctatattttttaatatggtatgtgtgcatatttaacttattttaaaatctggccagatacagtggctcatgcctataatcccagcactttggaaggccagggctggaggactgcttgaagccaggagtttgagaccagcctgggcaacatactgagaccccatctctacacaaaaaaattaaatccaatgaaatggcctttcttttaactggagtatttagtaaattacattgaatgtaattctgtttctttattgtctttttgaattgtttcatatttcactttttatatttttattaatttggaagttatatagttttatatttggtggctactcaaaatctgaagttaatccctttaactttagaacattttaactatttttttttctcaccccatttccattcct

SEQ ID NO: 44580 - DNA, 1638 bp, Homo sapiens
ccattggttgacaattctcattgattattgtttcactgaggaaatctaactaagtattgtaacttcacattcagctaaatttgaatatttgacaagtgagaggatggggctaaggattaacctgaacctatttgcgtagatagcatctgcaaaacaaatagctagtgtaatacatgtgcaggaaaaaaatgctcaaactgcttgatagctaactttttggtactgcagagcacttcagttaaatactatgagcagaaccgtgttgcctcctgatgataaagaagtctataaggcaagactttcttaacctatatgaagttgcattaaagtaagaaaatggcatttatttgttttctatttcagattggttaagtattgccatattttgaattctaccttatcccatagtccattgtcaaactaattatgcttcctagtgtagcagtgcagtggtctgtaaacaccacttcatgggtttatacgaaaactgtaaattaatcacaatttggaactcaggccttcggacactggtactaatgtgaactgatttttgcttcccaatcactaattttttcttaaaggagaatattagaagacagtatcaggagggcagaaattatcctggtcaacttgcatgctaattccccaatgagtgatgtgtttttttttgaaatgatagccttagaatattttaggtgttacaaaagtgaaagggaaaagtcagtctcctcattttatgcctgagaaaactgaaatccagacagtgttgcacaatttctacatgccaatataatgtatttttttgtcattatgagctgtacaccaagatatcattagtatacagaaagctttgtaagccatatacacttttatattcagtgtaaattgtgcagctctgtcttactgctttccttttcctctgaaaaatgtcccttttttcctgaaaggtccagttgaacttgagaaattaagagtatagggaaaatatttgtctagactacatagttttatagttggtttaattatcataccaagttaaaatattttttgattagagcatctgctgatgtaactcttaagtccaataataagactgtaatttttctctgcaggtggtgacaaagtgatagatgtcattgatgtggcgaggcaggcagacagcaaaatgacacttcacaattatgttaaatacttcatgaatcctaacagaccaaaagtgttaaatgtgatcagccttgaattttcagatacaaagtgagtagttctgggtattttggtttagcattctgagtgttagctaaatgtagtgtaatgatgtatttattttaggaagaaacatagttgtgacttctaaagttgtccagtggtagcaatgttataaattttgcattgggacactcagagatacttagaaataagatgtattttaaacttttggctgggcacagtggcttatgccttaatcccagcattttgggaggccaaggcgagtggatcgcttgaggccaggagttcaaaaccagcctggccaacatggcgtaaccccctctctactaaaaatacaaaaatcagctgggcatggtggcacatgcctgtaatcccagctactcagagaggctgaggcacgagatctctcga

SEQ ID NO: 44581 - DNA, 1056 bp, Homo sapiens
taatcggaaaatctgaaatgctccagtgagctcttcaattctcaaaacattttggattttggagcattttagagtttgtatttttggattagggatactcaacttgtacatattttactataaactggttggttttttctttttgcatttagaccagtttatatatatttctaattatatgtattgaattgtgtatattacattatctataaattttagtttaggatagcaaaaggagatttacaaaacatttgtcattaaaagaatgagaagtgataggttaagaaccactgatatagataatccagtatatgaattaacccatcactaccgtattttttttaaactgaccttaccaataaaaatgacatttttattcttatgtttttccttagtgccgatgaaataattataaagatgcatggcagccagctgacacaaagatatctggagaaacatggatttgatgtccctattatggtcccaaaattagatgatctaggactcaggctcccttcacctacattttctgtgatggatgtggaacgttatgtaggtacgaactttatttctttaagtacctgggaaaacatggtaaaagtaaaaatgatagtcctggtaatattaatggttaaatgaagaaatgtcaatttagttttctgctcagaaaagtgaggctcagtatcatctatattgaaaactagtttttctcagcagacctacaactgtcagaaaaacagaatgacaatttacttgattttatttactcagcttcatcctgctgctttcttttgtgccattaagttctctgatacttgcttagggaaaatcattactgagggatagatatagataccaggaagaagatattggaaagttggattggttgtaggcatctgtagaatacaggtgcaaaattcccagatcccagtacaccagctgcacagttagtcctctggagtctgctttgtgacctgctgctgcttagaggaaaggtggtaaaaagagcagatcattttcaaatctgtttttataataatgacttggtgaatattg

SEQ ID NO: 44582 - DNA, 1987 bp, Homo sapiens
atatagttagcttcttgaatatttcagaaatgtaaagcacctcctccttctttagaacattctaataaaaattattaccttcatgaaataatgatttgtgcttatttgtaaggatgcattcaccatttgcattgccagttactctgtgtccaagatgtcaggcagtaaagagcaaaataacaagcatttatgtacttgaagcaaataatgtatcaccatacaaatcatattgatgtgcatatttcacatattcattgtgggacagatttaattagaagcttgtcaacaggatttttagctttttggggagtatgttttgtaccactgagtgcacatcttggctcttcaacctaattttcctctcatgttgtttgatcagttcctttttatactgtctttctcccttcacccttattatcatagattcttttaatcagctggttggaaataactctggaagccctgggacagttggaagcatgagccctgctgttggaggtaggaaaagtgaaccataagtgaaccttaagagatgattgtgaaccaaaggaatttggttcagagtatgcatttacttcagaccccttaagcatatagtatgccactaaacagctttaatgtgtcaattatataatcttcacaaaagtggaaacataccatattcaatttatgaagaaaccatttaattttgtgaaaacagttttatgtcagcaagaaaataatagaagttgggtttttctgagccacaaatttaatcatacattaccagtttgatttttcactggaaataattcatacaaattataaatttttaccttagctgatatctggtaataaagtgatctgtctcagggttaaaacattgtataaaacgattaacaatttaaaagtgaaaatgcctattggcatcctagtatttttagtaagaatgtcaacttattaagccaattaataagccttatttttactggctagcaacgtaagatttttggacaacaaaaccattgttctacagtttcattctaagcattttatgtatattaattttcttaaaaatcctttgagggggttactgttactatttcccatctttacagatgagaccaaaaaacaaaaaacaaaacaaaacaaaacaaaaaacaggtaaagtaagttacccgaagtcatacagcttactaagcggggtagctgggattctaacacaggcagactgactcgagagagagagatttttctcaactccaccatctaaaattaattaaaaatagaaaacaaattctctcttttttttttttttcttgaagcatagccatttgagtgcctggtgtgtgctctgaagagaccttattgaagaaaaaaatactaagcccaatcataaaagcctagttcctatttgggctcaaacctcgtagctaatacgctgttgattagggcagtgttggctgactggaacctggtagagacatgataataatattaatagctgctgtttatgacttagtatgtttactgtgccattgcttactataggcttagtcccatgctttacatactgacatacattgtcctgcttaatctcaggggaacgcctgctcctcaggcagattgagaaacctgctccaagtcaaaacaagtagagctggaaatcaaatcaagtctttctaattctacaatctatgcatcccattgaagccagttgatatgtgtttatccggtgtcatggaggtagtagactgaggataccttgcctctcctatagctgtctctagacctaaactgaccccagaatcaagataggaaaggaaacatgcagagcaagctgtcagctatcctctgtattcccggagttaatttacctcaaaggccactccccatcctcctttgttagtgtgggactttaggggtacacaatgactcagtcctctgattatgtcacatgtcacagtgaagaaaatgagtagttgggtgctttggatgagaaggtgaa

SEQ ID NO: 44583 - DNA, 1250 bp, Homo sapiens
tgtccaaatccattattatgttcaaaacatgacactctaacagaagtaaactgttgctgcatatttaatactattttctctttacagacaagttgtacaattgtgtttatctcgccattaatagtgagggaaatattctctctcgtgctaaggagacaggctcacatattgagggagtgaccggtgcccgcgagacagaaagaacaatgtcagccacatcaggaccgctggggcttcgagtctgccctaatttgggtttgtctaggagctccagcctgatcttggattgtcaggcgtctctcaacactgccagccacctgagatgctgaccagcagtgaaggctgcactagttttctacactacaggaattactgttgatgatttttgctgttgtttcatgaatgtgccgagtgacttctgactctgccagcatctttgacctctgactctgcccgcgtctttgtttggcctattgaggtttagcgttttaaccttaactgttgttttggacttgaactttctctagccttgaaaatggagtgaacaggaggcaaagccacgcgtggtttgtgttggtggtatgttccacaaatggaagagatcattgcattttgctttggtaatgagtttacagagagtgggtcatctttgaagcatcaaatcctgatcaaatgctcaagctggaccgagctgcaagcctgccttggacaaagaatccctctgttcactgtggtgggaaagatcacactacatgcctgttgattggctcagtcactctgtgtctgatctaaacgtcattcagccctagaagcatgaattgcttcaaattattgtcaacttgttctcttccattttcattcaaattaactttgactcctggaagtattgagtcttcctttcaaggaccataaggtacatcagttatcttgaacattctgacgtgtaaaggaccataaggtacatcatttatcttgaacattccgacgtgtaactcacagccgaagcactccatcccagatttgttgtctgggaacttaggatcctctaggaagctaatctgcttagtctatttttagaggattgatctctggcacaagcagcttcctggagttacctcagcagaagactagaattagagaaaagggaaagaccttttcttctagtaagtgtcaagtacagatgctctttgacttatgatggggttatgtcccagtaaacccattggaagtcaaatgcatttaatacccct

SEQ ID NO: 44584 - DNA, 1069 bp, Homo sapiens
aataggaacagagtttctatttggatgatgaaaaagtttggaaatagatggtagtgttggttgtacagcattatgaatgtaactgataccactggattgtacacttaaaaatggttaaaatgggccgggcgcagtacgcctgtaatcccagcactttgggaggccgaggtggacggatcacaaggtcaggagattgagaccatcctggctaatgtggtgaaaacccatctctactaaaaatacaaaaaattggccgggtgaggtggcaggcgcctgtagtcccagctgctcgggaggctgaggcaggagaatgatgtgaacctgggaggcagagcttgcagtgagccgagattgcgccactgcactccagcctgagcgacagagcgagactccatctcaaaaaaaaaaaaaaagttaaaatggcaaattttatgtaagctatatcttaccataataagagaaaaaaagaaaatgggttaaataagtgcaattagatccttttcagtaattgaaagtaaaataaaagaatatgctgtaggatgcaaaggtagtactgcaacactgtgagcaaacagcctaattggaaaatgagtggcatacttaaagacaaactatttttgaggcatcaattatagtacctttcattggaagaaagaatgattaaatgggagtggcttgcggatgttcatcttcctctctaaatagcaaagtgaataaaaataaaccttctgaactgacaacttctattatacggtttttccatttggactctgcatgcttaaatgggccattaatcacagcaggcacatgtatgtggaagagctttgtaaactgcaaaacatacaaatcctgttcccttcttattttctaaaatagccatgtttaatctactttttagctgcttccttttatgaattataaagaattatattgtaatttttttttcctccctttcagtatttagtgtctctgatccgggacaagctaggatggatgtgggttttctactttttcattctcatggtaagtgtgtgcccctttaaaaaaaaaaaagtcatttttctgttaa

SEQ ID NO: 44585 - DNA, 1028 bp, Homo sapiens
taccactacagattgtagagtactaattttgtagaaagatggatctgagagtcatctgtatggataaaaatagttgaacctgtggaagtgaatgaaacatttaatagggaaagagaatgttggccgagtctcagggaatgcccagtggtcaaagaaagaggaaggcagcagagtaacctgtagtcaagggaactgcgtttgagaaggcgttagtaaggtcatggatgtagagaggtcaggagaaagagaactgaaggatttgtcttttaggctcttagttttgacatctaggaggtcattaataaccttgaagattattgttacttgcttgatgggggtgaattgctgatgtctgattgctagtggttaatgagagataagtattgaggtaaagtaagccatgttaatactttgactacctagccgtattttaatagtctatatgcacttgttaatgtctgtctctcccactgtaacataagcttcctgagcgcagcattttgttgtatgttcttctgtcaccttagtacctagaacagtgcctggcacacagtagacattacttgtggaatgaatgactgatatgcttggcatatttgattataagactaaagggcaaaaaaccccaaagaaacaaaaaccttagcaaagccttgaaaaatacgcttacctgatcatgccctggagcgggaatcgaaaaatgctcccagccatcagttcagacgtcttcacctatggggtagagagtggctgcattgggcatccttttctgacattatattattttaagttatccttccttacgaatgttttcttcactaactaaatgggtgcattataatgagtatttcagagaatttgcttttattcagattgcctcacctgccagtatccagatccctcactgtgaacttgggtcctagactgaccttcatggttggggaagcacgtctggagtaaatcactgttagctttactcattcctcttccatgttgagttttgaatgatttcccattgcctaaggggt

SEQ ID NO: 44586 - DNA, 1053 bp, Homo sapiens
ttctggtgacggcgtctgtgcagtttgctggtgggatcgttatcttctttggactcctggtgtcaccagaagaaattggtgaggagaagccgccccttctattccgaatgtcttactattatggccgaaaggaaatctgaggccaagaaatcgaatctcttttttcctaggaaaactctgagctccttttagtgagtgaaaggagaacagtactgccgtttgagtcctgtcgacattgtagccagcccctggcacagctggacgtgtttgaggggagtgatgcacgtcttttatagatacaggaaaatcttcgcatttgcaaattatttttataattgagacactggcaaggaatgaacatagatgtatttctgatttcacttcttgaaacatttcttttcatccataaaaatgatgcacaaaaaagatacttaacctgtagttaaatacagattacatacaaatgaaaccacagaagcaaacagatgtacaattcttctatcttttgagtatttttagatagactgtgtgactttaattgaccttagttgacctcggtctctggaccttcgttgctgcttctgtaaaatggaaataaaaataacatcacctcataagtagggatgtatgcagagcccttcacacgtggtaggcactccataaacagtggctgtcgctgttattttaggtctctcgggtattgaggcagaagaaaactttgaagaagactcacacaggccattaattaatggtggtgaaaatgaagacgaatatgagccgaattattcaatccaagatgatagttctgttgcccaagtcaaggcgataagcttctaccaggcatgttgccttcctggagtcataccggtaaggaccgcttacatcttaccacagccagggaggtatgagagcccgtgacatctcctctgcctgagataaagcttccttaagtattgagcctctgttggatactttattttaggaatatacgtgctgaggaatgttgtctagtgcccctcagcttatctgatctctaatgcaggggttgacaaa

SEQ ID NO: 44587 - DNA, 1104 bp, Homo sapiens
ctcggcctcccaaagtgctgggattataggtatgagccaccgtgcccagcttgactgtacctcttattcctctgttgcttgaatcatgtgaatatattacctactcaaaaacctaaattattaaaggtaagttcgctcttttaaaaggtagatacatttttaaacagctcaccaagaattttggtgtagttagggtcagtgagaagtccttcattcccttcattcatggccacctttattctaggcttcttagcctcacacctggattgtatagttggttcagatgaaaatttcagttcaccttctgagctgctctcagatttgacttctggaaacactaattttgtcactcatcggtttaaaaattcagtgtccacatcaggttccattctctgttaaataaaaattcagctgtgcagcctgggggttgagagtctttaatctagctgtcacctttccaaatcagttttcttcctgattatcccctagcagaagccctctccttgagtcgtgcagtaagctttctatctccttccaccctgtgtctttgcttaccgtgtgcctggaaagatgggcaattgactttgattttccattcttccctaagacattgtcttactgcttcaacctcttcagctctttccttcatctggattcccgtatatgtttctcagtaggattgggccttctcatctattcagcttcttggtgctttataatattgtttcatgtatttaatcccctcaactgtatgtaatatctttgagggcagatactgtcttttatgagaggctatgtgatacaaagacctagatttttggagctagtctaatttcacaatcataacagtaccacttagtatccaggggagcttcattctcctctctgagcctcatacaatcaccaggaagaattaaatgagaaaacacgagtagaacactttgcatggcgcccggcccagtagaagctctgggtgctcccttgcttcccggtctcccttcccacctctcccccacccccaccttcccccacacacctttaatgaatgtgcttgtgatgactgtccccagatatgtaaggaccacctttcacccctctcctcca

SEQ ID NO: 44588 - DNA, 1911 bp, Homo sapiens
agaaataatgattatttatttatttatttgagatgggatctcaccctgtcgcccagactggagtgcagtggtgtgatcacggttcactgcagcctcgaactcccgggatcaaatgatctacccgcctcagcctcttgagtagctgggaccacaaccatgagccaccatgcctggcttattattattttttattattattatttgtagagatgaagtcttcttatgttgcctaggctggtcttgaactcctgggctcaagcaatcctcccacctcagcctcccaaagtgctgggactataggcgtgagccaccgtgcttggctcatcctttttttttttttaaagagaagaattcttggccaggcacggtggctcatgcctgtaatcccagcactttgggaggccgaggtgggtggatcacctgaggtcaggagttcgagaccaacctggccaacatggtgaaaccccgtctctcctaaaaatacaaaaatcagctgggcgtgatggcacgtgcctgtgatcccagctactcgggaggctgaggcaggagaattggcttgaatccaggaggctgagtttgcagtgagctgagatcacagcactgcactccagcctgggcaacagagcgagactctgtctcaaaaaaaaaaaaaaaaagaagaagaagaattctaaaattgttcagtgtcatgcttataatcctggcaatttgggaagccaagtggtgggaggatcgcttgagcccaggagtttgagaccatcctgggcaacatagcaagactctgtcgctgcaaaaaatacagaaatttttgtagcctgagtagcctaagtagctaagatgacaggtgcactgggcgtggtagagtgcccctgtaatcccagctactcaggctgggctgggaggctggcttgagcccaggaggtgaagcctagtgagctatgatcataactgcactctagcttgagtgacagagcgagatcctgtctcaaaaaataaaaagaaataaaattgagagagcctctctgaatctattttggttcaggtggctgcccaccaaataaaataaaataaaattgaataaaagaaatgggcctatacctgtgattttattgaatgctgtttctctttgctattcattcatctgtattctctctattttgtagttattcgttgctccatgcttcacgaaaaacatttagcaatgtcaaagtcagtatctctgagcagtggaccccaagtgcttttaacacgtcagttgagctgcctgtggaggtaagcagaacagagtgctgggatggatcgaagtaggagaccgtgcccacccctagattgttcttaagctcttttttgcatcttttacttgcctagactctgaaatggctcactgtttcctatcacataagagccaaactattctaatttcaaagcctgctctgactcagtcccattttacctctccagccggcttgtttctaactgttgagaaatcacaccttttgacaaggctgttttttcactggctttcgttagtgctgtgctcgtttctgtctttgagattttgcacattatcttttatgtgctcttttgcccttttccacctatttaaagtttgcctttctctttgtgtcaagataaaatatcacttttttttttttttttaaacagagtatcattctgttgcccaggctggagtggaacgatctctcagaaaacatctctgcaacctccaccttctgggctcaagcgatcctcccacctcagccccctgagtagctgggactacagtcgcgcaccaccatgcccagctaatctttttttttttttgtagagatggggtttcaccacgttgcccaggctggtcttgaactcctgagctcaagcaatccacccgccttggcctcccaaagggtt

SEQ ID NO: 44589 - DNA, 1033 bp, Homo sapiens
ctactatattccctatttatttgtaagtattatgtgaacacagttaattagatttataaccggctcccactttttttcacttgacattttctcatgtcattaaaaagtcttcgtgacaaatgattataaatgattcagccattcagacataccataatttatttaattattcccctattgttgtatatttggattggttctgcagactcataactggagacattaagtttagctgcttactttatgcgtaattgttcttggatatcagagcatgggtgcagcttttagagagtacagtcaaatgaaaaggcattggggccaggcacagtgccttatgcctgtaatcccagcacttttggaggtcaaggtgggcagatcactttgagctcaggagttcgagaccagcctgggcaacatgatgaaaccatgtttccacaaaaaatataaacattagccaggcatggcggctcatgcttatagtcccagctacttgggaggctgaagctggagaatcgcttgagcctgggaagcggaggttgcagtgagtcgagatcgtgccactgtatgccagcctgggtgacagagtgagaccctgtctcaaaaattaaaaaaaaagccactggaagtagtggaaggagatggcaaggggtggcctgacctctttctctgtttctttgacacaaattttttcattttggggagatactggggggcagacaggggttaggcagcttgcccagagtcttgcagtgggacctcacctcaaggcaatagaagatcatttagaacattgtatttaatcattttgttttgttttgcttagagtcaggggtctcactttgttgcccagggttgactgcagtggcgtgatcatagctcactgtaacctcgaactcctggactcaagggatcttcctgtctcagcctctccagtagctggggtactacaggtgtgagccattgtgcccagctccttctttcttttaatattaaaaatctcctccaacactttgtgaaaaatacttttgtttat

SEQ ID NO: 44590 - DNA, 1047 bp, Homo sapiens
tgagccactgcgcccggcctcagactctgtcaaaaaaaaaaaaacaaaaaaaaaaacagaaattgagattcagagaagctacttttaagtggagggtcttagattccatacctggcttgtctcttgaatgacaccattcttctattagtgtttgatttcgagtctctgcctaagaaggtgacccggaaacaatacttttataaaagttaagtcaacagtatcttgctgctttctagctgtcaggatcaactgccttgttcattgtttaaggttctgatttgtgctctgttcatcagtgttaatgtcatgtcactgcagtgaccattaacttgattataaatcctttggtagaagagggaaagatttttatcttgaaaactagttgtctttggaacatgtccaaaaacagggaggaagaatgtggttttggaaaccctggaataaaatgagagatatttacagataaatgccaagtattttatgcctgtggtaatgagataatttaagaagagataaaaattacaggaagacggatgaattaatgaataaaaaggatttatgaggttcaagtaaatggcttcgtatgagataatgtgggataaaaaagatacttgtggctgggtgcagtggctcatgcccataatcctagggctttgggaggctgaggcaggaggatctatctcttaaggccaggaatttaagaccagactggttaacatagcaagaccctgtttctacaaaaactaagaaaattagccaggtgtgatggtgcccacctgtagtcccagcaactttggaggctgaggcaggaggatcgcttaaacctaggaaggagattgaggctgcagtgaactatgatcacgccactgcactccagcctgggtaacagagtgagaccctgtctctgaaaaaaaaaaaaagatagttgtatgagtgtgagcattgagacgctaaactgcaacatatacaatactgtaaaaatggtgaactcaactatacatttaataatttcccacattcttctttacactttgaaaacacataatc

SEQ ID NO: 44591 - DNA, 1066 bp, Homo sapiens
aggcaggagagtggcgtgagccaagatctcgccactgcactctagcctgggcgaaagagcaagactccaactcaaaaaatgctatcggaaaatgtttaaacatctaggaatcatttctgagtgggcttatactgtggtcatgataacaactggggatccactgagtagtctggtctgtttctgtaagcttgtagcccagcagctaactcccaggggagttaagtccaccctcaggtgtaccagtcaggctatgctggggacatgcagagggatggggaagagcctgagaatgggttgggagtgctggagctaggaggtggagagagccttgagcaattctggaaagtaggaagaagcatcgtttgcatatctgaatctgcaacagggagagggggatagcaaggtccagggagtggcagttggtcacttctgggatggagagaagtgtatgtttagagcaactcttttgtatcttggaaaaggcagtggaagcttctgtactagtccgagtagtctgtaatgtggattgctaccctcaatggctgcattgagagcgagttctcttctttccccaagtgttaattgcctgttgcaaaagaagctgaggtgtaaacattgatgggtggaacgtctcaccttctcatttgcacaaaactacaatttcagcctcttccctgccactgtacacaataagtgatttcacatcatgccagtgatttgggggagagaaggggcttgatattaataaaggtagttgataaaggaggagaaagaggcttgatattgataaaggtagatattgaaatggtagtcatagtactggcaacagatttccaaccctgctttgtggcttcgtggttcaattgcaaggcccagctgacttacctaggctgaaatgtgagaagtgtcattgccagatgaaagtttaagatcccatacgtgatcctctttccaggcaattggtaaattttgcaaagtggctgttctaccagcctgggtcaccatgctggtacacttagttaacccatgagggacatggaatatgagcaacccataaacctttggg

SEQ ID NO: 44592 - DNA, 1112 bp, Homo sapiens
gtttttacaagcatgcgtaccctgatggccgtagagaggagccacagagacagaaagtgggaacatcaagcagataccgggtaactctcactgtttttttaaaggaggggaaattccaaggtatcagttgagtcctgcacatattggggtaggggaaggagaaggttaacgctcaggtctgggagcgaaagtgtagagtattaaaggaggaaacaaacctcagaaaactgggagggataggaaaggaagaaaaaatgtgtgttaaagctctagcctaaacgatttccatgaagtaaccagaggggaggaagtggtaaatggaaaccctaactaagaagtctggttcgtcatgccctctggtgtgctggacgttttgccttataaacaacaggatagaagatactgctcgacagtgccatccctatcatggccttgttttttacaggcccaacgaaggaaccacttctgggaactcattgaggaaagagagaacagcaacccctttgacaacgatgaagaagaggttgtcacctttgagctgggcgagatgttgcttatgcttttggctgcaggtggggacgacgaactaacagactctgaagatgagtgggacttgtttcatgatgagctggaagatttttatgacttggatctatagcaaccttgcgtggcgtgtgaactggtctgctgacctcagacagcagctgtcccctgtggtggtgtggcagtgcctgtgttctctcctaggcaggcctctcaactccaggtgctgtcctaagaatttttacccagggcctgtcttctcaacccctcacctttccctgaggagtgtgttgttttccctgttgaaaaaagttacaaaaataaatcttaaagttagttttttgtaacacgaatttaactgtcagacagttagtgtaggtgtgttgcgtcatctgttttcaaccagattgcatttatggacttttcacacactcattttgaggaccccaggttcaaaagtaaaagcagtggccctgctttggggtccaagaataggagtgatgggtgaagggacctaagctggccaatagccctctgccccagacatgggatgtggatccttgaggttt

SEQ ID NO: 44593 - DNA, 1030 bp, Homo sapiens
gagtgctaagcaatttgagagcaagatcataaagtgagactcctccccagtcttcatttgtgctttctcttttggggaagaatttagtaacttgtgccaactttcaaccagatggaccgcatttaaatgcatgcattttatcttgaaactgggatattctaatggggatttcttctttgtatttcagctagcttctaggttagttggtctatctacttttatttgaatgaggaaaccctgtgtatcagttagaatcttcgtgctttttctgaggagattgtgtttaatggattattagccagtttaggctcagtgaacaaactgatctagctctgaatgtatgtttcctgacgttttacatttccactttcctattccattcattaagctagccaacaatccaccatcctttaaagattgttctcataactgaacaaaaaccacataatctaaacagagcaaagctacaagaaataaatttatttaaacgaaagaaaaaggagtctgtgtgaaatgtcttcttttgtttttgttttttacctaagttatatttttcaaaaaaaaaaaaaaagaactggctagcccttgagttggatttataaaggaggttgccttgcttgaaagaaatggtcagttgtgtgacagtatgtggaaccctttcaggaaatgcccacgtgcctttcagttaagtctttaagtctggaggcgacacaccagggtgtgtccttgaagagtgggcctgtaaaaggggaatttgcattgcagcctgttcattgtttcccaggtcctgcccagaatgccggatcacatctaactttgtcattccaagtgagtactgggtggaggagaaagaagagaagcagaaactcattctgaaatacaaggaggcaatgaggtatgagcactgcagccttttctcaagcgaagagcccaacagagcttgggttcactttgaaaagaatggtgctgcattatacactcctacctccttcctacccttctttgacttcccaggacagtttattttgtc

SEQ ID NO: 44594 - DNA, 1073 bp, Homo sapiens
gttgctactcattttgccctttgctaatttgtcattgcattattgctgaaaaagggggaaaatgacacaatgacattattctcaaactctccaccaggcatgtcttttttttttttttttttttttttgtgagacagagtctcagtctgtcgccaggttggagtgctgtggcatgatctcaactcactgcaacctccgactccctggttcaagcaattctcctgcctcaacctccggagtagctgggattacaggcatgtgccaccacacccagctaatttttgcatttttagtagagttagggtttcaccatgttggccaggctggtctcaaactcctgacctcaggtgatccacctgcctcggcctcccaaagtgctgggattacaggcgtgagccaccgcacctggcctctccaccaggcatgtcttttgcagtcccaatataaaaggcagagtcatgagaacttcacactgcaatggtgaatggacgaatctttgtagtggtatagtctctgcaggtattgaggctaattgtaagggagctgtgttccttgaactgggttctagtcttttgagagttactgccaactgtgactggggcaggaggagttgaatattgatgagagtgaagaatccaacctcccaagcagagggatgagaatagactgtgagatagaatcagaaagctatagataattagcagttggtccttatttcagaagaagtgctcatctgaatggactgtgtagatggagtgaatgaaaaaaatgaaggttaaattgaagaaatctgtgctaagcctctgcatttttttttttttttttttgagacagaatttcgctcttgttgcccaggctggagtgcaatggcatgatctcggctcaccgcaacctccacctcccgggttcaagtgattgtcctgcctcagcctcccaagtagctgggattacaggcatgtgccaccatgcccagctaattttgtatttttagtagaggcggggtttctccgtgttggtcaggctggtcttgaactcctggcttcaggtgatccgcccgcctcagcctcccagag

SEQ ID NO: 44595 - DNA, 1049 bp, Homo sapiens
gctggaggaggaggatggaagtcagcgcgtggcatccttgatttctaacccagctggatgatgttttaaatggtcgctaggtgccaggctagccaagctttttttttttttaaacagggtcttgctctgtctcccaggccggagtgcagtggtgcaatctcaactcactgcaacctccgcctcctgggccaagtgattctcctgcctccgcctccggagtagttgcgaccacaggcacatgccaccacacccagctaatttttgtattttttgtagaggcagggttttgctatgttgcccaggctggtcttgaactcctggactcaagccatctgcctgcctcagcctaccaaagtgctaggattataggcgtgagccaccacacctggcctgtagccaagcttttttaatccatagaggaaaataatcctgggggaaatggattcaaaacaatttactaaaaattaactcaataatacagctgctttttttttttaaatcttgaagtagggataaattataaacagtaaatgtagcacttaaaaccagcttttaaaatattcattcacggggccaggcatggtggctcatgcctgtaatcccaggactttgggaggccgaggtgggcagatcacttgaggtcaggagtttgagaccagcctggctaacatggggaaactctgtctctactaaaaacacaaaaattagccaggcatggtggcacacacctgcaattccagctcctcgggaggctgaggcaggagaatcacatgaatccaggaagtggaggttgcaatgagccgaaatcctgccactgcattctagcctgggcacagagcaagactccatctcaaaaaacaaaatggtccagcaaggtggctcacgcctgtaatcccagcactttgggaggctgaggcaggcggatgacaaggtcaagagatcgagaccttcctggccaacatggtgcaaccccatctctactaaaaatacaaaatttagctgggcatggtggcacgcacttgtagtcccagctacttgagaggctgagg

SEQ ID NO: 44596 - DNA, 1029 bp, Homo sapiens
cagcactttgggaggccgaggcaggcggatcatttgaggtcaggagttcgagaccagcctgaccaacatggtgaaaccccgtctctactaaaaatacaaaaaaattggccgggcgtggtggcgcatgcctgtagttccagctactagggaggctgaggcaggagaatgccttgaacctgggaggcagaggttaccgtgagctgagatcgcgccactgcactccagcctgggtgacagagcaagactccacctcaaaaaaaaaaaaaaaaaaaaagaaagaaattttaggccaaaggggatttcccgtatcttgaaagttagctaaataaaaatgagcacatttccaggcattgcacaacttctgagtacaaaacaccaggcacagataggaaacaaacagaagtagggtctcaggtcaggcagagcaagctgcgctggtctgagggcgacctccgccttactttcacagttggcaccatagccagtgcaactgaggactaacaggtcactgtgcaccctgacttctgctgcaaagggaaggggatcaggtcaccttctaattccaaaaccagcttttacagattataacagcacttgtatgttggagagtagtttagagcttacccacacttgcaaacaaatgaggctgtgtaagcagccctgcaggtgagttgaggacatggtactgttattactaattcattaagaattaatgtatgctggccaggcacagtggcttacacctgtaatcccagcactttgggaggccgaagctgtcagatcacttgaggtcaagttcgagacaagcctggccaacatggtgaaaccccatctctactaaaaatacaaaaattagttgggcatggtggtacacgcctgtagttccagctactcaggaggccaaggcaggaaaattgcttgaaccactccagcctggaggacaagagtgaaactctgtcttaaaaaaaaaaaagaattaatgtatgctgggcatggtggcttacagctgtaatcccagcagtttgggat

SEQ ID NO: 44597 - DNA, 1033 bp, Homo sapiens
tagacaaccttccaggatatcagaaggggaccagtgccctctgtttaccctccagctgactgatgcatctaatagggtggaaaaatgtcagagaagagagagcttcttaatccctctcaaaacaatcagacttgaagattccagcaccacagagagccaagagagcctcttattccaggctcttctttcccttgaatataggacagccaagattcctggtctggtacagaactgagagagatgggtaaaggggctaagaggctgcttctgggtacacacacaaccccgaggttcaggctgccaatttgtcagagaaaacgagaaagagaatgctccttttgggaccaagaaagaagcagaacaaatgcaagagtcccacgaggcagatccacatgttccttccccacacccccgaaatctggcttctattcctatccatctgctgaaaccatatcttaggttactaatggttcgtctgtggccagttccctgttctcatgcttcttgatctcactaatgcacttgacacacccctgacccttccttcttgaaacacaagtcaaggtggatgtaaaatgggtgcagtgatgaatctgcgccacttgtcaaaatactgaaatacttctattctggttggtaaatagggtgtcccacactcccaggaccactaactctccccctgccaagatctggccattaaagtgttaacaataaggccattctgcttgttgggctcctgcacacctttgttataattttgttgtgtgtttttgtttttgttttttgagacggagtctcactctgttgcccaggctggagcgcagtggcatgatcctggctaactgcaacctccgcctcccaggtttaagtgtttctccttcctcagcctcccgagtagctgaaattacaggtgtgtgccaccatgcctggctaattttttgtattttattttattttatttttagtagaaacaggctttcaccgtgttggtcagtttggtctcgaactcctgacctcaaatgatccgcccgcc

SEQ ID NO: 44598 - DNA, 1044 bp, Homo sapiens
gcactccagcctgggcaacaaaagcaaaattccatctcaaaaaaaaaaaaaaagaaaaaaataatggcatgaagcccccaaattcattaagctaaaggagcatgatatcacaaaggtactttgtggtttaaagaattctttatgctgataattatgttcagtgatgtgcctatatttaattttttgttagattgaaggtgaaattaactagaaaataggcagtctggattttctttctctgtcaaacgtgtggtgtgaacaaatcagttgacctcttaattgtatctttagcaaaatgaggataactactgcctctctcttcctaatagtggcattataataatatgataggtgaaaatgagttgataattcagaggtggaagtattctacaaattgacattactactttacattcagtttctgagaaattttgttcattggaactgttttcagcttgatcagaaccatgatacataaaacccaactggaaaattctgcagacttgctatttaattgatagagctgaaccatattctgtatactatatatgttgtgttcttccatgggtttcagccgtttttgcttttaaattagcaatgctgttgctagacttgaaatatataactagttacttttcagtgaagctcaaatgaggcttttctgtgtctctaggttatttgagatgacttttttaaaattagctcttgtcctccctctacaggagaatttgcagccttcaagtagccaccatcatggcagcatctgctcttatttcttaagtcttgtgttcgtacaatttgttaacatcaaaacacagttctgttcctcaaatctttttttaaagatacaaaatttccaatgcataagctgatgtggaacagaatggaatttcccatccaacaaaagaggaaagaatgttttaggaaccagaattctctgctgccagtgtttcttcaacaaaaataccacgagcatacaagtctgcccagtcccaggaagaaagaggagagaccctgaattctgaccttttgatggtcaggcat

SEQ ID NO: 44599 - DNA, 1050 bp, Homo sapiens
cttgtaaaataatgacagtaaaaaaggcaaatgatatcttattgttattacaaaaatagttttgacctcgtggatcccctggtggtccacggaccacattttgtgaaccactgctttatttcttcttggtggtaaacagattcaagctttcctttaatactgggtctttttgaggggcatttctgcctgatgcagaaaaaggaaaaggcagtaaggcatttgtcagctcagcctgcctttacctaattcttgataactcactgcttttttttttttttttccatattggaaggataaagccttaagttaacaaatttcaaaaagaactgtaactaaggccaggtgtcgtggcttacaaatctcaacactttgggaggccaaggcaggcagatcagttgaggtcaggagttcgagaccagcctggccaacatggtgaaaaccgtctctactaaaaatacaaaaattagctgggcatagtggcaggagcctgtaatcccagccactcaggaggctgagacatgagaatcgcttgaacccaggaggtggagattgtaatgagctgagatgacaccactgcattccagccagggcaacagaatgagactctgtttaaaacaaaacaaaacaaaaatatctaaatacctcaactagcttacagagtttagctgtagtagatattataatataaatgcaatgttttctgatacttagggagctcctgatagcactggataaatatgccttgatgaatcagtacagtttcaagtgggaagtgctatttcccatagtaaccctgctaccataattactggagtgttcatgtatgaactcttaggcctttgaatgcccagtcctagctgagtaactcagacagaagtcaatgttacaggaattagattcactcatcctttatttttaaatctaaaaaatgttattcttctctaaagaatgaaagaagataaaattgatggttttaacaagtctgtcagggtgttgcctaagaaaagaaagggaaagctaagtggttggctgggtagatataagtttcat

SEQ ID NO: 44600 - DNA, 1057 bp, Homo sapiens
agatgacaaaggcaggagttttgttataatcacatgcagagtttagtagtccccaagaccagcttcaggtttgttaaaaggacttgctgaaaactcactgaaagctgctcaagactcactgacaactgttacattcacagttacagtttattacaatgaaagaatacagatcaaaattaacaagggaagagactcataggacagaattcagaagcgttcttgttggagcttcctgtcaccctctcccaatggagttgtggacagagcttccagtagcaatgtgtgacaacacacatggattattgccaaccagggaagctcacctgagccttggagtctagagtttttattggggttcagtcatatgattaaccacctgcggggctgaccttagtttccagctcctgcagaggtcaagctgatgccacatgacccagagccctctataaatcacattgttagcacagtctgtctggcatggcccatggcccccagataaacagacactctgatcaggcaggacatttcaaggacttagtgattacctcccaggagccaagagcaaaggctagctctctctttgggcaaggttaattctttaccacatactatatatcactcaatcatctgagctcattcctataatgtaccaaaatttacatagtaacttgtcattaaaaatgttttaaaagctcagctgacatttcaattaatatttttgaaagtaaagaattggaaaccaacagactcgttacccattcgttggagcccagtttgacaccagtatttagaaatgtctctttgttgccccagaggtttttacaccctgggacaatgtatactatagttaggttacatatgggtaaaaggtgtgcctttttttttttaattaaagttttagggtacatgtacacaatgtgcaggttagttacatatgtatacatgtgccatgctggtgtgctgcacccattaactcatcatttagcattaggtatatctcctaatgctatccctccccactccacccaccccacaacagtccccagagtgtgatgtt

SEQ ID NO: 44601 - DNA, 1051 bp, Homo sapiens
atcagacgtagatttggtcttttcacatagtcccatatttcttggaggctttgttcgtttctttttattcttttttctctaaacttcccttctcgcttcatttcattcatttcatcttccatcactgataccctttcttccagttgatcgcatcggctcctgaggcttctgcattcttcacatagttctcgagccttggctttcagccccatcagctcctttaagcacttctctacactggttattctagttatacattcgtctaaattttttattattttcattaaaaaaaacttttggggtccctcccttaatcctgcttctctcttcagttattacctcattcctcttcttccttcgacagtaaaacttctcaaaagacttgttggtattcactgtccagttgctctccttcctttttatcttggaccccactcaaaccaggcttttgcccctgctgctccagaaaacatcttttttttttttttttttctctctctcaaggaagagtctcactctgtccctcaggctggagtacaatggcatgatctcagctcactacaacctctgtctccagggttcaagtgattctcctgccttagtctcccaagtagctgggattacaggtgcacaccaccacacccagctaatttttgtatgtttagtagagacagggtttcactatgttggccaggctggtctggaactcctgacctcaagtggtctgcccatctcggcatcccaaagtgctggaattacaggcatgatccactgtgcctagccaggaaacagcgtcttaatatgatagttactggtggcctccatgttgctagatccagcagtaaaattctcagtccacagtttatttgacctgtcagaaacatctgatacagttgatcacacacttcttcatgaaacaggttcttaatcccttgtttaattgtgttcttagtttcttgctgctcagaatgtggtctgagtagcatctgtaccacctgggagccttttagaaatgctaagttttagataccaccccagacctgaatcaaag

SEQ ID NO: 44602 - DNA, 1095 bp, Homo sapiens
tcatgtcgtctgcaaacagggacaatttgacttcctcttttcctaattgaataccctttatttccttctcctgcctgattgccctggccagaacttccaacactatgttgaataggagtggtgagagagggcatccctgtcttgtgccagttttcaaagggaatgcttccagtttttgcccattcagtatgatattggctgtgggtttgtcatagatagctcttaatattttgagatacgtcccatcaatacctaatttattgagagtttttagcatgaagggttgttgaattttgtcaaaggccttttctgcatctattgagataatcatgtggtttttgtctttggttctgtttatatgctggattacatttattgatttgcgtatgttgaaccagccttgcatcccagggatgaagcccacttgatcatggtgaataagctttttgatgtgctgctggattcggtttgccagtactttattgaggatttttgcatcaatgttcatcaaggatatcggtctaaaattctcttttttggttgtgtctctgcctggctttggtatcaggatgattctggcctcataaaatgagttagggaggattccctctttttctattgattggaatagtttcagaaggaatggtaccagttcctccttgtatctctggtagaattcagctttgaatccgtctggtcctggactctttttggttggtaagctattgattactgccacaatttgagatcctgttattggtctattcagagattcaacttcttcctggtttagtcttgggagagtgtatgtgtcgaggaatttatccatttcttctagattttctagtttatttgcatagaggtgtttgtagtattctctgatggtagtttgtatttctgtgggattggtggtgatatcccctttatcatttttttattgcatctatttgattcttctctcttttcttctttattagtcttgctagtggtctatcaattttgttgatcctttcaaaaaaccagctcctgggccagccgccccgtccgggaaggaggtgggggggtcagccccccgcccagccagctgcctcgtcc

SEQ ID NO: 44603 - DNA, 1032 bp, Homo sapiens
agccagaggtgaaagttgtaagaaaatgattttgtctcaacacttggaaactttataataccagaaccacttaaataaagatatgagagtcagctacaactgagtgatgaacttcccatagttgaaggtatttaagcaacctctagttgcctgtcagatatatttaaaaagatatctctgcataaagtaggaggttagacttggcaattgccagtctcttctaaatgtatccttttgttgccttttttaaaaaaaaaaaagctttttctgacaacattttaccgacagactactttggttctcttttgtaagaattgctaaagtttgtcgacatttaatgtttactgtcacatttctttgtacaggaaaacacgacatgtgaatatcctactcttcatgggctattccacaaagccacaactggctattgttacccagtggtgtgagggctccagcttgtatcaccatctccatatcattgagaccaaatttgagatgatcaaacttatagatattgcacgacagactgcacagggcatggagtaagttccattcgttaaatgtcttgtaaattatttttgaagaccattgaggatgttttaaaggttttggctgctattcttttggattgcattttaaattactgtccaggaacataaggatgctaactaatggctggtaaataatatgatactaaaaaataaatgtctctgtctagtgcagccttcagaacatatatcaagtatttgataataaatacatgactgcaaacttaggcttagcactcagtgattgagctaagcaagagaggttcagaagatagaaacagcaaaaacctgctaaaaagttgttagcagttgtgcaagtaaacagaatggttgttagttactttttcaaatcagtttctctgagtgcccgtatttttggttgcaaaatggtcagttaataaagttaaagtgaaaaatctgcattctgaccctttttgaggatttcagagtgagttcctatctgttgaattttgctatgcaattt

SEQ ID NO: 44604 - DNA, 1023 bp, Homo sapiens
acagacacagagaaaaatgtgtagagaaacccaaaatttttttgtttttctgtagtgtttgtcatttacctctaataaaatgttaactagtttataacatgagtagaaaagatgactggacataaaaggaagtcttttttttttttttttttttttttgagacggagtctcgctctgtcgcccaggttggagtgcagtggcgcgatctcggctcactgcaagctccgcctcccgggttcacgccattctcctgcctcagcctcccgagtagctgggactacaggcgcctgctaccacgcccggctaattttttgtatttttagtagagacggggtttcaccgtgttagccaggatggtctcgatctcctgacctcgtgatccgcccgcctcggcctcccaaagtgctgggattacaggcgtgagccaccgcgcccggccaaaaggaagtcttaaaatgtattatctacagttttaaaatttcttccaggatcagacaagatcggacacgttcaggatggtatggccgtagactacagttttaaaatatcttaccaaggaaagatccttaatttttatacccgctttattaatttctaaccatcttgaaagctattgttgataaatttcctttgtggggctccactgatacttaaagattgaccttagaatcagataaaacttaactttgctaaatcattctgaagagggggtttgtcagacattatcaaccacttccttcaactttctggaagtgttttaaatgtacattttatagaacagacccataatggcaaagcccatttgtcctcttcttaggtcagtaaatacacaaatgagaaactgaattgagatttccaactgaattttcatctagtattcactctagcacataagacaacattgcttaagaaaatactttttgtaagcattaccctatataatgttttataagaggtgatatttgagactgtcttgaagtgttcttccaggaggtcctttacacttaccttccctgttgtctt

SEQ ID NO: 44605 - DNA, 1047 bp, Homo sapiens
agtgtcatctttgtatcttgccttttcatcctctctcgtaaccagtcacagggtatcaccttttcatgtgcatctcaaactggtttttacttattaccgctgccatttgggcccatattttttcacttgaattatatactacattaatctcctaaatagattttctgccattgatttctctctatctatttccattccttctgcaactgtcagaatttttttacacttctagcatcatctgttctcttgttccaaaacttttagtgacttactgttgattacaaggtaaagtgcaaactctttagcatttttattcatgttcaagcacttatgattccattaaaaagatttactaataactgtgggctatgcattgtgttaggcaattgggaattatttatgaattagcacatggcctttgccctcaaggaagtcacagtctaataggtgaatcaaacatttaaatagataattacaaaatatataatggtagtttagagaagggggtaataaactccatctggttggatctaggaacattgagcagagaagggacaacctttaagccagattatggtgaataagtaggagtacactacataagggggttaggaaagtcatttgttaaggaaatgaaaggcatagaagtgcctttacatggaatgtaattaatagttgatattgaagtttagggtccaggagaaggcttggggaatggtggaaggtgaaactaggcaggtaatatctacagtgaaaggctttgtgtattactctgaaatctaaagcagtgctagggaatctgaagaattttgattgggagaggaagtcatcagctctatattttagaaaaatctttgatggtagagtggaggatagatgaaatgggaaacacatagaggcaggactgtcaataatgtggtttttacagtatttcagacaagaaatgatatttaaactcaagtaatagcattggtgctgagaaagagtgtgttttggggagggagactatgaattagtgaattagtggtaagagtcttaggaatcatg

SEQ ID NO: 44606 - DNA, 1026 bp, Homo sapiens
actttttttttccctttccctttccctccttctctgtctctctcttcccatgtcatctttgctgcttcgtatgttagcttcattctataacagattttctcagtgtggtggagaatatggccattgagggctccagatttgtatcttctgcaaatctacagaactacagtagaaacaaggacttttctctgtcagtgtccatgtgtcaatttagggaagaactcaggtactgtttgggtcatatatatagccctggaccagttgctcttgccgggggtatgggaaactgattagccagcttctgtcatctgtagtgacataaaagtagtgacccttgatagcttttctagtaccatgtggatttctagagaagggaatattcccagaggaaacaggggcaccaaacaacaaatatcaagtatacatgttaagacaggtttttttcttcccgctatgtttagggccagtaagaggtctcttaaggacagtcagtgtgattgaagggttatacagttttcagctttgaacagtattggatcaaaattgattttgcttttaatattgacatctattattgctcagtgatggatatactgcgttggtgggtatattgtagcagatactgttacttcttctttttatatgtttaaagtatttcataattttaataaaatagaaaattaactttgctttgatttaagttggtgaataataacaaatatttgggttataatttccctttagtattaagttagctgtagaaatggtgttgtatctgacctagtaacccatttgactttttaaagatgaattactaaatttttttaatgatatgaaaaaatgtaatttgctccctttacctcttatcaatatatttatgataccataggtacctgcaaggtgtggagttacagtccgagacagtctaaagaaagcactgatgatgagaggtctaatcccagagtgctgtgctgtttacagaattcaggatgggtatggtttgtatgtgacgtgaaattttgttta

SEQ ID NO: 44607 - DNA, 1060 bp, Homo sapiens
ggatcacttgaggtcaggagttcgagaccagcctggccaacatggtgaaacctcatctctactaaaaatacaaaaaaaaaaattagccagccatggtggtgcacacctgtaatcccagttacttggagctgaggcaggagaattgcttgaccctgggaggcacaggttgcaatgagctgagatcccaccactgcactccagcctgggtgacagagcgagactctgtctcaaaaaaaaaaaaaaaaaaaaaaatgtaattcagacgctgggtgtagtggcttgcgcctgtaatcccaacactttgggaggccaaggcagaaggattgcttgagcccaggagttcaagaccagcctgggcaatgtaaccagaccctgtctctacaaaaaattagccaggtgtgctagcatgagtttgtagccccagctacttgggagactgaggcgggataatccaggattttgaggcttcagtaaggtatgattgtgctgctgcactccagcctgagcaactgagtgagtccctgtcttaaaaaaagactttctagatcctggagtatgtgcaataactaaaaagaataagcatatatgttccttgagatttttatttttaattttattttttgagagtgagtcttgcccagaatggagtgcagtggtataatcacagctaactgcagccttgacttctcaggctcaggtgatcctcccatctcaccctccaagtagctgagaccacaggcgtgtgccatgcctaatttttaaatttttttgtagaggtagggccttgctatgttgcccaggctggtctcaaactcttgggctcaagcaatcctccctctgtggcctcccatagtgctgggattataggcatgaaccactgcacctggccctgagatatatttgaataattgtaaaaatctgttaattggggttattggagggatggggatattccctgggacaagaaaaagggactgaccttttacttttatacttgatacccttatttcacataatgccaaggtgtctgttttttatgattgttcagggtgattatata

SEQ ID NO: 44608 - DNA, 1890 bp, Homo sapiens
aaaaatacaaaaagattagcggggcgtggtggtgggtgcctgtagtcccagctaatttggaggctgaggcaggatagtgctgtgaacccgggaggcggagcttgcagtgagccgagatcgcgccactgcactccagcctgggcaacagagcgagactccatctcaaaaaaaaaaaaaaaaggtttaactagcctcctcatatttatgagagaggccaagagaaatttacaggtatcactaaagcttataatttcccttttaaaaagaaataaaaacaactgagactcttcaaagatgtaaaatgataaatgaataactattaggcaattgactaggcttaccttaattatcctggctaggcttagattaaataagtaacttgttcttgtccgtcatactcccagtttaacaattcgtattcaatactcagaaaaactgtatatcgtgaacttaaaaggccttatgaatcatcagtaaatgggtttgtggtattaaactctttcaagaacgttattttgccattctctcttttatctgaatctgttaacccttttcttaactacctcttttcctctccttttcttctctcaattcttattaacattaacagttactatttgagcatttgccatgctgtgttccaagttctgtgctaaggactttacatacatcttctcagccaggataattcacattctaagtaaaattgtttgtggtagtgaatgacagttcctctatcaaaatacatgtttctgtttgtcctgaacactcaggaacaaagggcagtagaacctactagcagcaaatgaaatcaagtaccaagaatgagattatgttttttaaagtggacttagatttgtagtccaagatagcacgctaaacacttgcctttatatctttgttcctttccagaaatttcattgaaatgatagtaaagatatgtaaaaagaataataaaacaggataggattctgtcagagaactagaaatttttaagaattcctggaagatggaaaatatatgaatggttacgtaaataagccaaaatagaaaaccaaacaaaatactaggagctagattcttacatgaagggagccattcttagcaaaatcctgatgaagcagatagcatagtcagcagattacaaagaagtggatttgcctcttgggtagtcgtcagagtaattagtcgaaggtcttgctctggcaggaagacaaagtcatgtgtcttcataaatcgagctggtgatataaatatgaatattttgaaggtgtgtgttagttgtgagtcctgtggagaaccaaaacaaacctcaactaaaaacattgaaattctgaattcaaaaaaaattttttaaaggtcatggcctgatatttttagacatctgataatgggttgctgagtcctgagtccccagtatagccttacattgcacatgtccatagagatgtgaatgttgcctcctggagttgtacaacaaggggatcctgttagttcctcttctgtatatatggaacaaataatttgtagcatttattccatgaaaaagctctaaaagtcgttttctaaacaaaatttctgcctggagagttctatgtgactgctgtgtgtgtttaaatggtggaactgaacatcagatgtccctgaacctcagagaaatccagtggggtaaaaagtaaacgttaatctaccgaggagtaaaataatactctgcttccatctggaatataccagacttcttctcacgtctgtacccattagtaatctgtttggaaaacaaactgctttcccctactatactgtcaacacaacaaatttttgtgactagatgtgtgggggtgtttttccccaccaagcaatctccagttctctgtagataatcaactgggt

SEQ ID NO: 44609 - DNA, 1022 bp, Homo sapiens
aaaaaaaaaaaaaagatactttgataaagaaataatagttatttctcattttatttctcatttgagatgaactcaaagttggctaaagtgacacacagttttggacctataacttgcttacattttaaatattaggttggtgcaaaagtaattgtggtttttgccacccaatagaaaggattgtagacatttttttatttgacaactgtaaagcattgcaggaattatatgtggaattataggcttactttgttttattgtgtttcattttattgtactacacagataatgtggttttttttacaaattgaaggttggtggcagccttacatcaagcaagtctgttagcgccatttttccaacagcacatgctcactttgtgtctctgtgtcacattttagtaattcttgcaatatttcaaactttgtctgttttggtgttctgtgatcttgcatgttactattgtaattgttttggggtgccacaaaccacacccataataaggcagtgaacttaatcagtaaatattgtgtgtgatctaactgctccactgactggctgttcccccaactcttctccagcctccgcatgccctgagacacaacaatattgaagttaggccaattaataactctacaatggcctctaagtattcaagtgaaaccaagagtcacatgtctcttgaaatcaaaagctagaaatgattaagcttagtgaagaaggcatgtcaaaaagctatgccttttgtgccagacagctaggttgtgaatgtaaaggcaaaattttggaaggaaactacaagtgctactccagtgaatacacgaatgataagaaagcaaaacaggctcatgcctgtaatcccagcacttttaagaggccaaggtgggaggatcacttgaggctaggagttcgagaccagcctggccatcatagtgagacgtcgtctccattcatttttaaaaagcaggcaagcaaaacagcctaattgctgagatggagaaagttttagtgatctggataga

SEQ ID NO: 44610 - DNA, 1047 bp, Homo sapiens
attacccaaaagggaaaagtaattttagctctctgaactgacctccacctaaccaactcatcaggttaactgatgttctccatttcaaaaaatatttgcggtcagattaggtgtgaatcatatttaaaggaagattgttggtcctatatcaaagattagagaatgaatgttcattttacagttttaagttaaaatgtttaaggacagtgtttaccattgcacatgattccctgatttaactgaccttttcagttaactagccactagacataattacattgactataggggcttcttttgtgccacaccagtgttggaattgtgttgatttacttgtggagttggaactacagtttctctcagcagcctgcttatctggttgtttaaacttgtagctgaattattatacaaagttttcaaactttctgttttggaatggtcagttactcaaaactgtggcttcctccttgctaccttacagggtagttgtgagagtattcctcaacaatagttcagactctcattacttcttgtctataattgtagcatgcttttaatgggattccctgcctccagtacctctctggcttgttggttaacataaacattattgccagattaaacatcctaaagtataatgtgtaatcagatcaaaagccatttataacaataaaaactacattaaaaaattacttatgtcctgggcttagatgtggtctctgcaatcagatgttcattaaacaaattatttaaaaaatacatacatacacacacacgcaaattctgaattgtgatatgtgccaaaagaaaaaatggggggtgatgtgagagctcagtgaggatcaaatatagattgggaagaagggtgatgaggaaagacttctttgagaaagtgagatttaaactatctgaagaagctgtgcttagtttagaaaagtgctaggcaaagagtgttccaggaagaaggaatagcatgtgtgaaggctctgctctgctgctgaaattgtggttcagtttattgagtatggcatagaatgaatagtgcct

SEQ ID NO: 44611 - DNA, 2030 bp, Homo sapiens
aggtcagggtaggcctcacttgagaagggggtatttgaacaaaaatttgagaaaggaggaggaggcatttcagataaaccaattagttcaaagattctgtgtcgggaatgtgccttgcctatttaagaaacagcaggaggccaaagttgctggggcaaggtagagactaggggattagggaaggatctctttcagttatctaggccatattggtgatagcagaaatactgagaagtagtcagattttggatgttttgaaagtagattcatcggggcttggtggctcacgcctgtaatcccagcactttgggaggccgaggcgggcagatcacccgaggtgaggagttcgagaccagcctgaccaacatggtgaaaccctgtctctactaaaaatacaaaaattaggtgaaatattgaaggagatgttttgattgaagtgattttaagagagaagaggaggggaagtaaagatggtgaggaattatcctgtaaaggggaacagagaaatggggccagagctagtgaggaaagtggggtcaataaatttttaatgataagaaaaagaagagcgtatgatgataggaatgagccattagagagtaaaacgtttcaggagggagagagaagaattgctgaagcactgtcttagaagaggtaagagggaaagggatttagtgtataaataggaaggattggctttctataggagcatctatactttatgataataggccattaagcagagtatgtggttagaaatgctgctaggaaggtcgacgtgattggtggagtctgtacacgttctgttgcagttgctttggtttttttcagtgaagtaagacttgaggttatcagccgagaatgaggattggggatatgtgaaagtagctccgcagcagtatgggagcataaatgaactggagacaaatagtaaaattaatgggcaattttttttcctttaagagatgggggtctcactctgctacccaggctggggtgcagtggcacagtcatagctcactgcagcctccaactcctgggctcaagtgattttctcacctcagcttcccgagtagccaggactataggctaatggcaatattaagttattttatgagttgtctagacagcattatgagtctcctaactttttggtactgatcttcagatcagagttaaatgtaacttgcccaggcaatttaaacactcaatatgagtcattttcatttggactcaaacatggaatcattgggaaatagaacatgaatttattactccttaatgaagtacctgccactatcctgccatgaatgtaggctaaatttggagtggtctggtaactgcttttcttttaaaaaaattttcttcatcttttctgtatcaaatacttactggtttttctatgtagaataacataatctcatcattactttctttcaaacactctccaaatttgacttgtctttgctcatgtttttcctaccacctgaaatacagatttcctcccccatcccaccctccaaaccttccagacttacctcacctaccgtttattgtaggaagcttttcttaacctctttccaagtcctagtttgatgcctctgctttgtgcttttgtagaatcccagagtttaccttgttttactcactatatcgtattgtggggtttttttgttaataggtatttctttttcctctagacctgcactgttcagtcatactttctgtgatgatggaaatgttcagtgtcgtcttaatatggtagacagtagccgtatctatgtggctactgtgcacttcaaatttgcatagcaggactgaggaactaaattttatttcattttaattaatttaaaaataactagcctgatggctagtggctgctttaatcagtgcagttctagaccccttcaaagtcaagagtgtgtgggattcatacttattctctcgttgcttaacaataatactgtctaatacttaaatgactgaattctttttcggtactcttagtctgcatagttataactcac

SEQ ID NO: 44612 - DNA, 1088 bp, Homo sapiens
gagaatgtcagaggaaaaagataaagagcccaggtcctcaatgacatcacggaaccaaatggttgtactatgtctggagtttgcccaaactctgggacatcctattatgtgaaataataaattcccttattgtttaggggggagtcagggttttctgttccctggagccatgagccccaacttgataaactgcaagccataggctatattggtggataggaaacacaacgaggacagtgatttaaaagaaaaaaaaaaatgatggcaaggtttttttgtgtgatttttgttgttgttgttgttgtttatggagtcttgctctgtcgcccagcctggagtgcagtggcatgatctctgctcactgcaacctccacctcccgggttcaagtgattctcctgcctcagcctcctgagcagctgggactacaggcatgggccaccaagtccagctaatttttgtattttagtagagactggtttcaccatattggccaggctgctctcgaactcccgaccttgtgattcatctgccccagcctcccaaagtgctgggattacaggtgtgagccacaacactggcctatggcaaggttttaagggtgaaaatcgatgacagaagaaagcaagttgacatcaatgggatgcttaacctttggtttttcctaaaatcatcctccagtcatttccctggaccttggaccagtgctatgctctttttctgtagattcattaacactaaaatagagttaaaagttcaaaaaaagatatagtgtccttatgaccattagtaaccttactatgtagcatcgccaatgaaacctgcttgtgggaacagatgcttcccagggtgagtactttgatcatggaaaattatgtacaaattcttttaagacttatcttggtttatttgctcattttttgcatgtagatacttctttagactactttgtttcccctaaggaaaaaaatatgaaatggtgttcttgtggtatttatgcttaaaatcctttccttattatgacctttaatatccactgaatctattgctaccagattggaaacatgtaaatgaggcctttcaagaaacc

SEQ ID NO: 44613 - DNA, 1053 bp, Homo sapiens
aaatggtgctaatgactggctggcaaagccatggtaaatcaggtggatttcagttctctgctttcaacagactaaaggagaatctaatcaagttgtttgttagttgatagatcatcattaataattcttgatgatagagcactgtgatctttgtcaaaatgccaaaggaatccaaagaactgtaaaaacattgttaacgtaattctattccatcgaatttatgtgcttacatctatacagaaacaaggaatacagctgaggttgaaccccatctcagctgtaaatcacattcatgtattcttggataaatgaactaattaggataaagaacattctaataaaaaaacttttaatcatccaagaattaataccgttttcattatataccaataattaattacgataatattggttctggactgagataacaaacaaacacttaaagcaagagctaaaaaaaaaatttccatttatattttttgttgacaagaagtaatggggtgaatgattaaaagatgtcgggcataatagattacattatgataggattcttggctgaaaagtggtatggaaatacagaaggagaaaagccaatttgaaatgtttaactactaaagaactagctcatttatttttataaatgaatgaagggtgtcaaattgttgtgatatttaaattgtactggatatgtttaaaatagtgatgtaacagtttttattttaaaataccaatatttacacgacaccagcaaatacatactttgtcaactatttaacttcccatgaaaaattttagataccaacttagataaaattttagatatcaacttagatgggtgagggtatacatgatttttcaaaatacttttgggggcacatgagcagaatactttgtggactactgctttaaaacacgatttctccaagtacagttgagggacaacttacagaatcacctgggaagggcagatgactttttaaaaatgcatattcctgggccccatccccaaatttgggttattaggtttggggtagaccccaaataagttttcaa

SEQ ID NO: 44614 - DNA, 1088 bp, Homo sapiens
gatctccctgttagtaaatggcagggccaggattggaattcagctcttcctgggatcagagcttatgctcttaacccctatgatactccttggctcagtgttcctagaaggcaattcaggggttgccagttagtgacagaaggaagagtggggccagtcgtggtggctcacgcctgtaatcccagcactttgggaggccaaggtgggcgaatcagttgaggtcaggagttcaaagccagcctggccaacatggtgaaaccctgtctgtactaaaaatacaaaaattagccgggcatggtggtgcatgcctgtaattccagctacttgggaggctgaggtaggaaaatcaaacccaggaggtagaggttgcagtgagccaagatcacgccacagcactccaacctgggtgacagagtgagtcagactccatctcaaaaaaagaaggaagagtggtcagaggtgaagtgcagcaggggttatgccaggggctccttcctacctgtgacttctgcagacacctcactttgcacagtagcagcccccatagatttgggatctgactggggactgtttgctcatcatgttattacttaacagtgcttagtaatgttttcgagttgagttttcttattgaagcagatgcttttattctggtttttttaaatttaaatttagctttgtttcctttgcattgttctcctgagtaaaataatgatcactcaactcaaacatcagtgtatcagggagctgttgtattatagaaatccagtttaaaggtaagacttttaaagtgaaaaacatcattgtgtgtggaaataagcatcctttaatgtatctgtttggatggactttagaatttcagagaaggagattagataccttttgctatatttctaagaagctgttcctcactctttctcctccctattcccctcaattttttcagatcacacacccagctggctgcatgtctcagtttataaagttctttggagaacagatcctcatcctctggaaatttgccttacttcgaaagcgcattttgatattttctcccccacctgtgggcgtggtgtgctatagaggta

SEQ ID NO: 44615 - DNA, 1037 bp, Homo sapiens
cccctgagtgttacagccccttgaggtgggcggagggtaggagtggtagcagagctgtgaccagggctgttctcactgtgtgtgtgtgtgtgtgtgtgtgtgtgtttttctgcaggcaccagttggagatgccaggacattactctcatctggctgccttctatgaggacaaaaagggggtgctccatgctggtcccggcagaggcagcagcctgccccctgtctactggctgccttccatccaccgatacatgtaccctgagatgaaggtgaggttagccctgcttttcttacactatactggatctgtatctgggaatagtagctgttgattactttttaatgaataaaaaatttatgtctttggatcatacaaaatgtctacttttgatagaacagagttgcaacataagcatttggtttttttaaaacataaggcaagttatcttaaacaatatgctttctagacacttctgtaatcatagtataaaggcgtgtgtgataggccagttgtgaaaagatagatttaattctgttgattgcttctgatattttaacactagacatttgaactaaagatgaagagtctgatgaagaagtatgacatttcttagttaagacacttctgatgttacttcgttctgtatttgttcctgaagtactttggctttggtactagaatatgcctatttacagttagcaaaacacccagcaaagcgttaggtgttggaagggtgcaaatatgactaagaacatgaatctcctctttctcttccctctctgtctcctgtggttggtcacaggatatttccatggaaacctagggctcccctggtagagaaattatgccaagagtccaagggagaactctgggaagatgccttaggagaggacgcagtccctgagtatttggctaggtggaaagtgaggaatgctgattccagaaccaggaaaggtgtgagcagcagtgagaaccatggtctgtcactttctcagcaccttctgggagttatgcattgtgccagctatttatctgt

SEQ ID NO: 44616 - DNA, 1030 bp, Homo sapiens
gctaattctccaagtaggcaatacagtttcatggttcaaaatccaaaaattttaaggtggtattatattggatagggtcctggctaaaaggcaagaacagaggcccaaaattactatggccggattacgataaaagattattgctcatgtcatagcgtagaggtaggcaggtggtcaagttgggtagcctgctctgttccatacaattgttcagggacccacattcatctcttgttattccaccgtatcctaagaatggttttgtattgtaaggtgctctttcccaaatgttaaaagctgctcactactattatgtttgcatttcagcccatagggaagaaggaaagactagaatttacatatctcacttctcatattccattgtcaagtcctcaatcacagagacacacccaacagcaaagtagcctgggaagcatcactactaggtgggtgaccctgtgaccagttagaactctggggcattggttacaaacaggaagaagggaagacttgactttgagaaaaagttagcagcttctgcttcagtttgcccctctggccactcaggtatccatgtatactcttcttcccccttgtagaggccattcctcccaccccaaaggagacatcacagagtctcattcagttcatgcttccagtctaaaatctaggatttctctgtagtgcgcagtagtcctttacgttaggccagggcatggttcttcttaccctgaaaacttataaaagaatagacaagtccctctactccctacctcccaaatgcaatataggaggtaaagtaggaaccacaatacaagcttctgtttggaaaagggaagaatgagaaatacggatggtcactagttcataacaacagtgaaattctgctgagcaagaattgcagagtcagtatgctcttggctcaactttggttctgttgtgtagaatcccttgtccattgtcctccatggcacttggctttgtcttctagaagattctttcttcattttcctccataaccacatctaca

SEQ ID NO: 44617 - DNA, 1053 bp, Homo sapiens
tgtcagtcacaggcagtgagcatggctttgtgaatttgtgtatacggagtgtgtgtgtgtgtgtgtgtgtgtgtgagtgatggttttcagactaaggctactgtgcaaagaagggattgtaacacatttagacattttgtgcaggcattttactataatgctgtttgatttattctgatcactgctctgtaatttgatgatcatttatacccaatttgtaaatgagggaacataccagggatggttaggtaatttgggaatattaagtagccaataaatacttgactgtaagtcccattgtctttctagtatactatgctgcctgaacccctgctccctggcacctgatccttacttatccagggatggaggagaaaggagggaggaagagagagcgcagtgtgagagggagcacttgtaacttgtgttttttttgtgtttttttgtggggggaaagcagtcctttactgaccataaatgtgtttgtctcttttgtcatctatcctagtcctaaatggcactttgcttcctgtaaaaatactctgatagaccttgtaccatataattttattttatatatatcttaaaagtaggagatgtagtgaatgaatgctactgagcttctgagggcctcaaggttagcactaggacagggccctcagagagtgcctgatgtaccccttgtgtgatggttccggtggagtgaggcccatagtggcacagtgagctggaccatcactggcccagcatcttcccccctttactgctgaggcagatctgctatttgttcctatttaatattggcccacccagacttttgcccctccttcgcctgtgttgccaaaagcgataaagtgaatattgacttctttaccaaaattagagcatattttagaagttcttacataggtgtgatttgtctgctgtttagtttctctcgctggcctgcctgcttagccacttccccatgtctctcccacctgtgtcctcagtttccactcctaggagatccttcctccccccaccccacacccacctcaaccctccgccacc

SEQ ID NO: 44618 - DNA, 1052 bp, Homo sapiens
agttggtgccttacgagacgatgcttgtcttcctcagaaactgctccctcctcttctccttctacccgattcatacacagggttaaatatcaacataagctggggaagatctgaggctgctcacagaaaagagattttgtaccccagagctcctgcaagaatgggccaatgtgcactagcaggtactaggagagatgcctgtgggtggatccagaggccagtggatccagggggtgactggaagataaagctggataaggaagagtttgttaacatgaagccactctcccatcatgcaggatttaatacgctggcaaggagcttggaaaatgagtcaaatatatgctatttgctgactcatggaagcttggaaaaagtaacatccttcattaaattaagcggagatgccaaaaattgccttggaagacgataaaggaaaggatcaaaaggcttagaagagtggaaatgctataatggatctactatgtaagaccgaaaagcctatcggctgatcatgttcccaaggagacctggaggacactctgcctagcaagatgattaaaaagaatgtgctgtaaaagaaagtattagctggggtggattatgttaggagctgctgttacagaactgagttctctagtagcaaggggacatggataactagaacagcagaggccaggtggcagtgcttaactgtcagatgcaaagcgggtggacttaccctattgggcagaaaggttgaactggtagataggagcaggctgaattgcagggatctttggagatggctcacagaacatagtgttcttgaggcaggctgtgtgggcagctaacaagagttctgctgaatatacataactgaaagagatcaagaatgtagaagaaaaaggctaaggacagtcaccccactggaaagtcaggatcctttgccaaatctccagatttgagctagtccacagacccacgatctatcaaacgaaaaggaatctgaggcaccagaggtagggccctgcgacaccatgacaagtatgtctagtagcagttccccgatt

SEQ ID NO: 44619 - DNA, 1047 bp, Homo sapiens
aataactattgagtactaggcttagtataggagtccctatactgctgtcagaaaatttctcagcaaaagttttacagtccaggagagagtaggatgatgtattcaaaatggtaaaagcaaaaaaaaaaggactgccaaccaaaaatactttacctagcaaagctttctttcagacatgagggagaaataaaaacttttcctgacaaataaaagctaagggattttattaccactaggcctgtcttacaggaattgctaaagggagttctttaagctgaaactaaaggctgctaaggaatgacataagatgtataaaagtacaaaacttgatgatacattaatatatagtgatactcagaatactctaatactataaatgtggtgaattcagaaattttatctgtagtattatggttaaaaaacaaaattattaaaaacaactgcaggtacaataaattgttaggggataaaaattacaaaaagatgttaattttgtcatcaatgtcataaaaggtgggaggggctgtaaatgtagagtttttgtatgtgattaaagttaagttgttattagcttaaaatagcttgttattaagtatacaatgttttacataagcctcaaggtagccacaaagcaaaactctatagtagttacacaaaatataaaaagaaagaattcaaagcatatcactacagaaaaccatcaaaccatagtgaaagacagcaagtgagaaaaaggcaaaatatccacaaaatacccagaaaacaaattacaaaatgggagtagaaagttcttacctatcaattactatattaaatgtaaatagattaaattctcaaattaaaagacataaatgtggctgaatggcttaaaacaaacagaaaaagatcttagtatagactacttataaatgactctctttattagtaaggacacaaagagagtaaaattcaagggatggaagaagatattttacacaaacggaaaccaaaaaagaccagggagagctatgctcatatcaagaaaatagtccttaagtcaaaaacctt

SEQ ID NO: 44620 - DNA, 1037 bp, Homo sapiens
gttattgcagatactttgtttctatgagttacagctctttcagacaggtgtgtacatttttggtaaatatttgactcctggttatatgtagttttccttcaaaatgatgtcttttcctcttacctctcactacatttcttttttttttttgagacggagtctcgctctgtcgcccaggctggggtgcggtggcatgatcacggctcactgcaagctccacctcctgggttcacaccattctcctgcctcagcctcctgagtagcttggactacaggtgcccgccaccacacctggctaatttttttgtatttttagcagagacggggtttcacaatgttagccaggatggtctcgatctcctgacctcttgagcagcccacctcggcttcccaaagtgctgggattacgggtgtgagccaccgcgcccggcccacctctcactacatttctgaccctaacacaagactaaaattttaatgagttttacagaattttgattttcttgctaaggaccataaaaatgtatacttagctgaaatgcctacaaccaaaagaaacatatcaaatgtcgtgtaaccatttattgccactgatatctgatttgatgcaatagttttcttttttctttctttccttcctgtaggagttgctgttggggctccactgtctttccttagtaactatcattcttgaacatggtgaaacttattttagcttgtgttcctccagggacagactttaagaccaagatttgaatagaaatattttttagtttttaatttttttaatgctcagggcaatataattttttaaaaaataaaggtacattattaggccagttaccacagtggaacactgaggcttcatcctgagaggaatctctggcaagtgctgtgaaacatgtgactcagagttcccacacctctcaggcagaaaagcatgggttctccatgccaattttcccgtcactggttgaggcttgctcctcagggtttttagtggccttatccccacctacccctttagtctgcagtgt

SEQ ID NO: 44621 - DNA, 1032 bp, Homo sapiens
ggtagacaaacactttgaatatttccccgcaaaggcatccacaaagcagttataaaatgtagaatagagtctgctgccaagggtgttaaaaaaagaaaaaaaaatgttttaggaaggcatatctggcatcgttactaagtcctcttttctgtggttggaattagtttctagaaatacaactgatggcctgaaacctgtgataaaaattgtgatacactgaaaactgattcctcaaaatggcttattgatttcagactttgtgaagataacctcccattgttcaatgcaccttgtcaattcctacttatagtgtgaaaaatgactcatggtgtgatataggattggacattttgtacagtgacactggaatgccaggcttctacaaatatcttcacagttgtgcaaagactcatattttaaaatatctacgtttttgaacagctctctcccagtattaaactaattaggactaattatcacttctagttaatgggtcccagtcaaggctgaattctgttttcattatacaacttaacacaggtttaacaaggacatattggtactgaagaaaaagtgagcaaattgtaaaataaaatactagaaatgaaatatttatattttatctttttttcaattctgaatttaagatacaatcttcaatatcacatatatattcatacacatacacattatctggtatggttgcagtcttagtttagaaaaataaacacagtgattattttcctgacagttggtttgttttgtcatacggctgccatgttcgcccgtacaccttgacgtctctggcttctgcagaccctggagttttgaatgagctcttccaggcctaggtcttacttaggaatggattatgtgttagcagtaaagcttattaacagttttcaccacaagatggagccttatgaatgcctctcggaaaagggagcaattccttaattcgcccactagtgggcaggcatgctctttctaaataggaaacttctggggaaacctttcaaaacctatttgaga

SEQ ID NO: 44622 - DNA, 1069 bp, Homo sapiens
atgagtatttctttttatcattttaggatttgttagactccctggatctgaggattggtgtctttcaagatctctggaaaattcaatcatttctttcaataataactctcccacaatctttctattatatctatttgaacctcagatcagatgtgtcttaggtcttctcactatatgctctatatcgtctatcctttttcatattttccatcattttttcgattttagactgaattatgaataatttcctctactccagatccagttcagtaattctttcttcaactttgtttaatcttctatttagtctcttcaataaatttctattttgaactattttatttcaattattttttaatttctagttttgattcttttttataaatacaattattttctgttcaagtttctagtttctattttatttttcaaatgtacaaaacatggctattctatgttctgtgactagtaattctgatatctaaattttgcctgtttctgattctcttgtttgtaatggctgtctttcattgtgctttatttcctgagtgttatgtggttttaaaaattattaatgtgagcttctcctttcatgtgaatttttgtcctagaaattatttctagatacattaaagttaaatttctctagaaaagatatgcatgtgcatcttccaattgaatacattagcaaattgggaccacctcaaattatttgcttagggtttttgaattcacagatgtagcatgaattaatattgcaaacctatatggaaaactggtttgtgattattcattctcattgatctttttccccttcatctttcagcagggtcaagacaagcaaattgcattgatttcttctgtgacatgaatttacttcctatttacctttaccctgttggaatacccctttggtgtgtgagctttgtgctgggatgtcatttttaattatattctttttgtgagcttggtcttaatatcctaggctggaaaccccatagagtcactccccatacattctccagggttttgtggaagcattgtggtgagagccagctttcatgcttgc

SEQ ID NO: 44623 - DNA, 1238 bp, Homo sapiens
atttatgcttaggacttgagttgtattgacgagaattttgcctacctctaggtcacaaaaagattccttatgcttaatagttctaccattcacatttagttttataatttatctcagagtattttttgtatatgatatgaggtatgggttaagggttcattggtttttatatagacatctaatcaatcaagaactacttattgaaaaggcatttcacaccattagactttttgaatctatgttcattgagtaatattcgtctctaggtttttgttcttataatgtacttacgagattttgctatcaaagttatgctgggtgtaataaaaatgagttgggaagagtttcttcatttactagtctctggaagaagttttatgatattagtattatatttttctcaagtgtttagaaaaattcaccataaaaatccttttgggactaaacttttttgcagaatgtttttgattttggactgcattttttttatgtataggattatttatattttctgcttcttcttgctgttttggataaattatgttgtttaaacaatttgcaaattcatctgagtttgttaaatttattggcatatgattacttgtaatatcactttgttatatttttaatgtcttttgggactgcaataatgtcccctgataattataatggattctctctctgtgtctctttattgatcattcttagtttggttcattaaaaccaacttttggttttactgaatttctaaattttttaaaatttgattcttgcttttatgtttattatattctctgatttactttaaatttgttattctttttctaatgttttgaaatagtttactttcagtctttcccttttattaatgtatgcatttagagctatagagttttcctttattaagtaattcctttattaagtaattgcttttgctgcctcctgcaaattttgataaattgtattttaattattatttagttaagatattttctaatttccattgtgatttcttctctgacctaaggggtgttcagaagtgtgatccttaatttccaaacgtgggaattttctaattaaataaataaaaattatttatttctggtttaattccattaagatcagagaatatattctacatctttttgagtttcttgagacttgcttcatacccagtatatgttttatttgagaaaatgtttgacacgcactaaaaatcatgtatattctgttgttgg

SEQ ID NO: 44624 - DNA, 1030 bp, Homo sapiens
gctgagcttggatttggttgggattcaataccacttatagctgagagtgcaagagtaagttgccctgaagaaaatttaaattatgtacaatataaatatttgtcctaactcttctctctttccagaagtaccactgtaacaagtttattgcacttgcaattctatagatgtaaaaattaatacctttttatgttgtatatgtatagtaccgtatgtgtttctttctcttgcttttgtcattgatcaatatattttataccccctacttatgaagatcttcaaggaaataccataacttctcttttaaataatagaaatatcctaaatagacattttattgtttataaagtatttaagaaatatcaaaaccgaccacccaaacattcttaggaattcattaagtgaaaatttccatgagtctttttataaagtgtatttcttattaggcttcaatctatatttggggttttaacacaggcagaaaaatacctgtaggtaaattaaatacttttcagcaagtaatatttctgaaagaatgtatcagtttagagcatcttggctgattaaagtataaagtattatatcagtattgtccctagtgatgaaaattggataagactgggtgtatggtggctcatgcctctataatcctggctttgggaggccacattgaggggatcagttgaggccaggattttgagaccagcctgggcaacatagttagaccttgtctctataaaatttaaaaacattagtcacgtatggtgagatgtacctgtagcttcaactacttgaaggttgaggtaagaggattgctcgagcccaggagtttgaggtgaccatgagctgtgatcgcaccactgcattccagcctgagcatcagcataagaccctgtctcaaaaaaaaaaaaaaaaagaaagaaagaaaagagctggttaaaaactcagattttcaactgaaaataaattaaagatttaactgtaagacctgaaactatgaaagacctaaaacaaaacatagcggggaaac

SEQ ID NO: 44625 - DNA, 1033 bp, Homo sapiens
gtagttcatacagtgtctctgttagttcagtgaggcaccctgaatgctttgtcactcagcttggaaacccttcttataatagattcaccattgatttcagtaatactccacctacacacacacacacacacacacacacacacacacacacacactcaagtttgtactaataatctcattaattgatgagctgaataatatctttggcatgtgttccttttatatttgcatgaaggtcatgattctaaaccttttggaaattacactttaagcactaaattctccttagtttgttgttaatttaaaaggtgagtaaataggtcatcttaactttcttggaagtcagtttccttatctgtaaatgacctgtcatagactatgagaattaaaagtgaaaatgcacctgtaaaagcatagcatgcagcctttgaggacaatgtacaaagtgggcaggtcacacatacctgggagcttgtgggattcctcaggtgctcatcccacggaaaggacttaggctaggctcgcctgtgctgcagggtgccctgtaatcactccaggagaggaatctcaactgctgccctcccacccccacaaaagttccacatatttgctggaacctccaggtgactgtaatactgtgtgtctgggaacttccaggttactagagtggggagcttgtgttgctaagcagctaatttcagcctattcttgcgttgttaactctgacctgctgaactagctccttgaaaaatccagaaattggggaaggggaggaggtgaaatgaactccaggaccatctgcatttgtatttatggtccctcacttgttttttaaaaaagtgaaatgtatccagtagtcataactttgcatttagacagcagttatatagttttgtcattttaatttccatatgcttgatctccatgtgctaagtattaccttctaactacagaaatgactttatttcgccaaaccagtgagtgttggagtcaactctaaaaatattgtcctctccttcaaattttaaacttc

SEQ ID NO: 44626 - DNA, 1021 bp, Homo sapiens
ggcctctgagcccaagctaagccatcatatcacctgtgacctgcacgtatacatccagatggcctgaagtaactgaagaatcacaaaagacgtgaaaatggcctgttcattccttaactgatgacattaccttgtgaaattccttctcctagctcatcctggctcaaaagctcccccactgagcaccttgtgtcccccacccctgcccgccagagaacaaccccctttgactgtaattttccactacctacccaaatcctataaaacggccccaccccatctccctttgctggctcttttcagactcagcccgcctgcacccgggtgaaataaacagccttgctgctcacacaaagcctgtttggtggtctcttcacagggacgccagtgaaaatactgatgtctggaatttgcttcaaaataatttcacaggagggaggagacagaggtacaaataaaacaacattggctgtgaatggaaacctgttgaggctgagtaacggggacacaggacttttacagtgctctctccaattttggatatgtttggaggctgatcactcagaagagaaaaaatctacatttctaataatgttcaggggattattacaattcatacttatattatgccagaaatttaaatctaatttctacctctaaataagagaatgactaccctcatgttatcaccatgacctacatcacactcatcaaatttttagaaaataggaaatgattacagtaatcaatgtgcaatgatcaaatatagtttaggggtagtgaatatttattttagggacatagtagtaggagggggaaggaagaaaaggaaagggaaggtcaaaggcaggaggagaagggaaaggaaaaaaaggatatgaaacacagtaccctgcagaatgtcctctatgccagaaaaggtggagcaaaggcagacaaccaacaagagagagggaacaagacttggcagaaatcagaaaacaaattctggcccacctcttcttggcccagtcttccagct

SEQ ID NO: 44627 - DNA, 1022 bp, Homo sapiens
atgtacactcccaagagcagtaaaataataactctctactttattttaaagacaagcaaagggaggttaaatataatggaattattatagaagaaaaactgctgtgttcataagctttaattaagatttctagctgtttagatagatgaaatagttaaagatataggtgtgtgaaaggacagggttaaatcaagtgtttttagccaaaacatttgagtatagaataattattgtaataaaagcatgatgtcaaatcagatctcagcaagcaattttttgaaactgatgattcatattaatgtcaaagaaggatgaaaagaaagaaagaaagttacagaaaaggtttctcaagaatttctgagtttctgaggcaactttagcccagctttaaagctcccaatatttatattttgcacaaatttaataggcaggatgttcaagtgctagtgaacaatgtaaaaaaaacccctccaaactgcaaataccatatgatattcaatattttaggatgactttagcaatcattacataaggtatattacaagtattttcaacaggattatttgaaaatagtactttgttgagagatgatttttttttttgagatagagttttgctcttttcacccagtacaaagaagtacaatgtacattggagtacaatggcacaatctcagctcactgcaacctccacctcccgggttcaagcaattctcttgcctcagcctcccaagtagctgggattgcaggcatgtgccaccacgcctgactaattttgtatttttagtagagatggggtttcaccatgttggccaggctggtctcaaactcctgacctcaggtgatctgcctgcctcagtctcccaaagtgctgggattacgggcatgagccaccacggccagacaagagatgaattttctaaacctatcaatttttaaaattgatttgtattgacaaagaaactaagactactaagagttttgcttatttgtctagttttaatgtcagcaatgatgtgggct

SEQ ID NO: 44628 - DNA, 1019 bp, Homo sapiens
cggggaaggaggggaggagcactgcatttgcaaccatcttccagactcccctggatattctcaaaggactgagaggaaaggcagctgctttcatagctgatgttctggggtagaatgtaaggctgtgtagggatgtttctggtgggattatgtgaaaatggaggtaggcttaacatgtaagatattcagagaaactcttagttggaacaagtagaataggtttttttctatgaatgctttatagacattataatgaaaaaaactaattttaaatgtgaaaatgcctattcgtgatgtttggaagaattttgtcagatttttttttttttttgctatgttttgctcagtaatgtatgtttatagttgataattaatagcttttgagtcagataaccatcttgaattataggtgattaattttaacctggaacaatagtgtgttcttccaaatgtcatttcttactgaatgaagctgcttgatttatttgcttttgcaggcaaaccctgaagaactgtaaccagttgcatttacaaaatcataataacttggtttacttataactgaaattattcactgggctgtgcttacttttttctttttagattttgtggtggatgcaacccgcaagggtaacaaaattcgttttgcaaatcattcggtaaatccaaactgctatgcaaaaggtaggtacctttgacgtgagaattggaactcccttttcagtcctgtgatgatggacttgaatacttctgggatagttgtttgttatgtgaacaagtcagttaaccccccgtggcccgtcttcatgctcactgacaccagtgtgtctctttgcagttatgatggttaacggtgatcacaggataggtatttttgccaagagagccatccagactggcgaagagctgttttttgattacaggttggtaaagtacatttctagcatgatctctaagggctttttctactggattgtgaactctggacaaaggagggtttttagttctttgcttctttt

SEQ ID NO: 44629 - DNA, 1050 bp, Homo sapiens
gtgtcacagaagagacaaagacatttttctggtatgcatgagtataagaatggtttgcctaaataagactgtcctcatggctctgtgactgtgcctcttgtcaggtgtatgagtttagagtcaaagaatctagcatcatagctccagctcccgctgaggatgtggatactcctccaaggaaaaagaagaggaaacaccggtgagtctgtcatgaagctccttagagaagtcaacatagatagacactgcaggcaaggcccttcctaagggctgttgttggtttctacttagtctatttttaaaaaaccttaaactgccatcaaaaacagaactatggaatcttatttccactgggaattgctagtatttttctataagaatacagcagccttcagtatatttggtatgttaagagtcataaaaattacggttaccagactgcatttgggttaagaaaaacatatttagtagcttttgcagtaaaggttacgtaaacaattactttaacatcatgaaatgttctgtgtttctgatgtgagctctgggccagtttttagaagtatcttttattccaggagcttgaatttctaagttgtgtggcattgcattccgatactcctaatgggtaccctactttaagcttgtgtgaatgttattttcaccttagcgaatgttttcaggctgatttgatttgtaaatgtagaaccagaaaaattgatgagtggactatctgctctaatctccccatacctctacctcacatttttaaaaatgagaaacctaattgggtaggtaagggtgcagttagattatgcttcttaaattgtgtacaggctcatgttacattttcttactttaacaaaaataagtgtagggccaacccaatttagaatttttttaaagtcaagtttttatttttattttttaggctttaggagatgcttctgaaattttggttgaattatttctgaccacgtagttcacttgcttggtttatgatgcctgaaataagaggaagtgatcagtgtcatccacatcagaataaatcaa

SEQ ID NO: 44630 - DNA, 1029 bp, Homo sapiens
attgctggttagttttctttttctttttttgagatagggtctcactatgttgcccaggctggtcttaaactcctggcctcaagtgatgctcctactttgggctcccaaagtgctggaattacaggcgtgagccactgcacccagcctatatacatttcaaaatctgtttgtctagttctttttaaaaaaaattagtggtatgtttattggaatcccattaaatttataaattacctaatttctttttaaaatataagggttaagtctaactaaccataccatcacctctctttttgtgtcctttaattatctcccaagttttctttatgtgactcttgtacattttttgttgagtatttctaggtattaaacttgctgctgctgttgggctttttccacattttgtcttctgttttgtaccctgctaccttactgcattgtcttcatgttttatcagtttctcagtacattcttaggagttttccagctgtgtaattatactgtctgtagttattaatggttttaccttctatccagtctttataactgaagcttctttctcttttctacctactttatttatttattttttggttgggcgggggaggggagtggggaggctttctgataaaaaccagaaagcctgctagacaaattctaaaagagctgtaactgtcttttctacctactttagcttgtagtttcagtacagtttaaaaattagtagtgctggtagatagagataaatgttctgtctcttctggatgagttttagaaaattattctttacatccaggttttgagatttatttgtatgaagtttatgtgttctctaatgttcgttttatttttgttaatattcttgttctctatatatttcattgtcacttttttgttaagaagtggtttttgtattttaaattatgtatttttttcttcagagaaccagctacaatgttagtttaactcataaacagaaaaacagttgtattagggttccttaacaaacgtaatccagcaccagattag

SEQ ID NO: 44631 - DNA, 1049 bp, Homo sapiens
attgggaagaaacagagtcaatagttggtgttctctacttggcaaagctcatgctaaggcagcatagaatagaataatttggcgggtgaaatagcaatttctaagaagcgtatttcaaaaaagagaaaataacaaaaaggtaccttattgaccttattgatcatctagttcagctccttcattttacagatgagtaaacagacccaagaggtaaagtgatcactctaagtcacaaaatcagttagtagcagagctgggagtagaacctaggttttctgcttcccagtgctcttaaagcttttcatatttgaatttgaattttgtttttgactgactggcattccacagacatgtaaagtatgtgagaagtaagtaaaacacaaaatagagatgatttcttagaaaatcagctttgttatagagacataattgggtagagaaaatgaaagatcaaaaacttgtttacttccattctttttttcctttcatattctcctgtttagataaagaaagccgcccacctcggaaatttccttctgataaaatttttgaagccatttcctcaatgtttccagataagggcacagcagaagaactaaaggaaaagtaagaatttgttcctttgaggcaatcttgccctgtatggtatgtaactcaccattttggtttattacaaatggaatcaatgtagcggatgagccactacactttgtttacagtgtttgcaagatacttgaagcaacatgtgtacttgtggtactctgcattacaaaatatttcctgtagatagaataaatacatatgtataatttatatatacacataaacacacacatatacataaaatttacagtagtacatttacaggaaaattatctggatactggtagaaatttgatgtttagttaaaactaatataatatccttttccatgatatatttgaatcatatcgatgaatttgattcttgataacaccatgcacaatatttagttggctctttatctaaatagagccattcctttatgttttaggcaagataaacatcaa

SEQ ID NO: 44632 - DNA, 1035 bp, Homo sapiens
tgtggtgtttttgtattatttgaatgtgggaaactatagtgtaaaatctatatgcacctaagaaaatgttcttgatatttttgaggatacactagatttttaacctgctttacaggtgttatacattttctaacaatgaacaatttctcctttcctctccttcatttttttttttaagagtatgtttagttccaatcgtcagaaaattttggaaagaacggaaatcttaaaccaagaatggaaacagcgaaggatacagcctgtgcacatcctgacttctgtgagctcattgcgcgggactagggaggttggttaacataacatgttgtagtaattatcatcatcttttggtttatgctattggaacatttgtttggttattgggaggaaatcattgacctcagggtgtccatctttttattgctatttctttttaatgtgcaactgttaatgactgctgtagatcacactattagctattcctataacagagttctaagtgtttggaatatactttgaactaggtagatgcctagattttataagaatgttgatttaaaaaaaaaagcttttaaatcaaatactctttaatgtcctcatcagatcactatttagagcaaggttttctgactcactgttgtaaccccaatttgaattagccatgtggtaagaaatgttttaatattcatggacaagaaagctttttattatatattttgttcaaaggctaagcctctctataagaatttttaaatttcttgttgagagattggaatttctttttctatagtactttctgaacgagctagctcttaattactccaagagtttcctattttcaaagaaaggcagtaaatctatggtagaatctataattaaatatcccgttaaaacatgattgcagcaagatgagaagaaaatggcaaaagtctaaatagcttaggcatttctgtttttaagtgcctgtgttgtatagaaagacatggcataggatatttaaaggggagttgaagcaaaaggggaaagagcgagttg

SEQ ID NO: 44633 - DNA, 1013 bp, Homo sapiens
tggtatatttagagtttagtactatctgcagctttaggcatccgctgtggggttggcggggggcggtcttgggagataagtggggactactgtacaattatcaggcacacacaggctctgggattttacaaatgagtaaaagtggttcttgctgttgaagcacttacagtgggaatagagtgaaatacatgaaaatgtgattttaatatgttataaatgctatgatggtgggagtttgttttgtgtaaaacatccttttaattggtactttaaattttaatattctttcacaggtctacctatttagtcttacactttcaaagaactacctggatgctgtagattttcatgatatactttattaggtatgttattaatggtagaaacagcatggaaagtcttccagaatattagacaaggacagttctagtactaaaacataaaatgctaactaatgtcttcatcaagacataaaatatgtatcttaaaaaataaattgtaagccaggcgcagtggctcacacctgtaatcccagcactttgggaggctgaggcgggtggatcacaaggtcaggagattgagaccatcctggctaacacggtgaaaccctgtctctactaaaaatacaaaaaattagcctggcgtggtggcgggcaccggtagtcccacctacttgggaggctgaggcaggagaatggcgtgaacccgggaggcagagcttgcagtgagcggagattgcaccaccgcactccagcttgggggacagagtgagactccatctcaaaaaaaaagaaattgtaataacacccacattatacatcagtgaaaactaaacacgttactaccctaggccttattgcacaggggtgctacctccaaggagaaatttgtctaggcagcagatggactagaggtgattagcctatgagcgaatgaggctacagatcattcctttttatctgattccttttctttctagttcctaggccttggaagcactaagtggtcttaag

SEQ ID NO: 44634 - DNA, 1033 bp, Homo sapiens
tggagtaggggcgtatctggtagagaacagtgctgattccttggacttgtgtggcctggccacctgagaggtaggtaggaaggtgtgtcttggccatgtcctggggcctctgtaaacctgagaggatggaggaagctctactttttctgacgatgctgttggtgataatgaagtaggctatgagagcccatcttccattaattcagatgttcctatacagttggccctctgtaaatgggattctacatttgtagattcagccaactgtgggtaaaaatacttgaaaagaaacaaaagtgtgtgtactgaacatgtacatacttttttcttgccattattccctaaacataatagtttaacaactatttatgtaatatttacattgtattaggtatttagtaatctagagatggttttaaagcaggggtccctagtccccaggccgtggactggtacccgtctgtggcccgttaggaactgggctgtacagcaggaggtgagctccgcctcctgtcagattggcagcagcattagattctcacggaagcgtgaaccctattgtaagctgcacacgtgagggatctaggttgcacactccttaaaagaatcttttttttttggagacggagtctcgtctcactgtgttgcctaggctggagtgcagtggcatgatcctggctcacctcaacctctgcctcccaggttcaagtgattctcctgcctcagcttcctgagtagctgggattacaggcacctgcctccacacccagctaatttttgtatttttagtagaaacagggttttaccatgttggccagactggtctcgaattcctgacctcaagtgatctgcctgccttggcctcccaaagtgctgggatatgagccaccatgcctggccatccttatgagaatctaactaatgcctgatgatctgaggtggaacagtttcatcctgaaaccatgtaccctctcccctctttgtggaaaaactgtcttccacaaaaccagtccctggtgcaaaaaagttggag

SEQ ID NO: 44635 - DNA, 1992 bp, Homo sapiens
cataagtaatctagagccagatgatttaaagtataaaggagaatgtgcataggttatatgcaaatactgtgccattttatataagagatgagcatctgtggattttggtatccatgaagttcctggaaccaataccccctagacccccatggatactgagggcttgctataacagtttttaataaaaataaaaaacaggccaggtgtagtggctcacacctgtaatcccagcactttgggaggccaaggtgaggtgattgtttgagcccaggaattcaagaccagcctgggcaacatggcgaaaccctgtctctgctaaaaatagaaaacaatagccagacatggtagtgtgcacatgtggtcccagctacctgggaagttgagatgagaggatcacctaagcccaggagggcgaggctgtagtgagccgtgattgcgccagtgcacttcagccagggccagagtgagaccttgtctcaaaaaaataaaataaaataaaagtaaattgtaaaaaactctttagtttttcatttctattatgttaaatgttaatagctataacacatataaactaaacaggtcatgagaccaaaatgctgaagaatggtgttaatggtgttcttacttactttgaattaccgtttttatttttctatgctagctaattactatgtgaataattaacctcaatgaagttctgtattctctgttgtagcagtggctgatttagggctcagttgtcttttgacctgttcttccttctcatatgattgcatctcgatttttaattttagacttagtttttaattctaaaattaaaaatctttttttttttttcttctatgcccactgctgtcaacccagtcagggcccttatcactttattcttgaattacttcagttctccattttttttctcatgtggtgtttttcaaacttgagtgttgattggaatcccagggttaattcaactttaattttatgaatatgatttcatataagttccttatgataaaaccagagcagatttacaaattaaatatagaccatcaaattagctgtacatatttaaggatgagattttgttaaaaccaaatagtcaatgttagagcttatagaatggcatagcctcaggatcagctttataatcagtttttttaaatttggcttgataatactaacagagaatggctatttgcataaatatgttttataaaatggtgttaacttttagtctttgttcaggataatgagacctactagttaaccagaacggggccagcaagcaactcttgaatgctagttttaatgcctgatcaaaattctgtaaagctgtgttgatcactgaggcgttgcggatatactgagcctgcattaagtggatatttaatctaattatttctggaatctttaccagaaaacatgctcttacatagtttgctcctgggtttgctgttggtgaactgccgttggttggtgggatctctgtgtcccatgggctttgccacacagctggggctctgagtacttcagctcacattcctttgtttgccacccttgccttaactcacttacctgtattgttttttctcccatagcactcaacatcatcttacatgtaaacattttactttgttgttgttgttgttgttgttgttgttgtttttgagacagagtcttgctctgttgcccaggctggtgcagtggcacatcttggctcactgaaatccctgcttcctgggctcaagtgattctcatgcctcagcctccttagtagccgggactacaggtgtgtgccaccactcctggctaatttttgtatttttagtagagacggggtttcaccgtcttggccaggctggtcttgaactcctggcctcaggtcatccacctgcttcagcctcccaaagtgctgggatcacaggcatgagctactgcacctgacactttgtttttaactgtttctgtccaactagattttaagctgtataa

SEQ ID NO: 44636 - DNA, 1026 bp, Homo sapiens
cttgtgtgtttttgtcattcttttttctttttttgaaaaaacaatagagtcatttaaggaagcaaaaaggtccctgggtcaagatttttattttatcttttatggtggtagggtgaggtgtgagtatttagggagatggttggtaggatggcgttgtcttagggttgcaggaggatcagaagggtgactgtaactactgatgatatcttacagtggtgaaggagaagataagtgaaaacagaggcaatttgtttaaacgaattttagtagatattagtctcttaatttggcactgacatatgacagattatttcatttaaattctgtagtttgacaggtataataaagtacccttcattaaatattcttcacatatactcttgtttgcctttttctagttgcaagagtggtgatttctatgtttcattataaattttagaaatatataatttgaatatattgtctgttctaggttctctgtgagtcaagaaaaggcagggtattatgacttcggattcgtatgatgtctggatatatttaaggggagcagttctcaaagtgtggcctgggattatgggatcaaaactattttttctttctttctttcttttttttttttttttgagacagggtctcactctgtcatccaggctggagtgcagtggcgacatcttggcccactgcaacctctgcctcccaggttcaagtgattcttgtgtctcaacctcccagaaactattttcataataatactgagttgttccttgcttttttttaaaaaaacaaaacaaaacaaaaacaaacaaaaaaaccatgttggacatttgtacccacggtgcaaaagcaatgaataaacactgttggcaccttagcacttgcagttaaaaaagccagttttgtttgagaatgtccttgatgaagtactaaaaatgattaattttattaaatcttgatccttgcgtgcatgcagttgtaacattctgtgcaacaagatgggaatgtgtgtaaagtgcttctgctgcatat

SEQ ID NO: 44637 - DNA, 1032 bp, Homo sapiens
tggtacttccttgaaagaactggctgtggcatatacagaactcaaaaattgaaattactagataatggttacttggtttagattgcctggaaattatgagaggttctgtaaatgctttgggattagtagtttgaaccacctagtccattttatgattctgtcttcagaatatagaaggaattgcatcttatttggggattaggatataaagttagtgtacaaggcaaaatagcatgtaggcaaagttacccatgcagagtttgtgggaagatgccttaccacaaaccagtaccttctttttaggttcaagaccagcccatttttcctctagaatgagaacagatcattgctcttctgttgagcacagagttgttggtttgtacttaagggcaatcctgttagaatcactcctgagtggctaaatatcttcagtctgagagacttgtccagcaggttatgggaacagcagattcatgtcacctgtctcttgctcacttaggcaaacgcttagtgtctggaatggtgggtagaacccttgtatttactaccaaaattgagctttctctgacatttttgctcaatgtatgttagatttgtgtaagttaaattagatgttggcttatgcgtggtataagatttaaaatagacttcttagcaaaaagaacacctggtatcagattgacttaccccttcattttgtttgcttttattcagtgaagtgttgaaataacaggtatctcatgtctcatctttgaattataatgaattttgtatcatagctttagtttctggtacttttttttttttttttttgagacaagtctcgctctgtcacccaggctgaagagcagtggcgcgatctcagcttaacgcatcctctgcctcctaggttcaagcgattctcctgcctcagactcccaaatagctgagatcacaggcacctgccaccatacccggctaatttttgtatttttagtagagatggggttttaccgtgttggccaggctgatctccaactcctgacctcaggt

SEQ ID NO: 44638 - DNA, 1017 bp, Homo sapiens
attttcttcttttcccatatggaagttctagggtgatatagtttggctctgtggccccacccaaatcacgcgtcaaattgtaatccccaaagttggaggaggggtctggtgggaagtgattgaatcatgggggcagacttttcccttgctgttctcctgacagtgagttctcgtgacagtgagttctcgtgagatctggttgtttaaaattatgtagcacctgccactttgctctctcttccccctgcatcagccacgtataatgtgctggcttcccctttgctttccactgtgatgataagtttcctgaggcttccccagccatgcttcctgtatagcctgctgaactgtaagcaaattaaacctcttttctttataaattacccaccctcagctctttatagcaatgtgagaatggactaatacagaaaatatgtaccacagaagtggggcatcacaataaagatacctgaaaatgtggatgcagcttttggactgagtaatgggcacaggttggtacagtttggagggctcagaacaagacaggaagataagggaatgtttggaacttcctagagacttgttgaatggttttgaccaaaatgctgatagtgatatggacagagatggctaggctgatgaagtctcagatgaagatgaggaacttattggggaactggagtaaaagtcactcttgctatgtgttagcaaagagactggcagcattgtgctcctgctctagggatctgttgaactttaaacttgagatgtttagggtatctggcggaagaaatttctaaaagcagcaacgtgttcaagaagtggcctggctgcttctaaaagcctgtgctcatttgcataagcaaataaatgacctgaaactggaacttaaatttaaaagggaagcagaacataaaagtttagaaaatttgcagcctgccatgtggtagaaaagaaaatctcactttctggggagaaattcaagctggctgcagaaatttacataagaggacgata

SEQ ID NO: 44639 - DNA, 1033 bp, Homo sapiens
acacagtttcactctgttgcccaggctggagtatagtggcgtgatcatagctcactacatcctcagactcctgggttcaggggatcttcccatctcagcctcccaagtagctaggactatagacgtgagacacgatgtctggctaattttttacattttttattttttgtagagttggggtcttatatgttgcccagggtggcctgccaccttgtcctcccaaagctgggattataggcttgaatcagatcccagtgatctttatccctcagctgcatttatatgggctaaattcatacatagtatatcaagatgtcttcaggaagtttaaaaaaaaaaaggtatcaaaaagacagtatgtcatgactgctttatctattttagtctcttagtttttgatactaaagactagaccggagaaatgctttaacaaatcacaaaaatctaagaaaatagacagttaattatttttaaacagtggaagaatttcaatcataattaaagcagcttttgtattttttgatgtcatagcctatagtgaaatttcatatattctgtttgtagatacatgagttcctacgatatgcttgcacataatagaactaattactatttgttgagaacctaacctgtacctaatatacatgtagtttctaaatcaaacattttactttttttaaaaattgtaaaaagcccatagtaaattaatcatgtttaccatttaaaaatgtacagttcagtagtgttaaatacattcacattgttgcacaacagatctctagaacttttttgtcttgcagaactgaaattctgtacccattgagcactaattcccacttccccctccccccaaattcttggcagccacctttctactttctgtttccatgatttttgactgttttagatacttacatgcatgggattaaacagtatttgcccctttgtgattagcttattttgcttagcataatgtcattgaggttcttccatgttgtagcatgtgacagaatttttttcttttctgtaaagg

SEQ ID NO: 44640 - DNA, 1029 bp, Homo sapiens
cttgaactcctgaactcaagagatccacctacctcagcctcccaaagtgctgggattataggtgtgacccactgcacccagcttttgtttttaatatttgtaagaaccaccttgtgtctgccaacaggcgaattaacaaaatgtggtatataaaccaatgaaaacataaaaggagtgaaataaagacgtaaaaggagtgaaatttcaaaataaaagtaaaaagatttcaaaataattcagacataaaaggagtgaaattctgatacatggatggagctggagaatattatgcttagtgaaataagccagatacaaccttttgtacaaaaatacaaaattgtatgatctcatttatatgaggtagttagaagaggcaactctatggagacagaaagtagaatagaggttaccagggctgtgaggggagaggtgaatggggagtttaatgaatacagagtttctgtttggaatggtgaaaaaattctggagatggataatagtgatggttgaacaatattttgaatatatttaatgccacagaattgtacacttaaaaatggttaaaatggtaaattttacacgatatgtatctgtatctatatatatctctctctatatctatatatcttaccagaatacaaaatttaataacacactccgaaaacctttacagatgaggaaactgaagaaaactgtctacaggggaggagttaagaatttgcccaggattattcagctgggaatttgcattcgggatccaaacttagttctgtttcactacatattatctactccatattatctgttctgtgttatctgctggctttctgggtgattaaagatatgtcagctccgagaagaatgagtttatttgaatcattcagaaagttacatttaaaagtaggtaattgtagtttgatggaaggtacagtgtgaaaccctagacagactaaaggttaactttgaggatttctttctcagccagagtggtaatagtatgcatttgagaggggaggagagtagagttct

SEQ ID NO: 44641 - DNA, 1031 bp, Homo sapiens
atacggttagcagtttcttattaattggtctcgttttctgtgaacaatagctttggtgattcagaaaagactgcatggagaaatgtttgttgcctaagaaatttaacgtgtgctgtccacagttaaacttcctttatcacacaggatctgtaacatttaaattcatttggaaataaaaatgtgtctttgctatttacttaaaggcttgctttttagggttcaagcaagttattattagtttaattttgtggcgttttgatgtcatcataaaacagcatttaataaacctttgaaaaacacgaatgctgtcacaattgaatgtagtttatacttttaggggttttggagtttattttctattactcttcataagcattagcaactaattcatgtttaggaatactgtacaagtgtgtaatcctaacttgtttatttgtaattttatttgcaggaaaacaagtatttaagatatattttaattttctattcatggtctctaaagttaggaataggtaggattctagtcatagatataaagcgtcttgttctctcttttcggaggtgtgttgggtgatgtaatatttaaggtttcccggaaacaggaacactgcatcttaaattctcgtttttgtggaaagtgaatatattccaagaaaacaagttagaaaaacataggcgttcttctggttgcactgtcctatatgataaagatctaatgtgcatctgctaacttaaggtttcataaaaatggagacaaataaatgcaatataaatttattacatatattttggagagtgttgacaccactgtacgggcattccaggtgctggtctaagtgttgagacattataacaaaaaagtaacgtttatattagttactattaattctgtatttaaaaaatcctattaataatcttgtccattatgagataaggtagttatgcagatttttggcagaaattcggatattttaggatacatatgtgtgtgtgtgtgtgtgtgtgtgtgtgcgcgcgcgtgtgtgtgtgtg

SEQ ID NO: 44642 - DNA, 1049 bp, Homo sapiens
gttgctcaggaccacggaggagtgtgtaggcagctgagtccccactgctgctttaaaatgtctattttttcctctctcattcttgatcatgttctgcctacttttctgaaacctggtgttaactcaacacacagagaaacatttgaagaaactgctcacaactcaaacccagaattaaccctttagccttcagccccaccctttgtttgctcatggatctgaacaaagtaatcactgggtttttaaatgttttcaagagtcatgaattattgtcttaattgttttaagctataaaaattaattcttttaaaaagggtattcttaaaaatccttttggtacgaatggtaacagtagaacaaacacatccatttaacctaaaagagttttcatgtaatagcaagtcaacaattattcattcaactagcatgtgattttttcttctttaacaagagtggtacggttttgtgggtgctttggggatggctaataaacatgagaggacatacctggttgatcctgacagtagcaaaagaagaaaataataaattttaaaaagaaataggaggattgtcaaggcctctgctggggtgggtaggggaggtggaattcaaatttttgagtaactgacaacggcacaagcactgaccactcagaatggacactggtcacaaacagcctgtgtggctgtattggtgtcaccttaacattaaatgggtcaactttcctttggtgccagcactaactggtttccagctccaacaccccagctctggctacaaacttctgttaggcactttttttttttttgggacggagtctcgctctgtcgcccaggctggagtgcagtggcatgatctcggctcactgcaagctccgcctcccgggttcacaccattctcctgcctcagcctccctagtagctgggactacaggcgcccgccaccacgcccggctaattttagtgtattttttttttttagtaaagacggggtttcacggtgttagccaggatggtctcgatctcctgacctcatgatccgcccgcctt

SEQ ID NO: 44643 - DNA, 1100 bp, Homo sapiens
aacaatagctagacaagacaaagcctgtgaaatcttatgcaggcttctctattaatgtggtttagaatgatatgttaggagcactgtataccagaagaatattgattgcatttcagataatgcaatttacagttaataagatggttaggctggtccagggaaatatttgttttcttcaacaatgttaggcagaaaacatacattttaataaatactacatgagaacaatccttttgggtgaatttcaaggaaacaaacagactaccatatggctacacattggtggattttcacatttctaaaatctggataaatgtattatcagtaatactttgctttacaaatagatttgtttgaattattcttgctttagtaccagaaacctttgctgacattttgtatgtaacgtttaatatctaaggatgatagttctaggacagaatatataatgtgatcacatttgtttttaaaaaaatacacacacacacacacacacacacacacacacacacacacacgcaaactctggaagactagaccccaggtttcataggggttatggtgaagaacagggcagagtgagattatagggtatttttacttttagagttaaatatttctgtgacatttgaatttttataataagtatgtattgtttttgaaatcagaaaaagatatattaatttatggggctgacactgatgatgttgacagtcaaaatagtattgcaaagagcctgaaaataatctagctgcagaatcatctaccaaaactgattcctgcctgcatgtacaaggtggatgctgcagcattgctcagagtggccacagatctgccactccttgaaagtccatcatcagagggagagaaagaggaagtatgaaggcgtatctgtctgcatagactaggaaaatctggcagaggatgagaacctagtaactctaaagtcactgggggctgtgatttttcaatttggtaccatgtgcttggtccacatgttaaaaaaattgggcggccaggggtggtggctcacgcctgtaatcctagcgctttgggaggccaaggcgggcagatcatgaggtcaggagttcgggaccagc

SEQ ID NO: 44644 - DNA, 1011 bp, Homo sapiens
tgtcagcctccaggtagtggcgcttgctgggatttaccgacgctggaagcacagactttatctgtagggctcacagtttcctccaggtcccacagagctgtccggagggtcacacagcaaacagataaaggaggccagcgcagattgggcggctctctggtaccttgcggtggctgagccactcaagacaaaccgggggaaagacgccctgatgacgaaatgctaattttgcatatctctttcccaggatgcttagcaacacgtctgattcttgttattcagtacgtttttccagctattgataaatagatgtgccagggaattcttagagtatatatatatcattaatattgtaaatatagtcatcagtaaactgaaaccagaatatcactgtaaggggaaaatgaacaaatttgggggctttaaatagttcaaacagtaggaggacttattggctggtccgaaggtagtgagttatctcaattgattgttcacagtcagttacagatcgaactccttgttctactctttccccccttctcactactgcacttgactagtcttttacgagagtttccactctcctggcatccctcgtttcttgttttcatctcaattttaaaatgttgaaagtcagcatcattaaataaagcatggaatacagggggaaaacgaagtactattcttttcttccagaaacaaacagtaaatttgggaaaacccatcacagacaagaaggaaaaagaaaacaaaaatcaaataaatagtaatagatactacggaccaattattggtaaagatggtatagtatgtcctaagagatcaaagacaggaaatgggatgagggtgaataggggtttttctttttcttgtactttttcttttcttttctttctttttttttttttttttttttttttttgagacaggctggagtctctgtcacccaggctggagtgcagtggtgtgatctcggctcactgcaacctccgcctcgtgggtccaagcgat

SEQ ID NO: 44645 - DNA, 1052 bp, Homo sapiens
tgggctgcattgtgggtggccagtgggtctcagggataagggggcaggatctccagggctctgagactgatcagatgctgagggtgggtgagtggacccaagaagacggataagatgcccaggtttctgaatgaagggttttgtcacttatgaaacttttcagcatatgcaaaagtaaagagactaggataatacacaccctttactcatcacccacctaaaacaaaatgttgctccatgtttaaacctgtgcctatcccaccctgcccgccccttttttttttttgaggatatgatggaggaaggacaggtcttgcctgtctaggtcatatcacctctgcctcatagaaaaggaagcagaggtcagatagtaaagaatttcccccagagccacagggtgggtaaactgggaagctggagcggaactcagaacaggtgtccttcagtgcatcagcagctcctagaacgtgttgaagccttctgaaggaggttagtatgcactccactagagtagaatctgtgagttacttggcttgggaaataatggagctcaaacaaataaaacttccgtggggttcttgggtgaagagcctctcagagcctgtagccccggcaggccaggcctccctccaggagatggataggacctttgacttcaaggtccctggctttgactacacatcccacagatccacgagttcccgaatgatcagctctcctaacacgtaagtctcgtcagctgagtctgtcttctgagcacacacctgcccttggaaggaccaaggcatcccctgtcaaggtgggccagccctagggtaagggctgtgagctaggaagggctccaggagccccatggacaaatctgaccctccaggccaccaggtgcacaacctcagaccctacccggtgcagcaaagggattaaactcgagtggacatgattgattatttgattcctactataatgaattaaagaggtacactcatgcactgagtaatgacatttctgtcaatgatggaccacatttatgacagtggtcccataaaattata

SEQ ID NO: 44646 - DNA, 1272 bp, Homo sapiens
tctctggcctttgcaaggacagagagtagagagtagcagctactactttctacagtagtgggctcttcctgtgtgactggcccgtctggtggccacaccaacctcactgcctggtccagagagagcccccagaatctttggcctttgcagcactgacgccccctcccgccttgctttccttggcaggaaaactgaagccagtcatcaaatcccagccagtgcccaagaacaacaagggacccgtcaaggtcgtggtgggaaagacctttgactccattgtgatggaccccaagaaggacgtcctcatcgagttctacgcgccatggtgcgggcactgcaagcagctagagcccgtgtacaacagcctggccaagaagtacaagggccaaaagggcctggtcatcgccaagatggacgccactgccaacgacgtccccagcgaccgctataaggtggagggcttccccaccatctacttcgcccccagtggggacaaaaagaacccagttaaatttgagggtggagacagagatctggagcatttgagcaagtttatagaagaacatgccacaaaactgagcaggaccaaggaagagctttgaaggcctgaggtctgcggaaggtgggaggaggcagacgccctgcgtggcccatggtcggggcgtccacgccgaggccggcaacaaacgacagtatctcggattcctttttttttttttttaattttttatactttggtgtttcacttcatgctctgaatactgaataaccatgaatgactgaatagtttagtccagatttttacagaggatacatctatttttatcattatttggggtttgaaaaatttttttttacaccttctaatttctttatttctcaaagcagataattcttctgtgtgaaaatgttttctttttttaatttaaggtttaaaattccttttccaaatcatgttgattttgctctttgctttttcgttgtctgagaaattgttggcgtagatttggcttctggtatgtgtttctgattgcttcctgttgagcacaaagtgagagctgccactgagcagccctgccaggggtgctgtttcaggctgggcatcgccaggcggcctccctgcaaaccaagggctgggggcaaaggggcatgatccagggtcccccagggtgggctcagctccagggagaggccacccacgtggcagccccacctcttgagagcccccagtgccggagcagaaaggaccctggacccagaggcagatactgc

SEQ ID NO: 44647 - DNA, 1023 bp, Homo sapiens
tggctcactcagaaatcccagcctggggcccttgcacgttggtggctcaggtatattttttaattgatggcttccctttttagcaggatgggagcttagattcaggtgcagaaccctcttagagttgacgtagctgagacttggaggagttcagaggctgcagagctgggactagaccagccctggccccaggcaggcgtggccgtgccacctgggcacaggtcttaagggcctgttgggcttgcagctgtggcccccgtgacaagtggggcttttccagaaacatgtttccctccaattgaggtaaatccagggtttgagcattgtcagaatattagcgacaggacctgaagcctgacctcagagtctgagctgggacttgctctgtgtggccgcctggcttatggcccttggtccctttcagcaactcagttttggcggagcaaagtcctagaggtggccaaggacttccctgagtacacctttgccattgcggacgaagaggactatgctggggaggtgaaggacctggggctcagcgagagtggggaggatgtcaatgccgccatcctggacgagagtgggaagaagttcgccatggagccagaggagtttgactctgacaccctccgcgagtttgtcactgctttcaaaaaaggtgagcccgtggctggggctggggtctcccatcagctgctgtgctcctcgtgcggaatccagacaggccaggggcgtctggtgctctggccacgggcacgacacccccttaagtcagccagcagtcctctctcacccccgagggactctgacttctcgtccagagaaatgtcgggtgtgaccccaaactccaaggcaccagaatagcttagaagaaggatttgcaagtgttactattttcttcttggcagttctcccagtgtttactttgaaagcaaaagcaagattcggagtccatctcagggcttacctagcatcactcagcggccttagcacatttccagcgctgatgtgctaaaattccag

SEQ ID NO: 44648 - DNA, 1050 bp, Homo sapiens
tgtcaccagccaatgacgtggtgggcccccagggaccacccgggacttgacacattctgaagtgtatgaattttaggaaagtttttttttttttttttttttttgagatgaagtgtcactctgtcacccaggctggaatgcaatggcgcgatctcggctcactgtaacctccgcctcccaggttcaagcgattcttctgcctcagcctcccgagtagctgggactacaggcgcgtgccaccatgcccggctaatttttgtatttttagtagagattgggtttcaccatattggccaggctggtcttgaactcctgacctcgtgatccgcccacctcagcctcccaaagtgctgggattacaagtgtgagccaccgcgcccggccaggaaagttttaaggagagtcaccaccagctttgtaaccagtctgggtgttttccactcagattcttctaacagagaaaatgccattgaggatgaagaggaggaggaggaggaagatgatgatgaggaagaagacgacttggaagttaaggaagaaaatggagtcttggtcctaaatgatgcaaactttgataattttgtggctgacaaagacacagtgctgctggagttttatgctccatggtaaggaccgcgttctaatttctgcaggtggacaagcgctgtgctccattcgctcagcccttcacccggtcatccagaccttggggggtggggtaggagtgtctgggtgcaggaacttgcactctagctttaagaacgctgggagctcactcgttctaccactgtgcgttgaacggccagtgagccagccctcatggaaggcgatgtcttcttgtctcagtccagtgggttaaagatgaatacgtcctctgatggtcacagctgggggacgggcatttaacaagcggcaatgacacagagccctgtgttggtaacagacacgtccttgttatagattctgctccgacctgtctcaggccaccctgccttcctcttccctcaaaggctgttgctcaggcagctgccccaagtgcaggctgttggc

SEQ ID NO: 44649 - DNA, 1032 bp, Homo sapiens
atagtaggctaggtgcttacagaactatgtcctatggtaattgctcaaatgttcatttaattgaatcaaattatttcagattgtgtttctccagttacaaataagtgtctgcagaagttccaatgattgacttctctatgagtctccccaaactattcctgtaaaacaagggcctatgtattcaatattccacctctgtcagggtataaatctgctttgtttgcagcactggttaacttttgaaaagaggaacagcaaaatcatcacaagtctattcctggaattatgtcactaaagcctaagtcaattcacatgatgaatattctgccttctcaagatttgtgtcctaactccttccccaatataacaaaggtagaagggcttttaaacattactgatgaggacaggtgtgaagccaccctgagacaaaaggaaatgtgtttggggttccaagtggcaatgacctttgacgacatggccatctgtttttcaatacaggagtaggagaatctggatggatatcagaaggaactttacaagcaggggatgaggagtatctgtgaagctctgatctctctaggcaagatgggtttttgttgaaaatttgagagtaattcatgaaatcagagactaagcaagtctctgcaggttacctgttctttctgttggctgcttggttggcctctggagacagcaacctacttatcagtaggatatcctgagaaaaattatttccttgataattatgcctagttcatgtcttccaagtatcctatttgccttataataccttaatcaaatgctttattgccaccaatttcttagggtctctgcattttggctttattgtcttagaacgcaacccacaaaacagccagaagtgtatgtgccagttaaatcaatgctcatctttccagaattttcattcctttatttaattcaggagaaatcaataaacacttattgcatacttcccatgtatcagattctggggtaagtagaaagataaataaaatatagtccctaccttca

SEQ ID NO: 44650 - DNA, 1068 bp, Homo sapiens
gtgtccaggcacaggaaaggcagagcgttctcagcatgccctgcctgtgccctgggcaacggccgccgccgagcgagatcccggggtcgcgcagggtggggctggggctgaagggcgcaggccccgcgtacgggggccgcccctgcttttcctccgcgagaccagagcttagactacggcaggactagtccctggggttccccttcgggtgtcagaccctctctgggcggtcgcgggagggctcgggctcgcaggatctgcaggtgttggggctggggcagtggggagtggtccgtgggcccaagaggacgaagcggagtcgggcggttccggctgggaggaggcgcctccccggggctgccctgacctagtaaaatctgtggggaagccctggccggggagccttcccccagctcgctccctggggcctggacaaaaggccgggaaggaaacgcagccctgggctctgcggtctttggaacagagactgcgacttttcatcttcgtttcccacctagtgtggggcccccgtgggtgctgtacaaatgctgtggaatcaaagaatcagtggaggagtcccgcacgcacccattgattttactcagtccagagtttccggagagtgcctgcttccctaagcgcagcttgtgggcggagactctgctggatgaggtgcagattgggagaaagaacaggaaattacgggtgagaaaagaaaaggattcccataaagggcacatgtgaaagtacaatgctgaattgcaatattaggcacttccattttctttttatttatttatttaagacggagtctcgctctgtcacccaggctggagtgcagtggtgccatgtcagccgactgcaacctccgcctcccgggttcaagcgattctcgtgcctcagcttcccaagcagctgggattacaggcgtgcgccaccacgcccggctagtgtgtgtgtgtgtgtgtgtgtgtgtgtgtgtgtagctgggattacaggcgtgcgccacccccccccccccccggcgagtgtgtgtgtgtgtgagtgagacggagtatcactcagttg

SEQ ID NO: 44651 - DNA, 1109 bp, Homo sapiens
gacagcctcagtgtgataaaaaaaatcagaggcagggctttatggaggggatgggcactaggagtaaggtgacaaagctcccagaccacttaaaggggcagaaagtattaatgtggggttgggggagaaatacagtcaaatattttgtattataaagttttagggcaatttgctctagcaaaggcatttttttaatatctctgccctttacagaccctccttttggcaacattttatttcaaacttaaacacccaaacacatacatgttctccttctcttatttctgaaaatttttgctttatacatatgcaatgtttggagaaaatacttttttcctcttgagttcattctcagtctccttcaaataagcatttcattacctttacaagttttgacactgtagatgagtaaagttcactggcttctcatcagttcttagtgactccatggtatctctccactgctcaggtaactgagtatgctactaacatactaacacaacagacacctagggcttagaaactctttatgcagatgacaggttttatgttggtaattgctatatgttctcttgaatctcctcagtagacaacctttcgatttcaactttttttttttttttttccttgagactgagtctggctctgttgcccaggctggagtgcagtggtgcgatctcctcactgcaacttctgcctcctgggttcaagtgattctcctgcctcagcctcccaagtagctgggattacaggcatgcgccgccatccccggctaatttttgtatttttagtagagacggggtttcaccatgttggccaggctagtctcgaactcctgacctcaagtgatccacctcagcctctcaaagtgctgggattacaggcatgagccaccgcatccagcaacctttcaagtgcagatttgattactactaatggccgaaattcatgtaaaataaagtctagtgcttatacagaaacatcctagttcttccaaattcaaaaataaggcattaaaaccaagtgttggccgggcgcggtgactcaagcctgtaatcccaacactttgggaggctgaggcaggcggatcaccaggtcaggagatagag

SEQ ID NO: 44652 - DNA, 1032 bp, Homo sapiens
gggcaaaaaaaaaatcctagaaatcctgtcaaagaatgtgagtaatttgaactggcatgacagatagcagtgaccacctagtagcttttaattggtcatcttatgcccaccatttagaatgtttttttttttttcctctcagaacatgttcagaaacaagggagaaaagagccaaatcacttacagatacatgtgacctgaccaaaatgaaaccaaaagtaagagtgttcataaaaattttaagccaagtatgcagacagatacggtttggatctgtgtccccactcaaatctcatgtcaaattgtaatccccagtgttggagaggggcctagtgggaggcgactggatcatgggggcggtttctcatgaatggttcagcaccatcccctcggtgctgtcctcatgatagtgagtgagtgagttctcttgagaactttgcattgaccacattgctggagatgaggatcatacagacggagtagtagcttgtgctgctggactaataggggacttatatacagcatttgggaaggatgtactgaaactagtagaagctaggccactgatccatgaattgttaactgaacggcggagatcgaagacgaacaaagcaaaaacccttgctacacgggcaacaaaagaattcaagaaactgaaggaccaagcttgatctgttaccactgggatgataacctgaggacccccactggaaatctccaatcttttgaaaaacctggaagtgaggagtgtgcatggatgctgaatgtttgggaatgagaggatgagtgagtgaggcttgaaaacacaccacattgaaaatcctgccacagcagcagccgcagccgccgccgccaacagcagcactgtcagtgagctaagtaagcactgacttcgtagaaaaccataacattggctatcttggaaaagagaaaaacaatggagttacttataaaaaaagaagaaagaaagaaaaagaaagaaagaaagagagaaagagcgaaagaaaagagaaaagaaaagaaaaaagaaaa

SEQ ID NO: 44653 - DNA, 1082 bp, Homo sapiens
catttatttcacctgttcttacttttttaacatgactaccagagtacttaaaattagatatgtggttcacattcttttttcttcttagctctggtctagaccatttacattgattatggttattagtttatttggattctttttaccatcttaaattgtgctgttaatctttagttctgccttttctgtatttttcctgcctctcctttgggaattattcatttaggtattttccttttcaaactattgttattttaaattaatttgacagttatgtattctatttctattgttatagaggaatctttagaaattttttcttcctttagaagttattttttgtgggtctgatggtaatgagccctcagtttgtgtgtgtatatgagtttatatgtgtttatatgtgtgaaaatatctttatttcatccctatacagtgagtcctctgtatttatgtattccacatttgtggattcaggtaactgcacatttgaaatattcaggaaaaaaggtgtctactaaacatatacagacttttttcttgtcattattctctgaacaatacagtgtagcaactatctacatagcatttacgtcgtattaggtattataagtaatctagaggtgatttaaagtatacaggaggatgtgtgtgggttatatgcaaatactacaccaatttatacaagggacttgagtattgtgggattttggtatccatggggtgccctagaaccaatcccccactgacaccaagggacaactgtagtggaaagacataattttagcttgagtgttattttctcttagcttttgaagataatttgccccttttttctggcttttgttgttgctattgagaatctgccatcagtccaatcaggattcctttgtggatgatctgcattttttctttccctgcttttaggtctcttgggtgatctgcagttttaatacaatgtgtctagatgtggatttattttcttttatcctgctttaatcactgaaatgtttcaccaatttgggaaaatgtgttatcttccctctttgaattttgccttgccccctttctaaccttttatt

SEQ ID NO: 44654 - DNA, 2746 bp, Homo sapiens
acttttctctcactctgcccagctgcagagtgctgttccctggtgctgttccctccgccctgtgccagggccttcgcagtgccctctactgggaatcctcctcaggcaggtcccacctgcaggcctttcgtgtcatcggcactgcaggccctccccacccaggactccaggcctactttcctgctttgggtcttccgtgttagacagtgtcacataatatatatgtttcctatttatagattcatcgtatgtcaggtctcctccattagaatgtcaatttcaaaagtataaaaatttttacctgtttaatcattttaggaacctagagtattgcctagtacagagtaggaattcaataactatttgctgaatgtatgctgtttcaaaatttaaaacgtgtgtgtgtgtgtgtgtgtgtgtgtgtgtgtgtgtgtgtgaaataatgtatttctgatagcatttaaattcctttttaggtctcccaggcctccctaggaattttctgtttattctttctatccacattttaaaacgtctgctgtgtactttggtagctgtaaacaatatataatacggttttttgtgttctgaaaaattacatagatgtcattatatttatcactcattattctgtatttcagacttatccatgttgatacatgtagatcaagttcattccttttaacagatgcttaatattccagaagcaactatattgtaacttattttccattcctccactgattggcacttaagctttttctgattgttcactctcacaagcaatactgtagtgagcgttcttgcgcctgtttttttgtggccctgtggggatgctgctccagggagtagacccagcggtggcctcaccacgtcgtaggcttgatttcatctcttccgttactgtatggccctccccaggggtacccagtgccagcgggtgctcctagaacttgcttcctaacgtctgcccagtttccataattacatttttgccgacctgatgggggtgagatggcctctcgtttcaacttgtattttcccccttaagttgcacgccctttttatacgattatttggctgcttctccagtgagttgtcttctgtttttctattgagatattcttcattttcttcttgattcagggcttctttgtatgtgttctagatacaaatcctttgtctattatttgtgttacaaacattttctccgtgtcggtggcaggtctttaacgttgtagttcttgtatggaagttttcactgttgaaagagtcaaacatgtcagtcttttcctttatgatctgtgctttttctgtagtgagatatccttgcttacctcactcaaggtcagaaagatactcttctctattttttttataaatttttaaaagttttgcttttcaaatttaagtctttaatttatctagaattaaaatttgtgtagcttgcaagggagggtttcagttttttctcccacaacgatggtctcattttccaacaaagtttgctgaatgtgttagcttttctccactgatttgtgatgcgattctgtcctgagctggtttctgcatgtgcacaagtctgtttctgggtgcttgcttctgtgtcattggtctctttgtcagtctctgcaccaacagcttgctcttttagcttcataataagccttgatatctagtagactaatccttctctgcttgttcttcaaaaaactgtcttggctattcttggatatttgttcttttatatgaattttgggatctgtatgtcaagttcctaagaaaatcctgttggaaatttgattggaattgcattgactttacagtctaatttctggagaattgctctcatgacaacattagcctttctactcattggaacactcatttattgaaggcttctatgtgcttgaataagattttacagttttcttctgatagttgtttttcattataaatgggatttttacagtttattagatgtattagttatttcaggtgtacaggtatgctgttgacttttgtttattaaaaaaaatcttgctctcatgtctaatggtttgtttctttatattctcttggattttttatgtagataattatatcctctacaaatcacacaaagattgtgtctgttttttaactttttgtaactttatttttcttatttagcagtttgactaggacatcgttgaatagcagcagtgatagtagcatcctgtctgtggacaagatacatttctagagtttcagccttaagtatgatttttgcctttggcttttgaaaatattgttaaagacatttccttctaaccatgctacccaaaagtttttattgtgaacaagtgttatattgtatcaaatgctgtttttctcctttttaaaaatattgtgttttgtttcttttaaaatagcagtccggaacctttttggcaccagggaccagtttcatggaagacaatttttccaccaatgggggaccgggagcatggtttggggatgaaactgttccatctcataagaagggagtgtgacccagacccctcgcatgcacagttcacaatagggttcgcgctgctgttagactctaatgccaccactgatctggcaggaggcgtagctcagtcagtaatgccagcgacagggagtggctgtaattacagatgaagcttcacttgctcgtcttccacccaccccctgctgtgcagtccaggttccccggggcatggggacccctgttttacaa

SEQ ID NO: 44655 - DNA, 1092 bp, Homo sapiens
ttgttaccttttgtgaaggatgagccctgggtgatggagttaaaagctcccttctccctgtgttgagtttcccagaatgccagtctgggaacggcggtggcttctctcctacgcaggcccgggatgtggacctttctgttcttgctgacttggagcggggaaggccccatctgctctcagatccagtatgtaattgactcacatttgagaaagactctttccttcagccttctcctacaaacatgcgtggcccttacggcaacatgcctcgaggtcagtggagaacatgggcagacggtgctgcttgcagcagacattttcttcatgcctcaaaactttgcttccctcagcccctggggctactgctcttctccttgtttaatcctgcccaggaagggcctggactctgtttcttcctgggctggttttctcttcctaatggtttctgtgtgaccccggagccgagggcagtgagacctgttagagagggcaggagcaggtgcagacgtgaggttgtttcgtcagcacaagtgcactgctgtttaacgtgcacgctctgtggcagtttcttcaccccggcactgtggacatttgggaccaggtgattctgtgtgtcggcggcatcctctgcattgtaggatgttgagcagcagccctggcctctcagggcatctccagatgccagtcacctctcccccagccctgggcatgacaaccagaattgtctccagactttgccagatgcccccagggagcaaaattgcctgtggttgagagctactgctttgtgacaatcaagagatttcatttctagaccattgttggttttccgggatgactgtccccagctttgactggaacgtggcaaaaactaaccttctgtctttcctcagactacgccatctccaagcccgaggtcctctcccagattgaacaagggaaggagccctgcaactggcgccgccctggccccaagattccagatgttcctgtggaccccagtccaggtaagggctgggagaaggccagggaggcatcaggtattgtgcaggaaacagagacggaaaggccagaaagggtgtgatctttcca

SEQ ID NO: 44656 - DNA, 1655 bp, Homo sapiens
ttgcttttagctgttgttgcttttaactccatggagagaccgaatggagtgagcccagcagggcatgctgggcaagagaggtcccccgagtcccaaataagaatttcaactagtataaaacgaggcagcgaacccacacgtggaagtctgataccgcttgcagaagggaattgaatagatgtctccctattggtaaggatgtggttttattgacttgaaataacaaagcccgcaagcaacaactgatcatccgcgggatgctgccacaaggaataattgagcactcattcagacacaggggaaaccactgcctctttcagtctttctcccagattccaacagtcagtgttacagcatttcaccttgttcacctccctgagaagacgttgcagctcactcaccccagtgggcactgggagcctctgctcaggtgggagacagatgccccccacatgcacatctggtgtttatgaagcagatactggggcttcataaacacagaaggggcagggaagtagccccagggcatagtgtggggcctcctgactaaaagtagcttgcaaacccctgcctataacagccacttcctggcagtcattgtgccacttaggagccctcctcaccgctcttcctttagttccttcactctgtatagaccctgccagagcagctcagggtggagcagctgcagccatgggacctgctccaggcaaggccctatgctacacagtccctgggggtgaggattccagaggagtcaattccctacccgcccttccaggggatggccgagatgagcgttcccacagggaaagtgaaagttgcaaggctgttgcggaaacaccaggggttccatctaggtcttgctgctcatctcacagaaagccagtcactgagacaagtattgtcagggaagaaggctttatccaggtgctacagacagggtgaacaagagatcagtctcaaatccatcatcatcaactgactaaaattaggggtttatatagcagggaagaaatgtaactacatgtgggaaaacagggattaacgaggggcaaggaagaggagttggccaacaggcagcaggtggtcacctggggaatcatgatgggtgaggggtctggcttctcactttccagatgtggggatctggtaaatttcagtttcttgataccgtctgggaggattgctggctggtttcctgagaaaggaattcagatgacataaatgtaaatttctccttgggtttcaagactgagagggtcaatttctaggtttattcaagaaaaaccataaacatcagttctatgggacaattgggcccatttcaaggctctgaggataagggttaatgaggggacagagtcgcctggagaagttcactggggcctacaagaaactagagaggcttcctggcaaagctctatgctgtctatcctctcttctctccttgcaggaagattccagtataatagacccgaggtgaaaaggcttttgttcaataagtagaaaactgaaggggggtgggaggcacatggatttgaaccagagaccgcttggcctgcaggcaaatgctgtaccttcagttgcacccctcacttgttacagctgtttctgataagcacttgtgcagccccatcagcacctcgatttct

SEQ ID NO: 44657 - DNA, 1026 bp, Homo sapiens
gaaagggagggagaccgtggaaagggagggagaccgtggaaagagagggagagggagaccgtggggagagggagaccgagagggagagggagaccgagagggagagggagagggagagggagaccagagggagagggagagggagagggagaccgagagggagagggagagggagagctgacttatttttgtaggtgaggattatcacccatgtgccttcttttctgttttccaatatacctactatatatcaacttctcagataaaatgctatatatttactttctgttcaattttatcttccatgttttaattattatgattagttaatagtgtttatgcccaatgtacataatcctaagctgaactaagagttctgatggaactttttttcccctcaagttactgatagcctcacattttcaacggcttggttttcttggaatatctacggttttccacaacctttcattgctccatgaaatgcctgtcaagtcagtttaccacactgtaaaagctgttacataattaacattttcacttcttgttttccagtagatctctggcttcctgctctgtttgttctggttgccctggaaagcctgctgctcagcccatgccccgggacttcctccaccctcaccaggacattctttccatctcttgtctcctgtgtgcaagtccctttctcctggattccatgtcttgaatgtttcttaatttacttcctcattttggcagaggatgtcctccagttgttttctgggaatggtgagtagaggtgaattttttaagacctggcatgcctcgaaatgtccataattccacctacacacttgattagcagtctggacagacatagatttctagtttcaacttataatccttcatattgtgaaggattgtttctgttatcttctggtgtctagtattgctatagaaaagtcaagtgccattgtgatcctctatcttttgtatatcacctgtttctttcactctttaagttttgaagatcttcccttttgt

SEQ ID NO: 44658 - DNA, 1068 bp, Homo sapiens
cattgaggctttcaggtacggtggccttcagcttcgtggaaatagggaaataataacaacaaaaagcaagcagggcagttgggcctgatcagattaatccctccatttgaaggcaagcaggaaacaaccggccttgggggctcaggggttacaaggcacaagtgaaccacttggaagtggccctggatcttcacttatttttgcatctgtgaccttcaccatgagactttgcagatcttcccactagaggtggaacatgcttccctgctcttgagttagggcttgcttctctgacttgatttgatcaatgagatgttagcacatgtgatgcaaacagaggcttgaaagctgcttgcatagttgggcctccccctttgcatttctgctgtcaccaccagaagagtgtccccttgctagctgctactcctccagctgggattgtggaaggaacacacatggagcaaacttgagcccggctcagacagaaaccaagcacagatggacccacagcttgaagcagacccagcctacatcagctgattggcatccatgctgctgacctatcagcacgagacatgcttatggtttcatacagcctaattttgggatgatttgttgtgacacattgttgtggaaatagctgactaatacagccttgattcttacacctgcctctcccccaaccctcatcccctattcccatcaggtactgagtaagggaatgggaggagatagttgaaggagttcaggttgtggctacagagtaggaaagtaccattagaccagtgaagggtctctgggaaatggaggggtgaactcatgaccagaagggcggtctctagtcagttgtggtagagttgccagtttccataagctggctgggaatgaatacaatttatagtgcactgtagaatccttgggtgtggcaacacaggtgaaatatgctaaggaggaatgtccaccaggcaagggggtatagctcacaggtagagcatttgactgcagatcaagaggtccccggttcaaatccggttactccctgctgccacttacctgtgggttctcttt

SEQ ID NO: 44659 - DNA, 1456 bp, Homo sapiens
agtgactgcaccacaaccaccatctccatctccagcacaccactccccaaccgcctcctgctgtcccttcaattccctctctggtgtcctgattccagcagtttccagtctttcaagacctgcaagccatcgatcttgccgccttttcactgccctctctcatttccctccatgcccaccattgtggtctccctttgcacacagccccagtgcccttgcccttgttttgttcattgtatccacctggtgaaatccatcagtgttctgtgcctgcagccaaacagctgcacgtggtgcagagaaccaggtaagctggctgctggtgtcacgtgacatccacgcccagcgacttcagtgggcgctctgccacgcagtcacactgtgtttccctagcctaggggccggccaactgtggctgagggccaaatttagctcatctgtttctgtatggcccacagctgcgattggttttatattttaaccccctttttttaattaaagagaaatacaccactcacttgcacagctctccccatgccatctgcctgcacctgtgcccccttctctgccttcagtcctgtgactgctaaactgtcgactctccagccaaagccccacttccacctggtgctgcatcccaccccatgccagcttctcaagggcaacacagtcaatcctaccttgacctctacccctacagccacggcctgcttctctgctccgcttcgtggcagagccccttgggtacatctgtgcttgctgtctcttgcctcttccctcccactcttttaccccttccgccaaaacctctccagcctcggttaccagggccctccgtggtgttaaatggtctgtcttcttacttggcctgttcgtaacacttgccatgttgctcactttcctctcacctgccacccaccttcactgctctttcttcgctggttcctgttgccctgtggagcctctcagccctagagcgcccttggttctcacacccgctctctacttgcatttcctcattcccatcgtctcccagggtcttggggccacacataccatctaggaatgtgtgcctcaaacctgggtttttgccccaaattccgcacatctagctgcttggcctgtatctccacctcagtgtctcataaactccccccaaacattcccagcgctgagctcctgtcttctctgaatagcctgctcctcccacattctccccaacccagtaaatggccgctccatccttccatttacaggcaaaaccccacgagtcctctctgacctcctcctccacatccgcatccactccaccagaaaccctactggccctccctgccaggtttgcccagagtctgtccacgcctcatcccctccactctgacacccaggcttatcgtctcttgctgaggttgttgccagcccctgccctgatcccccagagtctcatctcagccca

SEQ ID NO: 44660 - DNA, 1612 bp, Homo sapiens
ttgcaaagagtcagtcttgcttccgagaaccagtgtctatttatttattcatttatttatttttgagacggaatcttgctctgtcacccaggctggagtgcagtggcacgatctcagctcactggcaacctccgcctcctgggttcaagcatttctcctgcctcagcttcccgagtagctgggattacgggtacctgccatcgtgcccagctaatttttgtatttttgtagagacagggtttcacccccgatgttagccaggcaggtcttgaactcctgaccttaggccatctgcccgcctcggccacccaaagtgctgggattgcagatatgagccaccgcgtccaaactcaaccttaatttaagccagtagcagttgtagaacataaacccattggtcagccttatggttcagtatgattagaggcatacatttatttaaggtgaatctggttaccagatatcagtgtctcagatttccctggagccagtcagcacctttgaaagttaagggaaggacagatggacacaggagaaaaaccacatttctgaattggagacctgctggtcatttgaccacagagaccacatctctgcaaggctcgacccctgattcctccagaagacctgcccttgaccgtcccacctgctttggttttccctttcgtctgacactgagaaaggtggtggtccgcagaggccctcctgtgcgccacttgtgtgaaattaaatgcatcccccatgttcgtcatctatctcagtcagatttgcactttcctaagggcagaagcatgttccgggctggccgctttgccagtcgtcatcaggacattgacagtttagttctacagatgcatttttgagaatcttctaggtatcaaggacagtgctaagcgctggaggatgtaaagatggccgaggacagatacttttgggctggaaaagagggttacaacccatgcgcgtccagcttcttagcctgggtgggaggttctgggtgggtgggtttcgttgtatttacaccgtatgtggaggcttctctcacttccacggcatcattcaatgagagtaaagaggggctggaaatatgttggttgctggtaagaccctgtaacactctctagctgcatcgtatgatgttcagcagcatccgtggcctctacccaccagtagacaagatgagtagacacaaactccactgtccatcctgagcctgttggcagggatcctgtgtagcctttatccctgtcctgtttttccaaggagccgggaatcatggctcatcccttgccacatttggtctgacccatccccttgtgagacctcacctccccttctcctcacctcctgcacatccctccactgagccttgtgggacttagggctcagcagacccgccaggtcctgagtgttccctgctcagactgagctccaggggactgcagccctctgagtgcttgtcatcctcttccctgcctccatctgagcccaggcccaccagggacagggtcctcgcctctcatgattgcgtctctgccagcctcactccctctgtagagaccctgcctttgggtctcaggcctcgtcttttttgctgcttctgcagaccttc

SEQ ID NO: 44661 - DNA, 1130 bp, Homo sapiens
ttatgataggagtttgggtaacctgtgagaaacacagccacagtgtaaacctcttgagacaagctacactgatgggacaatcagggtgagggcaatccggcgccgtggctatgtcagctcatgtgtgctctttcaggaggacatgtctcacagacacagatcttcagctctgacatgctcgatctcacaagcccttttctgaaacctccatcatgtgctttctgattctctacaggcagaaggaacataaagtatgcattttatgatacgactcagcttggagggatgaagtagaaggtcctcactgcacctcatggcaggctgctgacggcagatattttaccgggctcactgaactgggcagtcagggaagggtcggctcctgctctgtccagctgtcttcataagggactctgtgacactttttataaaaatgactttgatttctgcataagaaggcttcccaagcttgctgtctagcagtggctgctacagggaattattcacatggcagcaagagagccctggctccctggaccaggacattccctttgtgtgtgttggaatgagagcaggaggagtgctggtcagaagcccctccccagggctctgggacttcagtgttctcagacaaactgggccgctcctctgagctgggatgctgacccacacttggccccggctctggcatccacaggacgctgccttatccgtcatctcgctggggctgggggctagaggctgagcaggtcacactgaacaaaagaagtgtgtccccatcactaggctaacatctgagtttcttccacagtatttggtaacacagtcagaaacaagactgaagatgattctggaggcaactgggaaccccccagaacgattctgcaggcttctgggaagctgaaaaaccccaaggccagactggcctcagaatgcctgagtccttttgattccactggaaaagccatccatctgtgccaagtgtgtggagagcttcaagagccatatagccctggccaccatgagcacagccacgtgggggagtagtcctgaaagtgtcctggtgtggcaaaggctttccactaagtggacctcagatggcacaggaagaccctcctggggatgtggga

SEQ ID NO: 44662 - DNA, 1329 bp, Homo sapiens
gtacagcgctgcccacagggaaggaagaagacatggcggggacatggcctgactcccgatgtgctccttcctgtagggtcttccacatggctgggctccctcccgtcccagcacacatcctgggtccatgtgaccttgaacttcacaaggtcaaatctgtgcagatccaaatggtgtgtggatctaattttcttcctcaagaagccttgcacaatctggccctgcatgcttcctctgagcccacacttcctgtgagcatacacttcctgtaagtgtatacttcctttgagcgtacacttcctgtgagcttacacttcccatgagcttacacttcttgtgagtgaacacctcctatgagcccacatttcctgtgagctcacacttcttgtgagtgtacacttcctataagtgtatacatcctgtgatcatacatttcctgtgagcatacacttcctgtgagcttacatgtcctgtgagtgtatacttcctgtgagtttacacttcctgtgagctctcacttcctgtgaacccacacttcctgtgagtgtacacttccggtgagcacacccttcctgtgagtgaacacttcctgtgagtgaacacttcctgtgagcccatacttcctctgtgtatacttccagtgagtgtatacttcctatgagcccatatttcctatgtgtttacctcctgtgagcccatacttcctctgtgtatacttccagtgagtgtatacttcctatgagcccatatttcctatgtgtttacctcctgtgagcccacacttcctatgtgtacacttcctttgagcccacattgtgagtgtacacttcctctgagcacacacttcctatctgtgcacttcctgtaagcctacacttcttgtgaatttatacttctatgagcccatagatcctatgtgtatacttcctgtgagcccacatttcctctgatggtatacttcctgtgagcacacacttcttatctatgcacttcctgtaagcccatacttcctgtgagctcacacttcctatgaggccacacttcctatctgtgcacttcctttgagcatacacttcctatctatgcacttcctaagagagcatgcttcccgtgagcccacatttcctatctgtgtacttcctgtgagcatacacttcctacctgtgcacttcctgtgagcatacacttcctatctgtaaacttcctgtgagcatacactttctgtgcacttcctctaaacacatacttcctctctgtgcaattcctgtgagcccacacttactatgatatacacttcctgtgagtatacacttcccatgagcccccctt

SEQ ID NO: 44663 - DNA, 1035 bp, Homo sapiens
ttaatcagatacctcaattagtcaagacctgtctcttttatcagaaagtgaatttagagaacaattctaaaacatagggtaatacaaattttttaaaagaaaaccaaattctaagctcagcttggtcccagggcaaattcactcctcattcttaattcttctccatttctggtcacgggaggggcacccccaaaatgctgaccctaggactccccaagatcctccagcatccaaaaggcctctcttctccagtctttactttctatgggaacaggttgaaacccctgggaatgaatacattctcaactaaaaatacaaattaaaagaatttcttgcttagactatcagaaacttgatctagtgcacatatttcccaagcatttcatttactagatctgattaagacactctgttattgtatcatttaaatttttaaattttattatttaaattttaaatacaagttttaaaggatggttacaaattagtaactcaaaataattgagtggaaagatcaaggtacaagacactctgcctttaccttcaaagtctgagcaaatatgattttatatctttttaattagagattcttttaaagaccaagttactgcagtcctgtcttgttcttctcctattttatattgatgtgctcagtaccttggtgtctttgtctgtcttttagggggaagggaatacacgttttggactagagtagcacagatgccattcttacctcactgtaggtttctttaaagaatgtttagtcctgacaatgcgatgcagatttctttctctccccactctatcttttgcagagctttatccctttttcattgttcagcataactgggaacctgccagctcgccacaatgacacataatgatttttgcaaagtgtgtgtcaaatgtcctgagcttagaagagattcatcgtagagactgctgcttaatgagtgtaaattaactgatcatttgctaaatctgatgtgcccagtggtgtggacgggagaatgctggataggatgtaggagatgc

SEQ ID NO: 44664 - DNA, 1049 bp, Homo sapiens
ctggtggttccatcagagcaacatgaaggaaagcaactgtcggaagccacaggccctcacttaatgtggtttgcagagtggtaagtgatggctcttcccacgtgtatggttgtctggcacagagagagccgggggacccacacgctcacgcagtccctgccagcaactgtgagacatgacgactgtgactttgcagaatccagggttcatccaccctcccgtgggtcctcctgctccccgttttgctgccatctcgggcccatatctgcaggttcagggaccctggagtagctgcacctcagcctcatgtcctctgtggtcccttaattgcccaaaagaaagaatttaaatgtaaagtcgctctgtgcagcgagcacgttccttcgtgccctgggcggcctctctgacagccctgactctggtctgtgacgctgggatcgtgactgctttcaggcaccgtcatggccttccatggtcctctgtctgcctttgtctccttccttctgtttaggatgccctttagtgggggaactcctggtctgccttctcctctaaatctgtgctctctaccaaggattttccaagcctgcgcttcctcctgtcatctcctttgctcctctccatggctccggctcctgttccgcagcccctggacctatatctgtgatcacacttagtgttttatacatcagttattcacttaagtgtcggccgtgcccaccagcccagaagactcaaggatgagtacttttccatacttacctttacacaagatagggtctcagtactcatcgcgattaatacatgaatgaacttcagcaaaataattgcaatgtgtaaaggccaagatccagaataaaacctttcatttcttagctaaaaatctccccacatccattagttttacatccttggcattaaagatcctaaggagaaattggtattcctgtctggaaaaacttgctgttgcttaatttatttaaaagtaagttatttttaaataaatatgaaaccccatctctactaaaaatacaaaaaattagctgggt

SEQ ID NO: 44665 - DNA, 1092 bp, Homo sapiens
tagctactctgcttgtattttttgtttccatccatcctcttacttgatacccctccatgttctaaaaacaaagcctcccttcacattttgagtgtgtctgctatggataatgaggcagcaatcctggttctaaagaattgggataaagcagtcactaaggatcccattaaaggtcaaaccatctaattcttaatctcacggcacctgcttgataatgatggatacttattaaactcattccttctgggtctcagaataccctttagaatgatccaatttttcatccaggcacttgaagttcattaaatgaatgctggagaaactgttttcccattgacatacttgctttaatgaaatgagaaagtaagaagtgcctgaatattggttgttgttctcaaacccaaggaaatctaggggtttgtggagatccagaatctcctctctcctcaccacttttatggcctttatctaattttacttttcagccacgtttgatgtagctgacttccatctcgaaacactctcttctgattttcccttcgattgcactatccactcctttttccatttcctcaaccggttctgtcttcccgcgtgacctctcagcattgaagtcttatctgcctgccctcttctggatgcattgtattcctggatgagcttctcaatgccctagtctcatatactggccatatgatgaggattcctggttttacatgtcaagccttatcttcgtaagtgaactgcaaactcagttttcaaagtgcccatctgaccactccactctgatgtctaacatgtcctcgctaacatgtggccagaagagagctcctcatccccacggccattgctcctccaccagtgttccatctcagtaaatggcaccaccaccaacccaggtggtcaagccacaagccctggggttgtcattcgttcactttccctttcacctcatttaaccattcagcaagcctcatcgatcccatctccaaaatatacccctaatccatgcagtacacccacctccccactggggctgcaccaatccagccccagccactgttgtctctcactggaatctctgaagtcact

SEQ ID NO: 44666 - DNA, 1060 bp, Homo sapiens
tcttcttctgtgtaaatattttataactatagcctattataaactatttgtttagaaaaaagactggaaaagtacacaccagaatgtagggtgtgtattttcccttcaaactcatttacctttgcagccctcttgaataatgtccttccaagccttttgaataacttttatgttgtcgaatgtttaaatcgtctccaatagtggtaatttttacagtctacaaacgacaaaaggtaattcaatgtcaagaacagttaataaaatagatattcagagtggttgatatggtgagatgaggttgggtttcaaagaaatggttgttctaaaaggaaaccaatcatgtgtatgtatgttatatgaatgttgagctctgtttggagttacccgcatcatgaaggtgccctcaaccatagcaatatcactaaaataaatgacaaggcaatttttttggaaggtaatattgtctctgaatttaaaaaatggaaaatctttatgcctctctctctctctctccattcaatgacactaatgactacttcaggatgtctgaatattgtacttgcttatatatgttcattgcaaccaccatggcaatgaaacatgacaggtcctatagtggaaatcatggcgtggtcctccaaggttaaattggagggaaaccccaccatgaaatgcagtggctagatgctagatcttcactccactccccactcaccagcgctgcttctggctttgggattgagcttccttctgggtgaagctcagaagagctcaaacttttctgagccaaggtcaagctgggaaccttgttttactctattttatttttaaatattcacttcccattatgtctgagtcttcagccacatcttgtttatctggtgaacgagtaaataacacacagtttctatgtcagtttcattcatcccatgttttattgagcacctgctgtaagccaggcattcacctggtgatcacttaaggcccatctccttgcttccagcttgcttccctataatagaggattttttattctctttgagtatgagggtgcacagca

SEQ ID NO: 44667 - DNA, 1026 bp, Homo sapiens
cgtagagtggggagagaataggagagagagactgatttctggtgtctcttccttttcttagaagaccttcctccagtcctgtcaaattagggccccacccctatgacctcaggtaaccgtgatgacctcttgaaaggccctatttccaattatagtacactgggagttagggctttaatgtatgaactggaggtagggggagcacagttcattcataataaagggtaatgtatacgttttgcccaaaggtccagagactttttattttttcagttttaaatacgagatatagacccatatttgttgacaaggaaaaatgttcatagtatattgttgaatgagaaaaatcaagtttatttattctttttctgtttctgttgtctgtcatttcctcctgtttgatgatggttattgttttaaaatagatacttggattcttggaaatgtctttggaaattcttgggaatttttatctgctttgtttcaatatttttccagatatttttttttttcggtcttttggagacaggatcttgctctgtcacccaggttggagtgcagtggcacaatcttggttcatgtagtcttcacctccgaggctcaagtggtcctacctcagcccccgagtagctgggatcacaggcatgtgccaccacacttggctgacttttaaattttttcatagaggtggggtctcccaatattgcccaggctggtctcaaactcctggactcaagtgatcctccctcctcagcctcctaaagtgctaggatgatgggcgtgagctaccacgcctgcccctggatatgtgtttttgtctgccatttgtttttcctcttttctctgtcccttttctttctctttgagtgtttttatatcactgttggctggcttctttgtgccccttactcgtctctgaatgagcagagttcttctggactaatggcgtgtgggtaggctggggaggtcctgggcagcgtctgggggaagctgtgatctgccctggactcttcccttgccgctgga

SEQ ID NO: 44668 - DNA, 1118 bp, Homo sapiens
attaaggtggggagacacaaagggaggatgtgaaagaggccttgaattgggcaaaaggacagcagtgaggtgtggctgtagcccaggaataaccagggaagcagataatttgttaaaatgtctcagcctaataagggaactgggcaggtggggataactaaaaaagtgcataaaagcatgttgtctaagttggcaccagagtgggggaattttaagaggttcagaagcttggccgtcaatacccacaacagctatgggggcaagggaaacaggcccttgaaaagaaggtaatgtggagtgggtagcctccatatcaattaaaaaggggacggacttaccctccactgtaaaagttacccgaagctcggcgtccatgatggtccagggggctttcccaggtgatcgggcagcatcagtcttcagccgcaaagccgagatctgagaagcagtcagccagagagctttgatccagagctccaggggccctagaagtggctgtgatattagttggacagtccgatttccagtggggtcccgcacaggtgggacacggcttaggaagaatcctgggctgtgggcatttcttggtctagtggccagttttgcggcacttgaatcaaggtccatgaggaggatttaaaggagtagctggaggctgtggtttggttgttctgaagtttttgtgtgctgaaggcatggctggggtttgtcttacagcaggcgcaagcagttgcagctctgaaatgcgttgccgcttggctgcctctttattgttgaacaccttgaaggcgaggttgattaattcctgttgtggggtttgagggccagattccaatttttgaagcttttttctaatgtcaggagctgactgggtgataaaacacatattgagaataagatggccttctggccctcgagggtctagggctgtaaagcgtctaagggtagccaccaagcgggccaagaactgggctgggttttcatctttaccttgagtggcttctttaagcttgtcataactaacagctttgtatgctgccttttttagcccttcaactaggcaagagaccatgtaatctcacctagctatacctgggaagcctgtctggtattccctt

SEQ ID NO: 44669 - DNA, 1047 bp, Homo sapiens
gcctgcctctccccttccctccctgcaggctgctgctggccccgggtcctgcctctcccccaaataattgaaaccacagcatttgtgttattgctttttcctttctctttcatttttttccttttcccttttatctcactctccagtctcattaccctccccataggcaaccgttcaaatgtacttactgtgaatgtgttgcttgcatatgttcttgcaaatgtgtattttgtctggatatatgcatatagatttaatttatgtaaatgatattgtgctatatgttgtattttggtgttcgcttttcttacttgggaatgtgctttaagtccagctgggttgctgttcgacatctagtctgtaggtgcgtattcagtggcatgcggccgccacgcttcacccacccactctcccggggagggaccccacaatgtctccaactcccagccactgtaaatgaggctgtagtgaatatccttggacatggtcccttctggacttgggtgaggatgtctgtgggatacacgcccgggagtggaattgctggatcgcgggacatgtggacacttaactaagtactgccatgcctgtcatcaccctccttctcagagctcgagattcccatacccgcatatcttggccactctcgacattatctacctttctaaattttgccaatctaataggtgacagtgatttcttgttgctttaatttgcattcctttgatttctgttgagtctgagcatctcttaggcctggtagcctcttgggcttactttcccgtgaattgcctgctcatgtcctttgctcattttaattttgacgtcgccgtcttttgtccttgttgatttgcaggagttgcttgtgtactctagagataccaatgcatactgttaaacattcagtgtattccagattttaattccttgttgaactggaaacagatattgcaaatatcttctcccattcagtctctcttcaatttatccaacaaagatacttaattttgatgcaaacaaattcattgatttttagctttgtttgta

SEQ ID NO: 44670 - DNA, 1028 bp, Homo sapiens
tttgtggactttatttaatttcataaattggctcctttcccacagtctggttgatgtggtggtcaagtggctctacagggcccatgggctggaggtgtctctggtctgttactgccggccgcaatcctgcttctggctcaaagacagcaccttgctcttctactttaagaggccatgaccctcacccctcacccctggggcagggcagcactgtcgctgcacaccccttcctcccaccctcccttcctctgcccaggagggcctgatgtggtccctcagagtgaggggagcaaggatgggctccccaccagggtggagaggaaagggctgggcctctccttgtggttctccatatctcaggtggatcctcttgtcctttccctcatcatcccccccataccaaggcctgcaggctggcacaggagagccccaaagatatggttccatcaggaacaccccctcccactccctatttgtcagtttcccaatgtttggggtccagtgaaagagagggaagttgggcctgtggctggggcctggtgtgtccttactggcaggaagaggaagggagggctccgcctacccccacccccacccccaccgtctcaagcctggggcctttagctcttgtggggaggctgaggaggcagaacttgtttgtatggagacaggctgtgtgccgcacttggtcccaaatgtgggaaaggagtcaggatgtaaggcaggacacaggtgttcttgaaagtggagtcaccccgtcttctccctgcctcttcttgctgagctctgggcagagttttcttccagttatacctttattgctgactgtgattctgcacctcacacctaacccgggcttggaggatacctgtcctcccttctctctaagatgtcagtcggctaaactcactcacactgaggtgcaaatgactgataacctcttgctaccattctcccctagagattcatgggggttcaagggcccagctccacatttcagaagccacgtccagctggatgatggctgg

SEQ ID NO: 44671 - DNA, 1077 bp, Homo sapiens
agggcagcgggagctggtgttagcggcagcggccacggtctcctggcgtccctgggccggggtgggtgttggggcccccgacttcgccgactccgcgccatcgcaaagcggtgcactcgggctccacgcgcgccctgcgaggtgggcgctgcgttttcatttcacgggtgaggagacttagagagacgaagccacttgtccaaggtcacgccgctggtgagtgggagcgcccagcatggaacccagcaccgtccagccgcggagcccgcgttccaccctctgtgccgccgccgcctcctgtgggagagggaggtggtcgggagagtgcacgccggtgccgcctgggctccagactgggcgcgaccactaacccggttaatgacctcgggcttaacttaaccccttcgctgctctgggcctgcgtttctccaccggtgaaatgaggtaatgccagccctgcctactcttcatgggcgtgtaaggagcatcagagatggtgcatgtggaattgctttgcaagtagtgctgcgctgagcgcactgaggattatgattgctgtttcaaaggcgtggaaggaggcagaggggcggggtggggaagaggcccagagcagtcacaaaggcttgctctgaccacaggccccctaaatgaggagtgaggtaagcagtaggtagcaggtctttctcccctttggagaaaacctcacccccttttttgggctgcccctcagggtctccatcacccaactccatgcttcgagtcctgctctctgctcagacctcccctgctcggctgtctggcctgctgctgatccctccagtacagccctgctgtttggggcccagcaaatggggggaccggcctgttggaggaggccccagtgcaggtcctgtgcaaggactgcagcggcttctggaacaggcgaagagccctggggagctgctgcgctggctgggccagaaccccagcaaggtgcgcgcccaccactactcggtggcgcttcgtcgtctgggccagctcttggggtctcggccacggccccctcctgtggagcaggtcacactgcaggacttgagt

SEQ ID NO: 44672 - DNA, 1027 bp, Homo sapiens
tgaatatcctcagtcagggttgctgagtgtcagatgtatgcacatgtgaatggattgctaggaaaaaacaggagttctttgtgttcattttatgttatgttaaaatggtgagtctgtgacattttacatttttccagctggcaacataacatacatttaaaaacttcaacattaaaatggatgtctaatttatactttttgttttatagttttgaagtgattaaagttatccatggcaaattgttggatatggtggggaaagtacagtaagtagtaccattttatctgcttgttagagaaacttcttttaatagtatcttctgagcaatacaatctggcacttactggtttgtcttttttttcttacaaatagaatacctattatgttggttgggaataagaaagacctgcatatggaaaggtatgtagcttttataaagtcaaatctaagatgatttagtcactgaagtatcattttaattattgttctgatgtcaagaatatttttagctgtagcatttttatccgttcagaggtgttatggtcgtgtgcagcagaagcaaaagtggaatagaaatctcacattcctctagaaaagagagagcaaactttataggaaactacctttaggttatctgccactttgcataaagcaaattctaaaaagacatagtgctcatttatgcagcaagtggtttttgagtaccagggtttgggattacagtgaggagcaaaggaggcagatgtcccctgcccaggcagcttcatgtcagagaggaagagactctacagcctgcatgcaagagaattgagctttcaggctctttcacaatttcccctggccttgggtgcttacaacctagctgtaaaatagtcaattgttacagatacgggagtactggaaaataagatcatgttctctgagctggaaggtttgctggagcatggataatcccataaagcaatgtctattctgttccccagctcaggcgtaattaaaacactcctgtgttacattcttgatgct

SEQ ID NO: 44673 - DNA, 1030 bp, Homo sapiens
tcaccccctgatacctgtcctcttgacagaagaataggagttggggcttatatggaccaggggagcagtagaagtctctgttagggggtcgggggcatggcacagatgacgaggctcattagaaattagtagggaagggaagagccgcttgagtaggaaattgttttggattgttgggttttgtatctttcttttatagttgactatataatttattgcctaaaccaagacactttcagagttgtgggctgggggtgctaataataattatgttgggacaacagtgtaacttagaatgtcctgggcaaagaaatacagctgttctgtttattgtgggactctgacactatcaagacttcagtttgcttttgtatccttatttggaatctcctttaagctcctgaaaactggtgatgagaatgtaaattgataaatcactttcatgtaatgttactgtggaaacacgttttgtatcaggcaattcagggaaccagtatttcataactgtttggagtgtgggccctggggttacacttgcctggatttgaatcttggtttttgttgctaacccagtaaccttaaggaagcgaatgagggctgggcatggtggctcatgcccttaatcccaacactgtgggaggtggaaggatcacttgagcccaggagtttgaggttgcagtgagctgtgatagcaccactgcagtccagcctgggcaacacagcgagatcccatctctttacataaaagggtgaagaagtctttctgtgcctcagagctttatctataaatagtgataactggcattgttgcaggattgtcacattggggttaaagaggctgtgctctttctttgtagaccttcaatgctgctgaggcaagtgtgacgccagcatattaactgtgttgacaggctgcatggtggaagtgcacatgttcttaatacttggagagctgtctttgaaaagatttctctaaagaataaatttctttatactgactacttatcaagttggaatatgtgttcctctg

SEQ ID NO: 44674 - DNA, 1120 bp, Homo sapiens
ggcacgttttgccagactcatgtctagtcatcaaggtcaaaaaattcattgtctcctccttggtattccattccctggaaatctactcggtactgcaggatacctccaattccaccaaatcctttcacaaaccgagacccgtcttgcattttatctgtgatcatttccaacatagctccaaattttttatagttgttagcaaaccattccaacaggggcatgctctcgataagctcatgttcctgtccggtctctttgtctgtgaaatgagatttatccttttcttgctttggagttagagaattttctccttttctgtgccttggcaataaagaacatatctcattatatccagattttcatagaccattagaatttctacagctcccttttccaaagtctttagtgtatcttcaacgccaaaacagtactttcgcgtgtcctgggtgatttcatcaaagtatcgttctattgatttcttttcttgaatgaatttcacttcggagaggacttcagtagataactcagtagcttgattgaatccattttcaccaccataggatatatcaactaattttaaaactttcgattgtaacctctgatcaaacatatcagattgacttagttcaaagtcagcagatccagctaaaactagaccagccacattcactttgtccccagaaatagctgcacagcagtctctgctactttctgaacatagttatgtcgcttttccatttttaaacgggcaaaacgcctctactgtgtttctttgggagatccacagtgaatttgtgcaggacttctcttgtgtttccttggagtgtgccaaaaagtgcaccactaccatctattacaatgaatccaaacttgctgtcatctgaaagtagtgctgtaagagcccctttatggaatttgttgtcacacaatacaatgacgtattaattggtttgaaagattcaaagtcaacgttgactttcttttcctttccttcttctgttacagttgttccacagtaaacaaccagaccatctggaggtactttgttataaagtttgagcctttgttgtatagatgtaatggctcccaggactggatggcggtttactcctgccttaat

SEQ ID NO: 44675 - DNA, 1651 bp, Homo sapiens
ccagccacctcagcctcccagagttctgggatcacaggctgagccactgcacctgtattttgctggctttaaaatctcaatcacatttggcatttgtttgaaagagaacatttgggccaggcccccaaagattgaatcactgcaactgttggttgaagaggacagtttgtgagtgttatgtgttattcaaattaggtgttcattaagcatttgaataaatgctctactttgtaccagtcacaaaagctaggacagttataatccttgccctcaaggagcttcagtctagttgagagccacaggaacttgttcctgctactgagaataataattgttggtgcttttgaagcatttactgttatggggtacaatcttaatgcacatgtattaatagcctttaaactcgggtaggtgcagttgttacacctattttgcagataaggaaactgaagtacaaaaagtttatgtgacttgcccaatgtcaaactgttgttaagtgacaaagccaggattttgaactcaggcagtggctccagagcaggcagtctttaatcagctactacacgattgttacttaaatacagttgggataggtgtttgagagaaataatcaaaggcagggctaacttgatcatcaagtggggatgggggtggtgggagaattgtctttaaaggaaaggcagtgtggctcactgagtgaatgagaagggtgaggtgtgagtaatgagagaggtcgggactcatgtgtttgccaactgtccttcaagaacagttttgtctgctctgtgaaaagttttagactttttcctagaaactgtgggaagtgactgaagggttttaagcaacaaataagacgatgatctataccagggactggcagacttgttctgtaaaaggccagatagtaaatatctcaagctttgcagggcaggccatgtagcctctcttgcagctattctactttgcctttgtaggacggaagcagccacagacaatacatcaacgagtgggtgtggctgtgtgctagtaaaactttatttatggatataacacttgaacttcatctgattttcagtatcatgaaatactgtttctttttccaaccacttaaagatgaaaaaaacatttttagctcatagactgtacaaaaccaaaacaggctgtaggccaaatttggcccctggtctgtagtgtgctgatcctggcttccatcctcctgctgttctgtgaagtgggaggggtggtaagggagtagaaatgggaagaccagccaaggcgcagagtagatgagatgaagaggacgcacatgggagatttccttagagggagaatgggcaagaccaatgtggaagctgtgaagtagccttcagatttctcatgtgagtgcctgagtaggtcatgttgccattggctaaaatcagaaatgatggaacaggagcaagtttaaggggtggaccagatttatttatgcacctgccagatccacacactttccttgctttctggccacagaggccctagcgaccacccacacagggcacagttcccatggtcccgaagacaggtggctgtgcctacaagtagggttctgagggtttgctggccctgggtccttgtgtcacccaaggatttgaccaagcataccctcaca

SEQ ID NO: 44676 - DNA, 1035 bp, Homo sapiens
gagtataccacattttttctatgcatttgtcaattggatatgtgggtggtttcttttctttctttttttttttggctattattttttatttatttacttttctgaggcagggtcttgctctgttgcccaggctggagtgcagtggagctatcatggctcactgcagtgtcaacctcctggactcaagtgatcctcctgcctcagcttcccgagtagctaggactgcaggtgtgcgccatcacacccagctagtttttttatttttttgtagaggtgggaaccttgctttgttgcccaagctggtcttgaactcttgacctcaagcaatcctctggtctcagtctcccagtgttgggattacaggtgtgagacaccacttggagctctactttctggctactatgaataataatgttttgaacattcctgtacaagcttttatgtagacatgttttcatttctcttgggtacattcctaggagtggaattgctgggtcattatggttaactctgtgcttaatattttgaagaactgtcagattttttccagaacagctgcacaattttatattcccatcagcaatgtatgagggtttaattttctccacattctcgtcaacaattgttacactgcctttttcattttagccatcctattgggtgtgaagtggtatcataggatttgcaaataatttctcctgtctgtgggttgtccttttaccttctcgatggtgtccttcaaagcagaaagtttttaatttgaaggccgatatatctatttttctcctgccacttatgcttttggtgtcacatcttagaagccattgcctaatccaaggtcatatagatttactactatattttcttctagatattttatcctgttaactcttacattagatctgtgatctatttgtggttaatatttgtatatgatgtgagggagggatagaactttatacttttgcatgtggatatcaagttgccctagcttcttttgttaaaataatgttctttcttcattgaattcccttg

SEQ ID NO: 44677 - DNA, 1063 bp, Homo sapiens
gcgagggttccgaggctcccgtgattgcggaacggggtgactatctgtcatgggaagcttgtacctgcctgccgctcactggatgcactccccaactgcgctttccaccgcctgtgccagggtctgtgctctttgaccaagatcagccactgcatgcttactcatccttttaccacctctccgtcgagagccggggggaaattaagggctgaaagaagcttggctagagatgcggggtgcctagagtcgtaggggaactcttgtgcgatgcggtgctgaatccgaggggatgcataggtggcagctttaacagctgcagccaggaagtaaccatgaatcaaatggaggggttcaaagtcactaattgttcaaatatcaacatggaacctgggatccagcctttattggcagcctgaatccatgctcttgtctctgttctcttgatttcctcctctgcattttgaggagttgggaccgcgaggtgttctggctcttgggtgagccttccctagtcagtcaagtaagtacttattggcaactatttggaaatagtagtccctgaataatcacgttataggcaacaagtacctcggctacctgatttcaacccaagagaatgacctaaagatcttgactgatttacccttttcaaatgtcgaaatggtagctctagtctttggtgagcagggctagttttatcacttttttttttttttttttggctacagaagttccttatgtccagttgaaatccattctgttttatcttccctctattcagcgtcctcctgaggacggagatgtgacaggccaccccttagccttgtcctcacaaactgttgcttgttaaatactgtgctaacttagtctccggtgggatacagggtcacttttagtccctattttctgtcttcagtatttcatatttctgcaacctaccccacttctccatatttattttcaagcgtagtcatattaaacgattttggagaggttaagttgctcccaatcttgtatttgatttttttttttttttttttccgagacggagtttcgctcttgt

SEQ ID NO: 44678 - DNA, 1038 bp, Homo sapiens
gaatatcagctctgcctgttgtggatgagtcaggtttgtgtgtttggcgctgacaggcagaaataattgtttatctcagggtgcaattattgtaagatgacctggcacaggagatacgtggggaaaatgaaaacttgggtatggtgaataaattcagcaccaaggggcacgcaggatcgtaaaaaaagtttaattggtttattttcatatgtccattaaaatatgatttcatatctaagttttcatttaaaatagacaaggttatttatcagtgtttaacttttagtaattatgtcattaaaactgattttaaatgaatttctttttgtcccttaagacatttttctaacatatatttttcatttttaggaaaagttgtagatatttattccaaatttgatgtaattgtaagtattttaattttgttcaatctgtcacctagaatgcattttaaacattcatgtaatgtgtttttatgtttttatcttgtttcttaatttaataatttctaaccttttggggtgtgaggatattatcagaattttatagaccttctatagtaattgtacttttaatctgcattggtttagcaaccaattatatattagtagcattttataatttttcatctttacaatacatgcatattttatgcactgccacagcatgtgtatatattttaaatgttcttgtttccacgtaggaggcctgatttattcgcctctagacgcgtgcgcagtgcacacgtggactcatggctcctttgtcgggcgcatcccattgcttagtgattgggagccactgttctaaagaagaaaaggggactgacactttatagccccaaatgtgcacgccattttttgccacaatactgaccccacattaaacattcttctgcagctgcctcaaaccctttgcttcacactattatgttaaacataacagtcaccgagaaatatgctgatcggcattttggttgagtgggacccgctaaaatgaatgagagccccatgaagccatttggatccatggggctcc

SEQ ID NO: 44679 - DNA, 1050 bp, Homo sapiens
agccgggcatggtggcacatgcctgtcatcccagctactcgggaggctgaggtgagagaatcaattgagcccaggaagcagaggttgctgtgagccaagatggtgccactgcactccagcctgggcaacagagtgaaaccttgtctcaaaaaaaaaaggtatttttcttcctggactttgaaagtatgttttgtttctcctctttttcttcaggttaaaaaggccttctttgctttggtagccaacggtgtccgagcagcgccactgtgggagagtaaaaaacaaagttttgtaggtaagcagtgtgggcctgaggaaaatcgaaaatggaaaccttgaaagcagaaagcctaaagtattttaatagatgccggtttggaattcaacctagtaaacatgtttccaagttaaagaacattcttgctggcagggtgcagtggcccatgcccgtaatctcagcactttgggaggccaaggcagggagatcgcttgagcccagcagttcgaggccagcctgggcaacatagcaagacctcatctctacaaaaacatgcaaaaattagctactcaggaggctgaggtgggaggatcacttgagcccaggaggtcaaggccatgatcgctgcactgtactccagcctgggtgacagagcgagaccctgtcaaaaaaaaaaaaaaaattccttgcttttacatactgggtaagaaggtggacgtgctagtaaggtccaaacactgttgtcctttttttctttttttttttttttttgccgcctcattgagaactctacacactgttgtaacttttatggagcttttgttgttgttgttgttgaatttcttttaatttagcaactttttggctctctgaagagcttatgtgtctttaccagcccaatgaacaaaccccacgtaggacaccacagtcagatgtgagccagctgccccactttgggccacacatggcatatggcatccctgggccccgcactcatctcgctagtgcacacctttttgacagggcaaattagatgctgtaaacatgactga

SEQ ID NO: 44680 - DNA, 1048 bp, Homo sapiens
cagtgagcagctctgagacccccgagttgatctttaatattcttttcccattgttttttcaatttttcttttcattccactttttggaagattttttttttcctaacccttctagtgagatctgtgtaaaactgggacttgtgtgacttcagcgttcaaggccctgtcagatggctgcccattcattcataattaagagtgactgctaacagttggcatggacataccaagttcacaggtgggcttcttgcttggtgggcttcactgaagagcagtaagccagccatctttttcattggaggccccatgttcctatgtctgttttatttctggagcagtgcatttcctccagaaaacagtccttccatggcaatggtgggcaactgttcttctgaagtcgaaggagtactggggcttggaggggcatggaagatgagttcagggaggagggagtcatgcagctggcaagggaggcctgggcctggacggagaagagtctcgacgaccgtatttcagaagctggacccttcttgacgcagtagatatcagcgttaattttaaaagcttcacagtcaacttaattactgaaaatcagagtgaagctgtgtagaaagcagtgaggcatcagaggaaccagcttcccattctggggaacacagatgttctccttggtatagactgccagagtctcttagagcagctcgggcctgctcactattctaaaaacttacctatgaacattttatttcccatcttttcttatctaattatcacatttgctttgaaatgtgttgaaaatcctattaaaatgtaaactttaaaattaatcatagtttgagcaaattgcgtatcagttaaaaggaaagaaattttcaaaggtactcaagatccctgagcggtttcttcctgcaaattagaactagattgtgttagtcctctttgtatcctgtttattggttaattggaacaccctgtgccgtctataattatggagaattttccaagtatgattttaaattgctttataaacagctccatgcacgtgttc

SEQ ID NO: 44681 - DNA, 1033 bp, Homo sapiens
tagcgaaagcctgtctctaccaaaaatatgaaacttagccaggggtggtggtgtgcgcctgtaatcccagctacttgggaggctgaggcaggagaatcgcttgaacccgggagatagaggttgcagtgagccgagatcgtccactgcactccagcctgggcaacagagcgagactccatctcaaaaaaaaaaaaaaaatgcttgggactgctgccgggcacagtggctcacacctgtaagcactttgggaggccaagctgggcagatcacctgaggtcaggagttcaagaccagcctgaccaacgtggcgaaaccccatcactactaaaaatacaaaaattagccaggcgtggtggtgggtgcctgtaatcccagctgcttgggaggctgagtcaggagaatcacttgaacccagaagccagaggttgcagtgagcctagatcctaccactgcactccagcctgggtgacagaacgagactccatctcaaacatatataaaataaaaaccaaaatgctcgggactgggaatgtttcagatttagtattttttcagatttttgagtatttgcatcatacataccagttgagcattcctaattcaaaaatccaaaatctgaaatgctctgatgagcttttcccttgagtgtagtatggatgctcaaaaaaatttggattttggagcatttcagatttcaggttttcagatttgggatgctcaacctgtgtatatcactgttgttatttttggaaaacatgttcatgccttttattgctattacaaataataatttctgaaaacaaagtttaagttatttcaggcgttattgtagaagatactgcgtcaaccccaactgtctttcttccatctgcccagtcttagagtgccgcaggtagctcctgtttgcccccaggtcccattttcaccctgcctcacctgtctttctcaccagggaggctgagtgtgggacacatcggctgggctcccgtattctggggtcctgttgagcttagccagtgaggagcccccagag

SEQ ID NO: 44682 - DNA, 2039 bp, Homo sapiens
tcgggctgcggggtaccgggcgtccgcggaggggacgcgagccaggctcccagagcgcagccctgagcccggcatccacacggacgggcggcccttttgtccttactcgccgaactcgaattacagcaaggtgtcagggagcgctaattgtttgtgcttgtcaccatgcactcggaggcaaccccgaatcatacccacagtccagaccctttaatcatagactggtgcccttatctgcgcctgtgaagatatgaccggtagggtgtgtcttcttttttaatggggaaagttaaataggaaaacctgaagaggttattgaatcggtgttgagttcaggcgaccctctcactccgtcatttctgtcgcctctcctctcacttggttgttttttttccctctcctgtcttcttcttgtatcttacaggtaaataacttggatcttatttggaggctgttaacatttgaaaggcatgagctcgttctttggcaaaattaatatttaaaatggaatgtgacgagctttcaccaggatcttattttgaagctgttaacatttgaacgggatgagcttgctcttacgcaaaattaatatgtaaaatgaaatgtgatgagctcagagtcgggaaagaactttatataagatgcttgacaattcgaggacttgaaaaggcgttcacactgtcttgtgtgcttccattatttatttagcaacttctcttttttccaggagtattgatagaataaagctctcgaaacaaagaacgtgccatgtggatgctgtcccttgtgccaactttactttaatacctctgttcattcacagtcaggcaattacttaaataagcctgcacagccagcatggacgtgttaacccaatagaattagccgggtgcctgttatctttgagattcactgcagcatttcacaaacatgttagctggaagagaacgcgttcatagtcattgtcattaaaagtgtttgtctgtatttattggtaacaaatggtgcatttcagaattttaccggacttaatttgcatttcatcctacagaaaaataatccagggtcttcattcgaacccatctcactattcctcagttttattatattgcaggccaaatcttggccgctgtccacagggtggaatggtgtgcccgttccataagactttgaatgtctaaatcaccagggttttgtctcttatattagtaagaatgagagtcttttacagttacaatttttgcaaattagcagggaggcaagaagaactagagagcagcttctgttcgagaggaatcgctactacttatttagctgtgtgaccttggacaagttacttaacctctctgtgccttggttttctcatttctaaaatagagctaatatcaggtgttttgaggattaaatgagccaatccgtatcatggcatttaaaaacagtgtaaacccatagtgagtacttcataaatgttagttactattatcgcttaagtgccattaagcattgtactgaattcatgagctttttaagatttttattaatgaaacccaacacagagattcttctcaacacagatttggtgtcctgtcccttttcttcttcttacttgagatttattaatttaattatgcatttctctaagcagatatacactcttttttttcttttcattgtgtctgccaatgtaatgaatgtaaagtattaaacctaagtgtctaagagaggaatttcccctcttcacccatctatttttatctatattgctgtcattcctttaaagcacaccgaatcccacgaataaccctgtcaaacttttctagattcttaaggaggcagaatgttaaacagtgactttgaggctgagctgagctggaagaaagaacagtgttggcgtggtagtccaaatgcagctttgtttcttttgaactttaaattgcttattcatccaaaatacaggaaaattgaatatcaagcagaatctcacacttatttagcagggacaaaagtcccagcagtaagacattacacctctaaatatc

SEQ ID NO: 44683 - DNA, 1048 bp, Homo sapiens
ctgctaatgggtacaagctgtctctttgggatgatgaaaatgtaaacttagatagttgcacaattctgaatattccaaaaatcactgggctgcacactttaaatgggtgagttattttatggtatgtgaattatatttcagtaaagatttttttggctgggcgcggtggctcatgcctgtaatcccagcactttgggagtctgaggcgggtggatcacgaggtcaggagatcgagaccatcttggctaacacggtgaaacccagtctctactaaaaaaaatacaaaaaattagcctgtagtcctagctactccggaggctaaggcaggagaatggcgtgaacccgggaggtggagctggcagtgagctgagatggcaccactgcactccagcctgggggacaaagcgagactccgtctcaaaaaaaaaaaaaaaaaaatttattgtcatttcctccacagaattaaatcagcttggcctgactcatagggaaaaatacagggtgatatcacaagcaggatattgacattgatacagtcaagatgtagaacagttcggtcaccacaaggatctcttacattatcctcttatagccataggcacctctggccccctaccccagcccctgatccccggcatccactaatctgttctccatttcgaccattttatttcaagactataatataaatggaatcatacagtatatgacgttttaggactggctttttccccctcagcataattccctggagatctatccaagttgttgtatgtgtcagtagttccttcctttttcttgctgagtagtattttacggtatagatggacctaccacagcccgcttcaccattcatccattgaacgacatctgttatttcgtttgcactgttgcaaaaaagctgctatgaatattcatgtacaagtttttgtgtaaatgtaagttttcatttccctgggataaatgcccaagagtgtaactgatgtgttacatggtagttgcatgtttagttttataaaaaactgccaaattgtttttaagagtggtg

SEQ ID NO: 44684 - DNA, 1052 bp, Homo sapiens
actgagagccttagttcattgacatgggcctctcccgcatggcagcttgcttcaccaaagccagcaagatagtgatctgctagaaagacaagccacagtcttatgtatatagacagaagcttaataatggaagtggtgtcccatcacctgtgctgaatactgttggctagaagtaagtcactaggtcctgctcacactcaagaagagggatacacaagtacatgaatgccaggaggtggggatcatgcattgggggccatctcagagtctgcttgccatattcatacaactcaataagaacaaaaactctaataaataaatagacaaaagatgtgtacagtcacttcacaaaagaaaacacattaattaccaataaacacaaaaagatattgtcctcaaggaaatgcaaattaaactcacagcaagaaacctatacacccactagaatgactaaaatgataaaaaatgttaagagaccataccaagcattgatgaggacatgaagcaactggaactctcaaccactttgggcagaaatgtaaaatggtacagccagtctgtgaaatgggtggtttctcatattaaacacacacctaccaaatgactcagccattctactccttggtatttgcccaagagaaatgaaagcatgttcctacaaagacttgaccacacatgttcacagctttattcccaatggtcaaaaagtgaaaatatcccacatgtccatcaactggtgaatgaatagacaaaatggggtctatccatagaatgggatgctacttagcaatagaaatgaacaaactactggtatactgagcgacatgaatgaatggcaaaataattatgctaagtgaaataatccaggagcaaaagcacatatactgtatgattccatatacacaaaattctaggaaatatttatagtgacatagtgataaaaagtagatcagtggttgccttgaagaaggggtgaaccacaaaggagcatgagcaaacttttggagtgataaaaaaattttctctatattttatttttttaattttctctt

SEQ ID NO: 44685 - DNA, 1048 bp, Homo sapiens
cacacaccagttttcccaaagcagggggcatgaggaccacggtgggatgcaagatgctttcaggcggtacaaggatgaacgttttcatagcgacatttttgtatatcatggaaaaatatatctgaaacagcaaaacctatgatttcatggaattgttgcctaagggaagacttgggggtttaagtcaatttaaataactgtgtaggttgtatggggatatgatagaatgacacctgtccaaagtttgggaggcatagctgatgaatcaaaaatctctgtcattcttcctcagcatgatccacaccacccacccctcctctccgccaaatgacactggaagctactctagttacacaccaaaggtacttttttggacagccttgtaatagctgaagtttaacagattgattgcagcattccccctttattacctcacacaggcccattcaatccctgttccctgacattcccaatctctttcctatttacttcctaatccacaaagtcgaaactgttcttatctctgcagtacctctgacctgctcgcttaatttttacattcattgtaaagacgtcttcaatgtccccgctgactccaggctctcctgcagccaaccctctctactgtatgcagatattaggatttttttatattgccaaaaacgatttgagattatctacattcacttcttacatgcaatcctaagaaatccaattccattcctttcactcccagtggtctccaatctttctttcacttctctacaagaatgttctactctcagataaagaccatcagcacatcctgaccttcaggctcttcctctgccacagccgccacccgaatgtccacctttccttgctcccttcaaaatctgcctctgcacatctctgtaggaagccttcctctcaaaggtttccttagcatttgtgcccacaatgcagtcgctatagctttttattatttaaattactttgtaattttttacagtgtgacatatgcagaaatctgatttccccaattataactgtcacctaattagaatat

SEQ ID NO: 44686 - DNA, 1022 bp, Homo sapiens
cacaccctgacatgggatctgtacacctcctccatcacccgagacacagcccagccacctggggcgcctgggaaacccagaggagggcggcttctgggtgatggtgccaaacccagtcggtggcaggccaccaacactggacctgtgtccccatgtctagagttagcaccaggctgtggctaggaagagtcctggggtccaaagatttctaaattgtagaacttgcatctgagttgagacaggctagcggctctcaggaacctgcatatccgagagtaaccctaacaagtagtttaaacacttctgtgatggagagcctgttctcttcctcgttccttcaacacatttgataaatatctacaggttgcttaactttcctgtgcctcagtttcaccatccataaaatggggataatattgctgtcctccttggtggatggagattaaaggaagcaatagatttaaagtgttgaaatatattaacctatttgaatattaactctttgactattttctgaagtgcatacactaaagtgcttagtcatcactggtactgtgatgcctattactgttactactaagcctagcactgttagtgctctaagcttagcactcttagtactctaagcctagtactcttagtactctaagcttagcaccctcagtactctagcctagcactattagtactctcagcctagcatcctcagtactctaagcctagcaccctcagtactctaaacctagcactcagtactctcagcctagcactcagtactctcagcctagcactcttcatactctcagcctagtactcttagcactttaagcctagcactgttgatcctctaagcctagcaccctcagttctctaagcctagcaccctcagtactctcagcttagcactgtttagtactctcagcctagcactcagcactctcagcctagtactgttgatactctaggcctagcactgttagtactctaagtctagcactctcagtactctaagcctagcactc

SEQ ID NO: 44687 - DNA, 1042 bp, Homo sapiens
cttccttccttgcttcccttccttccttcctttcttcccttctttccttcctttccttccttcccttcccttcccttcccttccctccctccctccctccctccctccctccctccctccctccctctctctctctctctctctctctctctctttctttctttctttctttctttctttctttctttctttcattcatttagagacagggtctctgtcatccaggccagagtacagtggcagaatcactgcagagcctcaacttcccaggctcaagcgatcctcctgccctttgcccgcaataggtggaactgcagatgcacaccaccatgcctggttaattttttaactttttgtagaaattgggtctcagtgtattgcccaggctagtctcaagctcctgtactcaagcgatcctcccacctcagcctcccaaagtgctgggatttaggtgtgaaccaccacacctggctcttggtcacaccaaaataatttccgtgtggaactaaactttaagtgttttaagtaatgtacctccaaaacatttgaatatctaaatcttgggatgtcaggcctttctagaaggtgcaaaaaatatgtttgtttgtgatataaatatccacagcctttcttgccttctctcaaagtttgcaggcttgattctcagagctttgctatattgatgaggtagaggagagctggatgcattcctgttagaaagaatgaagaatgtctaagagagaaatgcataacgggggtccaggtgagtgaagggaagattctagaaggtgagttttggttggagaagattttggagagtttgggagcgtcataccagagattgaagcccagttcttgtgctgtgtaggatggtgggagagggatagaagagatgaccccctgaaaggggcattatgtgtgttgggaatataagcacaccgctggctcccaggcagcctctccagacacctcttcagatttcctgaaaggactcaccttagtagaaaggccttcctttgacaccctgggtaaagtagtagca

SEQ ID NO: 44688 - DNA, 1056 bp, Homo sapiens
gtgaaaatccagcccccagatgccgggagagggaccctgagggagcggcagactctggggctaatggcaagaattattcctggtggctccgatgagctggggttgccgttggtgtttgggaagagctctgatctcctaggtggggcctttcccgcccccgcagtgttttgggaaatgcggctcccactacctgccgccctcagcatttaggtgacttggcagccacctccccttgtgaggatgacgaggttgggaagggaggcaggcatctgaaaacggcagccaccgcctttcccttcccagcgcctcccccacgagtcagtcctgatgctgccagggcccagacttccaagtggggccaccaccgcttcctccctcctcaacaatagttaggctggtggttctcaaacttgagcaagctctggggtcacctggaggctgggccccaccgccgagttttccgttcagtaggtctgaggcgggttcatgaatgtgcttttctagcaagttcctaggttgacaaggacgctgctggtccgggaaccacgctctgaggaccactgggccaggagttgaagagagccggagccctcttgcagctcaaggttctgatcagctcattagcccaagattcattttctccactaacaacgtcttcacctgagaaggaaatgagtcccatcctggctcaagcaggccacagacgaggagaagaggctgtcggggtgaagagggccatttttgtcgctgccaggagagggatgccgagcagtgatcctgccaggaaagggaactgtggggttgagatgtggggggcagctgggaacaggggcaggtggggagggacagatgtctcccagcacccttgtgcggggcggaggctgcctgccgccatccctggagctccgcatacactcttttcaacagcaccgagaagaggagctgtgacgtccccgtgtcccagggaggtttgccgggctggggagcacagaattcatctgccagactcagacccaggcggtctagcccaagagggaatatatgtatgtgacaaca

SEQ ID NO: 44689 - DNA, 1030 bp, Homo sapiens
agtaaaaatgtccaatttttaaaatttcagaaaatagcatattcaaaaatgatttgagttcaagtgaaacttaagtatggcttctaataagacccgagggtgaaacctttgtatgaaaaacagaaaaaagacttgttgtcacataaattggaagtatgtacacacttttttttaggggctgggcctgtatgctgctcgagacattgagaaacacaccatggtcattgagtacatcgggactatcattcgaaacgaagtagccaacaggaaagagaagctttatgagtctcaggtaggtgtctggtccccgagattgtatacacagcaccatcatcctctccctttctccgtgccagccagacaccctggaaggcagaatgaaatctgtcatgctgcattcagctttaaacaaaagccatatctgtatattagtgtatttttatcagttgtatctctttcaattggtgttacagtttactttgatagacaactgtaaattaatgagcctggcttcacacacaacctactgattccatgctttccattcgtgccatgtaaatgtcatctgtgcctaatagaatatccacagtaaggatgatcaggctgccgttccgttcagtttcgactgagtcctcctggtgtggataggaacacagaggggagtttcaggtcgacattgatgacttactgactgacttttccctcagaaccgtggtgtgtacatgttccgcatggataacgaccatgtgattgacgcgacgctcacaggagggcccgcaaggtgagacagcgaggaacctgacggggagtgcttttgcttgtggggccagtgctggtggagagaacactgaagccaagggaaaggctctcacggcagcctggcggtgactaaacattcagagcaaatgagttgagaatttttatttaaatgttatatttgtgcttctaacaatgggcaaatagaaatttaattagcaaaaactgctttatcaataaatgggaagtttttaaagctgcttctagctgtttt

SEQ ID NO: 44690 - DNA, 1034 bp, Homo sapiens
aggcatgagcccccgtggctggcatgaattttttttttttttttttttgagacagagtcttcctctgtcacccaggctggagtgcagtggcacgatctcggctcactgcaacctctgcctcccaggttcaagcgattcttctgcctcagcctcccaagtaactgggactacaggtgtgtactaccatgcccggctaattttttttttttttttaagtagagatgggatttcaccatattggccaggctggtcctcaaactcctgaccttgtgacccgcccacctctgcctcccaaagtgctggtattacaggtgtgagccaccgcacctggcctttttcttctaaccccacgaaatcttgactataaactgaattttaataccagttactactgtacgttagattttcatacatgcagggatctatttctcttttctgagatggagtctcactctgtcacccagactggagtgcagtggtgccatcttggctcccagattaaagcgattctcatgcctcagcctctggagtctcactctgttgcccaggctggagtgcagtggcatgatctcagctcactgcaacctctgcctctggggctcaagcaattctcttggctcagcctccctagtagctggaattacaggcacacgccaccatgcccagctaatttttgtatttttagtagagacggggtttcaccatgttggccaggctggtcttgaactcctgacctcaagggatctgcctgccttggcttcccaaagtggtgggattataggcatgagtcaccacgcctggcccatttggaatctcttcatttccactgatcttgtttattcttaaaccacactctattgatctccatacatactttttgtgtgttctggttcattcacttgtgagttgtatctggagtagaacagataatcaaagatgcttgttcagaggataaatcagttcacatactaaagtctctcacatggcccttcccaccatgtgctcccggatgtgcttcatgaggatgcagctgg

SEQ ID NO: 44691 - DNA, 1124 bp, Homo sapiens
actagaagcagcagtgtcacctgggagcttgttaggatgtgcaggttcgggggccccagcccagcctcactgaatccagctctggaggtggggcctcctggatgattctcatgcatgtcagagagtaatttctgtcttatatcctttctccccttctgttctttgtttccttgtctctctgttctttctgagacttcctctactttatctgctaatctttcttgtctatttttagagattagctacgagccctttctgctcttgatcttgtttgatattttgtttttacattatgagtggagtatctgtgttttctctgctgttgcccctctctgttgagcctctctcggattctgtgggtgaattagtgctttgcctctactccttccagttctagctttcccctgctaagtcaattacttttcattttaaatagtccattcactcttatacccattcgtgttctcgaggagtgtgcttttactgtgattttagtgggtatcttaactgtgttcaacctgtcacctttaacctgaagcatttttgagagctctggtttctgtctctttacttatttcatcctgccaccctcccatctgtccacctccctggggatcccgtggatgatctaatatgtatcctgtttttctgtgctaatatcttagaactatatacacttttatgtacatatataaaaatggaatcatgttatatttatttttctccgtcttccttttctctgtaataatcagaggtccctctcgatcaactgacgtagcttcatttcattcttttgaatggttacctgatgttccatagtgttgatgaactgcagttaaaccattgcattactgatgagtgtgtatttgatttataatttttctcataacaaacagtgttgctatatcttgtacaaatatcacaatgaattaatagtttcactcctatggggtatattcccaaacgtgaggtttctgtgtaaaagcgtgtgtacttttcatttaaatagatattgccagttttctaaaaagtctcttactgcacacttcttcctgcagcatgtgagactgttttcttgtttcccatttgtagctggtgttactatttttttgtttagttggtct

SEQ ID NO: 44692 - DNA, 1031 bp, Homo sapiens
tccttatttaccttcttatccttggccttggctctttcctcatttctgactctgcaagtcacacttatttaagactcttatacatatgtcattgtatctttcataaaatgtttttttaccatcttaacctgcaagcaaaagtaatatctgtttccctctctgtcttactttgtacttagactgaatagtaatctctcttggtgacttagttttattagattcttcttttatactgccattgctttcccagctatttgagaataggcatgtttctttatttttgccctagtgtcagataatcgactctgtaaccattgcttagaagataaattttttttattaattaaagaataatgttaatgaaccatgttgtaatgagttgatactgcataatttttcaccatgtgccaccttgtgtcatcagtcagttttaattactaacaaaagttgattgcctttaggtctttctggatataaggattctagtcatggtattgcagaaagcgcagcactcagaccacagtggtgttgtcattgtaaagtggttattcttggaagtggtgtgcggaaatctttcaaagatctgacccttttgaacaaggtactttgctactccttttatgaccccacctcctacctccagcgaaaatgtccttggcagtgtctcttccaacatcagagagagacaccacttatggtggtgtgatggacacatgttcctggtgatggcaccagcgtatatcagatgtgcttgggctgaacaccaaagagctacaacaggctgttaaagggaatattatgaggactacgtatttttaaatagagtgaaccgtggaccacatagtttggttttatacatgtattttttccctagctaaattatcacatgctaaatattggaacatagtttcctttctactattaagataaagaaccactgtcacttttgaatataacataaaaataatgtatagatcctgtttttattaaattttgacttgttgagattcccacacatttctctttgcttt

SEQ ID NO: 44693 - DNA, 1016 bp, Homo sapiens
tctcagctccctgcaatctctgcctcccaaattcaagcaattctagtgcctcaacctaccaagtagctgggactacaggcatgcaccaccacaccctgaggtcaaggctgcagtgagcatgattgtgccattgccctctacctctagcttgggtgacagagcaagtctctgtctccaaaaagaaaaaaaaaaaactatcttaactcataagctgttctccaaccttattttatcatcctcatgaaattctttatctttgcaaaatttgtaatttgactttgcacttgatttgcatggtgttattggtagattccaagtctctccttgagagactaatcagtaaatgacaaattggtgataactgttaagctgggagaggtgtctgaagaggaactacattaatgatttagttactttagtagtagcattagtactgttgcttcttttaaaggtcttagtcaatccagattctcatatctcggatgtgagttgtattacaagtttaagaccagaaattcttaagtttttcatagaactagggcatatcttaatgagaacttaaaggatattttgataatattttgcaatttcttgattgcattttaaagttatccttcactagctataaccacgaaacttgaagaattgcataaataaaatcaggtagaaaggaaattagcttcttaatttcagagcttaagtagtcaagctgggtaaagtaagcaagttggtatgtccataaaatcacgagtatctgttccactaagaagcctcctggccttgtaggtattgttttcttggtgtgcaagatacatcttgattacatttctgtagccttgcttctatgtgcaaaaaattcacagaactacgttttagcaaggtcattgcatattcgctcagtagcatataatttaaattttttggtctcctgcagcagaataatttaagtaatcctccaacaccccctgcctctcttcctcctacaccacctcctatggcttgtcagaagatggcca

SEQ ID NO: 44694 - DNA, 1049 bp, Homo sapiens
atcctattggcatctgaaatttacggtaatacaaatggattgataggtgatagtcaagattttcttatgttcataaggagtagcctcagtaccaagaaaaaaatctgtcctcagtactttgttgtgactctgaatccaaagaaacacattgtgaattctgttctacacctttgtggttgttacagaaggtgggagacagttgctaacagtgctgttggtggtacccagcctcagttgatgccccagtttttgctgagcatagataagaaatatgtttttcttgttagatgcctggcagcattcatttagtacagagcttatttttaagtctcaaaggtctgtagtctctctcacttactccagcattttgatacttgaaaattttaagtctcatttttctgaagccttattcaacaaagttgcttcgggtcttagaaagttgagctacactgagttccttttatcatgtacattactcttaaatgtgttttttaatagcagctctctctgctccctctaatggaaccaatcattggagtgaactttgcgcactttcttccttatggcagtggccaatttaatagtgggaatcgacttctaggaacttttggcagtgctaccctggaaggggtttcggactactattctcagttgatctacaaggtatgtttctctgccaaggtgttgtcttgcttcatctttgggtaacatgtcagaattgatagagcttgtcttatttttgtatttagtttacatctactcttccaagttttattaaaacttaagttcagctacagggttaaaattttacctggtgaagtatttctagcataaacatttgaagttgtttttataggtaagaatacaaattgcaagaaatatctattatgtacttccatggtagtggaaatccttatttccttataacctttattaacacttaaaatgaattcaaaaatcattgtaaatggtggggatttaaaaaaagtagtagtttaccttgaaaaatgaaattaaacaattttaagtatatctaataatttaggtat

SEQ ID NO: 44695 - DNA, 1027 bp, Homo sapiens
aataaactagttgagaagcagaacccagctgaaggactggtaagtgtaaatcataaaaacgacaacttttttcttttgttttaaattatacttacagcagattagtaccagcaactgtatttccacattattctacaacctttttattctaaaggaccattttttattttgtcatttctacctctctggaacccatgtttttacttatatctaaactatattaaataataatttgtttactattttttaaaaagcaaaggcatgtattgcatttcatatataacgtgatgtgtagcaactggttattaccacattgagttgatatgactaaagcaaagtaagtaaatgtctatgtactttattgtaaataagtgattaatttccattaacctctttaaaatgcagaggatagcccatgcacccctattaatacccttggcactcttagggataccacactgggaagctattgtgtggttacagtgttgtattgatacttaatgtaatgttacatgtagatactgttttgtagttttccatgtatcaattttctatcagttttaagttattaacatttaatttgctttttttttcatttacatgaagagctaacttgtaaatatacctttacaagaatctgtcccctttatttcagttaacttcattaagatagttccaaaactggagtttgagtcatgggaattggtctgcttaatagctcttgcctgtttatctttcagaaggtgcagtgccattaccagtgcattcataaagctgtccctagagagcttctcaaattggatttcattttcatattttaattaagggttgagtggtatatttagttgtccagttttttcattttaagattgttaatgaagctcatctttttgcaagtgttgctttttttcttgtctttgaccattcagtagagattgagtgttgacttgatagatttgtgtaatttttgtaaattttactggttatgcttttacagttgtcaccagtaaatataggcaactctcca

SEQ ID NO: 44696 - DNA, 1036 bp, Homo sapiens
tcaagatgtaataaactcttgtggcataactggatcaactccagttctctcaagtttacttgctaatgagaaatctgataattcagacattaggccatcggggtctccaccaccaccaactctgccggcctccccatccaatcatgtgtcaagtttgcctcctttcatagcaccgcctggccgtgttttggataatgccatgaattctaatgtgacagtagtctctagggtaaaccatgttttttctcagggtgtgcaggtaaacccagggctcattccaggtcaatcaacagttaaccacagtctggggacaggaaaacctgcaactcaaactgggcctcaaacaagtcagtctggtaccagtagcatgtctggaccccaacagctaatgattcctcaaacattagcacagcagaatagagagaggccccttcttctagaagaacagcctctacttctacaggatcttttggatcaagaaaggcaagaacagcagcagcaaagacagatgcaagccatgattcgtcagcgatcagaaccgttcttccctaatattggtaggagttttcttgagtctcaacgtatattactatgggtattagagtggcatgcgatatgcttataagattttattattagaattacagttggaataaagcactgagtttttctattcctccttgaggagtttgtttgttttgttttgagacggagtctcactgtgtcacccaagatggagtgcagtggcgcgatctcggctcacagcaacctccacctcctgggttcaagtgattctcctgcctcagcctcccgagtagctgggactacagacacgtgccaccatgcctggccaatttttgtatttttagtagaggtgcggggtttcaccatgttggccaggctggtctcaaactcctgacctcaggtgatccgcctgctttggcctcccaaagtgctgggattacaggcgtgagccaccctgcttggccctccttgagctttagaatgaaagcagttggctgggcacagtggctca

SEQ ID NO: 44697 - DNA, 1086 bp, Homo sapiens
atatgctgttttcccaaaagatcagcgtggaccctatcctcctgatgttgctagtatggggatgagacctcatggatttaggtaatgcttttaatttcctgccgaatttaaattgctattagaagagggaaacagagctgggtgtggtggcttgtgcctgtaatcctagctactagctgaggcaggaggattgcttgaggctaggagtttgagaccagcctgggcaatatagtgagaccacccccccccccccccaacctcttcaacaaatttaaaaattttttaaaagaaatagacaaatgaagttagtattaatcaggaagctgttactgctttctacttctttctcccctttgaaatatatataatctgctatttagtgctaatgagaggtcatagacatttttttcctctaagaactctacagactctgaaaacattacctttgtttttaagtattaactgtgttagcattaccttgcacccttaatgatgcagtttatcatatgacatcctcaaaatgtagctattctgcgtaggcaaagcctcctacgatgtgatgagacttgtcctctctccaaatttctaccttttaactttacattctaaattaattttaggctgggcgcagtggctcaggcctgtaatcccaatactttgggaggccgaggtgggcggatcacttgaggtcaggagttcgagaccaacctggccaacatggtaaaaccctgcctctagtaaaaatacaaaaattggccggctatggcggcaggcactgcacctgtattcgcggctactcaggaggctgagacaaaaggatcacttgaacccaggaggtggaggttgcagtgagccgaggtcacgccactgcactccagcctgggagacagaacgagactctgtctcaatttaaaaaataataataataaattttagagatttccgaactgaaaggactttccctttaggaactttccatggtgagatagggttgtaagttagtggtgatgaatcataagaatgtttcctttttcaaagtggctaaagtcaaagccaaacctatgccctagttataataaggaaata

SEQ ID NO: 44698 - DNA, 1044 bp, Homo sapiens
tgtcccttgaatctaaaaacttcccaactttacaagctacgttgttaataaggcagcacttcatttagaaaacgtttgtttggcctacagtgtgccacgatctttgttctttgtaaaaaacttaatataggtctatgacctcatgagaatacggcctgaataagattaactgtcagcagttcatcaacattctttattacaacacatcattagcatggctctgagaaagtgttatactctgttcttttgttgcagattggactactagagtgaagcaaattgccaaattgtggagaaaagcaagctcacaagaaagagcaccatatgtggtattttaagaaactcctctatcttttaaatatttaaatacagtgcttgaaccttatttgtattaggttaataaaaaacaaatttccatttcagaaaatgcttgttagtacctgtacaacaagcaactttatttttaaagtgattttctaactccttatgtcttaatagagagtgtgacatttttataagcaagttaatagaaccaaaacgttgaagattgaaaatcagctgttttaggggggaaggagtaattcatttcactttaaaattgttttatctcttcagcagaggtacagttggccgtctgtatccatgagttctatatctgtggattcaaccaaccatggatcaaaaatattttggaaaaacatctatactgaacttgtacagactctttcccttgtcattgtttttaaaacaatgtaacaacgatttacatagcatttatattgtgttaagtattacaagtaatctaaagatgacttaaagtatacaggaggggccaggcacagtgacccacacctgtaatcccagcagtttgagaggccaaggtgggcagatggctttgagcccaggagttcaagaccagcctgggcaacatagccaaaacctcatctctataaaaaatgaaaaaattagctgggtatgatggcgcatgcctgtagtctcagctacttgagagacttgagaggttgaggcttcagtgagccagaa

SEQ ID NO: 44699 - DNA, 1096 bp, Homo sapiens
tcttttgaccatcttttgaccgcccgcctcagcctcctaaagttttatgattataggtgtgagccactgtgcccgcccaagactaaagatttttaatttaggcctttttgagggtttaggaatcccttgaaattagatggagaattattgccttcatctatgccgtttcttatgaagggtttctgaatcttctaatagattataaaaaatatctaacacattctgttctccttaaaccactttttcttaaagctctagatactagatatctagatattagatagcaccttctgccctccctacgtaattatgtggaatttcataatcaagaatgtttccttgctttcattggtatattgttgtactctttagaagttaagaagtgaacatatattattaatagtattattttatcagtagtacagtattcttgggactctggctactaattatttgttccattgcaagacaactttttacttaatttcccgattaccattcaacatcgctttccgtgagatatgtctacttcaagttagatgcattacctggagcacatacctgctagcactgccatttgcagttttctgaatacctttgtgtttgccctaactagcttcctttctgtctttgaaatatttaatatatgatgataaaataattagcttccttatgtaatgtgctttgcttcctctctaatagttgttctcattcctttttatttccttcttagctgtatgaaagtttttctgttaatagagatagttaggagaaaagggcaaggtaggaggagcatgtgaggcttagggcttttaagtttgaagactcagtgttacaggttttaaaaggtagcagttctcagtatattccattttttaaaaaaaatgtacaaatatggtctttttagatggatgcatgcagtttgtcagaacttaaatactgaggaagaagtggaaaatgtagcagacattggttttgattgtagcatgtgcagaccctatatgcctgcgtctaatggtaagagaataatttaaactgtgagtctgcactcttgtaccactcacttgcaccttactgtccataaccaatgaattag

SEQ ID NO: 44700 - DNA, 1047 bp, Homo sapiens
ctgtagtcctagttactcaggaggctgagccaggagaattatttgaacatgggaggcggaggttttagtgagctgagatcacaccactgcactccagcctaggcaacagagcagagcaagactccatctcaaaaaaaaaaaaaaaaaaaaaaaaaaggccttgtaatgaacaaccaactcttgtcttactctacctccacgtctgaggcagtcgcttttaatcttttcaggtctttttttcttgtggttaatgctatagctctaaataatcaactggtttactgctttatcaatgctagattttgttgactttctgctatgaataaataaattctgatttaggtcttaaaatacacctccatccttctcccaatatagttgtattactatgtttagttcaattaataaggtgttggttatgactcagtaaatgttcactgcaggtctaaacagtatactatgagtttcttttgtctttcatggagttttttataacaagaaagtaatagtgactctccattcgttctttgtttttgcctactctagaactatcatataagattagtttttaaagtactgtttttttctgggagaagtcctaccctccttctagacattcccttctcctgctctgatatgtgccagtggcttctaggtatgttgttctcatccttaaacttcctggcctgatgtcctttgttggatctgttgatttatagatcccaagtcttcctattctttataatacatcctcattctgttccgcatatctctaagtaactttattagaaaggagaatgagggagctgaattttgagtcttcctgtgtctacaacgtgttctgtcttcacacatagttgcttgtgtagctaggttgagaattgtactttgaaaagtattttcctgtagaattggaaacttatactcttctagcatctggagttgggaagtttggtgccattctgatgggtgttcctttgaatttaactcttttattttcttctctggtagcttttaggctttcatgtacctcatgatctgaatttt

SEQ ID NO: 44701 - DNA, 1052 bp, Homo sapiens
agaatacttaatgttttggacctaaggaaattgaataagatccctttcaagatagtaatgtatttcttttaacccatccaacaattaccgaattcccattttacagatgagtacgacttacataagttaagattggacaattagtgcactatcaaacacatagttactggtagagctagaatttgaattcctgtttttaaaaattatgtatggttccttttgcacgatgacactgttttggacagtatagaatactgcagtctcattgagaaatacagcagtatctagaaatatactagggatatgtgaattggctcagcttgcatttttattgtaggaggcaattgtttgtggataagtttgatacctttgaagcttctttttaagcttgctggggcaagtctagaaagtcttcactctaaggtggatattttcaaactttatggttttagaaccttaacactctttaaaattactggggactccatagtttttgtttatgaggattttaactatggactgttcagcattttagaaattaaaactaggaacattttataacacaagactacagaagcacaacctgtacaatatcaatgtaatattatgatacaacatgtagcctctataaacaccactgtataattgtgaatgaattaaagtgaaaaaaggcaaattaaatcttagtattatttaaacttgttttaactttacagactcactggggttccctagaccacattttggtagctgcggtcctagcattaatttaaccctatacttaagacttggcctttctgggatcactactgaattctgctccctgttcaccagtgtctttgtactctgactggttgtgcttcacttgtctttgagccttttgcaagctgtggtaattgtgcagcttacaaattcccagtagatgtactttcccctggttgtgggtctttgggcttctagaagtacggcttggtgttccaccaaagacttcaggggatcctttgtagatttctggagctcttagtcgttattgcttcttcattttgagtact

SEQ ID NO: 44702 - DNA, 1047 bp, Homo sapiens
gtaatcttggctcactgtaacctctgcctcctgggttcaagtgattctcctgcctcagcctcctgagtagctgagactacaggcgtgtgccaccacgcttggctgttttttgtatttttggtagagacaggatttcaccgtgttgcccaggctggtctcgaactcctgagctcaagcgatccacccactttagcctcccaaagtgctaagattataggcatgagccaccacacccagctggttaatcttctttcagttgttcctcaagaaaagtaattcagttgttttatgttttgaccttgaacataacctgttgtgtttcaactctgtctttccaggcttaggttgtaagctttttaaagaaagaggattgtattttatgattttggcaatgccctccttgtcttcttctacagcttctagttcagagctttgttttgtttcataatcactctagaaattattaacaaaccagtgggtacttagttgatttagtcaaatagaactaagtccagactgagcaatattggttgataatcatatggctaatactgaaattttgatgttattcaaaataatattctaaagcagtgctaatagaaatataatgagaaccacatatgcaatttaaaacttcctagtaaccacattaaaaagttacagtgagctgggtgcagtggatcatttgcggtcaggagttagagaccagcctgaccaatatggtgaaaccccgtctctactaaaaatacagaaattagctgggcatggcggtggacaactgtaatcccagctacctgggaggctgaggcaggagaacagcttgaaccaggaggcagaggttgcaacgagccgagatcgcgccattacactccagcctgggcaacaagagtgaaactcctctcaaaacaaaataaagattatagtgaacaggcgaaattaattttaatgccttccatttcgaccgatatatctaaaatattaccatttcaacacgtaatatgtaattatgtgctgtattttatgtttgcaggacatctcagttcagac

SEQ ID NO: 44703 - DNA, 1047 bp, Homo sapiens
ctgatcagtctggctagagatttatcaatcttattgaccttcttgagtcagcctttgttttcatggacttttgtctattttctttcccctttctgttttattgatttttattatcatctttattttttcctatcttctcactttgagtttaatttgatcttctttttttgtttactcttacgtgtccctgcttggaagggacacttgtgaagtttaggtcagaactttctattctccttggctcatatctgtggtctaggaaaatgaaatttctatcaccttctggataaatcacactattatctatgcaggcaacaatagcacgtattttctcaaagattacctttgccctcaaggtaggttttatttttctagcagtctaacggtcatgaaataaattataaaataaaaacagtgggtcttcaagctagatgatactattttctttcttgcatggacaattattttaaaatattttggtttttctgcacttattatttaaatatgacagtatgactccccacccccacttgaatctagggacattgtagttttctactgcagactttgtttctggtttatactgggaatatattgtttatcattttcagtgaaagcgttcactggttaaatttccttttaaaaataataatggatctttacaatttctttgagctgctcagtgggtataatgtgttgaattttctgttagtggttgggaggtagaaatagatactttatctctattttagccatttccataattatatatctcaatagtcttgtcaatgcatcattagttctatgactgaattaatgattacttttagtagtcacttaatttcttactgatgatgatgattctacttttgtgaatcatcttggatgattctctaaaatcttagaaagctgattttgttaatactatgcatgtaacacatcaatacattttctctattaaaaaaaattaaagcattataggtagatcagaatttaccattactaactcctcagtccttcttatttccctgttatcagtttggtata

SEQ ID NO: 44704 - DNA, 1035 bp, Homo sapiens
aagagttctaggctgcagtgagctatgatcacaccactgcactccaacctgagtgacggagcaagttcttgtctcaaaaataaaagtaataacaataatgataaattttcctctaaatacaatggtgaatgaggtagaaatgttgagttcataagagaactgttgaatagtgaaggaaactgacttaattttaatgagaggaagaatactgttacacaacactagcaaaaatgaactttcacgctgatgtagcagtacagaatatgcttccaaccccgggacgctgcagccagacttgctagctaagtgaccttggacaagttacttaacctttttattcctcagcacactcatctcaaatggggataataaaacctactatatgggattgttgagagtaaaaaatacttagattagtacatagtaagtactcaatagatgttagctattattgtaatcaccgcgagaccagttaatgagagagttcttccttatacttactctatattgaatacaatttgttgcacttcgaaatatctggatcaggctatagttgttgtcgtcaccaagaatgtaggagtgggaaagagaaaaatcatgcaaaggcttgctgatagcattcacagtgacaggcctaaggtatgattctaaggttgtaagcattttatatttagatttttaagttgtggagtatacgtttaaagataaaaataataagccaggtctcttaatacttatctaaggaagtgtttgtgtaacatttaataaaatgttttatctcagtggcatttggatttaaaaattattttggtctgtcacagaatgttgacttttcccaatctgttacatagggccgtgggtctggatttccaggaaagcggagacctcgaggtgcaggactgtcggggcgaggtggccgaggcaggtcaaagctgaaaagtggaatcggagctgttgtattacctggggtgaggcttgcttcatgtatattttctctaatctaaatgtcagttaatgatgaaaatctcatagcaa

SEQ ID NO: 44705 - DNA, 1030 bp, Homo sapiens
gtttggctttttataggaataatatattgattttaatcgtataatttttaaactgtaaggccaagcttttaagaaaatcattttttaatgtgaaaattagtctcctctatatcaaacccagatatattttattctctaaagacaaggtacacgaaagggaaagtagttgtcagatgggatttagctgtttctgcatggcaaaagacgtgtgcagtaaaactaggccactctttatatatgcctttttctaagtattttccttgacagttatttctgctctaccatgaaaagtttttcttctcaaaccagttgtgctcctttctagtaagtttttttttgttttgttttgaatagttatataataattatgttgttctgactctgaaaagactttaccaatggaaatttgaatctcaaatttacttttggttgatatatttacattctttaaagatactgcttcatatgtattcctgttaaattttacttatctctccttccttgtagacttttgtttcaattgagaaaccaggttcaatacattaggactctttttctgtagactttatgttccgaaatattggggaggggggtgtatttccaggcttattccatcttatatgagccatgtcctagtattttgctgagctgtctttgattcccaaatccgatgataatctttctatttttctgcccctcttgttactacttcatcatttgctgctactcttgtaagtattttgtaggctgtgttttccctccctccagctttttagttttccaatcttggttttagttatctagcaaacagccttcacttgatgatgaacctgctaatatagtgctgttattagggagagtatgaattgaatagtacaagatagatcttccattggtgaggcactgggaccataacttgcaggaaatattctacagttagcaggaatgtgtatatccgtatattagaaatactgaagttcagtattctgttacatgaatttctttggtattaggcatttctgtattatac

SEQ ID NO: 44706 - DNA, 1069 bp, Homo sapiens
atttacaggtaacttcaattagttagcttttacgttttcttcagatttgagacattttaggaaagttactctgatattagtccctatgctgttacccaataaataaataaatttatgtgtgagagccattgttttgttaaggtatattttgcatacgctataattcaccctttctaaggtgtgtattgaatgtgatttggtaaatatgaacagtcatgtaattaccatcatagtcaagatacagaatagaccctttacccataaattcactcatgaccttttgaagttactgcctacctcccactccagctcctgccaatcaccgatctgttgctttcctatagttttgccttttctagactaatatatgaatggaaccatacagtatagaatcttttctgtctgcctttttttacttagcataatggttttgagattggtccattcactagcttacagttaagtttcgttcaatttttggccagtatataaagctgctgtgagcatttatgtaacatgcttcgttgtggatgtatcttttcatgtttcttgggtaaatacctaggactggaatttctgacttgttggaaatatattcttaactttggaaaacagtttcacagtttcttaagtgtctgtatacttctccgtttctagagatctgagagttccatttgctgtacattgttgccagcactggatattgccactgtttctaaattttagccatctggttggcatttagtgataatttattgtgggtttgattttgcattccctgatgattaattagattgagcctctttttatgtctttttttgccatttgtgtatctttggtgacatgtctgttattttgtctctaccatttttttccaattgatttacttgtcatcttcttgagttgtaagagtttttttatatattattcacagaagtcagttttggagatgcattttataaatatttttgcctaatgtgtgacttgttttcatttatttagcaatgtttattgaacagcagagggtttaattttgatgacattggtcatttgttaattttttggaagt

SEQ ID NO: 44707 - DNA, 1032 bp, Homo sapiens
ctgtagagggagggatagggatatgtccttatcactgggtgggtgttgaactcaggctccccactttttttccacccacactctagagggaggaagccgcgttactgctcagtgggtatgaatgtcctgtgtcccagttggcctgctgtggtatcatgttgtccgtgggcaggagtggggaatggctgactatgtcctccttttaagtctttgcaaaaggtatatggcttgggcttttatttgtaccatttggcttaaactggtttgttgttgtctatgagttttttgtcttggtagcctgccgcttccctgcttttttgacaaaagacagcagaattttcttggagttttacgtatgtgtgtgcctgttggtgtttctgagttgtctgcttctctagcaacttttcttgtatatatgagtcagaaaggaaacctagggaattcatcctcttttgtttcttggctcctgaagccctaattggtctgccctctctctacattttgttgtcttcttttgtttgtcttatgtatcacggctaagggtttttaaagctgtatttagtggaaagaacagggaaaagtacattttctgcattttgtctggaagtggaagtctgcattcatttttgctgtttttccctgaatacagagttctgggatgattatgtttttcttcttcaagcatttaaaagatgttgcattgtttcctgtcttccatggtttctaatgagaagtcaggtgtggtgtcagtagtatcattattcccatgtatataataatgttttgatattctctggctgctttcaggattttctctttatctttggttttcagcagtctgactatgatgtgcctaggtgtggttttctttgtattcatcctgcttgggggttgctgagcttcttgaaactgtaagttgatatttttcaccaaatttgtgaaaagcttgacttttatttcttattctttttctgtctcatttctctctcctcttcctctgtaactctaattacatgaatgttagtatatttg

SEQ ID NO: 44708 - DNA, 1027 bp, Homo sapiens
ctgaggcaggcacataacttgagctacaagttcgagaccagcctgggcaatgtgacaagaccctgtcttttcactaaaagtaccaaaaaaaaaaaaaaaaaggcaggtgtggtggtgcacacctgtagtctcagctactcaagaggttgaggtgggagggatggcttgagcccaggatgcagaggttgcagtcagctgagattgcaccactgcactccagcctgggcaacagagccagactttgtctcaaaaatgaatgaatgagggaatgaatgaatatgtttatttcccgtcaccttgacaccttgactctggagctaagaggaagctgaaaaatttgttttagaaaattaagagttttgtatgcctatttaaaaacagttaaattttggtaggcccattcaatgaagatgtctcaatttaattttaatctttctttttagtattaaataagtttaaagaaatgaacttacctttgtgatgaggtgggtggtattctttggtattgtaaaggaccccttgaatgtaaagtttaggggaggggtggagaataatatgaacttacatctgcataaaatatcttgtgaaggatgcataggaaactggtaaaattctttgcctgtaggaaacttattttatatagttgtatacaaagtgattttatactgcataccctttaggaacttttgaaccatggtaatgtttttatttcaaaaattaaaaaccttttaacagtttctaacttgttttgaaaatatacttcaaaaacttatttctctagttgtgcactattgtgtgttttatctatttgaaattgatttgtgtatcatgtgatataaggggtccagtatcattttttcacacatggacagccaattgttactacaccatttattgaaacatctttttcctccacatttgaaatataacctattatatagcaaacgttcaatgtattttagattgttggtaggttctctgttttattctttgtgtatttgagaatcccagtgatatatcatgatgt

SEQ ID NO: 44709 - DNA, 1022 bp, Homo sapiens
aagtgctgggattacaggtgtgagccaccatgccctgccatgtcttcattttttatggttgtttcaggaggagcgtaaatccgataatccggtctctgtgactccatcttggtcagaattagaagtattatgcaagtaactaagaagtttattatttcacaatagaaaattaggagttagggtgatgggtagttcagtagcttcatgataacaagttgtcagggtcttaacatcttttcttggtgcatccagaacatattggtctctttcttgatccagttcctctcatgagcaaaagatagtgggcaggacctctaagcattgtactctcaggatagcattcagaggcagaaaggaaaaaggaacctttttattattatgttaattaaggaaaaatccttgccagatgcttgtcccatcctagcatatttctctctctctctctctctcttttttttttttttgagatggagtttcgcctttcgcccaggctggattgaagtggcgcgatctcggctcactgcaacctctgtctcccaggttcaagtgattctcttgcctcagcctctggagtagctgggattataggcacccaccaccacgcccggttaatttttgtatttttagtagggatgggatggggtttcgccatgttgcccaggctagtcttgaactcctgacctcaggtgacccgcccgcctcagcctcccaaagtgctaggattataagcgtgagccaccacgccctgcccctggcatattcctcttaacattttattagctagaattaccttgagtgttcatatctttttttttttttttttttttttgagacggagtctcgttctgttgcccaagctggagtgcagtggcgtgatctcggctcactgccagctctgtctcctgggttcacgccattctcctgcctcagcctcccgagtagctgggactataggcacccgccaccatgcccggctaattttttttgtatttttagtagagacggggtttcaccgtgttagc

SEQ ID NO: 44710 - DNA, 1033 bp, Homo sapiens
ggttttgccatgttagccaggctggtctcaagttcccagcctcaaaagatccaccagcgttggcctcccaaagtgctgagattacaggagtgagccactgcacccagacagattctgtatttctaagaatttctcagtttgatattgatactggcactcagtggttggtccacatttttagaagggccactttactgctatcacaaatacaggatgccattgtatatttacatattagagttgattttgaagttttatgtctttatttattagctttaatttttttaatgtttgctcatttgctccttttcatttttcccattttaggcacttgttgggctcatcaccgttgtgtggagtggtcactaggagtatgccagatggaagaaccattgttagtgaacgtggacaaagctgttgtctcagggagcacagaagtaagtagacaaagcaaatatttaaatcatagttttataacattcactttaatcagaagttcacttgaaaggattattaaatgattgctgtagtgtaaaagctctcaaaataggaaattattaatttttattaagagaaattctaggccaggtatggtggctcacacctgtaatcccagcactttgggaggccgaggtgggtggatcacttgatgtcaggagtttgagactagcctggccaacatggtaaaaccccttctctaccaaaaatacaaaaattagctgggcatggtggcagtcgcctgtaatcccagctacttgggacactgaggcaggagaatttgcttgaatctgggaggtggaggttgcccgtagccaagattgcgccattgcactccaacctgggtgacagagagagactccgtttaattaaaaaaaaaaaaaaaaaaaaaaaaaaagttattttatgcaaaaattagccgggcatgctggtgcacatgtgtagacccagcaacttggggtgctgaggtgggaagattgcttgagtccagtagattgaggttgcagtgagccatgattgcaccactgcactccat

SEQ ID NO: 44711 - DNA, 1133 bp, Homo sapiens
tgatatgtgtactactttttaaaatgctatggaaaagtagaattccaaatgtataattattaaacttaattgttcttatgggtaatcactgaatagactgtagaaaatagattgaaaagcttagcttgtgctttagacataatttaaaagcacaagtatctatagttatcgcttaaagcagttgaataaagctacttttctccttctctgacttacatttcatttttactagtgaacagctctgcgctttttgttactgtggggaaaaaagttccttaggacaaggagacttaaaacaattcagaataacgcctggatttatcttgccatggagaaaccaaccttctaacaagaaggacattgatgacaacagcaatggaacctatgagaaaatgcaaaactcagcaccacgaaaacaaagaggacagagaaagtaagcagtttcgactttaaatgttggaatagattaagactgcatataatttatttccattataatgtttataaattttcaaatgggattgttcttgttgaacagtttctcctgttctccacatttatgggatactctgactcaccattaacccaattaatccaacaaactatccttttcacaaatttttcttgttattttttaaaaagtttatattaattgtatatgaaagcggtgtgatcacaaaactaaacttttggaagaaaacttcaaagaacataacacaagctgagagggagggagttcatggaatttataaatggaaataatgtaataataaaacagatcaataaagtccttcttttgtttctctaaataagcttttaattttaagaatataacataatacaatagcaaatccagaattggttttcactactcatgtcttttgtgtcattcattcatcaatccattcagtcatttatttaatttatatataagtttgtgtgcttcagaaaatgttgcactgtcctatacattcttccctccctccctcccctgccttccctcccagaagatgcttttttcttttttaaggaattttttttttgtaatgatgtgtgtatgtctgtattcacgggcacattgtaattacctaaaggtcttgtctgatatagtttaaaatattttgtacagttgt

SEQ ID NO: 44712 - DNA, 1053 bp, Homo sapiens
tattttttagaatattttccaataatataaaataatatgtgactaggattatgtgcaaaaatgtaagacttttatagagaaaattataaaactttttggaaagattaaggatcacagacataatagcagtataatactcacattttaggggattcagtattttaaagatattctttcccaattgatgtgtaggttcaagaaaattctaataaaaatttctacagtaaattttacaagctgatcttaatttatatgaatatgcaaaagacaggataagccaaaggacccatgaagaagaggaaggattgctttacttgatactaagactttttgtaacacactaataaattaagtcagtgctgtattaccacagaaacagacaaatagaccaatggatcagaatagggaacccagatacagatacatgattaatatggacaggttatttataacaaaggggcatcacaaattagtgaggaaggaagtctctttcaacaattgtgctagaacaattagacatactttaaaaaaaaaaaaaaagaaagacctaatttattcatgtctactccagttaatttatagacttaacacgtgagaagcaaattaataaaagaagttaatgtagaggaatttcttcattgctttggggtaaggaaagacttttaaaaaacaaatggaaagccctaattatagaaaagggttgattggccaggcacagtggctcatgcctataatcctagcactttgggaggttgaggcaggaggattgcttgagcccaggagttcgagaccagcctgacttgaacatgacaaagccctgtctctacaaaaaatacaaaaattagtaggacttggtggtgctactcaggaggctgaggtgggaggatcgcttgagcccaggaggtcgaggctgtagtgagctgtgatcctgccactgcactccagcctgggtgacatagtgagaccctgtctcaaaaaaaaaaaacacacataaaaagaaaaggggccgggtgcggtggctcatgcctgtaatcccagccctttgggaggcta

SEQ ID NO: 44713 - DNA, 1034 bp, Homo sapiens
caatattggtagaaataattgttataaagatgtatgttgtaatttgttggtttattttagtttcttttattaattgcaaaaaattccattaacatttaaaagttatgtaggaaaactaaaggaaatactgataacaactaaataaaacacctagagaacagttgacttccaacagttactattttttttcatttattagcagtctatcctgcttaaacaattactatttaaattaatgcccgcatattttttggcttttgacaagtattggactcttaagctttttgaatttgcattaaaaaatcacattaaatattataacagtaatgtatatttgtagaaatttatggaactgtgggtaattataaagagagtaagtcacctgtaaaagtgttaactctcagagaaaattagtgctttttttgtgtatttacttttagttgcttacattgttctgtgaaagcagcaactatattcatattattaatcagtgtcaatattttaagtagtttagtgaataaagatagtgttaataaataatttgctttttctaatatagtgctaatgttttagctttacagtacaattttgatgacattggatacactagattcaatgagatatatccagaaaacataactgtcaggaggcagacttctttcaaaagaagggagggacatggttacacaatttcttagctatgttttcttctgtagttttagtaggaagcaagcatgaaaagtattgccattctctggagttaagggaagtcagttattctatttaatagctgattaggctgggcatggtgatggtggctcatgcctgtaattctagcactttgggaggctgaggtgggaggataactggagcccaggagttcgagaccagcctgggcaacatagttaatccctgtctctaccaaaaaaaaaaaaaaaaaaatccaggcgtgatcgcatgtgccttgtagtcctggctagtggggaagctgaggtgggaggataccttcagcccaggagtttgaggttctgatg

SEQ ID NO: 44714 - DNA, 1047 bp, Homo sapiens
tatcctttttgatgttctttgtcatttggtttctgagattaatttgaggaatatttcttcttcttcctctcttttgtctctttttggtatttccattacatgttacctttttgtagttttctgtattaaacattctgttctttttttttttttttttcccagtctttttctctttgcttttcaggtttggaagtttcttttgaaatatcttcaagcaatgagattgtttcctcagctgtgtgaggtctactaatagacccactaaaagcattcatcatttctgttagttttaaaaaaatctctatcattttaatctctagaatttcgagttctctgcttacattgcccacgtcttcttgcatgctgtctactttatccattagaaccgttagcatattaatcatagttgctttcaattcctcatctgatcatttcaaattccttcctgcatccaagtctagttctgatgttgctctatactgtgttttttgctttttagtataccttgtaattttttttctcgatagccaggtgtagtacactgggtaaagacaacagctgtaaataggcctgtagtaatgtggtgggccttgtaggaggagggggaagtctgaattttttactcttcctccccaccctgccctttcactgcttttaggtggggcagaatggcctagaatgggctaaagttagatagttctcttaggctagaactggctggagtttatttctcttctcgtaggttaggctctagttaaatagtttctcctgaaggcaggccttgttaagagaaatggttccttttcccctcctgctgttgaaagcaagaagatatttttctgtgaagttcactgtgagaaactggtagagctcctagaggtaaaacacaaaaccgtggggccccacgatgactgggtccctctgtagtttgtatcttccagactcgtccacactgaacctccaacgttttgtcaattatggttcaggtttttgtacccatggagctttttacccatgggtttctgctcaggtaagttgtgattcatg

SEQ ID NO: 44715 - DNA, 1036 bp, Homo sapiens
tggttacatcccgcccggccgtctgtggccacccaaccccttaactatttttaagtgtacattttagtgatgtgagatacattcataatgtagacactatccattttcatagctttttaaaaaatcttgttaaactcatactttatagccattaaacaataactcccagtttctcccttctctcagcctctggcaaccaccgttccactttccgtctctgattttagctactcttagtaccttatataagtggaatcatccactatttttttttctttgtgactggtttaattcacttaggagattgttgtcaaggttcatttatgttgtagtatcgcatatgtcagaaattccttcctttttaaggctgcatagtattccaccatagacatactgccaatgtggtatgtctgtaccacattttacttaactgttaattatgttttatttattgtgaataatgctgctgtgaacatgggtgtataaatatctctttggagactctgcttctgattctttttggtgtatacccagaggtggaatttgtggatcatatggcaattctatttttaactgcttgagaaactgccgtactgttttccagggcccatatcattttatgttccctacacctgtgcactagtgtttcagtttctccacgtccttgccaacatttgttattcttttttttatttttcacagtagccatcctaatgggtgtgaggtggtatatcttagttttgatttttcatttttctaatagtcatcgtgagcatcttttcatgtttttttggtcatttgtataacttctttggaaaatgtctgtggaagttctttgctcatttttgagttgggttgtttttgtcaggtgttcgtcccacctcatcctcctgagtacccaggactacaggcacatgccactatgccccactaatagaatctattttagacctaattatattctgtctacctgaaagacaattgaaataaaatgacataaagagaaagataaaacatgccaacactaatcaaatta

SEQ ID NO: 44716 - DNA, 1096 bp, Homo sapiens
ttagtttttgaactttttatttgaccttcatctctaacacctgctccatctccatctctatcttcttcattttagctgcatactcccttctttcttcttccatttgtgccagagggctcttagtcagctgccctttattcttgttgttatcaactccattataagtcacagctgccagttttctgcttctgtagttctcatagtggacattattagtaacatctttcaagtcctgagtgtgtgtttttatcagcatatttcttagaattgtaaaatcacaatgttcaccattttcaacttcagcagcaccccaaggatactgccttcctttgacccttttgccattaacttcaatgatagtattactagcttaccacagcaagaggtaaacagtcctttacctttttagcaagtttattttcttcttcatcatctatttctggaaaatcatatatcttaattttatgttcttggatttctttcattatctgttttttaaactgttggcattcctctggtataagtgtgtctgctttggcaataagttggatgataatcactttttcatgcgaacgcttcataaactcaatatccaatggtttaagttcatgtcctgaaggagcaatgaagtataaacaacactgcaccctgctattaggcatctgacgtctgttcactcgtgattctgcatttaggtagtcctcagatttactatcaatgtaatcgataagaggctgccagcaattactattatccactacatctccaaatcctggggtgtcagctattgtgagcagcaactgaacaccaccttctttgattaaaactttggattgtccacctgtatagtctttttaattctatgagaaggacctggatactctggagcatacaaatctgtaaggaataatgagttgattaatgtcgactttcccaatccaggttcgcctctctgggtaaggtggctcacacctgtaatcccagaactttgggaggccgaggtgggtagattgtttgagctcaggagttccagaccagcctgcgaaataaggcgagaccctgtctcactttgtatgctggtgccagccgggggtgc

SEQ ID NO: 44717 - DNA, 1048 bp, Homo sapiens
ttgatgtttatatgttactgtgttgatctgacaatcttaaagaactcttttaacatttcagttgataaacttgtattttctaagtagacattagtgatattttctgctaattatgacactttagcctgttcctttatggtattaaagtgtcttatttcttatcacttagcttaatgacacaacatccagtattaagtggctttgttttaaagtttgattccctgtgaaattttattattttgttcagtgggagacagaactgtaacttgcttttcagaattgttaggctgttatctcaatatttgttattgaatccatatttttgtcctgagttatagaaccatctactctttcaacaaaacatatattgagtgcttatgtttcatctggtgctgttaggtgttgggggtgcagcagtgaatagaacaaatttctagtcttcatggagtatacagctaaagagacagtaataaacaaataatatttttttgatccatagtcatttggatttacagatgcggaacccgtggacatagaagtcttactgcatttatatctgttttttttctgcatttgttgagatgatcatttttccttgatttgtaaatatgacaaccatattaacagattttcccttttgatttctttatgaattttctagctttcttcctatgtcattgatttctagtttcatacaattgttgttagaaagatacttgaaatgatttcattcttcttgaatttgttaaaacttgttttgtggcctaacatatgatctatcctggagaatattctgtgtctgcttaagaagaatgtatattcagctgctgttggctagaatgttctgtatgtgtctgttaggtccatttagtctgtaatgttcaagtctgtgtttccttattaatttttgtctggattatttatccgttgtcgaaagtggggtatttaagttccccactattacggtattgctatttccccctttagttctattgatagtgctttatatatttaggtgctccaaattggggcatgtatatatatttat

SEQ ID NO: 44718 - DNA, 1048 bp, Homo sapiens
tgaccaggctggtcttgaactccagacctgtgttctgcctgccttggactcccgaagtgctgggaatacaggcatgagccactgcaccctggccttaactacgtattttttatatctgcacagtgttttggaaaaagtggttcaactgaaagaatgaaaagatgggggcagaatttgctttttaaaaaaataataataatttaaaaaaagggcattgaaaaaagtttcagtggtgttgggagggccttggaacaaggaatgaatggaagatgagggagtggagggaggccatgtatggactctttctacagaccaggctgttgaaggagagagggctaacaggaaatgaagtgcgggggaagttttttgaagatgggagaaagaggacaacttttatatatttcatttcatttgattccttataaatttgtaaggaagatagagcttgtattatttcagtgaagttgaaaatagagtacagaaaaattaagatacagcacccccaaaactgagaacttctgacataatacactgttggaaatacttacttcagagtgaagaaaatattggaagttaggcttgttaattgctctgcatggttcataattactctttcttattaactatttaaggaacatgagaccaggaagttaaatacctgggtatatgcagatatatatctagaattggtaccaaagtaaatacaggcataccttggagatactgtaggttccattatagactaccacaataaagtgagtatcaccataaagcaaggcacacaaatattttggtttaccagtgcatgtaaatattatgtttatattctactgcagtctattaaatgttcagtagcgttatatttaaaaaaccaatgtgcatactttaatttaaaaatactttattgctaaaaaatgctactgatcatctgagctttcagtaaattgtaagattttttgctgatagaggatgttggtggctgctgactgatcccagcagtgattgctgaaggttggggtgcctctggtagtttcttacaataagacaa

SEQ ID NO: 44719 - DNA, 1084 bp, Homo sapiens
caacaggctaccgagtggtattggtctgcagctataggtggggggaaccctgagtacgataaactatcttctagaataatttttttaatatattgaagcagtagtgcctagtttataagtagacatatgtatagtataaactatatagtttatattcagagtacaaaatccaccttggccactatttttttttttctttttttgagatggagtctcactctgtcacccaggctggagtgcagtggcacgattttggctcactgcaacctctacctccctggattcagcgattctcatgcctcagcctcccaggtggctgggattacaggcacacgtcaccacacccacctaatttttgtatttttagtagaaacggggtttcgccatattggccaggctggtctcgaactcctgaccttgtgatctgcccacctcggcctcccagagtgctgggattacaggcgtgagccaccccacccggccaccttggccactattacaaaagtaaagctaaataatactgaagtatatgttccatattttgtaaggactgttgatttggaaacagtgtattctaacaagataaattttaaatgtaactaatagtatatgtttctgaataaatagttgctgcttctaatataaagtgtcatatttgttttaaaatcattgctcaagttgtatagttgttttgggcacgtattttcaacttctagaccaatacaaaatgtaaaataagtaaaagacgtgatatagttgtatcctttctaaacactgacctattttttttttttcctttgctaccttttttttttttttgagacagagtctcgctgtgtcgcccaggctagagtgcagtggtgcgatgttggcttactgcagccttcgcccctcgggttcaagtgagtctccggcctcagcctcccaagtagctgggattacaggcgtgtgccaccatgcctggttaagtttttgtatttttagtagagaccggttttatcatgttggccaggctggtttcgaactcctgacctcaagtgatctgcctgtcttggcctcccaaagtgataggattacaggcgtg

SEQ ID NO: 44720 - DNA, 1077 bp, Homo sapiens
aagttttctaataaacctgagttcccacttgttttttttccttccagcttttattttaggttcaggggttacatgcacagatttgttaacatgggcacattgcgtgtcgctgaggcttagagcacaaatcattttgtcactcagatagtgagcatagtacccagtaggtagtttttggatcctcaacttcctcccagcctccaccctcgagtaagccttggtgtctcttggtcccctctgtgtccacatgtacttagtgtttagctcccacttggaagttagaacacacagtatttggctttctgttaattaattcgcttacgaataatggcctccaactgcatccatgctgttgcaaaggatcatttcattctttttttatggctgcacagtattctgtctcgtatatgtaccatgttttctttatccagtccgctgttgatgggcagttaggttgattccatgtctttgctgttgtgcaaagtcctgtgatgaacatatgtgtatgtgtgtctttatggtagaacgatttctattaatttgggtatatatccagtaatgggatacctggattgaatggtagttctcagttctttgagaaatccccaaagtgcttttgacagtggctgaactaattaacattcccactagcagtgtataagccttcccttttctctacaaccttgccaacatgttttttttgtgtgtgactttttaatcatagccattctgacttgtgtgagatggtatctcattgtggttttgatttgcatttctctaatgataagtgatgttgagcattttttcatatgcttgttggccacatatgtcttcttttgagaagtgtctgttcatgccctttgcccatttttaaatggggttgttttttgcttgttttttttttattataaactatttttttattatactttaaattctagggtacatgtgcacaacttgcaggtttgttacatatgtatacaaggtgccatgttggtgtgctgcacccattaacttgtcatttacattaagtatatctcctaatgctagttttttgcttgttgatttaagttcctt

SEQ ID NO: 44721 - DNA, 1075 bp, Homo sapiens
attgcattcagaattattttttttttttttgagatggaatcttgctctgccacccaggctggagtgcagtgctgcaatctcagctcactgcaacctccgcctccccagttcaagcaattctcctgcgttcagcctcccccgtagctgggactacaggcactcaccaccacatccagctaatttttgtacttttagaagagatggggtttcgccatgtagcccagggtggtcttgaacccctgagcttgggcaatccacccaccttggcctcccaaagtgctgggattacaggcatgagccaccgtgcccggcccctgttcagaattctggcaattgtagtgcaagagggacaagaatctgcctctgcacaaagttgcaaaataatactgtggttcttttctcgtctaattttcataaactcttaacaacaagcatgttatttctggagaaacaaaatcacagtttgaattgaatataatctttatatataatcttacagagggactttttgttcctgaactcctgataagaaagaactttttatgtgacccgtatccaacttgtgcaacttatctaaagtaagctcacaaatgtattttctcaaataatacaatacatacttcattataatagccttgaatttccaaataggttgaaaacaaaactccttgtgagtgggaggggtagttttaaccaaaaaatcaattaagtgagaagatttggtggtggtggtgggattagaaatcctcattttattttgttctcataagcattttaaactgtccctctggaatcacgttgtttttgaacttgcatggatggtaggattctttaaggtaaggaccaggtcctactcatctttgttttctccgaaaccagcatatcattggttgaaataattcccatgaaaactgccattctctctggtgtgtggacacaatttctaactgacagggatctgaagtatggattttcagtagctgcttacgagtcactgcactgagtctgcttattacagaaaactgcctgactcaaagctcagctaagcccccttgcttagctgcaccgaacctta

SEQ ID NO: 44722 - DNA, 1062 bp, Homo sapiens
aagtatgtggtggccaggcgcggcggctcacgtctgtaatcccagcactttggaaggctggggtgggcagatcatttgaggtcaggagtccgagaccagcctggccaacatggtgaaaccctgtttctactaaaaatacaaaaattagccaggcctggtggcacacatctgtagccgcagctacttgggaggctgaggtgtgagaactgcttgagttcagggggcagaggttgcagtaagctgagatcacaccactgcactctagtctgggagacacagcgagaccctttttccaaaagaaataaaaaattaaagaataaaaatgaggccaggcgcggtggctcactcctgtaatcccaacactttgagaggccaaggcgggtggatcacctgaggtcaggagttcgagaccagcctggccaacatagtgaaaccccgtctctactaaaaatacaaaaattagccaggcgtggtggcacgtacctataatcccaactactggggaggctgagacaggagaatcgcttaaactcaggaggcagagtttgcagtgagctgagatggcaccattgcactccagtctgggcgacaagagtgagactccatctcaaaaacaaaacaaaacaaaacaaaaaccttttttcttcataaattacctaatctcaggaagttctttattgcagtatgagaacagactaatacatcacccaaaatgatcgctttctttacaggatggctaataccctagtataacagacttggactttagaattggacttcagatatgggaaggtcataagaaaacctttcttttgggaaaagcagcacaagcaccatgtctgagggagagtatgtcactcaaggcggccactgagtctatcattttgctccacctaggttgagcttcaagacccagctcaaatcctacatgttctgtgatgctttcccgatcatcctgggccagagctggcttctgcacttgtctgcatcctccatttaagactcgtattttttatgtgtatgtactttttctcccagtccagactgtaaacccctggaaaa

SEQ ID NO: 44723 - DNA, 1099 bp, Homo sapiens
aattaatattgaagtgctctttctaatataaataaaatataagaaatgaaaatgtgatttttcttccaatgaacaaatgaacatataatccaagatcttgtagaaataacagcacttgagttttaaattattggattccattcatttattttgaagtttcttaaaggatcttttttaaagattcagaaatatttatggatagtcatataattcatgcctttaacatttcaaatatgattcagaatttcctgaaagctttttggggataatttactgtgccgaagttgattcttctgtatttctgactgactgacctctcacgtcatttctacctctccaagctcacattggggtaatgatgatttatagggtgatacgcttaatcttacttaaaacaaaatacagattaccaaataccggtttgtctatttaaatcttctatataaaaatctaacttatgccagagataaattatagggtattacttatggattcttggctataaaaagtattcatacataagggtatatgtgaatagtgcactgaaaatcaaaataaatggctacaatgtatggacaacagaacctgtgactgcaagcagctgttgggtgtcgggagccttgagggcttgctgatgtggcgtaacccaccggacgtgtgactgtgtgtgagctgcttaatctcatggataaaacaaagagtctgaattaggatcactagcttcttttctactaacgtagtcgctaaaagaaatttggaaaattatgtatccccttacatgttttgacttaacattcaaactttcatttataagtatttaatttatggcatattcacattttaaaataaaacatttatttaaaatatccactaaaatctacatatcacagcagtttgctacccaccatacatttttttgttttgttttgttttttgagatggagtctcactctgtcgcccaggctggagtgcagtggggtgatctcggctcactgcaacctctacctcccaggatcaagtgattctcctgcctcagcctcccaagtagctggaactacaggcatgcatcaccacgtccagctaatttttgtgttttttg

SEQ ID NO: 44724 - DNA, 1758 bp, Homo sapiens
aggacaccctcactgggcagaagtattcatgaggagcacatgacctcagctcatatactgtggcagagcaaaaggcactttagctggacgctgtcagataactcactttcaaagggagatccgagctaagtgttctttcttctctctctctctctctctttctttcttccagaggcttgcttcttcgcccaggctggagtgcaatggcacgatctcagctcactgcaacctctgcctcctgggttcaagcaattctcctgcctcagcctcccgagtagctgcgattacagacgcatgccagcacgcccggctaatttttgtatttttactagagacggggtttcaccatgttagccaggatggtcttgaactcctgaccacaagtgatctgcctgcctcggcctcccaaagtgctgggattacaggtgtgagccattgcacccagcctggctgctaagtgttcttaaaggaggctgatgtaggggaacttaccctattcgatgtaaggatatgtagttaaggccaggcatggtggctcaggcctgtaatcccagcactttgggatgccaaggtgggcggatcacgaggtcaagagatcaagaccattctggccaacatagtgaaacccccgtctctactaaaaatacaaaaattagctgggcatggtggcgcacgcctgtagtcccagctactacggaggctgaggcaggagaattgcttgaacccgggaggcggaagttgcactaagccgagatcacaccactgcactccagcctgggcgacagagcaagactccgtctcaaaaaaaaaaaaaaattgtcgctaaagtgagagtatgctattggtaaaaggatacacaagtagaacagaatatagagcttcagaacaaacccacacgtatggactttagcatatttcagaagcagcaaatcattgtggaaaggatggactattcaaatccttgtaacaaggatggatgatacatgatggaaaaagatgcaactgaaaactgtattacatcagtacttataatttttactcatcaaagattccatcaacaaagcaaaaagagaagctacaaacagagtatatttgcaacccatgcgaacaacacgtttaatattaaaaccaaaatgtagtgtgtatactcataagtgtgtatatatgtgcacacaaatatgtacgtatacataaatcaagacaaaataagtagaaaaatgggcaaaggatattcaggggcatttcacagaaaagaaacaggactggtcaaaaaacatgaaatgatgttcaatctcattggtaattgcaaatacaaattaagagttcagtaaggtgtcatttcacgcacacttggatgacagaaatttaaaggctgacattaccgagtcgcgaagaagatgtgcaacaaataatgccaactctgtgctgctggcaaagtcaaaccaaagaagtgcaagcacctggaaaacgaacttggcattatttttctttctttttttttttcttttgagacagagtctcgctctgacgccaggctggagtgcagtggcgtgatctcggctcaccgcaacctccgcctcccgggttcaagcgattttcctgcctcagcctcctgagtaactgggattacaggcacctgccaccacacccagcaaatttttgtatttttagtagagatggggtttcaccatgttggccaggatggtctcgatctcttgaccttgtaatccgcctgcctcgacctcccaaagtgctggg

SEQ ID NO: 44725 - DNA, 1950 bp, Homo sapiens
caatctcattactgggtatatacccaaaggaatagaaatcattgttataaagacacatgcacgcgtatgttcgttgcagcactgcccatcagtgacagactggattaaaaaaatgtggtacatacacaccagggaatactatacagccataaaaaggaacaagactgactgggcgtggtggctcatgcctgtgatcctagcactttgcgaggccgaggtgggtggattgcccgcgctcaggaggtcaagaccagcctgggcaacacggtgaaaccccatctctattaaaatacaaaaaattagctgggcatggtggtgcgtgcctgtagtgccagctactcaggaggccgaggcaggagaattgctggaacccaggaggtggaggttgcagtgagctgagatcgcgccattgcactcccgcctgggcgactccatctctaaaaaataaaaaataaaatataaggaacaagatcatacctttgccagggacatggatggagctggacgctattatccttagcaaactaacataggaacagaaaaccagatactgcatgttttcacttataagtgggagctaaatgatgagaactcctggatacaaagaagggaacaacacacacacacacacacacacacaccctctcacagacttagaatacgtggcaagaaaagcatataatttgacattaggagcagaagaattagtgtgctaaggtccttgcattgtccgggagaaggggaaaagtatcaacattagacattgataaagggtctgcaccttttgatttcttaaccactcaaggatagaaaaggggcataactttaaaatgaaacaggaaaatggtgggctgatttttaaatttaaaagaaccgaatacagcaggacagatccaaagcacagaggagatggtgtatttaactccatccacaccaatcattacattacatgcaaagggactgaggactccagttaaaatgacagttttaggctggtttttaaaatacatatttgctgttttatttttagagacaaggtctcgctccgttgcccaggctggagtgcagtggcatcataactcactgcagcctcgaactcctgggttccagtgagcctccacctcagcctccaaagtagctgtgattacaggtgtgtgccaccttgcctagctgagtcccttgaattgataaaaggtatatacaaaaatccctcagtaaacattagttaatagtgaaatattagaagtgtctcttttaaaatcaagaacaagagtgcctgctattactacttgtattcaacattgtactgaaagtgtcaacacagtaaagcaaggaaaatgaaaaagcatgaaaaaaaggcatatggaagaaacaaaactgtcattctttaaaggttagatgattgtatgtatggaaatccaatatcatctataagcagattattagaattaagagtttagcaaatttgcgagctaaaacatcaacatttaagtttttctaagtaccagcaacagaattaaaaaatagaattttaggctgagtgcagtggctcacaactgtaatcccagcactttgggaggccaaggagggaggattgcttgagtcctaggagttcaagaccagcctgggcaacatagtgtaagaccctgtctctataaaaataaattttaaaaaagaaaatggaattttaaatatatataatatttaatcataactaaaaatataaagtttctagaaataaatctaataaaaatatgcaagacctttttggagaaaattacaaagctttattgtaagaagcagagtttaacccttttcccatttagaaaaaaaaagtgcagctcactgccagcgctcatttaattttacgtaaacacactcttggaggctgaagcaaatcttactgattttcaatgtgaaaataaaatataaaaactattcttggagtta

SEQ ID NO: 44726 - DNA, 1924 bp, Homo sapiens
ttttaaagtggacacatttccctccccatcaaattgggttttatactttaggaagaagggaagaatggatatagtgtaatcaactaccagaaagggtgtgtactgtagtcatcagattttggaaaggccctagatctgtggctctttatttttgaatcttacaaattgaagtgggagtgcatgtgagcctggccggaggagagtcccctagcctcttccaaccttcccaccaggctctaatttccttatttattgtatttgcttgtacagctccattttggcaaaagtgaatttagattttctttcacattccagtaagtgtctttttaaacttttttgcagactttgcattttgtaacctacccttgagctactgcattttgactgagatttttaaattttacacaggtgatattcttgaatttcatggcccagaaggaacaggaaaaacagaaatgctttatcacctaacagcacgatgtatacttcccaaatcagaaggtggcctggaagtagaagtcttatttattgatacagattaccactttgatatgctccggctagttacaattcttgagcacagactatcccaaagctctgaagaaataatcaaatactgcctgggaagattttttttggtgtactgcagtagtagcacccacttacttcttacactttactcactagaaagtatgttttgtagtcacccatctctctgccttttgattttggatagcctgtcagctttttactggatagaccgcgtcaatggaggagaaagtgtgaacttacaggagtctactctgaggaaatgttctcagtgcttagagaagcttgtaaatgactatcgcctggttctttttgcaacgacacaaactataatgcagaaagcctcgagctcatcagaagaaccttctcatgcctctcgacgactgtgtgatgtggacatagactacagaccttatctctgtaaggcatggcagcaactggtgaagcacaggatgtttttctccaaacaagatgattctcaaagcagcaaccaattttcattagtttcacgttgtttaaaaagtaacagtttaaaaaaacatttttttattattggagaaagtggggttgaattttgttgatatacatcataaaatagtcttttgcagggtactacgcaagccttaaaatttttcttaagacagagtcttgctctgtctcccaggctggagtgcagtggcacaatcatggctcactgcagccttgaactcctggcctcaagggatcctcctatgtgtgcctcctagagtgcagggattacaggcgtgagccactgctcgtggccaaaagttttctttttttttttttttctttttgaaacagtcttactctgtctcccaggctgctggagtgcagtggcacaatctcggcccgctgcagcctctgcctcttgggttcaagtgattcttccacctcagcctcccaggtagctgggattacaggcacccaccaccacgcctggctaatttttgtatttttaatagagacggggtttcaccatgttggccaggctggtctcgaactcctgacctcaagtgatccacccacctcggcctcccaaagtgctaggattacaggcccgtgcccagccctaaagttttaaactctaggggaattaacagtatttctttacagaatggatttgttaaactagcacagtaaaagtaaagactattctgtttctaggctgttgaatcaaagtgattttagcaattaaactttgtattaatttaccaccaatatttcttcacaaaggaacttttaaaagattatctcagaaagtaaatctgagaggtaagaagtaataatgagtaaatggtaagtacttgagtaaatctaaagaaatattgatagtaaggcaatcctaagcaaaaag

SEQ ID NO: 44727 - DNA, 1064 bp, Homo sapiens
gtcccttgttctctatcacatagggcagtaaaagatgcttggcaggagtggcgggttcagcatagctcctcagtaacatagtaagagagggcacactgaacatctgggtggaatacaggtttagttgctatgttaacttttaattagatggacaattgttaatatgaaaatagttttactccttgagcctagaatctttttttttttcttttcttttctttttagagacagggtctccctctgttgtctgggctagagtgcagtggcatgatcatggctcaccgtagcctcaacctcacaggctcccacttcaccctgagtagctgagactgggactgtaggcacatgctaccacgcccggctatttcttttttttaattttttgtaaaggcagggtctccctatgttgcccaggctcgtcatgaactcctgggctcaagtgatcctcccacttcagcttccaaagtgctggattacagatgtgagccactatgcccagccatgtgtagaattcttaaatacaaaagagaagtctatgagaactgataacatactatgctataagaaagctgaagccaggcatggtggctcatgcctgtaatcccagcactttgggaggctgaggcaggcagaccacttgagcccaggagttcaagaccagcctgggcaacatggtggaacccagtctttacaagaaatacaaaaattagccaggcatgatgacacatgcctgtagtcccaactacttgagaggctgaggtggaatcattttttaaatttcttcttaaggtaaatttagaattgcaagttgtatgtaagattatggtggaaatttggtgcagtcttggctcactgcagcctctacctcctgggttcaactgattctccaacctcagcttcccaattagctgggactactgatgcacaccaccatgggtggctttttttttttttttttaattgtagagttggggtctcactatattgaccaggctgatattgaactcttgggctcaagtgatcctcctgccttgacctcccaaagtgctgggagttacaggcat

SEQ ID NO: 44728 - DNA, 1049 bp, Homo sapiens
catatttgtgaggaatttagttcaaggaccttaatgataattcatgtgtctcttgcaagtttgcagtgtcttcccggttgttataaaagccttttttatacctgctttgctattaatgtgtaaaagaaaaagagtatctcttaggcagggatttaaccttcaacttctttgcctcagtttcactcgtcgggaatccactctgtccttgctgttactctagaagcagtgaatgcctaggctagtgccgttgtctcctgtcttctgagtatctcagttttaaaagtttggttcacaaaatgagatgttaaatgtgcttttgcggactacacaattaatgctccaaggtcactattttggacaaactcagtgatcttttccctgctgtttttcattgtcatgacttttctgctatatttattatttagtagtttcattttcttgaaacattctcttttgccctgtaatgtttttcttcctggttttcctattaaatttctgttttagctgtcttctaatgcgtcttctaactgtggatatatctcaaaaatttagttttggccttaattttaggtccataatacccacccatcaaagagatttttgttttttctctattatttctgtgtggattactcccagtctgctataaccagccccttattacctaccatcttgaatctttttttttttttttttttgagatggagtttcactcctgttgcccaggctgaagtgcaatggcgcaatctgggctcactgcaaccctctgcctcccaggttcaagcagttctcctgcctcagcctcccaagtagctgggattacaggcacgtgccaccatgcccagctaatttttatatttttagtagaagcagggtttcttcatgttggccaggctggtcttgaactcctgacctcaggtgatccacctgcctcagcctcccaaagtactgggattacaggcgtgagccaccgcgcccggcttaccatcttgaatcttaaattttagtggctgtaggacattttcattttgtgacacctagagataaca

SEQ ID NO: 44729 - DNA, 1103 bp, Homo sapiens
tcagtaattttttttttctttttttacatttttgttgttaaaaaaaaaaaaattactattattttgagaccagatctcactttgttgcccaggctggggtgctgtggtgcaatgatggctcaccacagcctcgaacttcccagactcaagcgatcctcccacttcagtcccccgagtagctgggactacaggcacatgccaccatgccaagctgattttaaaatttttctgtagagatgaagtctcactgtgttgcccaggctgttctcgaactcctggcatcaagcagctttccttccccggcttcccaaagtgctggaattacaggcatgaaccaccacacccagcccgtttttttcaagagtttatgaccccaaatggttaattaccactgatctaggagaaaaaatacctgtctgtctttttggtctggctgtttttagagggaagtaaatgaaatataatggtgacatttaaatatccgaaggctgtacaggtaaatgtagctgtaatattatgtacctgaatatgggcgagaattttgtgggtcacacttgccacacttcacgtgtccacacttttcagagtatgtgctgttctgttttccagatgagcagaactacattctccgagatgctgaggcagaagtacttttctctttcagcttggaagaatccttaaaacgggcacacgtttctccactctttaaggtacactttaagggaaaagtaaatcagtccaagtaagcataacacacggacctgctcaagggaactaccaggtgatttggtgggaagtgcgcctccaggggagctgggctcaccctgcatcccatttacctcttggcttccttcttggacattgccactggaggtcttcctcctgtgaaccacagcacatctctagagaacttttctttactataatgtttaaaaataagtacacaaatttaataaatacatctatgagaaataagttattcaaagaataggtttttgagtaattggttaagaggcatgttcatttttctgcttttaataaatctttagaggacatcgcttacttcgtactattgtcagtaaatgtatattcagctggagaag

SEQ ID NO: 44730 - DNA, 1075 bp, Homo sapiens
tagatcacaaaaaggatgcttattcaccatttcagctggaacaggaaggcaaggcatggccttgttcctcccggctaggaacgttcatgtgggtgactgaatcttttccagtccacgtacgtccacaaatggccaccgaagtgccacagacactgattgtgggttcataaataaatttcagaggggaggaaaattagcaaagaatctgtgaaataatgcggctcgcatgtactaagtggtatttagaaatttttttaattgaaattttgaaaattttttgactctaaaaaggtattaatgaaacataaaacttaacaatgaaggcagaagaagaacatagtagaaacaattactacaaacattttagcttccaatttcatataatgttatacagtttagaaggagatagtctattcgttaatagaaatagtaagtgtacttttttagcttctgctgtgggagcatggcatacaccagcttgggtggtggggaaagcgggtctgtaatgttccagcctctggttggctccatcggctgcttttgggcaacacccagctttagagatcttttttgttactttctgactttgcttattctttttcttttccaaccaagaacatgctaattctttgaaaattagtttgccaagcagccaatttagtgaatgaccaatttacttaatttttcaagtttcagtttgtgaaaatgtggttgttttatctgtatataaagtttacagttcctatttaatgggaagttttggttgactagcttttatttctttatggcactgttaataagtatttgctgtgttgctctctgagggttagaaagtggttgttataaacatttaatactgagaaaacatttcatattttatcttccatattttaggatttcctaagagaatttttccagtttataattattgttttttaaaaatagacaatttttagggcagttttaagttcacagcaaaattacagaaagtacagtgagttcccatataccccagcccatacccatgcacacacaccgccacccccactacagtcaccatcccacaccacagtga

SEQ ID NO: 44731 - DNA, 1031 bp, Homo sapiens
ttttagggtggaggtgtaatttcaatcatgttttccacattcttttttttttttttttttttgagacggagtctcgctctgtcgcccaggccagactgcggactgcagtggcgcaatctcggctcactgcaagctccgcttcccgggttcacgccattctcctgcctcagcctcccgagtagctgggactacaggcgcctgccaccgcgcccggctaattttttgtatttttagtagagacggggtttcaccttgttagccaggatggtctcgatctcctgacctcatgatccacccgcctcggcctcccaaagtgctgggattacaggcgtgagccaccgcgcccggccatgttttccacattctaaattgggacacaggacaaaatatttgaaataaaaaccattttgagaagttcaaggttgagggctgcatatatataacatggaggaaaaaaagcaacaaagataatttaaagtactgaaaggattttgtgaataaagagggaaagaaaagaacaaaaaaacgatacagaggttctctccggaatattagctgcttctccccacttgcattgtcctagtgatcttttgaggtgaagactagttctgatgtggtgaagaagaacatgattcttgtatatgtttaagtagtttgattatttgacacataaatcttctggaagctactgtattacttagtagattgattgaattaaagtcgacaatattttaattgcagagtataagactacctcccaaactgaaacagaatgaagtagctaatgtccagccttcttccaaaagagccaggtatgagtaataaccttaaatttttcattgctggctttcacaggtctgctttggaaaatcggtggcaattgaggaaagtttctaaaatgttttgcagtaaataagatttgaaagagtttgctttttgctttacaactttattgggatatatttcattttaatgacataggccagtatattttttattttaaaaaaattcagtctttttctttaagtggc

SEQ ID NO: 44732 - DNA, 1025 bp, Homo sapiens
tataaaaaccgagtttaaatatgcctctaatatatcttgaatgtgcttcactataaacatccctagtgcttaaatccctgctatgtgccaagcatgctgcaagacttagggaatatgtgcgaaatcacagagacggagaaaacggaagagcagtgcgagaggcagccacacggctaagcagaggtggggtggcaaatgcaggctgttgtgagagcctgagaaaggaccttcacccatcgtgttgtggggtgatgtgttaagaaaagtctgctgggagaggtgattcctgaactgcttataggatgagtaggagtgagaattaggggggaggattttccaaatagtgcagcacagccaaaggcatgtgattggtgaaactgacaggagggtgcaaaggagggtgcctcagtgggatccacgaggcaggggttggggcaggagccagggctggtgtgtcttccaagaccttgttggtgtgccatgtggtgaagtttagatgcaggtgaagtgatcagctgtgcattttaaatagtaaagggttgaatctgagggtgaccagggagatgactgtgtggctggctgaggaaagaggcggatggcatgtgccagggtgaggaaggaagggagcagttctgagaaggacagcagcagagattttttaaaagtcagaagtgttcgaaggcagcactgagaaactgtcttgagaagtacaacaaaactcaaagatacaaaagttagtggagaaaagtttggggtttttgtcttgttttcaagttaaaagatttatccaagaggtctaacattaaataggatcttgggaacagagaaaatgaaggcaagaacattatgaaagaaaatagctttgcaactgaaggccatgtgccctcaggttgaaaagaaatgtaaggagagccatgataaggcaactgggaacattcacaatgctggtagagaaaactgttttctctcaaagacaagctcactggaggggaaacgtggacagatcaggagtctgggtgatttcg

SEQ ID NO: 44733 - DNA, 1050 bp, Homo sapiens
cgattctcttgcctcagcctcctgagtagctgggattacaggtgcccattaccacgcccggctaatgtttgttcatttttattagagacgggtttttgccatgttggccaggctggtctcgaactcctgacttcaggtgatctgcctacctcggcctcccaaagtgctgggattataggtgtgagccaccgtgcctggccttattatgtttttcaaatacaatggatgttggtttaaatataaagttccttaagtttgtatttggatatagagacaaaataatttactttgaaatggaaagaattgactgcagtagggagtttgggcacatctctgcactggaaattgtccttaggagacaaatttgatatactcagctgtgtgctctagcggtggaaaactgagaaggctccatccatttctagtgagtgaatggatttgatcactagtgagaagaattgcggagattttctgagagactttcagcaatgcaagagaacataaggacgttttacttctagatgtgaagaaaatgactgaaactttagaaatatgagacagatttagttgaacattagattgttggggggagtgtaacttaccatcaaaatcctgtttaaattgcaaatttatagtggttagaagccatgtgatgtgtatcatactgctttctatatatggcattcagtaactcagtattaatgtaaatgaggattatgacagttgtgatggaaaaatttaaacttgacattcattcagaattgtttgtagtatagcacaattacgtaattgagcaattaagattctttttcttacgttctccaggactaacatgtttccagccagaggcagatcagatggttgaaaaagtgatcggatgaatgtggtaggggttttgggaggcatctcgatggctggccttgcagatttctcctctccatccaggcctgcacctctcgcttcctcaagtggagaaggttccaggccaacggccatcttcattcctagccgggactcttgtcctgaatctccatctgttcttctccctta

SEQ ID NO: 44734 - DNA, 1085 bp, Homo sapiens
cagttttcacctaaatccaacactgaaaaatctaaaggggaattaatgtttgatgattcttcagattcatcaccggaaaaacaggagagaaatttaaactggaccccggccgaagtcccacagttagctgcagcaaaacgcaggctgcctcagggaaaggagcctgggttgattaacttgtgtgccaatgtcccacccgtcccaggtaacattttgccccctgaggtccggggtaatttaatggctgctggacaaaacctccaaagttctgaaagatcagaaatgatagctacctggagtccagctgtacggacactgaggaatattactaataatgctgacattcagcagatgaaccggccatcaaatgtagcacatgtaagtcactctttccgaaaaaaatgtcagtattggatcttagaattggatttcacagtctatttcaatgtagtttattggttttgctttttcagaccaaataacttacaagcagtatttgtgtgagaacctgtttacttgtgtgtgtgtgtgtgtgtgtgtgtgtgtgtgtatgtgtatatatgtatatttcagggtcattgaaaaagggtaacagcgtattttaagttgaagatttaaagcagctgagtagaaccaggatgtcagtgatggagtactatccgttgaagggtttccactcttacttagtttaaaattagcaatggcagcaaagagaataatgaagtttaccagctgtacctgatttgcttataatgaacttcatggtagtaaataaataacacaaattcatgcatttgttgaggaaggcttgatttcaggttacagtttatatagcatggagcttattgatacagagtggatcttaagttttgttgctggttgttttttgttttgtttttgtttttttttttttttttgagatggagtctcactctgtcgcccaggctggagtgcagttgcatgatctctgcgcactgcaacctccacctcccgggttcaaatgattctcctgcctcagcctcccgagtagctggaatcacaggcatgtgccaccatgcctggctaatttttttttttttttttgt

SEQ ID NO: 44735 - DNA, 1035 bp, Homo sapiens
tacagaagcaggagggagtgctcacagtggttagtcctaactgattggagactgtcagagggatctgcaccttttctgcacactggagcacccatgcgcacacacactcacatgcacacgccaggcaggaccccagctttacaaaaggactgtttcttggtggttctcagtgaccttctgtcttttccccgtcagggtgttgatacaagctggagctctttgttggagtcttccagagctctcccagggagaggtagggaagggagcttgtccagcagaagttgggaagcacagagatcatctgccttcttctgacccggtattgatgcaggctgaggcctctgttgtaatgtgctgggtaggttttggggaataggtcaagagtgtaatggagagcctggctaggtcatgatttgaatctagaagactaaaaagtcctttccattctgtatctcaatcaacagtatttcttgactgcctacccatgtgccttgcactgtactaggtgctgtgaaagatctcagagaagtttaggacatcatgtaagactctttaagaaggagtgttagagttcatagtcaagactggacaaggagaaaatcctgtaagctagaatcaaggagtgtcttattgggggtggtgaggcctgaagaaggaaaagggagagtgttcctgattggtttaaaggaaagcttttattcctgggggcacagacttgaaattctagtcctctgctcctggttgctttggagtatagctgggaggacagataagcaagcagatagttgtagagtgtgagaagtatttagatttctgtccagcttgctgtgggagtacagtggtaatgccacctgagctgagtcttagaggaggaggtcggagggtgggcgcagcggggcacaggaaagcagaacgtggtgaggacggcaggtgcacgtgggggcagtgctcatgggcaggaggaggtggttaggagcagccagacaggaagggcctggacactatgggggagcctttggattttagccttgcagc

SEQ ID NO: 44736 - DNA, 1007 bp, Homo sapiens
cccagtttaattatatttccgccacaaagctcccgcgtctcattgcatattcaagtttgactaggaagcatttaaaaaacagtgtggatgaaatacccttgtggggggaagggatggggtgggttggctggggggggctgcaaatcttcatggagcgaaagcagcgagccccaacacccgcatcaccccatggatggcctcacctgcgtggaaatgtgtccaacttccgcctgccccacccgctaggcgcccagctccccccgacggcgccaggcacaaaggccattgtcacgccgggcgtttaggtatgggggctgttttgccttgtgactccagcgggtttgtatgacattcttcctctgacgtgctgtttttgtttccttggggctctgaatccacagggcgcgttcccgtctctacatataaaagatgtttttctctctgcgagtgatgagtcactggtggaatcgcctactctgaggcagtatgcagtcactaaaataaattctaaggctcactgagttcccaggggcaatgggcccggctggtctttgatcacctttaaaagaatcagaacatttaactctccatccagacctgatgttctggccttcattcagaaaggaaggcccgtcatggcaataggcctagagtggccccggagtagcacctgctaaagctacctcacctgagggggccaccaaaagcctcttcctttatagcttagtgggtgggggtgggggacactacgacagagagttgcaggtacaaattgattaccagtcctggtcctgctagatgtagtggccactcccatccaagggcactaatatttgggacaggaagtgagccacctgtagaggtggttggggctttgaccttcaccccagctcctggccacagactccattcatacctgatgagagaccagagcatcctgcctggggctcctggagtcagggaccctaggacattacttccacatacaagctgggcagcacagaaat

SEQ ID NO: 44737 - DNA, 1105 bp, Homo sapiens
gcctgaaggactaaaacactgtaaaagtgaggttccagaaggagagaataaaaagtatagaggagaggcaatattcgaaaagatgatttcacatgatttttaagaattagtgaaagacgtaaatccaaagatacaggaagcataacaagcatggggtaaaaaaaaaaataaaaaaatccacatctagacgtggtgaaactaaaaatttgaataaccaaaaaagagaagatataaaaagcagcgaaagagaaacttccacctctggccatcatggaggactgagacaggcttctcacatcacaaacaacttgaaaactggacagatttggaaacactcttttcagacattggaagacaggcagtcgaggaccatgatccctgagagaatggcagcaaacgaggtgggccttatgataacccagctttctggattgtgaggcaggaaggggaaactcaggcagaacacagtggtcttaatgatttggggccacagggatgacaatttgtagtgcaggtgtgggacatttgtgggttgcagtactggagatgagggagctaggcagagaaagagttctggaaatctgcatggagtcaccttgaatatgttgctgtagggtgaaactccacgaggacagacaaagtacatcgggaacaaccagaaagctagagtaaaggttactccagaatctcctaacagagttttagaacaatcctggaagggagtatgctgatcagcaggtaatttaatggcctgccagaacaaagtccaatattttttaagacaaccacattcggcactcaataaagtaaaattcataaaagtccagcatccaatcaaaaatcgctactgaagtgaaggagcaggaatatatgaccaataccaggaaaaaaattgatcaatagaaataatatgacagaaatgatggaattaccaggcaaagaatttcaaacagttactatacatatgctcaagaatttaaggaaaaacaaggccataatgaagaaagacatagataggaagtgaatattttagagctgaaaaatacagtattcaaaataaaatgttcaatgggtagaaataaaagtagttagaaatttccagttt

SEQ ID NO: 44738 - DNA, 1055 bp, Homo sapiens
ccttatggatgaggttttacctccccagaccctggggagaaagcaagcatctttaccctgccccatccattgatacgtggccttgtggctttgcacatcatctgcagagctcagccagtctccctgctgtgggcacaggctgcacatccggaagctgtgtgagctggactgccgggtccagtctcctgcccgaggccttgggtcacccatgtgccgcctgctgcttctttcacccttgacctctggggctttctgctctttctcttgagctcagctgtgtcttttaaaaatgttgattttgaactagtttttctgtgtgacggcagtgggagaggcactggctgcatcaatccaggcccccatattcttggaaacaggccacaaaattcaatctcaccaggactgatgttcaagcacaatttttgttttaagtaaatgacacccctttaagtggcctggagtgagtctggactttaaaaaattagttcatgtgattcattcaattatacttttccccaatgaaatgttgaactgtagcaaaattcttggcatgagcattcttttctattcttttaggcataagctaccactggggggtgagccatctccagcacagcgcatcagtctttccagaggaggatgaggctagagagctcagctgctagagattctcctcctcactgggcaacttagggttataacatttacagtatctgtctaccgtaactttatccaataatttcactctttctttccagggatccttttttagtttgttggtctttcatgtagtgtctctgctttctttaataagttgattaaactgaatatccatgaaagaccacttttttttttttttgcagcataactaaattttgaagatatctcaggaattctttgggataaatggataactacataaaactatatctctgagtatattgaacaatctcaagaaaaatattgggcactgaaaattatttgaattctctttcttttctgttttgttgaatttcattagaagcttaaattctaaaaatgaagcatctatcttg

SEQ ID NO: 44739 - DNA, 1070 bp, Homo sapiens
gcttaagaagaaagctgcgggtggtactctaagagatctgttgtataaacattatcacaaaaagagtgatgatacctgtgcttatccaaggaagagcagcccaagatggatggcaatagcggactatttaagtggaagacattgatatgaagggaaaatcttatattttgcttgtgtagagcgcaattcacagaaagtgttcaaatactagaataggcagttggagtccagcttgtggaagatggggttttcttcatgatgacactagagatcatgatattggatactagtgctggccctgtatttttatttatttatttatttatttatttatttatttatttatttatttattttgagacagagtctctgttgcccaggctggaatgcagtggcgccatctcggctcactgcaacttctgcctcccaggatcaagtaattctcctgtcttagcctcccgaatagctgggattacaggtgcccgtcaccacgcttagctaatttttgtattttttagtagagtcggggtttcgctatgttggccaggctggtcttgaacttctgacctcaggtgatccgcctgcctcggcctcccaaagtgctgggattacaggcgtgaaccaccgtgcctggcctatggattcttaatgtatcatacccataatatttgaatttgcccacctgcctagtctctaaacactgcactaatgaaagcctaggcagggtcagaatggttcttagttcaatatccttctcacattttagtatcttaatgctctcacatttctcctttgttatgtacaaaatattctcaaagcctactcagtgcctatttgactcttgtctctcttaacacagtccttgacatctaaaacaaacctaaggagcagaaattggtggcatggggttcatctttaatttagttctcaattttaaccttcaccaaaaccatctctccatttatttttcttaatcttctgtattacctttaactttctactcacacttgtatatttatttatttatttattttttctttctttattattattctttaagttttagggta

SEQ ID NO: 44740 - DNA, 1110 bp, Homo sapiens
ctccagcctcggatgtttcctcgctgcacagacctgctcgggaagactcgagaaggccaccccaggactccagctctccccggaagggcttcccctcggattgcgtcttggcccctggaaccctccctctgtatcctctgctgttcctctcttggcctccatttgggttgtggcctggatactctggctcgctgcttcccttctcttaaggatcacagccctgcactgcctgtcgtccggtgcctggaaaccattgtattttttggtctgattttgtagttgtttgagaacttaagtctggtccctcacactccatgcccagaagcagaaatgagtaaagtttgttttatcttttcttaatatgacaattattgtgttggttcaacttatgttgtactttaattagaagaaatttggccgaaaatacaaggaaaatatacaaatgcaagtaattttttttaaacttccctgaaagcagggtctaaagaaattaccaaccaacttagactggatctagaagaaaaggaagggtctttgcagtcttaggactcttccgttccgcgacgtaggtgttaggataacagccataaatggttgtaagactttgggctcagataagtagacttaagttcaaattttgacttattttacaagtgtgtgatttttggcaagctcatcttcctaaaccatgagctccttatttgtaaaggggacattagccactctccagcaacagccctggtacttcttcagtcctgggatgggacgtatgattagcctaagcgaaccagaaaatccaggcccgtgaccagtgacttgatcagggctggcgatatatctaggtaggccaaccaggtggactcagtatttttgtgggtgctactggaaaatttatttaattctaactgaatgtagaaacagcaacagacatgaaatggcagttgtattgctgtcttatcatgaggtgagggcctgaagctatggtagccaccctgtgaaccttggaaggagggttctacaggaactggcagagctgagactgggacgcaacccatgtcctggtgacgtatttgagtcctgaggctggccctcctgttagtcttttctctt

SEQ ID NO: 44741 - DNA, 1033 bp, Homo sapiens
aaatttaaatagcaacaaatcatggagtcttttttcttttttaaatgcagggaaagtgtgctcacaagaaaacttcacctttctgtgacccaaattccccactaaacagtgatatactgggctgtgacaaaagactgaagcttagaccaaatgaagaagaaggcagtgggtacttagtagaagggacagccgccagcccaccagcgccaggccctgcgggctgccacacaaaggccaggctcctgcttcccttgggaggggctgctttcagcaacggggaggaaagcaggggaaacttgtgagactgagcaaagcggtggggtcaggcgaagggttttccctttttgtcaagaatctgacttgggtgaccacagtctggggcactcctgggtgaggtttcaatctcagccggcccaggatgcctgctgtggggaaaacttaacagtttttaaagtgaatcccacctgccttcactcaatgtatgcttttcttcttaaatggaagaaatacagaaataactagaactcagaaagttgtaaaaccttttcttgaaacttattgccaagagtaagtctgaattgaataaactcagtaatagggtcctttttcattaccaccatttaatagcaatcttttctatacttaattcattctttatagaatacttttcagtgttttatcaacatatattctatctatatggagcaacattagacgtcagtatattaaagtgttatctttttaagtgtccccaaatatttgttattggcaaacattctctgatgtaacaaaaatcaaggattaagtagtggaaaacacactaaaaatggcctagaagttaggattggattccagcaggactctgatactttctgcgtcggcctactatgagtcatttgaattgtttttattccctcatctgctaaatgggcagaatgcctactatacggaattaattgaaggccctctgaaatcactaaatgttataaaaatgccaactattgtttataactaaggaaaaatctgaacatgg

SEQ ID NO: 44742 - DNA, 1127 bp, Homo sapiens
gaaaaaattttttcttatcagtgtggtacattccttgtttggcttattttaatataaatataatgtaaaattgtaatatacatgtgtggatttatataatatgcataacatatacacatatgtgcacacacatatattttgttttcatgtgttattggcaaggattggctcaagtgtgatgacagtaagtaacctagttttctttatggttttttactctctaaaacaatgtgtttttagtatttgacacatagtttttaatgtgacaaggaaatttcattctagttctagtgtctttcattattaagaatggctgttaaggccgggtgcagtggctcacgcctgtaatcccagcactttgggaggccgaggctggtggatcacgagatcaggagatcgagaccatcctggctaacatggtgaaacctcatctctacaattagccgggcatggtggtgggcgcctgtagtcccagctacttgggaggctgaggcaggagaatggcctgaacctgggaggcggaggttgcagtgtgccgagatcgcgccactgcactccagcctgggtgacagagcgagactgtgcctcaaaaaaaaaaaaaaaaaagaatggctgttaaattttatttaatatcttttcagtaaaaacggagatgctcatataatttttttcagtcatttcatactttaaatttctttccacgtttgctatttttacaggaagtaatttcaattatattttcacttctattgcataaagttgtatacaacaattttgtaattttaaaatgatttctatttatatgggtacacctccctttctgtgtatctacagaaaaccaacgtcccaggtcaagcagtcaggcagagacagagagaaagcacacgcaagagagtgagactgtgcctgtgtacacacgcaattcactttactgagtccactgattcaaatgctcagctcatctggaaatacccacaggcacacccagcaataatgtttaaccagataacctgagcatcccttagcccagtcaagttgacacataaattaaccatcacacctgggtaatgtgaaattcaataacctagttcagtaaccttttggattccattaaatatgcagggcat

SEQ ID NO: 44743 - DNA, 1035 bp, Homo sapiens
aagaaaagacttcactaactctccctgtagtagaggagtaaaaatgtaggaacaaagttcgacaagcaaaatagattaatttataaaaacagaatggcttgggctaatctcatcctgagtattaaaaacgtatccctcttggtgagatcctaaaacatatgagggaaacaaacacttcctaatcagctatgtctaaaaatatcaaactattatccctccttgccctcctttctattgattagacttctctttccccaaaggcaacttatctttgatcgaaaccaatggttcccaagtatagcaaacaagttttcacctatctgccagccaagaaagaaagaataaattcagtggagtgaaatatgtgtaaggccaaatgtctgcagtgtgaaaggaatatcctttagtgtgcggtcaggtacttttttcttttctggtgttaaaatggtctttcttttacacaatgattctgatggtacgtggtgttttgttttttcctctaacttggtaaggtaagtttaaaaagttggcactgactttgttgaagccccagatttctctcatagttcagcagagtctagaagactgaaaagcactggagtgcagaatcgagatggctggtgggtgggagtggagaatcagccactgacagagagtcaggggagctgacgctgacgtacctttaactttggagtgcgtcatgtgattgatttctcctagtaatttgtgatttcagtttttttaggttaaaaataaaatgaatttgcaacagtttaacgttcaccaacagtgagaatggagatgccacttagaaatgtagctgctggtttcacatgttattcccagacttaaaaactgttgttccccagatcattaagaatttgccatattcaatcttattaattgccacacattttgctttgtaagatttccagtttctaaaattcaaacctcagagttgcatacacatagaagtatggaaggggtgatgaggtgaacgcatgtgaacagactcaggggtggcttcccatacta

SEQ ID NO: 44744 - DNA, 1025 bp, Homo sapiens
tgagacatgagttttcttgttcggtggaatcaatgtctattagatttactcacatttttaccactgacatctcagatttcccgtctggggccattttccttcctcatgcaaggcatcctttagaatttcctttaacgaagacgttctagtggcacactttttgtctggcttttcttttgcctctcgtcttgaatgtaactttcatttggttcacatgggagtctagactggcggttaggtctctcccgacacacggagatgccatctcaccttctgccgctcccactgggaaatctgcaggtcccagggtttgccatcgtctgtcctcgttcctggccacttccaagatgactccgtgctttgtgttctgcaggctcactagacacttaaaacaaaatcatattgggcttccttgggcttcttaaatctgtggcttgtatcttcttcagatctggaaaattcttagcctttgttgcttcaagctgttgcctctgtcccacgtgttctcttttctcttcaaattctgacagtgacatcctgcgccacatcctctcttaggcaagtcacttccctggacccgctttccaggggatgcaaaacgcagggccccccttgcagacctgactcctcagtgagctgaaggcagggcctgactagaatgtgtgtgtatcaagagccaaagtcaaaacagtagagccagccgtgcttagcatccagctcctctgcaaagaaggaaatgtgtgtgccctagtgggtgggaaatacgaattgtgtgcttttggtgattccacgtatgacttaaatgctctaatatttgcacttaaaactgacattctggtgtaaagatgcactgtgaaagtcataaaatttataatttaattttttcttagaataacattaaataaacagcaaataaaaaaaactacatgaccactggagagagaggccacagaagtacatacagctttatacttttagtacttggatggcactttcccatgttttctttcttttaaacagggatc

SEQ ID NO: 44745 - DNA, 1046 bp, Homo sapiens
tgtcccatgtagaagcatttccattcaaccgtggcccctcttcagaacctagacctatcagtgccatttttttttcataatctacgaagaacttggctatggctgatcttttttaaatttaactttctgatggaccctgtagtttccagttaagtgcagattccttacagacatatagaacagcgcattcttctgtagacatttgctcatgttggtaaatacaatcacccatatgaaaaaattgttttcacctgatatgaaaatgttagaaaaggcaaactccgggacttctaaagatttacttaaatcccattatgtactttattcagaatgtagaagctgacttgaaaggcatccttggtactaagtgaagcttattcagaaaatgcatttttcaaatgcaatggcaactgcttgtagatatcatttttgcagtgtatgttggagctgtaatggttgcaattatgtttcttatttccttaaaagcaaaaagcgtagtttctgatttatgttatagaatgatactgattagactttgagccaaggggaaaatactaaattcttttaaacctggagccttagagagccacaggaatatcttctgttgtacagtctaataagctgtggtaggaagtatcatgtaatcacagtttaatgacagtttatgtatatatataattcagtattccctctgataacatagttgccagtgtttaatacacttgtaacttggatttttaccttataggctatatgtatactcagttttttaaagcatttttttcagagatcacttaattccccatgcttctgcaatgcatataaaaactataaatgccgagtggtagaaactcctctttcttcatagtcctcaggctttggttacatttgcatatgccatttgaagcctccagcttttaccagtttaacatccaaagttcacagcatcagcattcatggtgtaagaacagttttgcagtataacacgatctgataatcattcagttattaaattgtaaataattattgggatggtttcttggctt

SEQ ID NO: 44746 - DNA, 1033 bp, Homo sapiens
tcagcagattctcaaaggagtctttggccctaatgataaaattacttatctgagatctctgggttgaagccactgaagcttgttttggtaggactatatcttgtttaaagatcacttcctaggctaaatgaaatggtactgtatttgaaaaataaaacttataattagatatgtattccttttaacaaagtaaagttttattaatatgaatagctgagaaactgtagccaagattgttgtcatcatctcataaccatgtgtgacatatgctgtgtactcttctggtgtctgcattttaacctttttaaaaaagctattttattgtatgttttcattaattatctaccttaaaaaaatattttggtatattactgtcttttaatttcaaacacatttgtcctgggtagaagtggctacagaagagctacttttgagatctcctgtttttatgacaatgtttgtatttggtttttctgttgtctctctaagctgcttttgtagaggctatctgtagtagattatgccattgcattggagggaggattagagttcagctcaaaggtcaactgataatgtaaaattgagtatagtcaaagttattcttgagatcacccataaaaatccttaaatcacccttaaaatacaaggtacataattttatttatacaattttatagacgattgttattacttattctaattctttgtagtttaaattttatatggcccccaaatgctctatccttttttccttgaagaatgttgacattcccattatctgtctcttgaccgacacctgaatgatgtgatttatttatctgtcagtggtcagaaaaatcctaccattcatgtatttttttccagtaaatactggacctggccatgtgctcatttaatagaatgactatttaaactatttttaagtaaaaatacttttacaaatgtgtataggtgaatttaagtaacttcaatgcatatattagatcatcctactgtatttcctgctttgtctttttaccctacaagcctataa

SEQ ID NO: 44747 - DNA, 1018 bp, Homo sapiens
caagtccccctaactccagtggttggtgctgctaatttccacacattgttgagcagctaagatcaagaatggcatcttactgtagctgcctgggtctgagagagcacataggacacaccctggagcagtttcttctcatggtttcctggctgctccttaaatgtgattctgagattaggagagtcaaggtgctctccaatggcctggattgtacagtttcccagggaaagtggaccccagaaggacactcacttacactcttccatatgggggattcattccccatttttggccccaggccacatgggctgcctgttttccttctctttttcagaattcgacttttccttttcaggaagctgcttttgccacagtttatccatttacctactgaaagacatcttggttgcttccagattttggcagttgtgaataaagcttctctatagatattcatgtgcaagtttttgtgtggacaaaagatttcaactccttggggtagatatcaaaaaacatttttcttggatcatatgctaagagtatgtttagttttcttttttaaaaaaccttctctgctgctgctgagatgtgaaaaagaagtaaaaatattaagaaatgaaaaaagaaaatttaactgtcaaagtgtcttctaaattggttgtgtcagcaaaagaaactatcatgagagtgaacagacagcctacacaatgggagaaaattttttcagtctaacaaaggtctaatatccagaatctacaaggaacttagataaatttacaagaaaaaaacaaacctcattaaaaagtgggcaaaggacatgaacatacagttctcaaaagaagacatttatgtggtccagaaacatatgaaaaaaagctcaacatcactgagcattagagaaatgcaaatcagaaccacaatgagataccatatcatgccagtcagaagggcaattattaaaaagtcaagaaacaacagatgctggtgaggtggtggagaaataggaacacttttacac

SEQ ID NO: 44748 - DNA, 1050 bp, Homo sapiens
tatttggatgtctaaatctcttgctatacttgggatcttttcaccatttattttattagatatgttttctaaactttttgatctttcttccccctcaggaatctgtacgttaggtttttatgtagtctcaaacatctccaaggcttcattcttttttgttcctttttctttatttttgtctgcctggattatttcaaaagacctgtctttcacgttctgagattctttcttctattggtctattgttgaggcttttgattatattttatacttccttatattaatttttttgtttcagaatttctggttttttttttttttaaagacaactatttccttagtaaacttcttattcacatcctatattgatttctgatctttgtactggttttcagatttctcttacatctcattgagcttgtttgaaattagtattttgagctttaatctggcattttgagggtttttttttttcagttaggatctattgctggagaattattgttttcctttgagggtgtcatattgccttggctttttcaggccttttgtatctttacattgatttctgcgcatccggagcaatagttgctgcttatttttaaatttactttcattgggaggggactttttttcttgactatgtgaccatgatgtgtttgggcaggtagggctgtttggctttgtttcaggatgtgcagtgataaaaacgctgcatgatttctttggctataaatagcctttgtggtagctgtgggtttgttggtgttatggggcggttattggtggcagctattgtgaagttgtactggggactggaatgcctgatggatcccttttcaggtttcattggtagcagtggtgggctaagcatgtctgttcttgtgccatgggacagtgtattctggcgcctgtgttggcagttccaggctatttcttgggcctctgtgtagctttcctggatgctggttgtagttgtgtatgctgaatgggtaagtgggccctcagcccccttgtaacccagggtggcatgggtcatggtggtagcag

SEQ ID NO: 44749 - DNA, 1034 bp, Homo sapiens
agttcttgtttaatgagtatagattattcattttttaggatgaagagaattctggggatgggtagtaccaatggcgaatatacttcctatcactgaactgtacacttaaaaatggttaaattggtccatttcatgttatatgtattttatcacaattaaaaaagaaaaaagagtaactaaatgggtacatactacaacatgaatggaccttgaaaacattatgttgttatattgtacgattccatttccatgaaatgtccagaataggaaaatccatagacagaaagtggattttttttggaatatatccaaagcccttgaactgtttatttttaaatagttaattttatgttatgtgaatttcacttcaataagttattttttggctgggtgtggtggcttacacctgtaatcccagcactttgggaggccgaagcgggcaggtcacttgatgccagtagttccagaccagcctggccaacatcgtgaaaccccatctctactaaaaatataaaaattagccaagtgtggtagcgtgcgcctgtaatcccagctacttggaaggatgaggcaggagaatcacttgaacccaggcagcagaggctacagtgacctgagatcgtgccactgcactccagcctgggtgacagagcgagactctgtctcaaaaaaaaaaaaaaagaaaaaagtatttttttataagtcttttactcagtagatactcagtaaatatttgtcctcttctccgtttccttggcgtggcagtctaatgccagggcctaattgtttttagtaagtcagtctttatgtgtttgcatttgccttcttagtgccaggcacttgataaggggaggcaggtggaaggacttttgaaagtcgcctttctggtgtatagagtcctaacctggggcacctcctttgtcccttctttccattcagagtctacttgttatttaagggctagttcaatccccaccacacacacacatgcacagtggaagtgtgatcttgtcatttccctgctccaaatgctg

SEQ ID NO: 44750 - DNA, 1027 bp, Homo sapiens
gagagctgagtatatgattttagtattttattgtgagagtagtgtttgtgaagtagattctaagcggatgtccttttatttgagaaggatagagaaagaagacatcaaaccaaaccaaaagaaataaggacatatttaattttccaagtgagaaagtttgactgagccataccatggagacctgtctctggagaactttcctcaggaagatcgcagccagttaccatccatgctggagggcttaggcgtgcacttctttgaaaattagcacataaggttctttcctggactctaattataattctctttcattggattttagtctgtcttcaagttcacatactctagttctggacgactaaatttaatttgcctccagattagaacaaaatgaaattgttgcacgtaaatcctcatgactaaaattgattcgatatttgcaaatacagttttccatctctaagctttggttcccattgttcccacagtcttctcccattcacctttctctatctatccaaatcttttttattctctgaggcagagtcaaatcctgcatcacacgtgaaggtgtctcagagtcttgcactttcaaccttgtattatacgtacctgtctgtattgactttctcatgaaactttatgttccttaaaggacaagacttgttttctgcatctttttatttttcacagcatctagttaataagtatttttgatgttaataagtattttgatgtcagtgggtgccaccatgttgagtgtatattgtgttctagaatagatgaactaagatactccatttgtcttgcttttgccctggtggtctttatttccatattctaagcttttctgaccaaatattttggtttgctattaatattttaaaagaccattacaacagtagccaagaggtggaaacaatcaaagtgtccatcgttggatgaatggatgatcagattttggtacataaacaataatggaatattcaggtaaaagaaggaaggacatttaagtgaaataagccag

SEQ ID NO: 44751 - DNA, 1032 bp, Homo sapiens
cctacttaaaggggagaagttattttacacacacacacacacacacacacacacacacacacacacacagctatttctttaaacttaataagtagttgagatatttagtatctagtttaagtgatcataaatattaattgatattttcaactcctcttatttactatggaagaataaacatgggatgcattattacaaaagtttagaggttttggatttctggtgctttttaaatcttacaattaacattagaaatagatgtgataaaagagatcttaagcaataatctggccttaaaaatgtagtcagaagtatccaatatgttaattattttttgcttgacaggcagagccttttgaaagtaacagctgcaatcagtaatgtaaagtgcattatctaggtgtcaagtaatttaagtattctataactatatctgtgctaggtactgtaaacatcttctagaacttacagatataactttatttattttaaaagtgtgttattctttgaaaattctgtactgaatagtatcattaagaaatcggcaaagtacactaggtaactagaatgcacaatcatttctcagaatgttactgggtttgattgtcatcctgctgtttaactgcccaatattctttctcgtttctcataacagatcattggaaattgtgtgtccatcttggttttgagctctgctctgcctgtgatgtcgagaacactgggtaagtttcagtgagaaattttcacttaaagatccatgtttttaaaaactgtctttactgaacttatttaacatttactcataaagattacctttgaaatacagtgtttcttcctacattattttacacttttacttctatactttatgtataggggcataccaagacaaatacttttatcaaataatgactacttattttttaaacacttaaaagcattctttctccaaacaacgggctggtttttgttgtattttgtttttactgacacatctataagttaggctttcgagtcctctagtgaggaaac

SEQ ID NO: 44752 - DNA, 1115 bp, Homo sapiens
tggatgtgctttcctctgaatcacagcaacatttcttgttatttttgattagcaggatttgccatgtgttattttagattttaattaaagggctacctgttctatagtgttaggggttctgttttacttctaaatattttttgctttgaacagggctgtcttcatcggtggaatacaacataatggagttggaacaagaacttgaaaatgtaaagactcttaagacaaaattaggtattgtactttttttttcttgacttgtgtattggccttggtttcttattaaagactttactgtagtctgaaatattagaaaatttatgaaatctttatgttaaaacttttgacctgcccaaaatcattaataaagactatcttacagtttggggagaggataagtttacatttattcactttttttggttttatatatatacaaaatgacttttcaaaggttcacaggttcaaagatgttgctccattgccttctcacttgcattatttccaacaagtcatctgtcatacttatcttttaatgtgtcttttttctgtatctgcttttaagatgtctttattgttgattttgaacaatttgattgtgatacgcctcagagtagttttcttcatgcttcttagagctaggaggttatagttttcaactaatttggaaattttttgaccattacttctccaaatattttttcttttcccctcatgcttcccttttcagggactccagttacatgtattttaggctatagctgaaggatgttcctttatttttcagtttttttcttgctgtatttcattttgattagcgtctatagctgtgtcttcactttcaccaatcttgtgcatgtctaatctgcctttaatctcatctagtggtttttgctttttttttgtttttctaccatctgcagttttcatctctgggggcctgtttgggcctgttttgtatcttctattatgtctctaacacgttcaatctgtgtcctccctctttgtgaaaatatagaatatagttatgacaacacttacaatgtttttgtctgctacttctaacatttgtgttagttcttgatatgttttgattgattgatttttttacctca

SEQ ID NO: 44753 - DNA, 1076 bp, Homo sapiens
atttgtaatgacatcagtttaggcattggtctacagcctcattcctgacgctgtttattcagctttgggactccttgaaatagcagctgtacccacaggaccttttacctggtgttgcatggctcacagttcacaccatcatgatgacattccttcatgcttccgctcagaggagagggagtgacaacctagccagcagtgggctcagcctcactgcttacctcagcctgcagactgtcaccagcagctaggactgcttggggtccctgctcctcctgcttgcccaccacttgggtgagcacactcactgctattaatagatcccaggagtcttctcatatcccttaagccaatctgcatgggcccctcctctttcttttccagaaagccatctattagtcccctatccttgttgccaaaaaccgtcaagaactgtgaaaagtctgagattttattctgcttgcaaactaacaagttagtctccgagtttcatggatgctagttgtaaacctgagatgtctgggtcagagacaaaggacttggttatgcacagcacataaccgagtgcacaagcttccttttggtgccagttgcccttgaacccaagccccacagtgggcctgtatcacagctggggaacccaccatatttatatcgggctgcaagcaaccctgtctaacctttgcttggaggtgaacattgtgctaccagacagtaaacaaacctctcctttgcttcagagatacactatctctaaatcccaaggccatctgctgtacgaccttaagaagacagttccaaataaggtctgtccctgcctctgcttgtgagatgtacagaaatgtgagagcgccgtggagattgtctcccagcacccaggcacatacctgaagaaaacaagtttaattactaagaaatagttcttaccagaatatcaaaggaagtctaaattttatggtgattgatttcccaacactgattatcatcctaaaaattattgttacagtgttataattatttaacattacaatgacaacttcttttggacagtgggttttaaatggttccaaggagct

SEQ ID NO: 44754 - DNA, 1032 bp, Homo sapiens
ttggtatcagaatgatgctggcctcatagaatgagttagggaggtgtcctttatttttaaatttttggaatagtttcagtaggaatggtaccagctgttctttaaatatttgataggattcggtcatgaatttatctgatcctgagcgttttctagtcagttggctttttattacagactcggtttcagaactcattattcatctgttcagggtttgaatttcttcctggttcagtcttgggaggctgtatgtttcccggaatgtttgtatgtttatccatttctgctaagttttctagtttgtatgcatgaaagtgttcataatagtccctgatggttttttgtatttctgtggggtcagtggtaatgccgtctttgtcacttctgattgtgattatttggatcttctttttatctttattagtctagctagcagtctatctaccttattttttctttcaaagaatcaactcctggtttcattgatctttcatatggtttttcgtgtctctatttcattcagaacagctctgattttggttatttcttgtcttctggtagctttggggttggtttgctcttgtttttctagttcctcaagtcgtttgttttcccatttattgacagttatacttggtattctttttaaaatcttatgtcttgattacatttttttcatatttctaatgtgtttttgctactttattttgttgatttttctagccagacatttatcagaattcttttgaattctgaattcttcgatttattttttcctacttttttgctcttttttattatacttactttaatttcctgttgtattttgttttatttatttgtttctgagacaggatttcactctgttgcccaggttagagtgcactagcgcgatcatagctcactgtaacctcaaactcctgggctcaagtgatcttcccacttcagcctcccaagtagctgggactacaggtgtgtgcttccatgcccatctcattttaaaatttttgttagagataaggtcttgctatg

SEQ ID NO: 44755 - DNA, 1124 bp, Homo sapiens
taacaatctcacacatggcatgccataaaggctgtgttcttgaagcttggtaatatttttatgatctcaagaaagatagtgataacagcttatagattttgagtacttgtatatttactagtggaagctgaattaacaaatgaaatttctgactatagtctcatcatctctcttctctctagctcaaagtttttgaaggtaaaaaatttgccaccttgcatttaatgaacatatttatctttttaaaaggtttatgtaaagctcacgcatgtggtatttaattgattttaagttggacaggttttgtctcatttaatcacagaaagaaaataaaattaacaaaagggaaaacttaactatcctagcctcccagtggattaagtcagaataacagctctttcttactatatcagttatcttaatatttcataggacaagcataatcatattaaataattttgatggcttgtaccgtggcagccttttctattagtattgttgatttactcttgtaatgtagatcgataactagaaatgagcagatttctttttgtgagttatttactgactttcaaaagaaatattgactaatttgaaataactttttgaacaatttatatgattgactacagagagttcttttggctaaatgtttctgaatggactgcttaaacatgtgagtatgtatttcagacagttcttgttattatttgtgtacctataatagaaaaatcatcgtcttggatgggtatggtggcagtaggaaaagaagggatgaatttgagttgtaattacacagtagaatcagaagcacttggtgtttgactggaccgaggctcagggtgtatggtgggggtagggtatggggttcagcaggaaaggtaggtgacaagggtgtttccaaagtatctggcataaacaacaaagtgggtaatgatgtcatgttttcaggtatgtgatattgaaggaggagcagagatagagaataaaatgatgagtttggtcttagaattaagtttaaggtactggtgagatgtctaatgaaagacggcagttggtgtatatggttcttggccacagcagtaagatttggactaaagatataaacttcagagttgttggct

SEQ ID NO: 44756 - DNA, 1535 bp, Homo sapiens
aaaataacaaaaaataaacaaaatacaacaagaagagtgataattacgaaggtattatctgacaaaaaagactttcatttctgaagcaaattctacacatacactttgatgatgaagttgatgagctgacatggcctgatctcttacaccattgaaggagctgtcttctttctttcctgttatgggtaagagcagtgtctagaagggataggaatgttttcatgcactacctgtacatgagtcctaatgaaactgcatagcggcaaataaaactagaaagtcaagctcagctgaatttaaaaatagattattcaaataaaaaaatttaacaaggatgctgggtacaaggattaatatatttaaaaaaatcaataaataccagcaacaaactgaaaatcaattataatagcaagacagcctaaggtatgttgaaataaatctaacgaatgatatttaaagcctttatggaaacaataatggaaacaaaaaatcttattgaaagatgttggttggacacagtggctcatgcctataatcccagcactttgggaggctgaggtgggagaatcgcaggaggccaggagttcgagactagcctgggcaacatagcgaggccctgtctctacaaaatacaaaataaaaaaaattaactgagcctggttggtgcatgcctgtagtcccagcttctcgggaggcaaaggtgggaggattgcttgagcccaggagtttgaagctgcagtgagccatgattgtaccactgcacttcacttttggtgataaaggaagaccctgtctcaaaaaaagaaagatgttgaagaaaacctaaataaattgatagatattctgtgttcataatttttagagtttttgcaattctaataaaaattctgcaaagttttcttatagaatgtgacaagcaggtagtaaaaatttaatggaagtgcagaaagccaagaatagccggagcaattttgaagaactaggtgatggaacttcctctatcaaatattacaagataggcaaagaaactgaatagacatccaaagtctatccaaagaagatacacaaatggccaataagcacataaaaagattatcaccatcactaatcactagggaaatgcagatcaaaactacaatgaggctaggcccagtggctcattcctgtaatccctccattttgggaagctgaggcaggaggatcacttgaggccaagagtttgagaccagcccggccaatatggcaaaaccctgtctctagtaaaaatacaaaaattagctgggcatggtggcgtgtgcctgtaatcccagctacttgggtagctgaggcgggagaatcgcttgaacctgggaggtggaggtttcagggagccgagattgtaccactgcactccagcctggatgacaaagtgagaccctgtttcaaaaacaaacaaacaaacaaacaaacaaaactgcaatgagatacctcctagtaggatgactactagccaaacccagaaaacagcaagcattggtaaggatgtggaggaattg

SEQ ID NO: 44757 - DNA, 1141 bp, Homo sapiens
atatcagcagtaaggctgttttgctttcttgtcatttgtgtgttcactggagtagcactttaatttcctttaggaacttttcctttgcattcacaacttggctaactggcataagaggcctagctttcagcctatctcattttttgacatgccttcctcactaagcttctagcttttgattgaaagtgagagatgtgtgagtcttcctttcatttgaacacttagaggacattgtaggattattacatggcctactttcaatatcgttgtgtctcagggaatggggaggccctaggagaaggagagagatgaaggaacagccaagcagaggtgcagtcaacacacacaatatttattgattaagtttggcatcttttatgggcacaatttgcagcgcccccaaacaattaacatagtaacatcaaagatcactggtcatagatcataacagatgtaataatagtgaaaatgtttgaagtattgcaaaaattaccaaaatatgacatggagaaatgaagtgagcacgtggtattgggaaaatggcacagatagacttgttcaccacagagttgtcacaaaccgtcacacggtatctgcaaagcacagtacagcaacatgcaatcggctttaggtatacttgtagtagataacttcttttttttttttttgagatggagtctcgctctgttgcccaggctgtagtgcagtggtgcaatctcggctcactgcaacctctgcctgctgggttcaagcaattctcctgcctcagcctcctgagtagctgggactacaggtgcgcaccaccatgcccagctaatttttttttttttttgtatttttattagagacagggtttcaccatgctggccaggctggtctcgaactcctgacctcgtaatctgcctgcctcggcctcccaaagtgctgggattacaggtatgagccaccatgcccggccagtagataacttttaaaaatgtttttttaaaaagactatgagatatttaattggaataaaactatcttgtgtaaaatgaatataattcgtgacacactgacctttatctttcataacacaaatgatttgaaacggtcatgtatttttcaccacgcctaaataaagcaatagattaacaaccat

SEQ ID NO: 44758 - DNA, 1596 bp, Homo sapiens
taatgcctagggtttcttctagggtttttatggttttaggtctaacatgtaagtctttaatccatcttgaattaatttttgtataaagtgtaaggaagggatccagtttcagctttctacatatgactagccagttctcccagcaccatttattaaatagggaatcctttccccatttcttgtttttgtcaggtttgtcaaagatcagatagttgtagacatgcggcattatttctgagttcttttctaaagtgcagagtcagtggctgactgggaatcagggggaggtggggagtggcagggggcagggattataaaaggatatgagaaaatttgggggtgatggatgtgtttatgttcattagcttaattgtggtgatggtgtcattggtgcattctcatgacaaaacttatcaaattatatactccatgtgtagcttattttatgtagttcaataaagctgttaaaaattaatatttcttatatttgtatatgttataattttgttcattttgtactgacaattgagaattaattctgagactacttctttagttcagcctgtgacctttttcctgagagagtcttttcctgttaacatttagctatatggattgtaatattgtttgtttatggaactcatttttattgattactcagcactgtagcaggcattgggaaataaaaaatgaggtgtagaaatatattcatgcctcatggacctttgatctagagatttgtaatcatacatttgcaagcatctctaaagaatataagaagtttaggggccaggcgtggtggcccatgcctgtaatcccagcactttggaaggccgaagcgagtggatcacctgaggtcaggggttcaagagcagcccagccaacatggtgaaactccgtctccactgaaaatacaaaaattagcctggcgcagtggcgcgtgcctgttatcccagctactcaggaggctgaggcaggagaatcgcttgaacccgggaggcggagattgcggtgagccgagattgcgccattgcactccagcctgggcaacagagtgagactccatctgaaaaaaaaaaggttaggaaatggtggaatttatgttgcctaaaaacattacagcatattagaaggaatagcttaagtttttcttgctctgggacaagggcacgtttctgaacctgaagtccgtctgtaaaacgggggaccttccctcataaaatattaaggtggtagctggctgagtgcagtggctcacatctgtaatcccagcactttgggaggctgaggtgagtggatcgcttgagcccaggagtttgagaccagactggacaacatggtgaaacctcatctctacaaaaaatacaaaaatcagcctggcacggtggcatgtgcctatagtctcagctacttggtaggctgaggcgggaggatcacctgagtctgggaagtcaaggctgcagtgagccatgatcacaccactgtctcagaaaaaaagatagcatcttaacgtatccagaacaatgcctactatgttacatacctaacagtgacaggcataccttggagatactgcagggttggttccagtgtact

SEQ ID NO: 44759 - DNA, 1025 bp, Homo sapiens
gtgagctaaacaaacccgagggaatatatcttaactcatttcctaactctacaaaatgaaatgaagagcactagaagcagcagtttatatgtagagaagctttttaaaaatcctgtgtttagaaaagataattggctgtttaaaaagtagtaacaatgtattatgaattttattatagatgtacaagtaagttatatgacaacgataacacacaggaggaaagccacggaagcacactgttgtgaagttctcatgctctacgtgaagtgttatctttttttttctaagtgacagcaagtttattaagaaagtaaaggaataaaaggaatggctatttcattggcagagcagccaataaaatcatctgaaggcagattgtgatgagttaaaggcgtatatgataaacctgaagacaaaccagaaatagcccaacagagatatagtgaataagtaaacaaaggaaataaactagaatcataaaaaatacttaatctgtgggaacatagaagaagggaagctaacacatggggcaaatagaaaacaaaaagcaagttgatagatttaaagctaactatatcaataatcactttaaatgtaatgttctaaacactacaactaaaaggcagagattatcaaattgaatataaaagcaagactgaagtatatctgcttgcaggatacccactgtaaagacaaaactaggtcaatggcagtaggagaaaaaagatacaccatgctaattttaaacagagcaaagttggagtggctatatgattatcagacaagggcaaagaatattaccagtcataaagaagatcatttcatcatgttgaagtggtttgttcacccaaagagcctaatgatacttagcatatatctgcctaatgacatatattaagtacatgaagcaaaaacggaaagtgtagtcagaatcacaattacattcagatatttcaacacccttctttcaataattgatagaacatatagaagaaaaaatcacgatatagaagatttgaataata

SEQ ID NO: 44760 - DNA, 1055 bp, Homo sapiens
tttgtaagttgtggaatttgtgaggaatttattgagtctcttttaagaaaaagttcagtttatgggtgcgttggctaaggggatcttaggttctcttctgctctgtatcttattcttggtgcactaaaataagagcaaggttttatttattttgaacagattttaattttagattcttacaattgtatctgttctgcttaagtattgaaataaatatgtattttagttcgttagaggaaagaggttatttcagtctaaaacaattctttgtctggaaaagataaaaaaaaactaggactttttttcttcaagagatggtgttttttctgaatgtggattcaaagtagcaggtattgaacagtgtaaaggaacttaaccaaagtgaggctttgcaattatttcattattattttaaaattttctaatacaacatcatttgagtagactttattttctgagtgtatcaaagaacataatagaaagaatgtgggaaaaggagaaaaagaataagcttgatgatatctgtgaagcatcttggaggcccactgtagaaatgtatactggaatagttaggttttaggaatttggggcaagagaatgaagagaacgtatatttcacaatagggagcagtattccatctagtaagagaaaactaagacataggagttgaggcttactcttttagtaataaacagactttgttttgttgttgagttgtatgttgagagaattaaacaaggggcaaggatatcaataagtatttggggaggccaacttgaaatagagtaggtaactacagttttaaaacattttttctatgatcagcaaatccattaggatagataggtagtgaagaacaagcactctttgctgatgttttatgcccagagctttttctgtattattgaggactaaggctcagacgtggagtatgaaaaattaggccaggtgtggtgagcctgtaatcccaacattttgggaggccgaggtgggaggattgcttgaagccagatcaagaccagcctgagcaacaaaacgagaccctgtatctaca

SEQ ID NO: 44761 - DNA, 1054 bp, Homo sapiens
gcctgggcaagaagagtgaaactccatctcaaaagaactaaaaaacagcagctatagtttctattttatttatttgctagtagtttctttagtcatttcaaaatatagaaggggaaaaacactctatgtcaagtacaaatagatatcatggtgtattgctttgtagtctttgggaaagccactgtcctctcaccgcggcttcctgttgtcttagttgggatgataaataaaacccagcttgtttttgcaataggaatgatgtatgtaaagtaattgtcttttagtaggcacttaataggtggtagctattatgatagttatttaggctgtgaggtgttttctttctgaagaatcttactgtttttacaaatcaatttagtgtatgtaaactgaactcttgtctctcatagaacatgctggcataattcttttttgagttctaatttatttttattttttaatgttttaattttaatttttgtgagtacatagttggtgtatatattaaaggcatgcaatgcaaaagactcacatcagggtaaacagggtgtctatcacctcaagcatttattctttgttaagattttgtaattatgttttagaattatagctcttaggaatttggatatctttcttgctcatcatacccatacccgtctctcattttattagtgttgatttgtgttactagtaactatattactaattattattttgttaatgtagttagttggtgttatcagtgttaatagttattttaatttgttatgtatttcaatttcttcatctcattttaaggtaaaagttttttgaaaattttttttcttagtaagaaccttatgagttaatggtaaaatgtcctcctttgacaatatttaagctaagttgccatttgacttaaatatatatcagagatagcttgtttccattaaatttgtattataggtcagtgaatttggaatttctgagttaacataaggacgtgttaggatctcaaatccagggaaagaaatggaataacttgcttgtgtggtagcgttacagctaagtatgc

SEQ ID NO: 44762 - DNA, 1034 bp, Homo sapiens
tttgtcttttacccctaaaagtacattgaatgacaatagggtgatgtgctgtttccttatggtagatgcccaggagcatcttacctgcttttggggcagctggcacagcacgtgcgaggggtttgggttttccgagtcacgggtggtttctgtatcctggggatgcatacagaaatcctcttcctgaaggtcagtgggttcgtataaagtggtgatacagttaagggaggggcatggggaagagggtcacctgaggaggagtctgactagtctccctcatctttcttccctgcccttattgatctctttgtcttttgctgtggtagaatgagtgagaactgatgagttagggtgatctgggttcaaattctggacccatgattaacttgagtccagaagagatggagaaacaaatattcactttctgtgtatgtaaaacagagttctcacctactttgcagtactgttgtgtggattaaatagcatttgccaaaaaaaaaaaaaaaaaatctagggtagggtgcttgatacaattaggggtgaaattaatgtttcctccaccgtagcgcttttgacctgttttgtctgcttagaattcttttctgtcagatatcccactgaattaactctcaccttatttagttttgttttgctttgtgtttttccctaagtctcaacttttcagtgaggccttccctaagtgccacacttaatattgaaacctgtgtgtcctcctccccatttccagtcttccttaccgtgttttcctgtaacacttatcatctttagtttattatacatttacatatttaatgttttattgtttattgcctgactctctgcagtccaggataagccctccttgggcaagaatgttcgcttgtgttcgttcactgttctcaagtgcctagcacagtcctggcacgggagcaggcactctgcaaatacctgtatagtgagggagccccacctgaaagacccactgaggtagaatctccgagatgggctttaacaaaagctccataggtgatcct

SEQ ID NO: 44763 - DNA, 1381 bp, Homo sapiens
ggttcaagctattctcgtgcctcagcctcctgagtagctgggattacaggcgtgtgccaccacacctggctaatttttgtgtttccgggtttcgtcatgttggccaggctggtgttgaactcctgacctcaagtgatccaactgcgttagcctcccaaagtactggaattacagacgggagccactgcacccagccttccctggattttatgaaatgattgtgtttcacctttaaacataatttttaaaaaattcagaaacatcctttgatcaaaacattctattcttgcagcttccttggtcaagtgctttcgttgcagctacttctgtaccgtgaacattaggtgattgaagtctttgtttctcctgtccatcagcctacccttagtttcagttttctcctaatctactttggtatcatggccagtcacttcactcactcttgctaataccctaaaccagtgcttctcacactgtggtcaggggcttccttgggattgatgttgaaatcctgggagtatttgatgttacctatgaagagcttgtggagtaagaatagatgggtgctcatcccagaaattacagagaagattgtttaaaggctggcaggaaaagggaagcttgtgagggagactgggagaacaacagagagggaggaagactgctgacagaagttgctgcatagagctcagcaaaaatcatgaagtgtaattttcctgttaggtttactgaccactttgagttggtcgatgagtgtgaagtttgatgagtggctggaaggagtgagtggtgaaaggtagaagtctgcaagcacaggctattattttgaagcgcttggctggaaaggggaggagagagctaggatatctgttagaatcatcaagcttctagtatttcttggggactctacctgcatctgcctcagcatctaggaatctggctctcatgttttacagcaccaccaggctgccagcactgctgagggttttagcttggacttgcctggaactttaaaggccatttaatcttaccttgactcttatttctattatatttgctccatttgttctcccatatgatttacatactccttctggaataggaattaaaagaaattaaaaactgtgtaagcaaaaactcagttgtatgtcaaaaacccagttccccttgaggaagagaaagggctggagttctttaaaattaactgcctgtttttctttctgaggctagtgagccttatctctccctttcccaggcattgtacagacactgtttctctagctgcgcagctgcaaggtcactcaacagataatctcaagtcttaaaacgtgttattccttaaaaagtaaaaaataatataacgcacatcttaattaaataa

SEQ ID NO: 44764 - DNA, 1039 bp, Homo sapiens
atcatacaaatgttgccatttcaaattgacttctttcacttagcagcaagcatttaagtttcctccatgacttttcattgctttgacagctcttttaatttttaacttttatttaggttcaggggcacatgtacaggtttgttactatgtttcacaggggtttggtgtacagattattttgtcacccagataagaaacgtagtacctgattggtagtttttccatcctctccctcccatcctcaagtagaccctgatgtctcttgttccctatgtccatgtgttctcagtatttagccccctcttataaatgagaacatgtggtatttggtttcctgttcttgtgttagttcacttaggataatggtctctagctccagctccatccatgtcgctgcaaaggacatgatctcattcacttttatggctgcatactattccatggtatgtacataccacattttctttatccattctactgttgatggtcatttaggttgattccatgtctttgctattgtgaatagtgctctgaagaatataatgcatgtatgtgtctttacggtagaatgatttatattccttcgggtctgtagccaataattggattgctgggtcaaatggtagtactgtttttgttttgttttgttttgcttttttttttttttttgagacagagtcttgctttgtcgcccaggctgcggtgtcatggtacgatctctgctcactgcagcctccgcctcccaggttcaagtgattcttgtacttgagcttccctagtagctgggaccacaggctcctgccaccacagccagctaatctttgtatttttagtagagacggggtttcaccatgatcccaggttgttctagaactcctgacttcaagtgatccacccaccttggcctcccaaagtgctgggattacaggggtgagtcaccatgcccagccagtatttctcttttaaatggtttgagaaattgccacactgctttccacagtgactgaactaattgacagttccactagccagtttataa

SEQ ID NO: 44765 - DNA, 1036 bp, Homo sapiens
gtatttttagtagagacagggtttcaccttgttagccaggatggtcttgatctcctgacctcgtgatctgcccgcctcggcctcccaaagtgctctcctttatttttgaaagataattttgctggatacagaactttgggttggtgttttcatttttcgttttttccttttaacatttgaaatattttacagctttctttttgcttgcatggtttctgaagagaagtctgatgcaattctaatctttgatcctctatttgtaaggcatttttattcctgtagcttatttcaagatattctctttatctttgattttctgcagcttgcagcatatgatatgcctagacataggtttttttttttttttttttttgtatttacgttgtttgttggtctgtgagctttctggatctgttaggtgtttgtattaattttggcaaattatcagccattatcacttgaaatattttatctgttgctttctgtctttttttctggtattcctgttacgtatgttatgccttttgtaattgttctgtacttcttggctattctgtttcttttcagaattgttattttttctgtttgcttttcagcttgggaagtttccattgacatatcttctaattgactaattgctatggtgttaagagatggggagaggggaacattgtgtagtcttgtgattaggtctcagtcttttattgagcctatgcctctggtctgtgaccttcacaggtgtctagtctactgatgagctcattaaagcattcttcatttctgttacagtatatttgatttctcccatttaaaaaaattattcttaacatttccatgtctttgctgacattacacacatatttttgaatgttgtttacttttccacctttgcatattaataattaaattcagactctcataatccccaaatctctgtcatatgtgagtctggttctgactctttgactctttagattgtgatttttgcatttgagcatgcttcgtattttgtgggaagccggatacgatgtagata

SEQ ID NO: 44766 - DNA, 1050 bp, Homo sapiens
aggggccaaacaacagctgggtctgttgcttcagaaggttcaagccccaagccttggcagcttcaacatggtgtttagcctgcgggtgcacagaagtcaagaattgaggtttaggaatttccacctagatttcagaggatgtatgtatggaaatgcatggatgcccaggcagaagtttgcttcaggggctgggccctcatggagaacctccgctagggcagtgcagaagggaaatgtggggttggagccaccacacagagttactactgggacaccacctagtggagctgtgagaagagggccaccatcctccagaccccagaatggtacgtccactgacagcttgcaccatgcgcctgaaaaagctgcagacactcaatgctagctggtgaaagcagacagaaggctatcctccgccacaggggcggagctgcccaaggctgtaggagcccaccttttgcatcagtgtgacctggatgtgagacatggtgtcaaaggagaccattttggagctttaagatttgactgccccactggatttcagactgcatggggcctgtagcccctttgttttgtccagtttctcccatttagaatggctgtgtttacccaatgcttgtaccctcattgtgtctaggaagaaactaacttgcttttgattttacaggctcataggcagaagggacttgccttgtctcaaatgagactttggaccatggacttttgagttaatgctgaaatgagttaagattttgggggactgttggggaggcatgattggttttgaaatatgaggacattagatttgggaggggctggggtggaatgatttggtttggctgtgtcccctaccaaatctcatcttgaattgtagctcccacaattctcacgtcatgggagggacccagtgggaggtaattgaatcacgaggcgggtctttcccgtgctgttcttgtgatagtgaataagtctcatgagatctgatggttttataaagaagagttcccctgcacaaactcttctctttgcctgttgccatccatgtaagat

SEQ ID NO: 44767 - DNA, 1060 bp, Homo sapiens
taatattgagatttgaggtactattccattcatcgtgctattggttgcctatataccttgtttttttttttttttaattgtatttttgttttatatgccctgtgagaattatgctttaaagaggttctgttttaatgtgtttccaggatttgtttcaagatttacagctactttagcagttctggtagttctggcttggtagtggcaaattctctcagcatttgtttgtctgaaaaagactgtatctttccttcatttatgaagcatagtttcactggatacaaaatttttggctgataattgttttgtttaaggaggctgaagatagggccccagtcccttctagcttgtagggtttctgctgagaaatctgcagttactctggtttttctttgtaggttacctggtgcttttgcctcacagctcttaacattctttccttcatcttgacttttgataagttgatgacaatgtgcctaggagatgatctttttacgattaatttcccaagtgttctttgagcttcttgtatttggacgtctaggtctctagcaaggcccgggaaattttcctcagttattcctccaaatatgttttccaaacttttagatttctctccttcctcaggaatggcagttattcttagatttggtcacttaacgtaatcccaaacttcttggaggcgttgttcattttttcttacttttttctttctcttattcatttttctttgtctttgttggcttgggttaattcaaaaagcttctcttcaaggtctgaagttctttcttctgcttatttgagtctattgctgagactttccagaaaattttgcatttctctaagtgtgtcctttatttcctgaagctttgattgttttttatttatgctgtctgtttcactgaagatttctttcctcatttcttgtatcatttttttgattgtcttaaattggacttcacctttctctggtacctccttgattagcttaataactgatcttctgaattatttttcaggtaaatcagggatttcttcttggtttggatccattgctggt

SEQ ID NO: 44768 - DNA, 1031 bp, Homo sapiens
agatgatcatgtgatttttgtttttaattctgttcgtgtggtgtatcacatttattgacttgcgtatttttttttttttttttgagtggagtctcgctctgtcgcccaggctggagtgcagtggcgcgatctctgctcactgcaagctccgcctcccgggttcacgccattctcctgcttcagcctcccgagtagctgggactacaggcgcctgccaccgcgcccagctaattttttgtatttttagtagagacggggtttcatcgtgttagccagaatggtctcgatctcctgacctcgtgatccgcccacctcggcctcccaacgtgctgggattacaggcatgagccaccgcgcccggccgacttgcgtatgttaaaccatccctgcatctgtggtatgaaacccacttgatcatggtgttacctttttgatatgtttttggattcggttagctagtattttgttaaggattttagcatctgtcttcatcaaggatattggtctgtagtttgttttattggtcatgtcctttcctggtttggtattaggatgatactggcttcatagaatgatttagggaggattttctctttatcttgtggaatagtgtcgataggattggtaccaattcttctttgtctggtagaattcagctataaatccatctggtcctggactttttttttttggtaatttttaaaattaccattttaatcttgctgcttgttactggtctatttggggtacctaattcttcctgatttaagctaggagggttgtatctttccaggaatttattcatctcttctaggttttctagtttatgtgtctaaaggtgtttataatagcctcgaatcctctcttattttcttggttaatcttgctaatggtgtatcagttttatttatcttttcgaagaactagctttttgtttcatttttcttttgtattttttttgtttgtttgtttcagtttcatttagttctgctctgatcttggctatttctttcttctgctgggtttgggtt

SEQ ID NO: 44769 - DNA, 1043 bp, Homo sapiens
aggtgggaaccaatcaccaatcttgtatgtaagttcagaatgcagttatcttggagtctgtagtcttctgacctttgtcattgccctccagtgaaagacctccaagagcacacctgtagttggacaaattgggcttattgcatatttcagtgagttccatggggaactgtggggtgtttcagtaacttttcaaatgggatttgggcttctactaggtagtttgggaagggtttaaggaagtgaggctttgatctgtatggggtgctgttaggaagctggaaaaattctgtaactggatagcttaagaaatcttttctagaaggaaagaagactggaataaagctaaagctgtaactggtaaagaagcaacagtcattcctgttagccaggatagagagttggtcatttctgtgatttggacaatgttcatgtttttttttttgcttgtgttcaggagtgattacagagtggtcttgtttagtctttatccatcatggtcttgtctgatattgatgttctctgaaattgttgatgttcagcagaagagtcagtcatcaaggcctaggtgtgtgccttgctctgagttgttagccagtttacagcaacaccaaggcccagctgtgatattaccaggccagctcccagatgtcaggggctgcatttctttttctcacgtggttgtaaagtcttctagtggaatgatgtattagaaacaaatccaatagccaacataagttgaagtgattttctaacatagaagagcaaaaaggaatgggatagaggtatagaggtttcatttgtatttgacttttctaaactgggttaaatcagcttcccctctgcggtaggcagcataatggcccctgaagttggtaatccatgtggtaatccctggagcctgtggtgtgttactttacatgggtaaagggattttgcagatgtgagtatgttaaaggagaattaccctgaattatccaggtgggctctatgtggtcacagggtccttataggagaggcaggagggtcagagtcagaggagatgt

SEQ ID NO: 44770 - DNA, 1056 bp, Homo sapiens
aactgcagctcactcactgccagaccctaagtgatccccactctcctgttccacaagccataactatagctttgattggacaagagactgatttcagtaactttctcctgataagagcactgagcatgaactggttctggccagtttacagaggctgtgcacttcagtgccttcatgtccctgcttcgccatctgactacagggcctcattgtaatccttttagatgttaagtctccacccacaagtgaatatggataagtatgtaacatacatgtttattcagcctgcatgtgcatgacctcccccactttgtgaatattcatagctcctcctataacctgttaaatatataaacttggccaacccgttcagcataaatccctgttctatcctcccttgaaggtctgtttctgtgctctgcgggaggatgcttcccagctatcaggattgccaccttgtaggctgtgactctttacaaaattatttttgaggcagagtgtggttccgtcactcaggctggaatgctgtggcacaaacacggcttactgtagcctctatctcccaggctcaagagatcttcctacttgaaggaagtctttttttttttttttttctttttttgaggcagagtctcactctgtcacccaggctggagtgcagtggcactatctcagctcactgcaacctctacctcctgggttcaagcaattcttgtgcctcagcctcttgagtagctgggattacaggtgccaccaccatgcctggctaattttatttatttatttatgatatggagtctctgtcacccagcctggagtgcagtggcacaatctcggctcacgataacctctgcttcccgggttcaagtgattctcctgcctcagcctcccagtagctgggattataggtgcctgccaccatgcccggctaatgtttttgaatttttagtagaggcagggttttaccatgttggccaggctagtctcaaactcctgacctcaagtgatcctcctgccttggcctcccaaagtgctgggattacaggtgtgagtcaa

SEQ ID NO: 44771 - DNA, 1098 bp, Homo sapiens
tgttgcccaggctagagtgcagtggcgtgatctcggctcattgcaacctctccctccctggttcaagcaattctcctgcctcagcctcccgagtagctgggattacaggcatgcgccaccgcacttggctaatttttgtatttttagtagagatgggtttcaccatgttggccaggctggtcttgaactcctgaccccaggtgatccacctgcctcagcctcccaaagtgctgggattacaggtgtgagccactgtgcctggcctcattttttaattttttgtagagatggggtttttgctatgttgcccaggctgttcttgaactcctggcctcaagtgatgcacccaccctggcctcccaaagtgctgggattacaggcgggagccaacgtgcctggcccagaatttgttcaggctgaataatattttctttttgtgtatactgtattttgcttacccattcattcatcaattgacctgagttgtttctgtttttggctattgtgaataatgctgctgtgatcatgggtatgcaaatatctattagagtccctgctttcaattcagaagtagaattgctggatcatatgataattctatgtttaattttttttttttttttttttgagacagagtctcgctgtgtttcccaggctggagtgcagtgactcaatctcggctcactgcaagctccgcccccccggttcatgccattctcctgcctcagcctcccgagtagctgggactacaggcacccgccaccacgcccagctaactttttgtatttttagtagagacggggtttcaccatgttagccaggaaggtcttgatctcctgacctcgtgattcgcccgcctcagcctcccaaagtgctgggattacaggcgtgagccaccacgcccggcctctatgtttaatttttttgaggaactgccataccattttccacagaggctgtaccattttatattcccactagcaaggagccagagtttctggttcttccgcatcttcaccaacacacattgttttctgtttttcttcttttttttaaaatggatgtgaaatggtatctgatgctggatttgatttgcat

SEQ ID NO: 44772 - DNA, 1098 bp, Homo sapiens
gtagctggcaagttttccaagtcccgaaatttgtcccatatgctgaactggaaagtcatctagtatcatagttaaaaggagaaaaaaggcaaacggccacaaattactataatatatcactaacaacataacctaaaggtattttcttattatcttatttttaatattctaaacatcaagacttttagtggtggcctcactgttcttgcctatagagcatagtcccaaacagcttcacaagaatctccttctggtgcagttcttccccccaaatcagcagatactaacagaacattctaaggaaaaggccacagcaaggggcatcagaacagactggtgcactgtgaaccgacgaggtgctcctgctggcctggccacactgcctgcatctgtggcagaagcaggtgacatgaggacatggtggacccttgacactcccctctagccctcccacttccgctcccagtgaaggtggcctggcagccagcgtggaccaggtgacggggatatcaggggcctcctgacttggggaactcctttgcaggtgggttgagccaggtagcctgtgtagaaaaaatagtagagcggacgtaactggtgcctccgcactaagctacctgaaatctcctttcatattcacagaatttgctagccaggaaagcatagaagggattgtaagttttctcttgaaggcagcaatccatgagaacgtgaatgatttctctctcctgctgatccttaagtccaagcctagaaaacagaacagcaatgactggaacatcactcgacttccaaagtttaatggctgatacctttcaggggaacatcttcccgcctggaagggtctggttagaggcgagccacgtaaaggaggtggaggcagcggcagacaccagctaggggcccagccctgtcacaacctctctggtcctcaggttctcctacaatgtggcaaaatgtcagaggagacaagaccatctagggggtcccccgtcgctgcaaaagtcgacagctgtgcccggctgacaataaactgactcaatcgtgtgtgcccttagagctggttcctgctatggcgatgacttcacattttcttac

SEQ ID NO: 44773 - DNA, 1066 bp, Homo sapiens
tgtaatatagttaattagagtaaaaattaatctccccccttcccccactctacccgatttaagaagctatttccagagctaagaaatgaacacctgttggcaaggatgtgggccttgggaattcctacacactgctggcagaggtgtggccggccacagccaccgttgagaacaactcagcagtgtaagtggaattcccgggtcatacaccttatgaatcagaaattcagtatctagaactgaaccataaattacctccattcccaaaagtacccatcccctaattaaaactatatatatatatatatatatatatatatatatatatatatatataaaatttacttctagaagactaatccatatatatctctgccctagaaaactatcaaaaaatcagaaataaacacggatcagtaggataagtaagtatataaactgaggcatacgtatacagtaggatgctacccagaacagactcacgggcgccaacgtggacccactgcaatcttagctgaatgtcagcgagctagaggaggggactaaacgcatggtgacgggaatgctacccacagggaggtgcgcagccaaacaccatcacaggcgcttgcggacccgaggacgcggcgagaccacaaaagcatggtcgaaacacagagaaactcggaatgagagcagcccggaggggcagggcggggggcatctctaaagctctacgcctgagggtgtgctcctgccacgcctctcccgctcatcggtggtagcatctgtgctgttccaggatgagcgcaatgcctgggcgagcgaaaggcaaggcaggggagcggagggggagcaacgcctcctccatgagctaagttattccagttgtcaggatttggcgtaaggctcggtgccctcattttcagtacagtggccaaacttggacaccacacagcaagggacgcagggtgaactggagccggcatgctgatgaactgcacacgacacacagaaacacacgggaagctgtggctgcggctgtcttgtgggtctgggccactgcagtcaacgcccctcaactatc

SEQ ID NO: 44774 - DNA, 1023 bp, Homo sapiens
ctttgggaggccaaggcgggtggatcacgaggtcaggagttcaagaccagcctggccaaggtggtgaaaccccgtctctactaaaaatacaaaaaattagccgggcgtgatggcgggcgcctgtagtagcagctacttgggagctggggcagagaagtgcttgaaccctggaggcgaaggttgcagtgagccgagaacgtgccattgcactccagcctgggcgacagggctcaaaaaaaaaaaaaaaaaaaaaaaaaaagtcaaattaccatacgatccagcagtctcagttctgggtatatatccaaaagaattggaaaaaacaaaaagatctcaaagagacatttgcacacccgagttcattgcagcactcttcacaattgccaagaggtggacgcagcctacgtgtccatcaacagagaaatggatgaggaaaatgtggtacacacatacggtggagcgccattcaggctttaaaaagaagaaaatcctgtcacatgctacaacacccatgaactctgaggactttatgctgagtgaaatacccaattacaaaagacaaacagtggccctgcgtgggggtgccctcctgccgtcccagctactgcggagcccaggcggaaggatggcttgagcccaggggctccaggatgcagtgagctatgatggcaccattgcactccagcctgggccagtgtgagacctcatctctaaaaaaaaatagtaataaataagcaagcaaatgaacaaaaagacaaatgccgcaagatcgtgtgaaatatcagtttagatgagtcaaactctaagagagtagaatgggggttgctagtggttcggagtggggtactggggagtcggtgtttcttggggacagagtttcagtttgggaagatgagaaagttctagcgtctgttgcataatgcacatagttaaccctccggtactaacacgtgaatggtcacaatgattgtaaaaataattttgttgttttttcttccttccttttcctcttccctctgctct

SEQ ID NO: 44775 - DNA, 1071 bp, Homo sapiens
gtcaggctcctgggaaatcaagggaagtctcgttttgaggtcataaaattctctgtgatgtaaccgtgcgaaattatgtaaataaagccgggcaggcctccttgaacacacagagaaccggatcctgcctgcgcctctgcctgtaatttgcgtaatgagaattgtcctgaaaaggcttctagtctcctcaggccttgcccctgccgcccgcaccctgaggagggggcatgccaaggaaaacatttggaaggtgggagggtccctggtgaatacacagacttggaccctgggtttggtcctgttccacctgtcctctctcccttcccttcctcccttccttccttccttccttccttctttccttctttccttcctccctccctctttccctctctcccttccttccttcctctttttctcctcctcctcctccttttctgtcttaaggaggcagtgcagggagacctggaacagcaggaccagctcttcccagacctgtttggatctgagcctgaatctctaggaaggcgcagtgaggagagggggagagatttggttctcatcactcactgctcctttattttattattttattattttttatttattgagagatggggtcttgctgtgtcacccagggtacagtgcaggggtgcagtctcgctcactgcagccttcaactcctgggcttcccggaacctcccttcctggcccccgactggcctcagttctcctcttgcctctgggtcaatccactgctaccaaagccggctcctgtggagaggaagcctcctgcgatgggccctgtttaacagggacactcagacgtctcctagacaaaaaaaaaaaaaaaaattggtctcattaactccaaactatccatttccacttggtggtcctgagtccgcattccttggggagtgggcactgatagtgagggaacagccccgccctctgcagggccaggccttggcgctggggccttgagtgtagtggtacaagcagcaacgggaggggctggggcgaggaccggagccggctgtgggcctcactgccctttggtccccagcc

SEQ ID NO: 44776 - DNA, 1049 bp, Homo sapiens
ccggcgctctcctactcgtacccgcaggtgcaaggcgcgcaccccgcgcaccccgccgaccccatcaagctgggcgccggcaccttccagctggaccagtggctgcgcgcgtccaccgcgggcatgatcctgcctaagatgcccgacttcaactgtgagtaccctgcggcccccgtggatgcgcgtggcgggagggcctcgcgcatcctccaccggcaccgcctgcccctctctgcgcttggctcccagcgagcgggggaagagctgcgaagccgcctcggctctgcccggggcctgcgaggactcgcccggacccccaggcatgagacgggcagcgaattattaaaatggccatgcgcaggccttgccttctcttcctctcttaacgggaaggggcagttggaggtgtgagactgagatctaatgattaacccgaaggctgcaggagaaggaagtcgccgggggaaggcgagccgagagcgccctgaattaggcaggcccgggaatgggggtcagggcttatcaccggggaaaggaacttgggccaggtcccccactggggcgttagagagacccgcggcccctccagggagagggagtgcttcaggagcagcaaacaagagaaatgggcttcggaggcccggggaggcaaggccaaggcccagggaacccccggctcttaccagggcgctgccctcctctggaagggcgttggatccggggtgcgatggccgaggcaggtggcctggcttgaaccagctatggggggactctcaacagtaggtgcctgccctggaatcctgggcgcccaacaaggtaacgaatgcccctccaaggtggggccgagggagcccctgttctccccaccccagagccgctgggcttcgggcagcttcctctccatccgggcgggacacctcgccagaggcctgggcccctcaggctttcctggcacacgcggactctccgggctggggctccggggctctggctctctggggctctggctctccccgctcgccccatcggggtcagctacttatgagtcg

SEQ ID NO: 44777 - DNA, 1032 bp, Homo sapiens
gtccaggtggtccacgtggctgagtgacgacaaggcagctgcagggagggacagatgagaagtcccagcaagaagagtgaccccgatcatccactcccacctcaccctccaaaccctgggaatgccagcgggcatgtcatttggtccccatgccgtgtgactggcactgagctgggaaaagatgtaaaatatctctgatagtctcacctctaactcttcaccctgaaaagtgaaaacactgtttgacatatcagctctctgttctcttctcctccaaactcctcgtttcaaagcaattggaagaggagtggtgaccagtcaacacttggtaattgtggttgactatggaagcctgaatgttctcttcccttcaccaacattttagaaatttcactgctcacaggaaggtctggaaggtggaggaggtagactgagccctccaggctcagttccttgtgagcacgtttggttggtgaagagctggatattaactttgtctcgcacatagactgacccctccaagctccgttccttgtgagcacgtttggttggtgaagagctggacaataactttgtctcgcacatagactgaccccttcaagatccattccttgtgatcacgtttggttggtgaagagctggatattaactttgtctcagacaagcaagtctttctggtatttttggtgccatcaccttgtcagttgttttgttccccttttcttgtattattgctcatgtgcatatagcctgtgggttttaggaagtgaagcatcaaaacattctactttcagtgagcacctttagaacttcggcattttcaaataaggtgctatagaattcagtgtttctcctctgcttatggaagaagacatgcatgtctccatcactgtcctaagtaacctttacagcacttgctggaactctttattcttcctaaaaacttcatcagaaaatcgtaatgagtacatcgttggcacagaatagagaatgctgctgctaagaaaagacctgctacttgggagcgggaga

SEQ ID NO: 44778 - DNA, 1026 bp, Homo sapiens
tgtctgggccctgggctgtcacctgccacagcccggactgccgtctatctgctgcacgagttggtgacgaaccttcgaggcctgacggagaggctggtgagccactttagacaccaccactttctagagctcagctcacacttcctggctggagcctggccgcctgctcccacctcctttactgtgggtgcgggtgtctgcagggggtccttgggaagggcgcagacagaggctggaggcagcagcggctgtgcaaggaacaggggctccgtcgggggagcagtcacagccactggttctggatttccctgggatgcccgggccgtgggtgtgcccgtcctgcagcagctgtgccttggtcagcggccatcacggccttcccctgcagcccccacacctccgccacagtgccccttgcagcgctctgtggatagttgggttgtgacacaggcagagagtgtcccttccatgatccgcctttattgagggtgtggaactctatttttttgtgggagggggagtgatttgactttttattttttaaaaatctgatttgctgcttaaaatgctagagccatgctagtgctttatttttcagtctctccaagttttcaatatgttgtcttttctgccttgagcacttaatgtttaaaggaaaaattctctgaccccaatctgaccagtccctgctgccatgctggccccagcgagacaagtggctgagtctataggaagagtttgtaccatctttagtatgacagatggtgggttatgtcccaacaaacccatcgtaagttgaaagtgcatttttgacttaatgatattttcaactccaaagaggtttatcctgccatagccccatcataagcggggactacctgtatatttacgacctggtttgattggatgtttgggctccagagaaggtgggtgatggtccagagagtctgcgggagaaagaggtaagctgctgtgatgcagcttggcctttggctgccggggcgattggcttaggtaaatggcacc

SEQ ID NO: 44779 - DNA, 1013 bp, Homo sapiens
aggacagagggggcctctgtggggcgggagaggagcatggaagggcctgagctcagagagagaggggccaggatgcacaagggaaatggaggggcttccaggggcagacagctagctactcctctcccattttttcaggtttatgtggacgtgaggtgggcagagtcaggcatttctgcaggtgtctgaacagcggcttttcctgttccatgggggctgcagaatagtgctcccttcttcatccagccagctgttctgaaactttgttgctcaaaatgtaacgtctccgtggcttttctgctttgggagaattactgatggttaagaatgaaatcttgggactggcacaggggctcacctgtaatcccagcactttgggaggccgaggcaggcagatcacctgaggtcaggaatttgagaccagcctggccaacatggcgaaaccccgtctctattaaaaatacaaaaattagccaggtgtggtggcgtgcacgtgtcatcccagctactcgggaggctgaggcaggaaaattgcttgaacctgggaggcagacgttgcggtgagccgaaatcaaaacttcatctcaaaaaaaaaggatggaacctgggtatgttatttctctattagcaagtacaagagactcactagaaaggtggcaggtgtgaacaagcaccctttcaagattttttaatgtacaggataataatgcagccccagaattgagtgtctgggtctgtgctagtgtgcgcctccaggtacagtgacttgaagaacagatgggaagattcgcagacgattacattagccagtaaagctacatgttttaaaatacataattcactacagagtttgtggaatgtggatttgatatacaggtttaaacttggattgatcttatgccatttaatagctaatcaattaaaagagtttacaagtgataagtgctgggactattctcacattgatgtataactggactgagtacctctgaggagagcggaagctggatttg

SEQ ID NO: 44780 - DNA, 1016 bp, Homo sapiens
ccaggatatcaaccccatcagataatccagccaagtttaatttgctcagactggagcaaaaattgggtgtattaactttcagaataactgaaatatattcttaaaggtcatttgtttaacagactactcgcaccaaacttctccccattgttttagtaaatgttgttttttcttctaaatagataaaacatgatatatttggattaattctgtacttcatgatgtaaaaatccaattttattgacttttattcttttttttcaaattggcatagcctgtcatatatgcatatatgtgtgtatatatatatttatacacacatgtacacacacacacactaaggataatgtgaagacatggaagaattgtgatttttggtaccagtatactttatgcattcttttttcatgtaggtgtcctatttctatggaaggtgattgggtaaaaactgtgccaaaaataagttgttagatgattagaagacattctcctccttttctctcggagtctctttgaatgttgcatccatttccttgaggctttgatcatctttgagcagcaagtttagtattctgccagcccactctcccttccccgacatgagggcagagactcctgcagaattttcagcaagttctcttttgatggtttatttcacaatacccagcaggtttccttgtgtacttggaggcctttggaaccaaacccagaggaaagcatgcatccgggccacggggacctcctgtaaacacagcggctaagtgcacgtctcggtcgctgctgctgctcccattagcaagtgattacaaaggcagtgacagtgtggtggcaattgctgcgatctgagggtgctcagttgactggggctggcgtgtctgcaagtcccaaatgcaccctgacttcttacccccggtgcagaaagctgagttctgacaaagagcacaggtcacgccttggttcattctctggggctttaagagaccgttctttctctaggtgagtttaatcttcaggca

SEQ ID NO: 44781 - DNA, 1052 bp, Homo sapiens
aattactgtagtgaaatctggtccaggaggatgggatgggattctattttaaggttatttctttccttcttaggcctgaatagccattgttaaccgcccgggcaccctcctggatccgtcctttggggcttaatgctccagcccgttaattctgctctttaaattctcacaggtgactgctccctgtcagcccctttgtcttaacctcatggtttagtgctgctgtcctcactcctggtgtgccctgcatcatcgggagagctctgctatgggccgttcggggttgagcacctgattccctacgctctggaagtgcacggtactcacttggtagaggatttgctagaaccacagttctccccctgctggaacactaggaatccccttgcttcctttttttttttttttttttttttgagatagaggctgtctctgtcacccaggctgaagtgcagtggcacgatcacggctcactgcaacctccgcctcccaggttcaagtgatttagtagagacacggtttctccatgttgaccaggcttgtctcgaactcctgacctcaggtaattcacctgcctcggcctcccaaagtgctgggattacaggcgtgagccatcacacctggcccttgcctccatgtttaagggtggcccaggttgagctgaaaaggctgggtcaggaccgctgggcctggacacacaagtgcttcctgtgtgtcccacaggctccccagcacccgcaggatgggcccgttctcctagttttacagacaccaggctgagagactggggtcctcatctcccacccacagaagtcttcccactgttagtcctcccgggagaggggtgggctcgcctgctgaggtcgccatggagcccacacggggctttcccgttcaggcctcttgagccctgccatcttctgggaggggagtcggaaaaggttaaggacaagagatcctcatctgtgttagtcacaggcccagagtggacagtggccagtttcctagttgagaagaggacttggccaattgggggccatgttaggcccact

SEQ ID NO: 44782 - DNA, 1030 bp, Homo sapiens
aagaaatagaaaactaaaaagggaacaaatgagtaaatatgtgaggatacatttatgaatttaaaaaactcccaaagatatgattaaataaatgagtaaaacaactagaaaacttctagaaagtctggcagagaaaagaaaaagaacacaagtaattaacatctgacaggagggagggaatgtgttccaatacagaggagaggcaacacgagagaatcgccgggaagaatcagagggggtttgcgctacccagcattgaagggtgtattaaaaagctacagtatggaagtggttaggaataggcaaataggccaacggaagagaacgagaagcacagagcacacacacttacgtgggttatttgtgtataatgaagtcatcccaaataaatggggaatgacagattttcactaagaaaagttagttctctaccttatataatgcataaaagaaatattccagatggaatacaaatccacatgtaaaactaaaaccattcaaatatcaaaagataatgatttgacaggtaaagagcttggaagttatcactgctgtccccacaacaagaaaaaagctcagcaaatggaaaatcaacaactcttctcagatccatcagagaaatgaggtcatggggcaaactgctatcctgaaaactggagagacaggtgaatgcagagaatcagaacttacctgagaagccaggaacagaagctgctgctggagccagtactgtcaggacactcacaggccaactgacaaatgtaattagcacagaaatgagaagccaggcatggtgtgcacctgtagtcccagctacttgcggggcaggggcagaaggatctcttgagcccaggagtctgaggctgcagttactattttcaattactaaagcagttttttaaaagtataatccccacttctggaaaatgatggtgtaattggtatacattgttttagggcagcattaaactggtttacattagtacatgatgacactgaaatacatattgatacatatccattgtcataa

SEQ ID NO: 44783 - DNA, 1033 bp, Homo sapiens
gatgtgtgttttgtagagataagttaccttaatcataacgacaatattttaacttagcctcattgatcttatgtgtgtatatcctttcgagattatgtaacatggcgtagtgatatttttatgctaccttatctgatattatcacatgtacccttcactttttttgatttggtaacatctcagtaatgtattccgcccaagtttttttccctgaagagagcatttttccttagggaaactaaccttcaagaacggatttagctaattccatagtgtcccacatggtgatgaagcttaaagtgtttaagtatagtcagtgtattctatacgggtgtatcatgggatttatttccaaatgaaaagtattctcacgtactctgattttaaggggcttatgtctgtgtatgctgtagaagatgcttagtaaatgagtgggttgtcaggaaagccccaagttcggtctttctcttggaaccttttagctgataatcagcatccttaattcagttctgtgctctgctgttgttaggaataggtgtggttttgctgccgcttttgaaatgagattggcctactatgacagaaagcctggggtcctcgacagaaccttgtcagcacgtgtggggttatttaactgacatctctagcttttggaagttgaatatggaagtggctggtatacccctcctcccccctgtacctttgagaactccaaagtcttgaagacagcgatgcagatgcctaggtggcagccactgtcatcacgttcgggaggaaacagtgtctgtggtgagcgtcagcaggtgcatcctgggaaagggctgagtcgtggcagcaatgctccattctcacagccaggtcccttaccagggccgtgcaaagaagctgtgagtaaaataacttttttggatagaattggaattggttttccctggaaatattttttatacacattttttagtacacattttttatagaaagagaaaagaggtacctctgacttacatttaacagcttcttgcatgtcaggagc

SEQ ID NO: 44784 - DNA, 1037 bp, Homo sapiens
gtggtgctgacagcctcctaggctgccctgacctctcgcccacctggtggatgccagttgtttcatggccccatgctcctggccctcttagtcaaagattctgtgtcacggttgatcctgtgggcccttgtggaccacctcatagttggttggaaattagtgcagcttaaattttgtgcttgttctgtcctcagcccctgagcaaaaaagtaaagaaattccagtgtttctgtgcctgtatttctctgagacggtacaagaagtggactacttactgtagttatgagcattcagggtaaggttttgccaagggatctgagaaatggaaggtggggagtggaataatattacagcttaattcagataattttgaaaatatgactttctagacatcctggctgactaaaccgtattctgaattagtgagtgacattgataacggaaatatagttctatcagatagagtcgtttatttggaagggttagtgcagatctaagactggcgacttgagtatgtgagggagagattgctggtctctcccctgttatttattctcctctttttccacagaaatactatctctgattttgtctctgggtacgtgcccctcctgaataaagaccacattcaccaacattgcttgcacctacatgtgggcatgtgtccaggtgcttccagtaagataatagtgaagttgtcatgggcaccttacaagttatctgtgtatctttacctttcttacattctgcctggaatggggttgtgatggatggagctctcactgccatgttggactgtgaggatctacagttttgagctacattcctgagccgacattgtttaagcccccagtgtctttgggagaactcagtcttgacagttgaaagccataactcaaagctagtctgaggatgaatccctgtgattgccaccgggcacttgacattttaattagcacttctgctcccagaattcacctgcaatgttccaacaccaatgttacttctgcacccagttagaggggtagggagaggtt

SEQ ID NO: 44785 - DNA, 1066 bp, Homo sapiens
agaaaaatggcctgggtttaaacccagactgcccttcccatctgagtggtcatgggcagtttgctttaccacttttgcctcagttagcttatctgttacaggataacgataaagagtcattcttgttgccagtctagacttaggtcagtgtaagtagctctttactacctggtaaatgagaacacttggccctccgtatccatgggttccacgttcgtaaatccaaccaaccatagtttgacaatatttgggacaaaaatggatggttgtgcctgtactgaatatgaacagacttttccttgtcattattccctaatataatataacagtataggataaacaatatagtatatagtataacaactattagtatagtataacaatatagacgatatagtatatagacaatatagtataacaattattaccatagcatttaccttgtattaggtattataagtagtctagagatgatttaaagcatacaggaggatgtgggtagactatatgcaaacactataccagggacttgaacatctgtggattttagtatctggggggtcctggaacacatctcccacagatagtgagggttaactgtacttttaacgtaacatttttctctaaagtatttttaaattcatgttcacttaaggagacaatattatttttgagtaattaaaaattaattttaggccaggtatggtgtctgtaattccatcactttgggaggctgaggcgggcagattgcttaagctgagttcactactagactgggtaacatggtgaaaccccatctctacaaaaaatacaaaaaaatctgctgggtgtggtggtgtgcaccatagtcccagctacttgggagggtgagctgggaggattgcttgagcccgagaggtcaaggctgcagtgagctgtgacctcactgctgcacttcagcctgggtgacagagcgtgaccctgtctcaaaaaaaaaaattaattttagattttggagggttcatgacttcctgggcctgttctcctctgtcttgcctctggctgcactgctgctgagccaggcagt

SEQ ID NO: 44786 - DNA, 1083 bp, Homo sapiens
aattgttataaaatgcactcacaagccaggtgcggtggcttacagctgtaatcccagcactttgggaggccaaggcaggtgaattgcttgagtctaggagttcgcaaccagcctgggcaatgtggcaaaaccctgtctctacaaaaaatatagaaattagttggatattgtggcactcacctgtggtcccagctacccaagaggctgaggtgggaggatcacttgagcccaggaggttgatgctgcagtgagccgagatcacgtcactgcattccagcctgggtgacagagtgagaccctgtcttaaaaaaaaaaaaattcagtcaccacctaaatcgaggaatacacctcctgaacatggtccctctctccctgtttgaaggtatcagcccaccccaatacctcagtataattttgggcattgtccggatgaagagcaaagtgtgtgtggttttatacttgatatgaggtttatgtttactgtggcttttaacaccatttcttttttgtcttttttgattgtacgtctgagactggctctgtggctcacacacagcatttgtgagtgcttgtgcataggagtgtgtgttttagagaggtggagtgccacctgatcagttcacgttcgttaattgtgttacctcaacttttctatgtttttactgattttttgttacttattctacagagacttgtgttaaatttctcattatgcttgtgaatttgtccaagtatcatatttaggactgcttttgcattatatattttatggccctgttattaggtgcatataagtttagaactgctgtatgttcttgattaattgacccttttattttaataaagggtctctctttactccactttgtcaggtactgagataacaatgttggctgggcatggtggctcgcgtctgtaatcccaacactatgggaggctaaggtgggtggattgcttgagctcaggggttcaagaccagtttgagcaacacagcgagacctcatctctacaaaaaatacaaatattagacaggtgtggtagcatgtgcctatagtcccagctacatggacagctgaggtggga

SEQ ID NO: 44787 - DNA, 1029 bp, Homo sapiens
aaaattagctgggcatggtggcaggtgcctgtaattccagctacttgggaggctgaagcagaagaattgcttgaacctgggaggtggaggttgcagtgagctgagattgcgccactgcactctagcctgggcaacagagcaagagtccatcttgaaaaaaataaataaaagtaaaaaataaaaataaaataattagccgggtgtggtggcacgcttctgtaatcccagctactctggaagctgaagagcttagttagcctggctagaggtttatcaatttttactgatattttcagagaactagcttttggtttcgtttattttttctgttgatttcttattttcaagtatattaatttatgctctagattttactgtttctgtttttcttacttaggatttaatttgctcttctttttctgttttccgaaggtggaagtttagatgattgattttagatttttcttcttttctaatatgtactttcaatgctataaattttcctgtaagcactgctttattccgcattaaaaaactttttttttctatttatctttttgtcctttttcttcccatcagtttttattttgttttgttttttgttttgagatggagtcttgctttgtcacccaggctggagtgtagtggcacgatcacagctttaacctcccaggctccagcgattctcccatctaagcctcccaagtagctagaactacagaagtgtgccaccatgcacagctgatgaaaaaaatttttttgcagagatggggtctcactatgtttgcccaagctgtccttgaactcctgggctcaaacaagcctcctgcggcctcctaacgttctgagattaccagtgtgagccaccatgtttggcctttccatcattcttgcttcccttttatgcatctcacaaatttttgataaactgtgctgtcatttttatttagttcaaaatatttttaaatttctcttgtgatttcctctttgacctatttagttgcgttgtttaatctccaagtgtttggg

SEQ ID NO: 44788 - DNA, 2011 bp, Homo sapiens
gtggtaattttagacattagtgttattcttaaaaacttacagggacatttatctaactttctagtttatctttttgcaaagcgtaaactgcatactttcagtgtaattttatacattacatataagaggtgttcgattatgtttgtggaattacataaaatatgtctctagatttcttacaaaaacaagaattaatgtatctttatgaaaattcctttataaaacatctttataaaaatctgctttataagataactagcacatggataggagaagctttgtgaggctggatttactccctttttaaaaatggcctttgttgctaagctgtgtctgtctcttacagacctacctgactgtgtgtaaagatgttgttatggtaggccttggtgaccatcagtttcagatgcaactcttacagcggagtcttggaatcatgcaaacaggtacagtcagggctgttttagagcaataaatactcagaaccagtccttccctccctccctcctttactgtgtagctcagaactctcacttttaagtgactgattataatgcaacctggcatatcccaaaaaagggatttgttaggtggttcagcccggaaattaagaggtgtttctgtgtcagacatgactacatccagagtttgtgacagggtccttgggattctgcctgtccttgtggtcagctttgttgccaggctgactttccctgtggattgggctagtggctatttcctggcatctgtgtgggaaaccatcacctttttgctctgctctggtcatgtgctcctgtggatgggggcgtgagtcagacattattgggtggtaccccaccaggacccccggaagttgctgttaccacagggaaagggttagcacagggtgacccatggcaacagtgagtgagaggacagccctcgaatcacatcagatgatgacgggaaagggtgtggggccagggggagtgcagctggggtcattccatatctccttggccttctgatcacagtctggtaaagaagagtactgctgagctgggaccctggtccctggcccctgacgcctagcccctagcccctagctcctagcccctactccctaacccctaacggccagcctccccctcagccgcttctgtggtgtagctgactgctgtgtaaacctgtttctggatggtttttaagtagtatcccaatatcccagtgctgcatttgattctcactgagatctgtaaaagcctcaacatttgatgttgacatttctttaagcctagttatttgctagaagagattgaaaatgataacatttagtaaattcaacattaagttttgaaaattagattaagttggttgtccaatttctagtggatccatctgtagtctctttcccatagccttaaatatcttcatggcagattccagaggggtctgtgtgtgtggacacccccagtgtatctgtcttcatgacgttgcaactgaagtagatgctaggagaacactggagccaggatactgggcagtgtcttagttaatctttaattataagcaaaatcatccatcatttgtttaacagatctaaagtttaagagtaaatattaaatagaccaatattatttgcttcagcttttttgtttaattattattattatttttttttttatttttttttttttgagaccaagtctttctctgttgcccaggctggagtggagtgcagtggtgcgaccttggctcactgcaacctccacctctaggttcaagcaattctcatgcctcagcctcctgagtagctgggattacaggtgcccaccaccatgcctggctaatttttgtatttttagtagaggtgaggtttcactgtcttggccaggctggtctcaaactcaagtgatccacccaccttggcctttcaaggtgctgggattacaggcgtgagccaccatacccagcctgtttaattctttataattcacttctgttgtgaaaacagcattttatacttaagctt

SEQ ID NO: 44789 - DNA, 1113 bp, Homo sapiens
tctgttttcatgctgctgataaagacatacctgagactgggtaatttatgaagaaaaagaggtttaatggactcacagttccatatggctggggaagcctcacagtcatgacggaaggcaaaaggcacgtcttacatggtggcaggcagagagaaaatgagagccaagcacaaagggaaaccccttagagaaccatcagatctcgtgagacttactaccataagaacagtatgggagaaaccacccctaggattcagttacctaccaccgtgtccctcccgtaacacgtgggaattatgggagctacaattcaggaggacatttgggtggggacacagccaaaccataatttaccagtaaatggtaaagctcattagctgggcatggtggttcacacctgtaatcccagcacttttcgaggccaaagcaggaggattgcttcaggctgggagtttgagactagcctgggcaacatagtgagacctcgtttctacaaaatttaaaaaattagctgggcttgatggcctgtgccttttggtcccagctatgcaggaggctgaggcaggattgcttgagcccagagtttgagactacagtgaactgtgatcatactactgcactcactccagccctggcaacagagtgagaccctgcctcttttaaaaaaaaaaaaaaaaaaaaaaaaaaaagaaagctgaaataatgacctgggactgagaaaccagcattatttcagaatatgaacagaagcccatataggacaccaggtaggttggcggacagggcagttgtggccttggggtatttgaaacccttagagggtcttgggattcagttaattctgagtatgtctataagaagtctctccaccactaaggaaaattgcttccttctctaagtaaagagatgatgggtgagccacacagatggaattggccatcattatcagtatacttgtaacattaacgagatattttctttttttttttttttctcgctctgtcgcccaggctggagtgcagtggagtgatcttggctgcaagcctcgcctcccgggttcacgccattttcctgcctcagcctcccgagtagctgggactacaggcgcctgcc

SEQ ID NO: 44790 - DNA, 1040 bp, Homo sapiens
ttttgggacatttaattatttattactatgtgtggttttaaacattttatgcatatgcctgttgtttccccaatggagaggtggtgtcatatggtgggtaaagcacatgctctggtgtcagccccctgctctctggggtcagagtccaccactctcacttaataggtatgtggctttgggcaagtcacttaacttctctgtgtctttctctgtaagtgtgattgcgatattgcctatcctaaaggtgttgggtagcataatgagcaaacactggttatatttcagggcaagcctacaaataatgcctgtggcaggtgatttttcagatgaggtgctaggatgttaagatgcggcatttatttccaaggagtattgtggattcttttcatctacttagtctgtatttcctaacacagcttacttaagcagtgcatactatctactgtcctaagtagtaaagttttaggaaacaatgacaacaaagtgctgttgtaatgctgttgcctgtggtgcttctgaagtgctcccttttttctttttcttttctaacttatggaaaacctgacatgcagaaagttaaagtaatagtataataggcctgcacagtggcttacgcctgtaatcccagcgctgtgggagggcaaggtaggaggactatttgaggccaggaatttgagaccagtctgggcaacatagtgagacctcgtctctacaaaaagttaaaaacaacaacaacaacaaacaaaaaaacagcccggtgtggtggcacacgcctgtggtcccagctacttgggaggcttcagcccaggaggtcaagtctacagtgagccatgatcacacaactgcaccccagcctgggtgacagagtgagaccctgtctcaaaaaataaaaagaaaaaaaagtgtaataaatatctgtatacttcttcaagcacacacacacatccctaaatgaagtcattagtattttgctgtgtacattatgtatatttatctacaattcctttttttttttttaaagattccttatttttaaattt

SEQ ID NO: 44791 - DNA, 1051 bp, Homo sapiens
ctgctagacaaagggccatgtgattaggactgagacctttggctcccagggtctttgttcactttataggtggtgcccttggtcaggcctttcagcctcagagttttgttctgtaaaataggagcaacagttactgtttcacaggattgttgttaggaacagatgaggtaatatgtatcaaaccgcagcccaggcgctggtggataagaacccctggggagggctgccctttgccatccttgctgtgtcagcaccatcgttattacaaagatgttggacacagcctgtgccccacacatgtctccaggattgttctgaaatgggagagtgaagaaattaatgatggattcaaacaataaactattttatgttgacttatacataaggagttgatgaatcgtacttgttaacttatatatgtgtgcagatatataacagacataaatgtatgtatgtgttataacctctaccctttttaaaaaattgatgtctcctttgaatttaagatatctaaatgtagtttcctaatcaatcattaatttggtcaggtcagtttccagtcattctgggtaaaccataaacatcttgtactgtactaacagattacttccagtgaatattactgtttttttttttaacttgcctgttgtgagcatggttaccctgcatttgaatcaaaatgtattgcatttctgtaggattccagttctgtgcagtggtgtgctggtaagagatgaaggtgctattcactgagagagttctagatagatgcatcttatgcactctatagagtatgaagattgtattcattcttcttaggttcagatacataatctagtagcatgcatataaattatcatcacatgatgtatttatgacttgaagactgtgtatttggaaattctagcttgacaaacacttagccttttaactatatgagtcctcagttttctcatctataaatgagaaggtgaaatgaactgggatattcaactccattcccacccacctatgctagatttaaagctttctttcatttgagactatggaa

SEQ ID NO: 44792 - DNA, 2506 bp, Homo sapiens
aagaacttgccaaaggctggacccagtggtgagtgtccctgctgcagacagagaaccccagtgtgtagctaaaaacgctttccccgcccagtgggtagtgtcccccacagacagtggtggaacccgacacgtatctgataggcttttcctacttggtcctgtatccgtcaccaccttcctgtcactgtctttctcaggtatgacctcacggaagatgggacgaggcctcaggcgatgacatagccgcagcaggcaggaggcgtcctcttcagcgtagctctccacctctacccggaacacaccctctcacagacgtaccaatgttatttttataatttcatggatttagttatacataccttaatagttttataaaattgttgacatttcaggcaaatttggccaatattatcattgaattttctgtgttggatttcctctaggatttcgccagttcctacaacgtgcagtagggcggcggtagctcttgtgtctgtggactctgctcagctgtgtccgtaggagtcggatgtgtctgtgctttattatggccttgtttatatatcactgaggtatactatgccatgtaaatagactattttttataatctttacatgctggtttaaattcagaaggaaatagatcaaggaaatatatatattttcttctaaaacttattaaattcgtgtgacaaataatcattttcatcttggcagcaaaaagttctcagtgacctattttgtggtgtttctttttgaaaagaaaagctgaaatattattaaatgctagtatgtttctgcccattatgaaagatgaaataaagtattcaaaatattaacattttcataaatataaggatgtattattgagaagtaagttgaagggcttataaggaaaaatgttttataactgagtaatatattaagagaattgtcatggttcataaatcacattatgctaatctgaaatttcttacataaaaatgaagtgtcttatgtttattttaattgctgttgtaacttactcatgaaacagtatacagacaccttgtacttttcctcaactgtaagagcagactttcaatgttagcaattaagctgttgtcaaacaatcagtcatgagctttgttaattttcaatgttttcccagcctataaaaaaaggaaggtacacgttgtccttttaaaggttgtgaggtagattggagtgagtagacaggatattgcattaaaaattgaaagctcgatctcattattgtcaggaacccccagtgtgacctcacacataggatgtgggacctttgagccgatgtgcactggccaccaccagggttgggggcgccacagctgcgagcccggcccctgctgttctcagcagccacttcccaggctgcctcactttatgccatgactgaccttaatattgggatattgttatgcaatttttatcctgtttagactgttaaaagcaggtttctgtacttaagagtcccccagacctcctgtgaggtgaggctctgttgcagtgtcgtaggctgtgtgtgtctgtaaagaaagaatgcacatatgtagacgattaagtgtatattataagctatatgctgaaaatggcttccatagccatgagaacatcttaaaactatgtgtaaatatattaaggaaagtatagctttgtaatttaaattggagcttttagcttgtttcatggaactatacaacttgtgggtaactcacatgaccaaacaaaccaaagtgcctgtgacggggcgggtggcgtctacccaccctcccttctagcagattcttattttgtttgaatttataaacaaggctggtggctgtctacccaccctcccttctagcagattttgattttgtttcaatttataacttacactttgaaccatgggtttacttataatggagtctgtagcttcacagcatatttcatgtaatcataaagaccagtatattccctcctgctgaatgacatgcgactgtaaagcctctttataaaccatttccaatgttagtatataggattatttgggaagcgtatcaatacctttatagacaaatacgaacatgtatgcacacaaaacatttaactatggtatttatggaagacaggtaacaacattaaatctagttgctttcccttagtattagatttgttgagggttttttaaaaatcaggtctgttgaaagtcttctgtcataatctataaagcagcagcactcatggaaattgtagcatgccagtaatttttaccaacatcccatacatctgagttctgcagtccagtgtgtaatccgctccatgtgtattttgcttaatggaatgctttatttaagcacttaggcagagtagacacaattaaaggtacaaagcccagaggaagtggtagagcagcaccgtgcctgccctgaggcagtggagtcagtagcgctgtccccagggccttgagtgcctggaggtgcttggcctccagtagctgcctccattc

SEQ ID NO: 44793 - DNA, 1105 bp, Homo sapiens
tgccattgctcaggccctctggggccttactagttctcagactacttatatcaggtatgaagagcatggcgtttaaatctctgaatttatgtttttttcctcagcctctgtttttgctacttgtatcttgaacctctcttgataggtgtgtgtgaacagccaggcctaggagacctggtcatgccgcttgcccgaccctgtctcattagataggtgagtgtgaacagccgggcctaggagacctggtcatgccgcttgcctgaccctgtctcattagataggtgagtgtgaacagccgggcctaggagacctggtcatgccgcttgcctgaccctgtctcattattctgtgttggttgttttattaggttggtgcaaaagtaattggagtttttgccattgaaactgcaattacttttgccccaatctgatacttttttacattctgttttatacaaaaggatttgtgttttgtctagctggtttttccttcataaagtgcacttctgtattctcaaaataatctatgcttactggaccttggattttaaaaataatttttaaagttccacaaacattgtcatagttatttcatttaaaactgcttttgtgattatagtttagtttgaaaagaaatatgcaatcaaccttttaggttttcctgagtagttatgtgttaatttctctgaccatttttgtatagcctgagaaaccttcagagttcttactctatttgattaaattattttatattacagccatctaacaggaataattcctgttgcagagataatgcagaaggttattatacaggaaaaagaggctgggcatggtggctcacacctgtaatctcagtactttgggaggctgagatgagaggatcacttgaggccaagagtttgagaacagcctgggcaacatagtgagatccacctctgttttttaaaaaatttttaaatgccttgctgtaaattttctttaatgtggattttgaatggagaaggcttaaaaggtacttagaaatgtattgtctccataaatgtcatgaatggaaactgtatacatcgttatgagtgtgtattgccaccattttcccaggggttaaa

SEQ ID NO: 44794 - DNA, 1021 bp, Homo sapiens
cgtggtgacgggcacctataatcccagctactcaggaggctgaggcaggagaatcacttgaatccaggaggtggaggttgcagtgagctggtatcgtgccgttgcactacagcctgggcaacgcgagtgaaactccgctttaaaaaaaagaaaaagaaatggaggtttctgattttcctgataagaattacaggtaattgccttaaaggaggtcaatgagctatgagacaacactgataacaagtaaaatctggaaaaggatacatgaacaacatgagaatatcaacaaagaaaaaccataataaaagaatcaaatatagattctggggctgaagaatacagtaactgaactggatcaatacaaggcttcaagagctgacttgatcaagcagaagaaagaaccagtgaactcaaagacaggttatttgaaattattcaatcagaagagcaagtagaaaaagaattttttaaaagtgaagaaactgtctgtctttgctaaaaattggagggtcctaagaactcctccccgcccccactgccaatgcagagtcttactctgtcacccaggctggagtgcagtggttcgatctccgctcactgcaacctccacctcccaggttcaagcgattctcatacctcagcctcccgaatagctgagattacaggtgcctgccaccatgcccagctaatttttgtatttttagtagaaacggggttttggggtttcaccaagttggccaggctggttttgaacttctgacctcaggtgatcctcctgccttggcctcccaaagtgctgggattacaggcgtgagccaccatgcccggcaagaactcctttttatgttagattcactagggtttagcagctcacagaacccaggaaaacagtttacttagctgatttattacaaaggacattttaaatattacatatgaacagccagctaaagagttacatacagcaagttttggaagcatcttaggtttaggaggtctgtctccaagcagttggggggta

SEQ ID NO: 44795 - DNA, 1024 bp, Homo sapiens
acccgcgcggcgcgggcacgcacattctcagggacgcgcgtcctcaggccacgagaacacctgaaggccccggccagcgtcctcccgtgaagacccggaccggcgtcgtcacccgccgcgcaggcctaaatctcaggtcttcaccgtcatctcccagcgatcgcagggatctcaggcactgaccgcgcccgtccctgcgcacccgagccccaccccacgcccccacgcccccacgcctccacgcccggcactctggacgcgcgcggacggaggggcagtgcctactacgcaggcgcacgctgcgggcgacaggaccaggcagcaacattgccacgcggatccgcgccggccaatcagcatggccaggggcggggcttccctgaggcgcgccgggaggcggcggcccacttccggcaataaccgcctggtcgccgtcaggtgcgggcccaggtggccggcgcgcccgttgggcactgggggacgcgggcgcgtcaggtgaagactgggggccgcaggcgcgctaggtaggtgcggggtgcagcgggcgcgtcaggtgaagacttggcgccgcaggcgcgttaggtgaagattggggctcgcgggcgcgtcaggtggggacgacgggccacgggcgagtcaggtgaagaccgggggcggcgggcgcgtcaggggaagacatggggtcgcgagcgcgtcaggtggggacggggcctgtgggagggtcaggtggggaccgggggcctcgggcgcgtcaggtggggacggggttgtcgcgggcgcgtcaggtggggacgggattgccgcgtgcgcgtctgctgaagtctgggtccgcgggcgcgtcaggtagggacgatgggccgcgggcgcgtcaggtggggtctgggggcggccggcgggtgtggagggttcattcagggagctgcgggcgagtcgggtgggcacgggggccgcccacaggtgcaccgcgcgtcctcagccgcttcccctgcccaccttctgcgaccccttcccgcccccaccctcc

SEQ ID NO: 44796 - DNA, 1057 bp, Homo sapiens
gaagaagatagggtcacatggagaatacagttagtgtgattcttgaaacttttaagatttatctgaaaaatttgtttctatggagtaccatacacagcaacagaagaatagaactttttattagggtacataggaatgtagtaatgtaattgcattttataatcatttatgtcttcatatggcttcagtcattaataatactaattttcttctaagttactaggacttggtactgtctgaaatcattgttcatatcttaaactgatttaagaaacaaagcaattctgtttgcattcacccacgtaaaagcatttcttgtcaatatagtaagtcagataattttgttaacatgtccaattatttaaattcctttaaaatcttcattttgaaatgatttgccagattttaaaaacaaaggtaatttttattctaggtttttatcgtgaaaaatggatctatgtccataaagaaagcacaaaggaagtaagtattctattataaatatgagagtatcttgtattgtttctgttgaatatggagtcacattaaataaatgtattaataaagttgcataaaacacatttcttttgcaatatcagatctatggttcacattctgacagataatagcatatgaggagcttttgaggcagtgattttccattgtgtgtgcttgcatgtgcatgtggtatgtggctgtgtatttgtgcacacatttgtgtgtgttgtgtgtatggtgtatgtgtgtggtatatatggtgtgtatgtatgattgtgcatgtatttgtgcagatactggtgtgtgggatgtatggtgtgtggtggcatgtggtatatgtgtgcagtgtgtggttcctgcctacctgtacatatctgagtctacagcagggttatttaaaccaagcatggactcctgcagtcatacgcattttctctgtgttagcatgaacccctgatgctgatgggaatgtgtcctccctgtggcgtgttttggagggcagggcatctgtgagccctctcattccacataaagagtggctaacatgaaattagtaatt

SEQ ID NO: 44797 - DNA, 1066 bp, Homo sapiens
ttacagctgaagagaacagggagaggggttccagcatatttatcactggaatcttcaaacaggaaaacaaaacaaaaggacagaacaaatatttaaagataatgttcaggaaaattctgctcaggtaaaaatagatggaagtgtacattgtgagagggcaaattttatgctggggaaggttgactgagaacaggttatgagtgtgccatatcctacaggaattattaaactctgaagatgaagcaagaacctcccaatggctgaacaaacatgtcgtctcttactgagggaaaagatcagggtggcttcaaatttctccaaattcttcagatagtggagtaatccttacttatgggatcctccaggaagaaaggatggcccatgaattttatgtccagtcaaaccatcttttgtatccagtctgcaaacaaacagtattgatcatgtgagaactcagggaatacttactgttctcatgagcagtttcggctggagaaacagtgtccatcggactggatgtcagtgaatctctgcagcatcagctgtgtggctgagggtgacggagcagagtgtgagtggagggcagaggagaaaaggtcggtggttagaggtttgttgactgtctcacctgtaatcacagggaggcactaagatgttattcactaaaatcaagttgtagaggagagggatggaaggaagaaggagcaagatgaatggcagttttatcacaatgtggaacagtaaactaacaggctaagatgtgttgtatgaggattccgaaggagagggaattacatagagttaaaattccaaaagtaacccctagtacaaaatagtgcaaacatttctaaatttcagaagaactacagagagaacgcaaagtttttcaaaaagctacaaaaacatgtcataaaattaagaccaaacatgctgtgtctatacatgtaaacacataactttatacacataacctgaaggctggtaaaagtaaaagatttcagattgaatcaaaaagtgaaacccaactccaagttgtacgtaagaagcacacctaaaacagagattt

SEQ ID NO: 44798 - DNA, 1026 bp, Homo sapiens
tccattggtctacatgactgtctttgtttcaatacaacaccattttgattattgtagctttgtcgtaagttatgaaataaggaagtgagagacctcctacttggttccctttcaagatgattttggctgtgtgaggtctcttgagattccatatgagtttcaggatggaaaaaaaaaagccactgggatattctgatagagattgcatgaaatctatagattgctttggactatggacatcttaaggtatccaatccataaacacgggattgctttctatttatttgtgttgaccttactttctttaagcagtgttttatggttttcaagtacaagtcttttgcttccttaagtttattcctaaatatttcagtttttttgttactattataatggaattttcttaaatttccttttgagattgcttgttattgtatagaaatatcatggatttgttgtgttgattttgtaaactgcagtgttactgaaatttttttttgtatatgtatggacactaggattttctacatataagatcatgtcatctgcaaacagataattttgcttcttcctttccagtctggatgccttttatttctttttcttgcctaactgctctaagactccagtactgtgttaaacagaagtggtgagacagggtatttctgtgttgttcttgatcttaaagtcctttcagtcttattgaatatgatgtttacagtgggatgttcatatggcctctattttaggttgtttccttctattcccaattgttgagtttttatcatgaaagggcatgacattgtctcaaatgctttttctccatcaatggagatcacatttttttccttcattctattaatgtaatagacattacatttattgacttgagcatgttgaaacatctttgcataccagctgtaaatcttacttggccatgatgtgtaatcctttcaatgtcccactgaatcctgttggccagtattttgttgaatattgatttaaaaaaatcttgatcaggaatac

SEQ ID NO: 44799 - DNA, 1076 bp, Homo sapiens
agctaattaactttattttcttttttttgagagagagtcttgctctgtcacccaggctggagtgcagtggcgtgatctcagctcactgcaacctctgcctcccaggttcaagtgattgttctgcctcagcctcccgagtagctgagactacaggtgcatgctgccatacccggctaatttttgtatttttagtagagatggggtttcaccatgttggtcaggctggtctcgatctcctgaccttgtgatctgcctgcctcagcctcccacagtgctgggattacaggcgtgagccaccatgcccagtagtctttcttaggctaagctcactgtgaagataaatctgcccccagaaacaccccaaagtcagatatggcatttcaggacgtgacaatggcgagcagagaggctgagctgtgagctcacagtttgtctccagagcaactccagtgcctgggtctgcacaccgcgcacttcctcctgccacagctgcatgggtcaggggctcccgaatgagacatcctgtgttgatcgcagccgtctcccagcatgtggagcaacactaggaccgtggtagatgttcagtcatgttcgctgaaggaagaagggagtgaatgaatgtcttctctgaggatagctgagcatccgtgcatccgtctggccatgagaacttggttgcgctcacatgaggatcctgagcaggtaattatctcggtccagaagcaatagcttcaggcaaagagaagacgcgttccctccctgtctgtgcatctgactttcacggttgttcctaccgttcattgctttattaaagccagtcactcctgggtttgccttcacgttgtttcacttcattaaaaaaaatggaatgagacttgagtttgaatgcaattatgtaattgaaggaactgtcctacacacgatttattaattaacattggagcacacttatgtcggcctgcttcctgattacagtcaggcgccaggtaacgacggggtgacgctctgagaaacgtgcccttaggcggctttgttgtgttgtcttcatttgtacaaatttaagggatgcaagcaca

SEQ ID NO: 44800 - DNA, 1137 bp, Homo sapiens
aaccaggtgggtcttgtctcaccaagatgggaagccgtgtgcaggatgctgtgtacagccaacagcatgggattgagaatatgagagctgtgaaccgtatacacagaagggacttggatcaacagaggagcaacgtctgcagatgtcctggagcaacagctctgaaaaatgtccagaaatagaaggaaaagtagaacctgtgatgtgggcaatggggagaatgaatgtgacttttgatcgtcacagcctcattgacttataggatgcagaagcatttgttttgctttaaaaatcattttcagtatatgtgtcctctgtttccactcttgccttacgtccaagattgactttcctcaggagaaatgcaggctctaagcccagcggacagagtcaggccaggaagcaggcaccactgtcttaacctctttgccattaatttgaagtgggggcttcttaagaacgtaacttctctgaccctgacgttctcccagtaaaatttcctttgccttaaaattgtgtgtctctgtgtgtgtctctctatttatgtctctgtgtgtgtctctgtgtgtgtgtgtgtgtctccctctctctttgtgtctctctgtgtgtctacctctctctgtgtgtctctctgtgtgtgtctacctctctctgtgtgtctctgtgtgtgtgtgtgtctacctctctgtgtgtgtgtctacagagtgaaacctctgctgtcagggtctgatttttattttctagatgttcttcgtaaatttggtttccacgactgtatacaccgttgacctgctacttagtaaaactgtttcttattgttagacgtgttgcaaaaaggtagatgggaagtaattttttaaatttcagaattgtaatgacggatgacccatttcctaatattgcaattctcaaattctttccccacgtcttcatgaaataagtcatagttaattttggcaaactaaccattaccaaattaaatgattaaataattaattaaatcataaacccacaaaaaagaaaacatgtgaaaaggagaaaataacatgaattgggagtcaagattagtgccaaacaggccttggtaaaaatccagctttctccacccagcactgagagacctccagccagcggtgt

SEQ ID NO: 44801 - DNA, 1089 bp, Homo sapiens
tatatatagtcataaaaatgtatatacaaaaattaaaagtatatgtaaaaaggggctggatgcggtggctcacacctgtaatcccagcactttgggaggccgaggcaggtggatcacctgagttcaggagttcgagaccagcctggccaacatggtgaaaccccatctctactaaaattacaaaaattagctaggcatggtggtgggcgcctgtaatcccagctacttgggaggctgaggcaggagaatcgcttgaaatcaggaggcagaggttcagtgaactgagatcgcaccactgcactctagcctgggcaacaagagcaaaactccatttcaaaaaaaaaaaaaaaaaaaaaaaaaaaaaaaaaaaatatatatatatatatatatatatacacacacatatacgcaaaaaggagattttaatgaatatataattttgtcaactaaaaaatacagaaaaaaaagaatggctaaaaattattgggtctacaactttagaaattgaatagtagaacaaaccaaaagtatattgaagggagaaaataaaaataaggccagaattaataaagcaggagatagtaattccatgggtacaaatgacagaatggattttgaaaagacagaaaaattggaaacctctagcaaaatgatcaaagggaaaaagagacagagaaaaagcatggaggtgcagaccaacaatctgagacgtgacttcagagtgtccacgcaggaccccgcagaagtaggtgagtgtggccttcccaggtgaagggggctttgcagatgtaaggagaggatctgaagggggagattgtcctggatcgtgtgggtgagtccagtgtattcccaagtgtttttgaaagtagaagaggaggcagaagtgttcaggggtgggcgacagcatatggactcagcccagcattgctgctttggaggtggggaaggggctgcaagcccaggagagtgtaaagtgcaaggcaagtcttctccctggagcctccagatgggaatgcagccctgccactgccatttcagctccgagagagccctgctagattgtgacctgcagatacacaaccacagaca

SEQ ID NO: 44802 - DNA, 1065 bp, Homo sapiens
cgtcctggccgccgaggtgagtgcgggccccgcggaccgtgggtcccctcgcgggcttctggtttcctttgagagttgcacttctgcccggctcccccgaaatcgctgggtcccacccggaggtggctgcgcccccgaccccctgcgcagatgtttcagggaaggggctgagaccccctccccccgagcagctcccccttccgcggcgcccccggcccctcaggataacggcgcgggcctgggcggggggagcagggactggcagcagggacccctggccccaggggcaggagcgaactccgatcggcggaaggagcccgaggggcgagctggcttcgcctggggggtcgtgcagtaacttagattttccggtaaaggagaagaatgcggtccgcctcaggatgcagagaaggaccggtgtaaggaaagccggcgtctttcccccgcaccctacctgtccccctaccccaccagttccccgcaccccgtgtaccccgcctgtccctcagcaccccctgttcactctgcactccaccagttccccgcaccccagctgtccccccgcaccccacctgtttaccctgcaccccagctgtcccccgcgccgcagctgtcccccccacaccccacctattcccccgcaccccgcctgtccccccgcaccctacctgtttattctgcaccccacctgtcccctcgcaccccacctgttccccctgcaccccacctgtcttccccacaccccacctgtttactctgcaccccagctgtccccccacaccccaccagttccccgcaccccgtgtaccccgcctgtccctcagcaccccatgttaactctgcactccaccagttccccgcaccccacctgtcccctcgcaccccacctgtcctccccacaccccacctgtttactctgcaccccagctgtccccccacaccccacctgttcacccgcactccacctgtccccccgcactccacctgtccccccgcaccccacctgtcccccctgcacctcacctgtccccccgcaccccacctgtccccccgcaccccacctgt

SEQ ID NO: 44803 - DNA, 1026 bp, Homo sapiens
cagagagagacagaggcagaggcagagacagagagagacagaggcagagacagaggcagagacagagacagagagacaggcagaggcagagacagaggcagagagagacagaggcagaggcagaggcagagacagagacagaggcagagacagaggcagagacagagagagacagaggcagaggcagagacagaggcagagagagaggcagaggcagagacagaggcagagagagacagaggcagaggcagagacagagagacagaggcagacgcagagacagagagacagacagaggcagagacagaggcagagacagaagcagagacagaggcagaggcagatacagaggcagagagagacagagacagaggcagagacaggcagagagagacagaggcagagacaggcagagagagacagagacagaggcagagagagacagagacagaggcagagagacagagacagaggcagagagacagagacagaggcagagagagacagaggcagaggcagagacagaagcagagacagaggcagagacagaagcagagggaggcagagacagaagcagagacagaggcagaggcagaagcagagggatgcagagggagacaaagacagaggccgagacagaggcagaggcagagacagaggtagagacagaagcagagacagaggcagagacagaagcagagggagacagagacagaggcagagacagaggcagagagagacagaggcagagacagaggcaggtgcagcgacaggggcagagacagagacagaggcagagacagagacagagacagaggcaggggcagagacaggggcagaggcaggggcagagacaggggcaggctacagcccggggccttcagccgctgccactgcatccgccccaagcacggccctcacggctgcctctggctcttctttggcgccctgttaccgcctccaagcccccacccccaggatgctcaccatgctctctggtctcttcccagccctgggtcagccccc

SEQ ID NO: 44804 - DNA, 1031 bp, Homo sapiens
ttgggctgggatccaccgggggtgccgggggtgcctggtgccttcctttctctaacaggcctggactccatctccagcgatcctgatgcgtgaggtggcattggccctggtgccagcgtcccagggaaagatgacatcaacctaaactcttgaggactcatagctgtattggagcattgttaattttctttgttgggagatgctccagccatggaacgtactcttcttccatccgtctctgaggctgcagagtcatccaggccaggctgacgaatgaaggagtcttctccttcccacagccacccggcacccgcccagcctggggagaagccatccctttctctgcactcagggcagcagtcagcgtctggtcctgctgctgtgtgcacgccggaggcagtcctcttcagacctcatgtgttcattccttcaaagagccacgcactcttcagcacagttggtgttggctgaatatttttgactgaggctaaagggtcattttgggttttgtcagggtctcagagccagtgtggtcctctctgtccatgggatccgattgtcggaagcattgatgccatctggcgtggaggccgtccaccgtggggactgtgcagcgtgggggccatctggcatgggggctgtctgatgtgggggacatccagcttggaagctgtctggcgtggatgccgtccagtgtggttgctgtctggcatggaagctgtctggtgtggggactgtccagcgtggaaggtgtctggagtggaaggtgtttgatgtggggaccatccagtgtggggctgtctggtgtgggggccatctggcatggaagctgtctggcgtggggactctctggcgtgggggccatctggcgtggatgccgtccgatgtggggactgtccagcgtggaagctgtctggtgtggaagctgtccgatatggggactgtctggtgtggaagctgtctggtgtggggagtgtctggtgtggggactgtctggtgtggaaactgtctggtatggggactgtccggtg

SEQ ID NO: 44805 - DNA, 1029 bp, Homo sapiens
cactcctctgctggggctgggggtgtctccatagcccctccctctgcccagatttcgacccaggggagagtatgacaggtccacgccctctgggtgcagctggactggccaggccgtccttgggccaaggctactggatccagcctcagggctggtcactagctccaggctgcaggaatgtggagctctccacagttcgccactgttaacatttcacccaggagggtgtcctcgggagaccctggcgggagcccgggagccgcggaggggctgaggagccgcccagccctctggcgggttgggagcgaggcccctgcccttgctgacaggccacatgaccttggtctttgatacagaaagccaccatttaatgacagtgctctggcttggaaacttaggtgagtttctagccaataacttttacgacaaatagaaatagggataatggcctggtgtcttttctgaggattctgtggtactttaattataatttcccccattattaagtcaaccgtccacttaaaagtgcccctgaagatcaggatccagcaggaagttactgcgacctcatttcttccctgcgtggggacacagttggtgctgttactttagatcatcacttttctggtttttttccccatatttcttttctacataattgtagtcattgaatataaatttttaactttttttttttgagacggagtctcgctctctcacccaggctggagtgaagtggtgtgatcttggctcactgcaacctccacttcccgggttcaaggattctcctgcctcagtctcctgagtagctgggattatagacacctgccaccatgcccagctaatttttgtatttttagtagagacagggtttcaccgtgttggccaggctggtctcgaactcctgacctcaagtgatctgcccacgttggcctccgaaagtgatgggatgacaggcgtgagccaccacatgtggcctgatttttaacattttgagtgtaggtttttataccgcgttaacatttgtgt

SEQ ID NO: 44806 - DNA, 1046 bp, Homo sapiens
ttgggaaacacagaggtttcagaatagacggcctcctgtgcgttttcctgttgaagtcggccagagtcctcggaactcaccacggtctgcatgatccacgctgctgttgtcactctgtgaccgcggagcatgagaaccccctggaaatgagggcgtgcagagtgtaggattcttggctgaaggaaaatacgtttgttttaaagtgattttcttattttaaaatattatttgattatttaaaataattgcatatcatttaatttatttttaaaataacttagcatgaatttaaaacaatttgcttatttttgttctgtcaacctagagccagtaataaagccttgttctaataaagactattttaagtcccggagtagaggagcaggtggttctccggttgcgttttgatcattgaatgagggatgtgaacgcagacctccttcctgggaggtggaaaagcgtggatttggtgttaggcccggtccccagcctggcccacacttcctgcctggtggcactgctggcttttctgttccttgctctggagcctccctggggcggggcggccgcctggctctgcagggcttccccgggacgtacagcccagccaggatccccaggcctgcggtgggaggttgcagagccctgcctggagctcccagctggccaaactgggatgaccagattccgttatttttcctgcctaccgaaaccagctctcaaagacgtccacaggcaggtcctgctcttgtttacgcacgggctgttgtggccagaagcctctgggtgcgctgctgctcggagctgtttaggcgactccctggccagcgtgtctgcctccttctgaccttgacagactcagtttgcaccttaatttcccggaaggcggaggaaagaagagtttcctggggtggagccctgagagggctcatgtgtgtgctctggggatgggagtctgtgctcctggacacccccgtgggggagacatttctcaccgtgcagcgagattgctgctgggcagcacgtcctgcctttgtccctctgca

SEQ ID NO: 44807 - DNA, 1722 bp, Homo sapiens
tcacttgaggtcgggagttcaagaccagccgggccaacatggtgaaaccccatctctactaaaaatacaaaaattagacaggcgtggtggcgggcgcctgtaattccagctacttgggaggctgaggcaggagaatcacttgaacccaggaagcggaggctgcagtgagtcgagattgtgccactgctctccagcctgggaaatgagtgaaaactctgtgtcaaaaaaaaaaaaaaaaaaaaaatcagtaaaccataaaagattagaacagcaatgtagtatgattgacttgaaggtcatatacagatctttgaagcaagtagttccagaatatgtatttttttaaacacatgaaatattttaaaaaattaactatatagtatgcctcaaaacaaatattaacaaatgccaaagaatggatgttcagaccttatttcctcataataactgaataaaatcagtaaaaaaaaatcaatacaaacatttagaaattaaaaatgatatactactctgtaactcatggtcaaagataaaatggaaatgaaaatattttgtcttgaataataataaaaacattacataaactatatgggatagattttaaagtctaaggaattatagacataatggcatatgttaataaaacagaatgggcgcggtggctcacacctgtaatcccagcactttgggaggccgagccgggtggatcatgaggtcaggagttcaagaccagcctggccaagatggtgaaaccccatctctactaaaagtacaaaaattagccgggcatgatggtaggcacctgtaattccagctactcgggtggctgagacagagaattacttgaacccgggaggtggaggttgcggtgagccgaggttgcaccactacactccagcctgggcaacagagcgagactccctctgaaaaaacaaaacaaaacaaacaacagagagcagtgaactgagtatccagccagctgcacgaaagagcagcagagtcaaaggaagtggcaggaaaaaaataatgggcaaggcaaaaatgatgaaataaaaatccaggaagcaacataaagtattaacaaaaccaaaggttggttctttaaaaatagtacaaaaatagacaagcctctggttatattaagatgacacagagaaagaggggagagggatggaagaaggaaggaaggaaaggaaggaaggaaaaagttgatcaagaggatgtaactgcagtagaaatttgtaaaaatcataagaggatgctataaataactttttatcaaaaagttagatgaaattaaaaattgccttgaagaatcaactatacccaaaataaaaaccatgaataaacctataatgatccaacataatgaatggtttgcttaactactgtgcagaacagcccaccaggctcagatgtttttatgctggggtttattgagccttcagggagcggacaaacccctcagtcgcatgcactgttccagtgaatagcagaagcaaggatgaggtgagaattagtttataatgttagcagaaacttgtaaactccctcacctgcgaaggttgatgctacatttccttccagaaatgtcaggaagttgaatccagcatgaccctaacaagtaagcaagagcctgttttaaccttttacattcatggcagcagttcaaggatcctttgagaagctcttgtaacacgatttccccaaattgatggacat

SEQ ID NO: 44808 - DNA, 1091 bp, Homo sapiens
tgggatgtcagagctgtaaggcgtgaattctggaattgggtggttgtgagtcatggaacccaggaaccattcagctgaggcacctcccaggtctcggtggtgccaggccgtgccaccggtgttttgttagagttttttttgactgtttgtaaaaggatagatttgtgctcatctacagtgatgtctgtgtactttctgtgtgaggctgagatggaagccacacgcagtccttgtctgaggctggcgagtcccgtgttactgatagagatggtgaacggatgcccgccatagtgacagttgtcgataaccggtgttatccctccggtcccctagtaacccccagtaagcggagatttcattcctggacctagctgccacgtccctatggtttacaagtgattatgggctgcctacaattctcatattctgtgaacctggctcgtgaaactcaaggagaatctactagatcttggcagtcagctcacctacccagtttcattcacaagttcttccaggaattagatcttttctgccaccgtcatcattacaactgcgatttaaacaaccgatgaagctgcaattgtagtttttcgggttttttttttctttgaaatggagtcttgcctgtcgctcaggctgaagtacaatggcgtgatctcggctcactgcaacctccacttcccagattcaagtaattctcctgcctcagcctctcaagtagctgggattataggcaccttccactaccagctaatttttgtatttttagtagagacggggtttcaccatattggccaggctggtctcgaactcctgacctcgtgatctgcctgcctcagccctccaaagtgctgggattacaggcatgagccactgcacccggcctgcaattgtagtttttaacagctgataactgaggtgatatttcgcttgctgtagctgagtcagacacttgatttaaactgagatttaagaagagtgctgggctctgacatcacagatggaggctcggtgtgtgcctcggagcgtgggttaaatgctcttcagtttcgccttcatggtgggctgtggacagaggggccaggccactg

SEQ ID NO: 44809 - DNA, 1032 bp, Homo sapiens
tcacagctcccttctccagtgtgtctgtgtctggtctaggatcacatgaaaaatgattctcgcctctgtgcccagaggggatggacaagcttggaaagctaagaatagatttaaacaaaacatacccatcactgatttaacagcaaatcaccgaggacagggagatgctgcgatggtgaaaacactgtccactggaccctcatttctctaaactaaggattctcaattggatacctgtggctgtgaacagtaggcctgttctgagtgctgacgtgacgtctcacagcggacggcctctaggtcacgtctgatgcagtgtgtggttgcccgctcgttttccgaccttcccacataacctggagcccaggtgaccctgtaggctgcggggctcagcacccattttatttaaatgaatgccatgcctccagggaggatatttcaaaggagagtctatgctggtttctgcctgtgttgatttttcaatgattgctcagcttgctttttctaattaaatcagaggactttgcttggactgcctgcttattagagccgattaagatgaactggtggagtcatcgccagaaatgaactggcgcctgggaaatagtgtgaagtccccttccattgaggttatttttatttttgaccaaccaaatccatggcacattctttttaaataaatgtagtcatcaaagtatgaaaaaggatacatactaaaatatcgacatgggctctttccatggttaggttgatggctcatgttaattttatcctctggcttatatttttaacaatgtgcagtttgcctgtattacagcattaataacaaaagctgttttttcccaagatcaaaatattcaaagtgtgttttatttctttagctgacaaatatgtactgagttctaatacgtgcgagacgctgttggcttccggcaagcagccacagacgtgatgaatgagcttcctcgtgtgagggagtctggcgcttgggaggaagggggtcaggccgcctgttagacattagttattcag

SEQ ID NO: 44810 - DNA, 1045 bp, Homo sapiens
cttttggtcgtttcagcccctctcatgacagccgtgtgatgagcagccagaggtacttgctgaagtggagcgttccactgggacatgtggacgccatcgagtatggcagcagcgcaggcacgggcgagcacagcaggcaccttgccgttcacccgccggagagcctggccgtggttgctaacgcgaaaccaagtaagtgatgctttctctcacgttcgtgccgtggggccagggtaactctcacgttcatgctagctgtggggccagcgtaagctccaccatcagcaggttcagggtttaacatggcaagtctgcagaggtgatccagtctctagaatctgtatgctgtctgactaacatggccaagtcggctgctcatcactgacttgtcccacgtgcagctggggctccttcgggttcgggccgtgcacctggccagtcagaagtggattccgtcttcccggtccagtgagctcagttttgcgtttccagttaaccaaatcaggacttggcagtgctggtctcttgagtgtgtggagctggcgtgcaggaagtcatagagcttgaggcggtggtggttccagctcggctctttgctcacctgctcacactgctgggcagcgttgtgatgtctttactcagtttccccatggaggcagtgcttgtccatgaacttcccaaggtgaaaggagaggagtcagaatgctttggcaatgtcttagcattgcacatgatttatgattattattacctaacattgttcagactgcagattttaatcttagtgtaaaaatcattaccttctcttcattattaaaaaaaaaatccaaagaacgactggctaagttttattcactttttgggctctacccctgaattgtagaacaatttaaaaaacacgatgcatgggaactttcagttaacctttcataggttaaatatgcatgaatttttcagattattttgtttctgacatgttcagaagcaaggaaaccacgtgagaacgtttaaccttttctgattgaatttgcatattcacctggat

SEQ ID NO: 44811 - DNA, 1074 bp, Homo sapiens
cacggaggggtctgagcagcgcgtccagccacagccctgagggttctggacacagtgaccgatgtgggaccccaggagtgacgggttagccccgatttctctccctggcccctgcccgatgcactgcatggcctcgcctgtaggcagggacagtgcctggtctccaacgtgtcctctccagagtaaggtacttctgggcggcaagggtcactgttcttgctccttatgcctgtaagagtgaacttcgttttgaaggtgagaggacaggcacagcggaagcccaccatggcaaagctgtcgtgttttgaaatacacagcagtcgaaatgaaggaaacagaacaaaatgcctctgtgctccattgctgtgggaagggctgcttctgcgtcatctgaacgttgtactgtaaaacagcacgtgtgtgtgtgtgggagatgaggccaggactcggcgctggttttcctgtatggcgtgtggatttgcaggtccttcccacgactcaaaagtgtcattataacccttgaacgagtactgagagcaaacacaccacctggccaaaggtagcagggaggttggctttccacactgaataccgtggatagtccggaaacagtcttcagtagctttcctgcaatgcgacactgaggtcggcgtgcctgtggaatgtgacaccaacagatgagcccctcactgggggagcggatgcagctgctcattactgtgaagctgctgacctcctgccaccactctctgtgtcctgtgcccctgtgtgctcatgcggcgtgttcagtgcagatgaacggcctcccttcgtacagacaacatctgtatgctgagaaaggccttcaaacatacatagggagtaaaaccacaaagagctctcagagaggatgggcgctgactccggatggaaggcagagtgaaaacagggtaggcgtgccatggcttttcagggatttttgatgaaaatggcatctgaagtgaatggagcaaaacagtcacatcacagattctgggcagtgggtaaaaatgtgtccatgagttattctacttttctacatttaaagagtatttc

SEQ ID NO: 44812 - DNA, 1057 bp, Homo sapiens
ttcttggcctttagcagtcctctcaccttgtgctcccaaagtgctgacattataggcatcagttaccacaaccagcctatacttgtgttacaaggttgtgtttatagagtttatcatcaaagtttgcgaatgaaagcaaatatgtgtgttatgaaacattttaaattataagcattctgtaaggataaataaagttgcgatgtgtaactactggatcagtttgctctttcgtttttttttgtttgtttgttttgatggagtttagctcttgttgcccaggctggagtgcaatggcatgatcttggctcaccatgacctcctccgccttccagcttcaagcaattctcctgcctcagcctcccgagtaggtgggattacagcatgcaccatcatgcccagctaattttgtatttttagtagagacggggtttctccatgttgatcaggctggcctcgaactctcgacctcaggtgatcctcctgccttggtctcccaaagcactgggattacaggagtgagccactatgcctggccgctccctttgttacgaaacttcatgatacttcaaatgcagttagtaattgcatttgtctagatagttgatacaaatcaggcttaccatgttcataaataccatgtaatcatgtcttcaacataaagtgcctgcaaaattataaatggttatgctactcctcagttatatagtaaatatttttagatacctatatctgaaatctttttattggaaatatgtaggttctttcagttttgacatatatatgtattatatctgttatatacactaaaagaacaagctgcataatttgtgggacgtagcatagaaggaaaatgcagagtcctttcctcaaaattattaagaatttcaggatgtccaggccaggcacggtggctcacgcctctaatcccagcacttgggaggccgaggcgggtggatcacctgaggtcaggagttcgagaccagccttgccaacatggtgaaccctctactaaacctctactaaaaatacacaaattagctgggcatggtggcaggtg

SEQ ID NO: 44813 - DNA, 1100 bp, Homo sapiens
cgccactgcctctcacttctcacatccacagctcctgcttggtcagtgttcctagttgagtgtcagaaattgaacaacccaattagctggtatttcatttgtaccaacctatgaatggaggagtagccttaattcccttgggggcttccacttctaagagaactgttttccgtccaggtaggcagacctgtcatggctgaagcttcatcacctggcctggtcatagcccccaggccctgtaggcaggacaggggcttggcagattggcatccttcccacaaaagcatgaaagtaggatgtctgtatgtagcgacaacaaatacaagaataaggagagtttaacaacattctcaaagttggtggaaaagaaaaagaatcaatgaaaacatcaccctaaaccagctagtgctttctgtttacagggatcagaccccttcccacttaaaaaaaaaaagacaaataaatttaagtttaaattgggaaactaactgtgctatgtgttctcgttgtagagattcaaacacacaggaagttcatgtacactgttgcagcaatgctactttagaaattccacggcaggcgtggtggctcatgcctgtaatcccagcactttgggaggccgaggcgggtggatcacaaggtcaggagtttgagaccagcctggccaaacatagtgaaaccccgtctgtactttcacatagtgaaaccccatctctactaagaatgcaaaaattagccggatgtggtggcacgagcctatagtcccagtttctcaggaggctgaggtggcagaatcgcttgaacccaggaggcagaggttgcagtgagccaagatcatgccattgcactccagcctgggtgacagagtgagactgtctccaaaaaaaagaaaaaaaaagaaattccacagcataccacatgttgacttccaatgagctacttgggatgcattcttactgatgtttttcctatttgaaaggtttattttcttagcctaggtcattgaatattagtgttaagttattaaaattgataataatctgcttcttaggattttaaattgaggatagatgggcccttaccttcatattgtgatgagt

SEQ ID NO: 44814 - DNA, 1030 bp, Homo sapiens
gagagccgcctccctgctgcctgtgttcctaccactctgcactcaactctttcatgaagcttcgtggaggaatgtgtgttgataggactttttcatataatctggatttttttctgtttttctaatttctattaaatgcaatagaaataacatttctattacgtaaaatgtattttatgcttatgtcccccttttttcccctgggtttactagcgagcatctctccagcctcttacttggctgcattgctgtcctgtccactgtggagccccgtgcagggctgtgttttcgccttgtcagacgcgttgcatgatctgtaactgagatctgctgaacgtgtctcttcgcatctttctcaccaagagctgtccggcgtaccgtgtgggagcgtgcgaggcagcctgcgcagaagcgcatagcctgccacttcgttcttggtggtgagggacgtggctggctggaggcctcggcccgggcagagggagggggaggctgcttcctagcccctcactgttgccagagctctgagctttcaagggacttaaaaatgtgaaattctgtgggcaatttccagatttttaagtgttagttcaaaacgtcattagcgtgtgcctggttccggctgcgatttgggatcctgctgagggctctggcctgggacacatacacagggagaagtcatcccaagaaagacaagcccacactgcagaatgacccacccaggtgctcagagaacaaagttcagttgttggaagttaaaccttaaccgagggaaacgtctgaagtaggccatcgtgtcattgatctttgagttctcgtttcaaaggaatggtgctattggtaggacactgccaagccacacctgacagccaggatccaagcacagtgggcggtgcatagagagagctctgacctaggattcacaaccctgcgttcttgtgccactccatgcccttcagagtgtgtgaatgtcagagaaaattgtagctctgccctgagcccacatatttctggaggttgccgtgtgccg

SEQ ID NO: 44815 - DNA, 1101 bp, Homo sapiens
gcctttccaggacagcagagctaagaggaggcacagactcagaaccagggtcaggctgcaggcaggcagtggggccccatgccatagcttggagacatcgaggaaggttccagcaggttctgatgggcctggggggatggatcctgtgcctcccctcgccagcctgcccatgtctcctttaggacacaagctcagtggcccctcggcaggcgcaccatgcctgtgtctttggaatggccattttctgggctcacaaaggagccaggatgattggaaaatggcaggcagttgggttgctggtgtttggttgctggagacgcctgtgatttggagcaaagcctgctactgtgttgcagccactgaatggcgctccagctggacgccacgtggacccaacaggccccactcagactcactccacggggctagcagacttgacctctcgatttcacagggtcagctggaggcccaccaggaggaaggcatggtgatctcccacatggccgtgtccggcgtcgggatctggattgccttcacctcagggtccacgctccgcctttttcacacggaaactctcaagcacctgcaggacatcaacatcgccacccctgttcacaacatgctgccaggtaaggggacgggacggggcccagggatgggacagcaaccggggacggacgtggggggtgcggagcgctgtcagcccaccttagcgcttcccagtgcaggacactgttcacaacatgctgccaggtaatggggtgggacaaggcccagggacagacgtgggagtacggagcatggtcagcccactttagcgcttcccggtgcagggcacaggtcctgaaggagccgcgtgctgggaggagccgcgtgctgggaggagccgcgtggcagtgccatctctgtaggtcagagtgggtgggagacgatttctcatcatcggtgcaacaaggccctggggaagccaggacctgaggctgaagaacacagaacaggaggcctccctttggctgggagggctgttggggagaggccaacagaggcctatgtttgtgaatgccctgttgctggtgggtgtcactgaagtttctgggcagg

SEQ ID NO: 44816 - DNA, 1048 bp, Homo sapiens
tattttatgttgtgaagaaggaagccgggatctccgtcgttcctttctgtattttatgttgtgaagaaggaagccgggatctccgtctttcctttctgtattttatattgtgaagaaggaagccggggatccgaaaaggctccattgtgctattgcaatgtcagtaagagctcaggctggaacacatggcctttctggacacagtcccgttagggattggaggccttaaaacatgcttgtgtgtctggaatcaggattcccaatccagggaattggcccaggaaacagcctaagctaggaacaaagtatgatgcaagaagacatttgccacagcatttaatttttaacagcacgaaacaggaggtgacccgcagttcgtaatgacggattgggccatttaataaaatggtggcattgccggtaatgggtagaacacagccagcagaagtggtgtgtgcagagcctgcagtgacgcggaaaactcctcgtcctgttaagttcagtaaaccacagccttagattctatgtgggttactatgtcagccagggggaaatactaacagagaaaacgctttgcaggaagcttgtagagcagaactgttcctacgggctccatttctgtgatttcctcccaggccgacctgacggtggcttccgtgcactcagattttggcaggtccacccacaaggattaaggaattctagttttgccattcatttcctaatttatgtttttattatgatatatgggattgtacatgttgaggaccccaaatccaaaaacaaaatgcgaaatgctccaattttttttttttctttttgagacgtagtctcactctggcacccaggacggagtccagtggcacagtctcggctcactgcaccctctgcctgccaggttcaagctattctcctgcctcagcctccctagtagctgggattacaggcaccagccaccatgcctggctaatttttgtatttttagtagaggtggggtttcatcatgttggccaggctggtctcgaactcctgaactcaagtgattcgc

SEQ ID NO: 44817 - DNA, 1039 bp, Homo sapiens
ttccattgccttcagatttgctccagcaacaacctcgtgtgtgcagatttatggtaactggcattgcaatgctcccatcagggcataactaagtaaaaattgtaatgaggtaaagcctttgaactttccatgtcagttgcacaggcattgctggccatagcattggacagcacataataaaatcagttaaaagatgttgcttacattatagtgatgtgtagcacagccacgttcggatcaattacagaccgccaagttgacggtggtcctgtaagattataaaactgttttccctgtgtctttttcatgcttagaaatgtgtagatacacaaacaccattgtgttacaattgcctgcggtattgtgcacgctgcacaggtgtgcagtctggagcaggagtctgtgcagtggagcacaggtgtgtagcaggctgcaccgcctaggtgtgtaggtgccctgtgtgatgtttgcacagtgatgaagttatctaactatcatttctcagaacctgtctgcatctgaaccattcgtgactgtatttaagccagcattgggcttgggaggaggggagaaagcttaaatgttgtggctctgagactaaagaaattcccagggagcaggactctgtgttgactgatgtctgggcctaacttgaacctcagagcaccttgctctgggtggatggaagaatccggaaaggtggtttggagcttatcgcatcatttgtaaactccaatacaaacccgcttcaatggggtttccatatgttccggtacaggtagcaaccttggcagtgggagcccagcaggtcccgtctttgtccctgtgctgatacagagagactctccgtgctgtggacgcctccatctgggcacatgtttcagttgttttctaaataccaagagcacagattgctcagtaataatagctctcctgcaaatctggaatcacttaggcagctgcagtgcctctaagcctccttgcatccaaggctgtgatcaaggaggactggtgtctgagtgggcttgagaagggcccg

SEQ ID NO: 44818 - DNA, 1003 bp, Homo sapiens
atcagtggtcccctgggttgtcaggccttcagctttggactgagttattctattcgcttccctggttctgaggcctctgacaataaactgagccatgccactggcttctctggttctccagcttgcagatagcctgttgtgggattctcagcctcaataactgtgtgagccagttcccctagcaaatcccctctcatctaccggtctatctagcctttctgttggttctgcttctctggagaaccctggttaatacagctatggtaatatgttaagggatatacagcacaaaaagctgtcatttgtgacatcaaaaacataaaatgggtggggggcaggagttaaaagtatagagttattttattgaatcagttaaatcgtcagcttaaaatagactgttacaactataaggtattttatgtaagcctcatggtgaccacaaagcaaaaacctacagtaggtacacaaaaggtagaaagtcaagaatcaaagcataccacaagagaaagtctaatcataaaggaagacagcaagagaggaagaaaggaacaaaagacctacaaaacaaccagaaaacaattaagaaaatgggaatagtaagttcttacctatcataattaccttgaacataaatgcattcagttctccaatcaagagacatagagtgcatgaatgggttaaaaaaacatataagaccccactatatgctgcctacaagagacccactggcctttgaggaaacacaggttgagagtgaagggatgggaacagatactccacgcaaattgaaagcattagagagcagagggagctatgcttatataagataaaatccacttcaagttaaaactgtcaagcagcactcagaagctttgtacaatgcaagcagcattttataatgccaaaggggccaattcatcagaagtaaacttttagtatgagttgctgagcacttttttttttttttttagacaggatctcactgtgtcacccaggctggagt

SEQ ID NO: 44819 - DNA, 1044 bp, Homo sapiens
cttgctctgggggagagaaaccgggctcagctctgagtacagcaggaaagtgggagtgagaccaaggagtagggtagggcggatgggaaattactagggggagatgggggtgagggggttccggccgagcctccccagcagggttctggctgaaggcaggctggggccatcagacatccctggggatggaggggtgaggagcccatctgctatcgagggaggggcttgagttgggctgagctggtgggattcttactgttgagggcccaccaagcctggggcctggttgggaagagggttgaaaggagctgtctccggtttagtgagggagggggtctctgtccccatccagcctggtgtttagtgagggagggcgtctctgtccccgtccagcccagtgtttagtgagggagggtgtctctgtccctgtccagcccagtgtttagtgagggagggcgtctttgtcccctccagcctggtggttagtaagggactagtctttgtccccgtccagcctggcagaaagttgggctctgcctggcttctctccctctgtctggctcctgccctgtgccctcccccagcatccttaccaactcttcctcttcctgccttcccttcctcctgttcccgactctacctggggcggtggcttcagccagctcttcctgatgctcatcctggtggcctgagcatggcttctgcccggtggtgcccctccccgagtcagggggtccaccagctcctctgtgtgtgggactccctcctgcttcctcctcccaggagcctgcatggggcctggggcctttgtcctgctggaatggtccaccctctgcagattcactagagttgggtgttgaaaggcaataattgagattgaaatttgcagggcatcctacctcatttctccagataaatccgggtttctctaggaaagctctccttctggcgggctccttggccctgctcacagagagcttgctgtgtgcctggtgctatcctggatgttcgagaggcttcaggggccaagacaaggatgccgcc

SEQ ID NO: 44820 - DNA, 1050 bp, Homo sapiens
gtcccactctctggcatcaggaggcaattgatgagtgaaggacacagccagccacagcagctgtgggtgaggggagggggctgtggcccgttgtggtgtgaaatagatgccaggtggaccttcatggagatatcacatgagcaaggcttgaaggccagtagaggacccagagctgtggagtgggtgggccccctggcacaaaggctctgagaggtgcattgggggtcctgggctggggggttggcaggggacaagctgtcacaggcatagccagtggccctgcagatcacggggaccccgtgggccattgtaaggacattggctttgctggagggaggcggggagaccccagagggctgaggggagaaggaaggatgtaacattgacctctagaggatcactctgactgcagacaggctgcagggcctggcaggcctggtgggagcccttgctagaatccgggaaggaacacaggcctgggagcgggagggagcaggggagtgggaagaagtgggtgctctgggcagcttttgagggtagagccagcaggatttgctgctgggctcgactgggcattagtgaaagagaggggtccaagtattctcagagctgtggccatcacagcggggtaggcctgggttgggcagtggagttaggcacaggctgcaaaggatgcctctcctggggccctctccaagtttttcagagagaaactttctctccttggatttccaaaagttgtgggagttttaatagaccgtaggccgtcatgtctagaaagagaccacctgccttcattttggacagctcatgggtgtgtggggctgtctgctttctaccctgtgtgtgctgtgaatgtttaggggtaagtaggttggtctgagttccagatcagcttgttcccaagctgtgttctgataattgttttaaaaagaaaagaatgatatacctttctcaagaatgaaaaacgttgcgttgacatcggtgttggcaacatttaaactttacattgggcaccacatgggcttcgaacggaatggactaatttgt

SEQ ID NO: 44821 - DNA, 1049 bp, Homo sapiens
aaaaagaagctcccccttggtactattttattttaaatttgtaattgacactgttttatatgctcataagattttcccatgggactcatgatgtgagccctcattcttcaaagaatatgatgttctcatatttttatgaaagtatttataatagaacaatctatctggttttctatcagtaacatgctcactccccattcattctttgctgagtgattttagggtgaaacgttttttgtactttatttttagagcttgatgtttaaattttgatttaattaaattataaatccagcgtcatcaccacttataatttgaggacatgaggccccagctgcccatgagaattgatatggcacttaaccttatggctgcccatctttaagacaggacagaaccagcttctcccaggaggttgttttaggggccttcaaacagagactctgggatgccaaagggcgccatggacgtttgtataaattgagaccagagaagactctctccatctattctgggaacctgtcagaacaggaaataaaacccttgcctctccctcacttgcttgcaagttctcacagcatgaagcaaaggctggaattagactgggggtgagctgagtgcctgtgtggggcctcgggaaggggaggaagacgggggtcctttggaaactgcccatgggccaaagctgtgatttgcctccaaatcccaagtggacacaggctaagctgaggaagtctccgcgagagtggccgcccttcctcctgcatctgctccgtcgtctgcccaggccccctgcttcccggcctcggggcaggcagggggcaaaccctgggaggcagggcaagggtgcccttacctccctcccagggcaggtctttgcgtttgtttataacctacacagggacctgtgttccaacacacttcatacagtatgaaacaaggtcgaaagagaaaaggtgagacagcgggaaccataaacagaaggcctaacttacccgtgcccaccgtgggggtgaccgcgagctccttagcggggcgcctcctgcatg

SEQ ID NO: 44822 - DNA, 1050 bp, Homo sapiens
tacccacaatgtgtttattatatagtcagtagataagaatgatcgggctggtctcatgaaggcaccagtttggaaggagaatttgaggctggcagctgcaggtgtgtaaaagccttggcaggccaggcacggtggctcatgcctgtaatcccagcatgttgggaggccgaggcaggtgaatcacgaggtcaggagtttgagaccagcctgagcaacatggtgaaaccctgtctctactaaaaatacaaaaaattagctgggtgtggtggtgcgcacctgtaatcccagctactcaggaggctgaggcaggagaattgcttgaacctgggaagcggaggtttcagtgagccaagatcacgccactgcacttcagcccgggtgacagtgtgagactccatctcaacaaaaaagagcctcggcaactatttttgccctggattttcttcttatttcttcttattgcccagtgtttcttcttattctctattcttctcattgcccaatattgaaaaaaatcctgaatccaagacaagtagtttcaaatgaaaacatttttaccttgacatctcagaatattatccaattacatagaggtagtaggagaagctctgcctgaggccccggtacccatgagttaagtggctgcgtaaggttcatgttgggcttcgtgcctgacaggtgtgtgatgagctgagtctacactgacaccacagtttaaaaacggctaaaacacacggaggaagaaatgtgcagcacacgggggagattccagttgagagccgtggggcgcagtgtgaacgctgttgatgttacttaacaggcagcagcagggttttcaaggggttggctggagccctgtccatgtagcccacactcccgctcctcgagtacaagggtgggtcaaggcgttcacccttcctcactgaggaactggtcatgacggtgacctgctgggcttggggacagcccgtgccctggtccagccgggtcacatcccgtgagtcctgccctggtccagcagggtcacgtgcagcggttcctgcacgggaa

SEQ ID NO: 44823 - DNA, 1046 bp, Homo sapiens
cagaataagaaacttaaaacatgattccagtacagggaaatggttagtgaatatttattgactatatatgataaataataattgcttacacggactgaatatctatcatacacaaagcatctgtgctaagttgtccacctagagttttccatgtagtgcctgcaatagtgctgtggggtgggaattatcatccccatcttacaaatagaaaaacaaagtcttacaggggttaaggaggttgattaagaccataaaatctgtgaggtttcaaagtcccagtattcgagcctagtccatctgacttccaagtcttggcctgtaaccactgcagtgtaattactgctaattaagttttacatacacgggttcttttagataagaaatggcatactgttggataatagacctctgatccagaggaggcccagaaagtacaaaagcaaaggtgaactcacagaacaagtggctttggcaccacgtgtagtcagctcctgctataattaggtgctgtgaccttactgtcggactctacatgttgagctaattaactagaattgaaaatgaaggatgtatgttatccataaaaattttttatggcgcgttcagggtgatttttgcttctgctgcaggagagaaaaagtggagcctggcagttctgaccctgatccctgtgtttctcaggttcgtggtgcacggcttaaccacgggagagcagtacatcttccgagtcaaggcggtcaatgctgtggggatgagtgaaaattcccaggaatcagacgtcataaaagtgcaggccgcactcagtaagtcactcacaggctgttgtgtgccgattgctcccatacactgtcatttctgcatgaataaacatttgtgatgccatttggaatgtcattgaaggggaaaaggggactaaattcctgaacagagaacttgagtttctttgaagcctcttggttggctgcttgtcttggaaatgacagtgtgagagggagaaatgataatacactaataaaacgcaaattaaaaatagaaaacattgttag

SEQ ID NO: 44824 - DNA, 1061 bp, Homo sapiens
atgagggtgtgtggataaatgagtgggagagtgaacacgtgttatgtgtgtatgtgtggatgggtctgtagataaatgaatgggagagtgtgcatgtgttacgtgtacatgtatgtatgggtatgtggataaatgtatgggagagtgtgcatggattatgtgtttatgcatgggtgtctgaataaatgagtgggagagtgtgcatgtattatgtgtggatgtgtggatgggtgtatggataaatgcatgtattatgtgttcatgtatgggtgggtgggtgtgtgtgtaaatgaatgggagattgcgcatgtattgtgtgtatggatggacgggtgtgtggataaatgagtgggagagtgtgcatgttttatgtgtatatgtgtatatggataaatgagtgagagagtgtgcatgtattatgtgtatatgtgtatgtatgtatgggtaaatggataaatgagtgggagagtgtacatatattatgtgcatatgtgtatgtatggatgggtgcatggataaatgagtgggagagcgtgcatgtgttatgtgtttatgtgtatgtatgtataggtatatggataaatgagtgggagagtgtgcatgtgttatgtgtatatgtgtatgtatggatgggtatatgaataaatgagtgggagagtgtgcatgtattctgtgtatatgtgtatgcatggatgggtgtatggataaatgagtgggagagtgtgcatgtattatgtgtatatgtgtatgtatgtagaggtgtatggataaatgagtgggagagcgtgcatgtattatgtgtatatgtgtatgtatgtagaggtatatggataaatgagtgggagagtgtgcatgtattagtgtatatgtgtatgtatggatgggtgtatggataaatgagtgggagagcatgcatgtgttatgtgtttatgtgtatgtatgtataggtatatggataaatgagtgggagagtgtgcatatattatgtgtatatgtgtatgtatgtacaggtatatggataaatgagtgggagatagtgcatgtgttatgtgtgcatgtat

SEQ ID NO: 44825 - DNA, 1251 bp, Homo sapiens
tgtaattgagaaattagcaatcgttttactttatcctaggctgaaagcatgttttaactaagcttcaagaatgcatttttttgcctccaatttaccagttataaaacgatatattcaatgggtttgccagaggaactggtaagagggatccataactctaaatagaaaggaaatttgggagcagactggatatatctactataaaacatagagcttaattaaattactttcaaattctttaattgacttaggctatggataaaagctaagaataaataggacacatgctcactgatttttttacgagctcgcctgtgaagtggtgaacctgttccctgctgtcctctgcctgctctgtccagagcggcgctcatgtacataaaggcttgtttctaaacaaacgattgaaggaccaataaatgtaactgagtgtgacctggagcccaccgtccgagggggtgacatgactttcctttttctaactcttccttctccaccaacctcttccgtccaaagaccttgaatctgacctgcacggtgtttggaaaccctgaccccgaagtgatttggttcaagaacgaccaggacatccagctcagcgagcacttctcggtgaaggtggagcaggccaagtacgtcagcatgaccatcaaaggcgtgacctccgaggactcgggcaagtacagcatcaacatcaagaataagtatggcggggagaagatcgacgtgacagtgagcgtgtacaaacacggggagaagatcccggacatggccccgccccagcaagccaagcccaagctcatccccgcgtctgcctcagcggcaggccagtgaaggcgttttcctagcctggagatgggaaaatatgcttggcagagacaggaatgctgtgtgcttgttccaaatgagcagctggcatccgagtggtgtcctgtgtgggctgatagttgatcacacattgtgcttttgatttttgcatttggtgatgaatattttatacccgtctaagggagaaagctaatgttttccacaagactgaacaacgtgtatttacacgagggtagacggcagatgcctgacagagagtgggttggcagacaacacactagcattttcacgggtgtgggcacatgggtgtggcacctggacgtgtgcagcatgtggcggtctgtgtgaagccaccgtgcttctctttggggggccgcgagatctagcatctctgaaatcctggctgtcgaggctttgaagcat

SEQ ID NO: 44826 - DNA, 1110 bp, Homo sapiens
gtggaggcagatagcacggagaaaggacactgtgaggtctcagcaaagacagcccttgagagcttcccagaggttgggttcctgatggggatggtggctacattactgtgttcatttggcaataattcgtagagttttgtatatatattatatatatatgtgtgtgtgcctgtatatatatatatatatatatagcttgttcactttccatgcgtgtgttatttattttaaaatactttatttatagagtagttttagtttcacagcaaaattgaacgcttcttctctacacactccctgcctcactcaggcacagcctcctcgttaaactgacatggcacactggcgggcgtgtctgatcaaaagctgcttgtgccccaggggccgtgttttagctagtcctcaatgtggtccattgtccaagccccacctctggagtcaagttccacctcctacttcactgttaatgaaaataataattgaatcatcttgaaaaagaaatctccaaatgatccagttacactgtttctcatagacatgcgcttgggtgcctaatagtccttgtaataagagggttatttttcacacctcgctgagacctcctgacccactgctccctagtgggtaatggagaggacgtggggaaagaatgtgggtcccagtcttctcatcacagcctcatcaccagctagtcctgtgaatttgagcaaatcctaaataattttgtatcacatttgtcagtcatgagaagggaatagccatatgtagctctgtgtttcattggatgtatgaaaaagtcaaatgagaaaatcacacaaacatgaagtataatatgtaaactatcatgtggattaaatgatacagtgagagctaattaggatcaccgtacctgcattaatgtaatgctgctgcttcttttttttttttttttgagatggagtctcgctctgtcgtccaggctagagtggcgaggtctctgctcgctgcaacctctgcctcctggtttcaagcgattctcctgcctcagcctcctgagtagctgggactacaggtgtgtgtggtctcaatctcttgacctcgtgatccgccaacctcggcctccccaagtgc

SEQ ID NO: 44827 - DNA, 1036 bp, Homo sapiens
aacagtaaggtctgggcctgacatttttatgttttcacttgagagccagcctacatgctatttctgtagtgaggaaaatgatttgaaactcagatgtgtcccgtggccctaatgactttattttctttttagttttaaatctgaagtagcacttgcaggtaatgtcctatctgggcagccctgcagacaggactgtcagtcgatgagagctgtcagtcgtgagttctgagtaatgtgaaggtgccaggtagaaggtacaaaggcaagaaaggtgggaaggcctggagcctgtgcgaagagcagcacggccttggtgtggcccggggatggatgcagaaccgcgagaagagagaggctgacttcagccacggccacgggctctggggttagactgctctcatctttggttttctgtaggttcattgtgattgttgtaccagggtattgtttttgttgtttatttacttgagagtcacaggccgtcctgtctttgatctgttctggaaacttctccactgtgatttcttttgcctgttttctcacgcctccattgctgggaacgcaatctcgtgtgctatcctttgcttctatagcccatgtctcatgattttcctctatttctttcctcttgtatctccttatttcattctggatgtcttctattggtttcttttccatttcacctttgactctttttaagtctattctgatgctaaatccatatactgagttttaacatgtattatttttcagtccctgctattccatttattttttttaattattttttgtagagatgggggtctctccacgttggccaggctggtctcgaacgcctggtctcaaacaatcctcctacctcgtcctcccagggtactgggattacaggcgggagccttcatgccctctatttgatttataaaaaccatttccagttctctgtcaaaattattaatcctatcttttatttatttgaacatattatgcatatttcttttgaaataactcccttttctggctcccctcaatttctgtt

SEQ ID NO: 44828 - DNA, 1027 bp, Homo sapiens
aaacagtgctcagaagaatgcagttccaagatgatctgtattgtataacataagtgttctgttttccagttatttactgataaacttgcacataacattcttggttgtgacagcagcgtctgtaaactgtcagtctgattctcagcctcgggttcatctttgcataggtgttctgtctaatcacaattatggatgtttagggtcttgctttggtccgttaagtgatgcaagtttaagtgataaagtttacaggctctaatctggagcatgtgggtcccgtcagcaccgagcacacgccctctgtggtggaagaggacacagtgcgcagccgtgactttcagtgcactgggcttaagtctttgaaaatagttcgagacagttcctcaggtggactgggatgtttagaaatctgctggtcggatcatcatggttgtggccttgagcgaatagcctgagcctttccagtagtaccatttaatgccgttgaacttatttgtgttctgcctctgtggatagtacattccgttcaagttggaaggaccacatgcatcaaaccaccagcctgtgaaagtaaaacacagaaggaattaggaactaggtgatgccagctcccaccacgaagacagcaatactcagctaaggcaggaggcacactgcaggcgtgtggagtaggcacatgcagatgatggtgagtataggatgtgcactggcagagggattgttttccagccatacacccatgacatcacagttccattacggcaaatgcttttacaagccttcttccaccttttcccttgtgctgtgtggagaggcctgaattctccacagtcctatttggtaagcccacagtgtgtacacacttacagcaggagtaagcaaacatctgaggcacagttggaaaactctccttcaaccaggattactttgcagtcccagcaacatggtgggctggactcgctcaggctccccttgctctattaaatgattttttcggttgaagtttaaactaaaatattaagtactc

SEQ ID NO: 44829 - DNA, 1057 bp, Homo sapiens
aagctgtgcttttaaagtcattgtgtatgcgtaactccagatacttagcgtttagtttctttttttttttttttttttttttaaataatctaatgatgggaaccattcttccattccctggtccaaagtataagctcgtgagtgcacaaaccatgttttcttccttttcacatagtgtaacaaacattgtttattacattgaataattgaaagatgattataaaactggttctggtgccctcctttaaaaacttagaattctttatagagaaaccattcgtggagtcagtcatcagacatgatttcccccaaaatgttaaccactaaataattctgtgctttctgtctttaagagtaggaaaataggatgggaagggtagagtttctctcttagagcttctttgttgatgcatttcatagattgtgtcttgtgactggtatcagatggttttaggattaggctggaactataagtttcctgtttccgatgccccctcgccatcgactctgccccacttctctaagctcccagctccctgcatgcccctcagcctggtcactaaggctgcctccctggcagtcgttctcccgtggatattggatgggtcagatgagcaggatgcatgagaggcacagtcagccctccatctgtggcctccacatctacgggttcaaccacaccatcaatatattttaaaaaaaaaataacaatacaacaataaaaaacaaaaattgtaaaacaatacagtatagcaactatttacatggcattgacattgtgttaggtattctaagcaacctcgagatgatttagagtatacgagaggatgtgtataggttatatgcagatctaccctgttttacggaagaggcttgagcaccgtggattttggtattctcgggaatcttggaatcagtcccccacagacatcaagggacagttgtactagagctccaagcatgtgtaaaatcattttgttgaaatgttactcaagccatccacccgcctcagccccccaaagtgctgggactacgagcgtgagccagcacatctggc

SEQ ID NO: 44830 - DNA, 1031 bp, Homo sapiens
ttggagtaagggagacagtctgaatattcaagggcaacccagcagtgttcaatgactgtcagccactggaagaattcatagctcaaagcagttcaccgtttcaacagtatcagcttgtacctctgtaaagctaggtttttggtggttgctgtttgtgaaaagcaagtgctacaggaaaattagcatagagcgtaaaatgcaggtggcagtgtccaatttgattccaaagtttgagaagccaggtgtgcctaactggcaaatatattccattcatacgtcactggggttacttaagaaagaaaataaaggatctttttttaaaactcaatttatatgtatattggtattttcaaatagctactaaattgtcagaacataaatacttaaattatttggagctaaccgcttaatacaagcaactgttggcctagagataaatagagaaaaaatagtgaatcactaagggtcccatgagctgagaaagtttgagaacaactagcctagaagcttgcacttggtaggatataaactcaacgtaccctcttcctccccttcccccaatccaagtattgcctttaattgtaatctctatgatttgatatgtttatcggaaagcgagtaagtcaaaaagaactaataaattgtgtaagaccttcattaagatgtacccttccgtgttttcctaacttctgaaatcactaggaaaaacagccatgttccttgcaagctggctggttagtcctgtcttctttcaggtgaacagcatttataaccacggtgtacctcggaagaagcgttctcagagcaacatgcacgtgttccgtgtgtaccgtggttgccttcgggctaatgcgtttttggaagtgtagataggtgccagttttacaaaactcatgtggcctatttctgcttgtaatttatagtttgcctcctcaccatcctcacttgctctaaggtgaactagttttataccattagattatacagaaaagtcaaatttacttgcatgccacagcaattcgggaagtaaa

SEQ ID NO: 44831 - DNA, 1083 bp, Homo sapiens
acatatatacagggagagatagaatggtttgcctgctgacttgccattaagtaccgtaaacatcctggaaattgtgaacagctaattggaaaacagtctgtccgtgttcatgattcattgtatgcatcctctagatctcaactcaggaaatccacaaagctgaccaggccctgctgtcattttgtggccagatatggaaagatataaaccacctcctttcttccctgtcaaaacagttgtgccacgtcctccccctcttcctcatcttgactgactccctcacaggtggtgtctctgtctctcctgcccctgcccccacacgcacctttagttacctcagtctttcaaattttgctctttgttcctaagtacagtcttccttccaacctctcgtcatgtcatttttgggccaggaaagatcctgattatgctataatgccactgtacgtgttttaaaaagaaggaacgctgtacatttgatattaaatttggcattttaaataaagggctggtaaaaaaatctctgagtgctaatctccaagaaagggatggaagactggggaaagagaatctacttcctatttccaccattttaatagcctgacatatttttttaccttgcccatatcttactttcataacatttttgttttattttttaaattactcccatggcggtagagttgatttgaactcttgtttttcaattttaaatgtacaaaatttcaattattttatggattaaaataagcaccccagaccatcctgagcatctgatcaccaatggtaagaccattatccttctcaagtttcatctacggtaactggcttacagataaacttgtggattacaacctgtttgacaactgtaaagagccacattgattaaaatcagaagattttcagagttcagtatttagactatatggattatctagtgtctcaatagaaggtaaggttatggaaatccatttcctagttctaaactctgcaagcaaacaatcatctccccatagtgtgatatctaaatagttaatccagtatgtcagacaaccccatttagtaaacaaagactacttgacc

SEQ ID NO: 44832 - DNA, 1035 bp, Homo sapiens
gtttgggttctgttctaaggataaatggaagtcacagaacgattttaagtgggaggattaggctgcggtatatgtttgtttactctgtttgtgtttatttttgttttaatggatacagagtctcccaatgttgcccaggctggttttgaactcctgggctcaacggatcctcctaactcggcctctcaaagtgctgacacatgtttttttaatggaagcagagaaagcagtctcggacctttgcagtggttcaggtgattagtgatgggggttaggaccagggacgtatcgatggaggtgttgtgaagttgtcatattttaaatatacatttcagagccaggtgcactcgctgatacattggatgtggcatattagagaaagaagactcgaaggtggcacctagtcttgtgttctgagcttccagaatgaggcatctagaagccaggacccgggagaagcacggaaggagcagtggtttattcagtctgcagaagcagtgcctacaggactgctgtgtgaaagaggacacatgtgatatgagcagatgaaaatcacacagcaggcagctctgggctcattatgagaaacgactctaggaatatttgtaacctgctgggctctactgctaagggctgccttaagccatgaagccgcagaggctgggtgaccaccgtcccacagtgagggagctgggcaattccttaccagagtggagatgtggctagatctcctagccctaacatgcttacttattttgataagcaaagatgaagctcacatgggtcccgtgtgctcttgaacttctgtacattgtaccattaaccacacttggatgctggcaatcgcagttttagttaaataaagtgacttgcccaccatactataaaaaattaattttggtagcatgttgattctgtatcctaaccataagaccacacagagccatggctagtaaactttagcttgtgcgtaaatgcctgccaagacctgctaaatactgttgcttacatttaaaaaaaaaaaaaaaaattttt

SEQ ID NO: 44833 - DNA, 1048 bp, Homo sapiens
tcgtgaattacctgtcctgatcccttaactgttttgaaattgggttatttatatttttcacatggttttacagcaatgtttacataatatggacattaaacttttgttgtgttataaaactctgtctctttagctgtgcttatggtgtcttaagtattaccaagtttttaatttttaactattattttttacaaaattaaacacctcttttcctccatggcacctacccttgtggttttgcttagaaaggccttcctcaccctctgagctttaaaaataatctcatattctcctatttatagttttaaaaaatatttagacctttaatgcatgtgcatttcacttactgtataatgtgaggggaccatgttgtttttaataactaatttattgacactgacctatattgccccctgtgagtcatctcttacattcccacatggtatgggtgtgtttctggttattctcgtccattgatctgtttgtctattctgtgctgacctctattttactgctataattgtacagactgttttgatatctggtatgtcaaattttttctcatcatttctctttttaaaaatcatcttcctatgcatttttttctttcctataaactttagaataaacatgtcgttttctttttgaaaagtttgaaatttttggattacattgaatttctagatgaatttggaaagagcatcattttttctgcatttttttatgatttttcaaaactgacacctagtcagaaaactaagtgtaaaaattgaatccatagagtttttacaacctggaagaaaatacaaatgtggctgaatgactttaaaccctgagtatcggaaaaggcttccacctacctatgactcaaaagccagatgcaataagacaaagtgttgatataatttgaatacataagaaattgaaacttatacatggcaaaagtttgcataagaaaagtcaagccaggtgtggtgggttatgtctataatcccagcattttggaagactgaggcacaggaagattgcttgagcccaggagttcgag

SEQ ID NO: 44834 - DNA, 1026 bp, Homo sapiens
atatgttgtacttcattttaccctttcaacaatcctattagtagcttactgtgggtctgcaaagccttactcaaaacatatagggctagaggttctcaggattctgaattttaaaaaaaatttgtaaaggcttatggctctcaccactgttattcaacgttgcattaaagtttctacccagagaaggcaataaaaggaaattaaagctatacagattggaagtgaagaaataaaagtctttattctcaagaatacaagacactatgtatagaaattgtaaggaatgcaaaaaaaaaaaaaaaaaaaagccctacaagaacttataacaagtttagcaagattgcaatatacaatcttgcaatcttcctaaagattatatacaaacctaacagaattgtatttatatatactgtcaataagcaattcaaaatgaaattaagaccacgattccatttaaaattgcatctaaaaataaacaaaataggaatagacttggcaacagttgtaacatctgtatactgaaacctgtaaaacattgctgaaagaagttaaagacttctttaaatagagacatatacaaagttcatagattagaagatgcaatattgttaagatgatagtcctcaaattgacgtatagattcaatgcaatccattaaaatctcagatggctttttatagaatttgaaaagctgatgctaaatcttttatgaaaatgcaaagaacctctagtagacaaaacaatttttttaagagcaaagttggaggatttatagaacctgattccaaaactgtcagtaaaactacaataattacaaagtatcagccaggtgccgtggctcacatctgtaataccagctctctgggaggctgaggcgggtggatcacttgaagtcgggagtttaagaccagcctggccaacttggtgaaaccttgtctctactagaaatacaaaaaattagccaggcatgatggcacacacctgtaatctcagttactcaggaggctgaagcagaatagcttgaac

SEQ ID NO: 44835 - DNA, 1036 bp, Homo sapiens
aatcagtaggtgtgtgtgtcttttacgtctcaggaattgataagctcacctggaaggagaaagcaacagagccccaagctttagccatagggaactccaaacattagatctggtaaatgtagagaagctgtgtctggcaaaagaaatacttcagctgagttaaatttaaaggaccttcattgggtaatgaacggcaaatcaggcagcccccagaatcacagcgaatttagagagaccccagcacagccgaagaagatttatagaccaaacaaagggaggtaatgtacagaaatcaggggtaatgtacagaaacaactgggttggttacagctcagcatttgccttatttaaacacagtttgaacactcagcagtgtataaatggttgaagtatggctgctgggattagccgagactcagctattgttacaggtgcatactcctaagttaggttctcaatcttgtctacctattaagttagattgcagttcgtccacaaggactcgaatataaaagtactggagtccttctctggccatatttagtttgctttaacactacccaagatagagagttcaaagtcacaaaatctaagaagaaaacatatttcaagaagtcactggttagttaactgttgaaagctagctgagaacaatagatctgagtagaacctctttaggggatcacattgctgagaagtaaagctctttgtcaaccaaaaatcaagatcccaaacatctctcatctctgctcccttccctccaatgtgattgttcctccccttctttgcttctctttgttctttaaatttatttttctatattcaactcaattctttttccttctcttccacctcctatgttcccttcctttctggaggcccaaatgatttcattaaaatcaaggtgtcagcagagattccttactttctggaggcgctgggtgggaatgcgtctcttgtctcttctgggatctaaaggtaccgccttccttggctcatggccccttcctccatcttcaaagccagcaacggcagg

SEQ ID NO: 44836 - DNA, 1051 bp, Homo sapiens
aaaatttcaataattcaggctaattttttccctttatatggtaactccaccaagtttgtctaaatgtatgatttttatcatgattaagtttttacttccacatcatgtgacaactggcctgggatgggatataagctcagaacacaaagtcattcacctcttaaaaaaataattctatctgtggcgggttatgttatttttgttcaaagaggacacaatatgatgcagaatacaccattgaaggattttttggtttggcaagttcttatttttttaaatggctgtaaaacctagcagtgtttctgaaattgcataccttacctgatgttcagagatccgatttacttcttgatttcccagcaagtgattttgaaaacatttaatctaatcattccccccaccgtctgttcaaatcaaaggaagtggcatccagcactaattttcatgcatttatgaaaggatgcctgaggacccttaagtataattcaaaattttgtttaatgtgtgttccttgatgaagttctttaggagtcgtagaacgaactgattgcccactgatcatcaaatgcaagttatgaacatttaataaaaatttaaaaccaagagtttcttgttcctgcatttttatttttattgtatggaggggacaaataattattttctgtttagtaacagagcagggtattttgaatttattagggtctttttctgcaatctgggtttcctgtgtacacaaagctacctttcaatattttttattgtttctgttaagattaaatcaatagaggaataaatagctatcttcaaacataagacccaaaggaaaaagatttatagtgatgttctgtcaccttattttttacctgtgactttgtaccattaactttgtcactgagatgttttgattaaaatttttagcttgcttttcttgttttgttaggacactctttttttcttgaattgtttttatcagctttcgtttgcaaggctagtgatgattctcttgttctgtataaagtattgttgactcatttctgaagggagttttagt

SEQ ID NO: 44837 - DNA, 1463 bp, Homo sapiens
ttccttggcttggggccccatcactttaacctctgccttacagtccttgctgccacctcttctgtctcacatctcactctccctttctcttagaaggatgcttgtcattgggtttagagcccacctggatattccgggatgatctcttcatctcaagatccttaattataactgcaaagagcctttttccaaataagaaaacattcacaggttccagggcttaggatgtggacacattttttgaggggctgcccttcattcccccacaacaatgaactccatagttctgcctattcagtattttgtagttatttcgtagtttaacttgccttatttctttaggtatttacgtattaaagcattttggtctctgctttctttaacagagaacctggttttctgtaataagtttacttactttcccataatcttttagtttcttatttacagatttaccttcacatatcccttaagtagaacatttgattaactgttttattttcggaacaaatctgcattctgtataataaccaacttattcatatttcggtattcttttaattcttatctgattctgaaattaccatcttgtgattatatatatatatatatggaaataactgaaatcctgataaattaaaggtgatataacttctaagacaattaattatgtatgatgtggtgaatatactggtgtttggtttgtttgccacttaaaagccctatctataggataggaagtaacttgaatgtggaatgcttagagactcagagtaagaggccgtatatatatccttgagctggagtttaaggaaaacttatgggaaattaaaaggaaagttggagtactgacagaggattgggtaggactcatgaaaaaggaatgaagttaccttaaattctatcatcgtgagttaacgtgaaactagatttatgttagtttatagcctagaattctatcctaggaatctagatatatcctaaatgttgagatagctgcataaacaataactgtaatcgttatgataaataatgacaaatctttttagcatgttctgtgaagctgataaatgttaataggatgtcttcaaatgtcagaattcttttttctttgcttcttttttaaaaaatttcttttcccccattcctatgcaatacactgaaaactgatcattgaaatttgtaggccaaaaaattaatcaacacgtaatagattggggtttgggtttttttgagtcagggtcttcttctgtcacccaggctctggtgcggtggcaccatcattgctcattgcagccttgaatgcctgggttcaagtgatcctccggagtagctgccgtgccattatttctagctaatttttaaaagtttttgtagaaatggggtctttctgtgttgcccaggctggtcttgaattcctggcctcaggtgatccttctgccttggcctcccaaagtgctggg

SEQ ID NO: 44838 - DNA, 1029 bp, Homo sapiens
gaacctttatcattttattatacttgcagttctcttaaattccctgcttgataattccaacatctgggccatatctgagtctgcaaattttgattactttatctcttcagattgtgctttatcttgcctttgtcatacttcctaagattttgcctaacgctgggccttttttgtaagacaggagaaatggaggcaagttgtcttgatacctggaaatggatagacttgtctttctgcttggcctttagtgttgaggagtggagtcagtccactgaggaggtgcactgcatttgggttttgctcatgtgctttttctcacagcttcaggtttctgtagaactcattactttgtttgtaggttggggatgtcctcccgctagagcttttcctcagtgtctatttcacactcagcgttttcacatagcaccttggagtggctctcttctttatgcctttccccactatacttcttggatacttgttactgaactctcgctagtttggtggtagaaggagagggaagggaagtgtcttttcattcttagggagaatctcaggggtggagccttctctgatcctgccttgcttctggctgtaagtctgtgcccagtatgtattcctgcctttactaagagtttttccctgttctcttcacccagcctcatcgagtattcatccgtgccccatgggtagcagggttttgttgcccctgttcatcagtttcaggctgctgttccataggaaaggtagaaagaaggatgtgggctgggccctgagcccttcccacagggctgcttttccctcccacaagcctacatccagtcttccctgaccgcagtgtgttttcctttttctttgtcttgtgagtacacaggaggtctgtgggtcgagcctgtgaaatgtgctgcattctccttgtgtctgtagcccaggggttcgtctgttccactggctcatacttggctttctgcaaaattgttaaaatttttagctaaattctttttactggtatctgttacattggccccc

SEQ ID NO: 44839 - DNA, 1028 bp, Homo sapiens
gtaactactgtgagagatcatttgtttatataatggaaacaaagatgaggaaagaacctggcttagatcagagaactgatgtatttagattcttttttttttttttttttaagacggagtgttgctctgttgcccagactggagtacagtggctcaatctcggctcactgcaacctccatttccctggttcaagcaattatcctgcctcagcctcccaagtatttgggattacaggcgtgttccaccacacctggctaattttttgtatttttagtagagacggggtttcgccatgttggccaggctggtctcgaaatcctgacctcagatgatccacccgccttggcctcccaaagtgctgggattacaggcgcgagccaccgcgcctggcccaatgtatttggattcttaaagaacactttcaaattaaatatcagttgaagagaactagaactaaagaatttctgtgtcaaactgtttagcaaatgtaagtagaagctgggagatgtgtcctggaatgaatgaatacatcagtaaaataccatacgtatgttatgatgttattgtttccttgccttggttgatttggttttactgtgaaataattttcaatatagaattgtgatcgttggaatttggtcatctagtagaaaatgagaaagaagttaatagctatcttccttaaagatttctgaggttgggattaaggtagtgttcccaaggtgttctaaaacggcagcgagagctgtgcactcacttcacaaatttgaattcctgctctgtgttaggcgctgtgctaggggcttagcttagcacagttatttccagaggttcctgtgtatggtgtgaagaaagcttcacaaagactgtagtgaagccaaagatatagtagggaatgaaagcaaggcatcaccacttcctgtgaggacacgttactgcacaggcacccgagctgtgtcatctctaccatgtgccttgttcaggttttggcagagcccctaagcatatgcccaggaagggatctatg

SEQ ID NO: 44840 - DNA, 1083 bp, Homo sapiens
aggatattggtctaaaattctcttttttggttgtgtctctgccaggctttggtatcaggatgatgttggcctcataaaatgagttagggaggattccctctttttctattgattggaatagtttcagaaggaatggtaccagctcctccttgtacctctggcagaattcggctgtgaatccatctggtcctgcactttttttggctggtaagctattgattattgccacaatttcagagcctgttattggtctactcagagattcaacttcttcctggtttagtcttgggagggtgtatgtgtcgaggaatttatccatttcttctagattttctggtttatttgcgtagagttgtttgtaatattctctgatggtagtttgtatttctgtgggatcagtggtgatatcccctttatcattttttattgcatctatttgattcttctctcttttcttctttactagttttgctagcagtctatcaatttggttgatcttttcaaaaaaccagctcctggattcattaatattttaaagggtttttgtgtctctatttccttcagttctgctctgattttagttatttcttgcctcctgctagcttttgaatgtgtttgctcttgcttttctagttcttttaattgtgatgttagggtgtcaattttggatctttcctgctttctcttgtgagcatttagtgctataaatttccctctacacactactttgaatgtgtcccagagattctggtatgttgtgtctttgttctcgttggtttcaaagaacatctttatttctgccttcatttcgttatgtacccagtagtcattcaggagcaggttgttcagtttccatgtagttgagcggttttgagtgagtttcttaatcctgagttctagcttgattgctctgtggtctgcgagacagtttgttataatttctgttcttttacatttgctgaggagtgctttacttccaactatgtggtcaattttggaataggtgtggtgtggtgctgaaaagaatgtatattctgttgagttggggtggagagttctgtagatgtctattaggtctgcttg

SEQ ID NO: 44841 - DNA, 1034 bp, Homo sapiens
gtttggttttctaggttaggcagttctgatggggtttctggaacaggcagttcacactggagtccctccttctggatcacatggaggagagccacagggaagctctgagcagggggccgctcggctctaagctggtgttggcctctttagtttgattgtcttcctgcaagacaaactcaaacttcaccctcttcccttgcagaaggagagctggttgtaatgaagtttcttcctctggccaaggctaccttctcatctctccccttatgcagaacactctcctcgatggaccaacttttctcttttcccactagacgtgttcctgggacgtttccaaagggcactcctcagaaagtgagcccccagtgtggcccttggagggtgagggtctgggccagcttgggcccaccctgcagagctacaactgccagattggggtgctgttagcgactctccaagtatccctcaggttttccttgattctaaagatttaagaaacattttatttattactgattttcattgtaattctgtgagcagctttcctgatgtctcagtggcttatttgcaagcagcagacgctggctctcgctgaccaaggaagggaagagtttattcggaggatatcagggttggtggggggtggtggcattgctggagaacccagcttgaggctcagtttccaggaatgacatccaccctacactgtcacggtggtccaatgagaaccccatactgcagccacatggcatgagacacccagagtggagtgaccctcagccactctaccgctggcagaatgccattctgcacccaaacatgaacctgccgtatactcccacttcaaccctgccagagaaagacagagagagatccagaaagatggacaaacaaaaacagagacagaggaagagacagagacatgcagagagacagtagagagacacagagaaacagagagatagaaacagacagagagagatggaaatagagagagagagagagatagagagaaatagattcagagagacaga

SEQ ID NO: 44842 - DNA, 1050 bp, Homo sapiens
atcggggcttggtggcatgcgcctgtattctcagctactctgaaggctgagatgggaggatagcttgaggccaggagtaatttgaggctgcagtgaactatgattgtgatactgcactccagcctggactggagagcaagaccctgtctctcatacatacatacatacatacatacatgcatacatgcatacatacatacacacatgcgcacatacatacatatccaggctatacctctggtgattctgactcagtagggtggggtatcccctagggatcctgctgttcagcctggtctgggatccacttttcattgggaactgagacactggctgtgagcctttctgtcctgtgatgtagaggtcatggcgacgcaggttcaagcttaaggagacctgactgtgcgttaggtattgtgctgaacatcatctcttactctcacagcaacatccttagaaggttaatgatgtgtccccgctctacagatgagaaactgagctttgagaggagtttagcttgttcaaaacttattcttcctattggaaaatttgtaccctttgagcagtgtctcctatccgctacctttcctccaccccagcccctgataaacactgtcttactctctatttctgtgagttcaacttctttagattccacatataagtaaaatcatgcagtattagtctttctgtgcctggcttatttcacttaacacaatgtctttcaagttcatctatgttgttgaaaatgacaggcttgctttcttttttaagggttaatagtattccgttgtgtgtatatagtacatttgctttatcctttcatccactgacggacacgtaggttgattctatatcttgggtattgtgaatagtgctgcagtgaacataggaatgtagggatcccttcgacatattgatttcgatttttttttgtctatacccagaagttgggttgctggattatatgctttgaaatctataacacagcagcgtgactatagtcaataataacgtatctttcaaaataactaaaaggctacatttcaa

SEQ ID NO: 44843 - DNA, 1050 bp, Homo sapiens; identical to SEQ ID NO: 44842

SEQ ID NO: 44844 - DNA, 1050 bp, Homo sapiens; identical to SEQ ID NO: 44842

SEQ ID NO: 44845 - DNA, 1050 bp, Homo sapiens; identical to SEQ ID NO: 44842

SEQ ID NO: 44846 - DNA, 1050 bp, Homo sapiens; identical to SEQ ID NO: 44842

SEQ ID NO: 44847 - DNA, 1050 bp, Homo sapiens; identical to SEQ ID NO: 44842

SEQ ID NO: 44848 - DNA, 1079 bp, Homo sapiens
ctcctgcctcctgagtagctgggattacaggcccatgccatcactgtctggctaatttttgtacttagtagagacagtatttcaccatgttagccaggttggtcttgaactcctgacctcaaatgatccacccgccttggcctcccaaagtgctgggatgacaggcatgagccaccatgtctggccacagtgaggcttattcttggtcacgttgcatgtctgggctgtgttagggcattgtggggtggtctgttcattgtgttcactcagggatccaggctgacaaaagccccatctctgcatgtgtccttgatcaccacttcaggggaaagagaatgtggtggatcatagagcctcttaacacttccacctggaggtgactcaagttgctcctgctcatggttcattggacaaaacagatcaaagagtcatgggcaacttctctgtgcctggaagaggaaccaaaatatgaatatctacattgactttccctagctattacacagaaggtctcatttaaatgcagttacttatttgtgttttgaagctaactgtagtccatcaaacttcacagaagatatgtgcacttccaagctattactaagcacaattttttttttttttttttttttttttttttttttttttttgagacagagtctcactctcttgcccaggctggagtgcagtggcatgatcatggataacagcaacttctgcctcctgggttcaagtgattttcatgcctcagcctcccaaagtgctgggactacagacaaccaccaccgcacctggctaagttttgtatttttagtagggatggggtttcaccatgttggcctggctggtctggaactcctgacctcaggtgatccacctgtctcagcctcccaaagtgctgagatgacaggcgtgagccgctgtgcccggccttgagtatgatttttgattgggaaggtcagagttagggttttagtctgaggacagtatgatgtgaaggtgaaaagcagagcttggctgtgagtttgctgggattcctgtgctgcttctacagctctttggctgtgtgaccatcacct

SEQ ID NO: 44849 - DNA, 1079 bp, Homo sapiens; identical to SEQ ID NO: 44848

SEQ ID NO: 44850 - DNA, 1079 bp, Homo sapiens; identical to SEQ ID NO: 44848

SEQ ID NO: 44851 - DNA, 1079 bp, Homo sapiens; identical to SEQ ID NO: 44848

SEQ ID NO: 44852 - DNA, 1079 bp, Homo sapiens; identical to SEQ ID NO: 44848

SEQ ID NO: 44853 - DNA, 1079 bp, Homo sapiens; identical to SEQ ID NO: 44848

SEQ ID NO: 44854 - DNA, 1048 bp, Homo sapiens
atcaagcacttcaacaacaataacatgtgttgtggggttgttgggcatttgtccaataggtaacacacactacctgcttcacaaggacctggtgcccagtcctcaaagaatacttgacagggccaggcgcagtggctcaaacctgtaatcccagcactttgggaggctgaggcgggtggatccgaggtcagaagttcgagaccagcctggccaatatggtgaaaccgtgtctctactaaaaatacaaaaattgggccgggcatggtggctcatgcctgtaatcccagcactatgggaggctgaggcgggtggatcacctgaggtcaggagtttgagaccagcctggccaacatggtgcaactccatctttactaaaaatacaaaaattagcggggtgtggcagtgggcgcctgtaatcccagctactcgggaggctgaggcaggagaatctcttgaacccaggaggtgggggttgtagtgagccgagattgcggcattgcactccagcctgggcaacaagaacgaaactctgtctcaaaaaaaagtacaaaaattagccggacatggtggcgcatgcctgtagtcgcagctacttgggcagctgaggcaggagaattgcttgaacccaggaggtggaggttgcagtgagccaagatcgtgccactgattccagcctgggtgacagagctcaaaaaaaataagataaaacatagatacagaaaaccacaaaggaaaaacatagcatattgaatcatcacaaggcagccaccccttcatagccacacccagcccctggccaccgctgacctttgctccatcaccagaattctgttgtctcaggaatgttggataaatggaatcctgtgtggcctgagatgagtgtctttcatgccgcatgacaaccttgaggcccgtgcaagcttttggcatgtcaacagttagctgcttctcattgctgactggcaattggtcctgtcatggtttatttggccatgtggtggatggctatttgtcttctaagccacttgccttctgattgctggactga

SEQ ID NO: 44855 - DNA, 1035 bp, Homo sapiens
cagcaggctcggtctaagataaaaccagacggtggacaacaggccaggtaagacccacatggtctgcactccctggttctgttattgtgtggaggaatgtcttagtctgttgctcctgtgggtgtagctaaagcacaaaccaggagtcctcatccttagaaagcagttagacagacatctgagaaccaatcccaaactgcagccttccacagaaccttctggaaccttctggaatgcaacttattactgccagagggtctttgatgagagtctactctccaccatttgtcttcagagagaatacccacctattctctttccgtggaaaggtaagttattggagtttatgcagtctggtatattaattgagagctttacttcaaagaatgtcacgtttatggttcagtctcacagactgggttaaaaaggcagtgttgactattaagttgtaaattactatgatgatcattattattgaagcaagctgtgagaaatgagcattatcttacaatatctgcattttagtgaacctgaaggaagagtgtattgctggaattacagaagcctgagaaccacaggggaattctcactgcagggtattcagggtcaaaagctgattctattttgcatgctcaatccttcgtcaatttatttttatttctttctttattttttgagacagggtcttactctgtcgcccaggctggaaggccttggtgcaatctcagctcactgcaacctcgcctcccgggttcaagtgattctcctgcctcagcctcccacgtgactgggattacaggtgctcaccaccatgcctggctgattcttgtacttttagtagagacggggttttgccatgttgcccaggctggtcttgaactcctgacctcaagtgatccgcctgcctcagtgcctaaagtgctaggattataggtgtgagccactgcacctggcctaatttaacagaatttaactgagcaaagaatgattcacaaatcagactcaaaaattagacacagaaacaaaataggttca

SEQ ID NO: 44856 - DNA, 1075 bp, Homo sapiens
aaaagaaaaatagatacaaatgaggaagtaattactgaaaaagaaatccttttttcataatgagcaagaaaaagcacaaaaactttgacctctgagatctaggactagaaaccctgaccctctccatagttcaacctttgcatctcactgggagcttccagaaccctgattgcctgaatcccttccttcactggtggtggtgttggatccttgtcactagatgacttaagctcctttaaagtgttgctttccccctccttgctgcaggctgttgggacaacatttgctatacgttctcagaagcaaggaagctggtgtcatcattcagcacccctgttcaaacactccctttaataattcctcctgtttcgtctggctcattgggtgttgcccataaaaacagtttggcttttgtaattacaattagagcaggcggcatgactaatcagtcagttcactgcatctcttgttatcttctgtgaagtgagtcagtttcaactttgcctttgtgcttatgtgtcattctctgctctttgatgttcaagtctatattggttccagactctgttttatttaatctgtttgttttctttctaaaaacatattctatattcccgttcaagagtggagctaacttcacaggatttgggaaaattctgattattctagcccatacacagaatgcccaggacaaggaagacaccacttctctgaggaattgtgccaagaatacaagtcggtgaagtcagcatgcacatgttgaatgtttacaatgtgccaggtactttcatatactattctattaaaaataagcagtatatggccaggcacaatggctcacgcctataatcccagcattttgggaggccgaggcaggcaaatcacaggaggtcaggagtccgagaccagcctggccaacatggcgaaaccccaactctactaaaaatccaaaaattagctgggtgtggtggcaggcacctgtagttccagctactcaggaggctgaggcaggagaattgcttgaacccaggaggtggaggctgcagtgagctgagatcacgccactacactccag

SEQ ID NO: 44857 - DNA, 1049 bp, Homo sapiens
tctatttgtcctgaaagccttggagagtggttggaggatttaagtatgagagtgatagggcggacccgatttacgttttaggaagatcagtctggcagcagtatgtagtatgcgtggaaaattgtgagacctgagatgggaagacacttagggagctgtggctttcagcttagaagagatttctcttttccctcctctagaaatccagtaagccgctaggttcaggcctataaaaagagaaccactggggatgatcttaaatcttaattttgggaggattatacttttcagttgaaagtagtcccagtacttggttatgaaatttttagaatttcttaaaaatgaaactttaggtggagctaagccaaggaaaccatgaatttaaagtatcagcctttctcatactgtttcttcccctccaacttaggtctgggtattttgtaggtctacgtgaagctgcagccctgatttttgtatattttacttttatatcctcaggatcaggtagacagagctgataccttccctcaggtactaaaaaaagtaattgactggatgaaattgaaggaattaggaacaaagtataaatactcacttttaacagatgggtaagtatttaggaagattatttttttatatctactttttaaagattaaagatacccttatttatctgatttttagaataaccacaaactattattagagaccctagagtctcaccccacagggaatagtatttttcctttcacctaaggatgaaagagaggaagaaaacagtggtcacagtccaatacaggactagaacactacagaaagttaaaaatatgtaaagctaaaaagactttgctaaaactctgttttttcatgacacttccttactcaaaaaagttcagactcttgagcttggccttgaagcctctttcctctcatcccacgctacctgtttaatctaattcacctgccattaatcctctttagtcagactggcccaggaattcacatggtttaccctttctctgtgtagttacttatgcctccctctgtac

SEQ ID NO: 44858 - DNA, 1027 bp, Homo sapiens
cgtgtaaatgtttaaaatattattgcaagacttacaatgaatggcagtcttctgccatagccttcaccagaactggttcctgttctgaggcaaacactttcaacttatgtaaagctctgtttttgtttttgtttttgttttttttcaaatatttacctttgtatttctaagtttcatgcttatactacttcttgacttttcagtttgcgatctattgaattcctgccctgaaagatcaagattgagttcaattaagttaccactcctgcttgtccttcccttcctgcatcttcctactatagctctattacctttcagtcagagcactcagtgttcatactcccgtgactatggagagtgtccacaactttcccctggatgtaataatttacttccgcggttgtttacttatccccttactctccattcaaactgtaagtcacttcttatgactgagaacactcaggtagtctgtcaggttttcttttttcatctgtttttcccttgcagactatcttcctggagcctttaatcctgttctaatctgaactgttagttcttcaggcttcttttaaaatcatcttaggggatttcctttaattctcatgcattagatactatgtcatttttctccctttacagtttcattttggagaagcatgttctaaagtagtttcatgagaaaaggtgcttttccttacagactcttctgttttaacagtcttttaaaactgagaagtatgcatgcagaaaagtagagttttgccgattgctataaagcaaatacccttgtaacttccacccacttaactcccttccttcctcctggagttaaccctaattcttcctttcatggtaatcattttcttattattccttatagctttagtatttaaatgtatatccttatattatatagttttgtctggctttgagcacgatataattagtattatactggctatattatttgttttttttgtttttttttttttttcaatattatgcttgagatccatccacgtct

SEQ ID NO: 44859 - DNA, 1236 bp, Homo sapiens
cctgtgttaaagaaaattcatttaaaaattaaattaagaaaacaaattcccacaggtaactgtgatccttagatctggagaccttggctgagaggaccgctgctgggccatcagccatcgccattggtcttgctgatggaatgtgaccagtgaggttctctgtcctgagaagcggttctgaaagatgctagttcttctgagcatatctcttgagtggcagtgatgagtctgccctccgagtgacagtgacatttctccttgcagcctggcagtaaaagccagtcagcagagagagacatgagcagcacatatgcgagactgcctagaggagatgaggcagagcagccctgagacctctgcagttcctgaggccacactgcacacggccacactcctctccttgcttccatgagatgctcctttatttctttgagaaattcccctctccggctaaggacagcacaagttggtttctgttacttgcaattaaagagcccagtgactacgactcttactcaaatagcatccctaaagaacaatgaagggacacactttaaacatgctaggtatgaaatatcaactttctccccaaacaactctggaaatgagctcttgctcaggaaggaaaaagcaaaaacacctttactattgagtcttttatgcagctattagcttggtacaaagaacatccccttaggaaaagagaaattcaagatgctgtctggattggaagaaatggaagaaagcagtggaagttccactctcacaagcagggcccacatcggcctccccttgggaagaggaaatacaatcagttttgtggcacagatgagctccaggcagagccaatttcacacacgctgattgcagcctgtaccttctgcctcaccctccgaatcagcctgaggctggcagaggtctgtgaactgggctgagatttttttgacctgttaggttttagcatatggcagaaacaatcaatactgcccaagaaccgaataaagcacggctgttcccaacagggaaaacaggcaagctgctctttcccagaaggagcactccttgccaagcctgcatgccctgaccatcttcctgcacagggcacttagatattcacctacttaggaaacacattccagcctctagccaccatcccacacctaaaaatcaaacagagacattcatctggctggggactgggagtttatagcagtgcctttcgggtgagttggtgag

SEQ ID NO: 44860 - DNA, 1052 bp, Homo sapiens
tatattttattctgtttcatttttagcaaatgctgcttgtgatccattaatgggtcgtgaccagtggtatgagaaacacttaaaggaaatcattgttaggtcactggattcattattgatatacagacactacttattaggaatgcagtgaattgaatcagaaacagacttttgcctatttgtttgctcaagggtcttgcttgttttagatgaaatagcatttctttttccttaggctaaatgaaaggcctaagtctgattttattaatcaacagaggtgtctacttttgcatactttattccaagtttgcctattttaacaaattgcgtcacaaatcatgtcatttctcaccatcccactttatgcgtaatcaccaataaatgatagttatatttatgtgtattaatgtatttaggataagtcacacaaaatagtgcttgtttctcaaatcacgtgtcttctatttgccacaatagttacttgttattctgtttcagagttttatgtatatccagataagctagaagataaacaatcaaacagtaccgtaattatgttgtagttatgacaagctaaccttgaattggctttttaagaaagtttttagctcagttgtggaaaacacagtaataaaattctcgatatgaaaacataatgtcctgtagtcagtttgccacgcttccgtgattgaattcgtaacattaaagttttattaaactttagtcttctttatcatgtataggctgagaaatgaaaaaaattatcagttgactggttattatgatagtaattgaattgtcacggaatagctgttttaaagatgagaaattggtacaatcccttggatggaaaaatttaaaaactgcagtttatttgttccagaaatattttagtgtgcttagatgatcgggtgttaaatactgacacaattgtgtaatggcaagcagcccttaacccttatggagcttacagtctagtggggaagcataaacaacaacaacaacaaaaacctataaagtatctagtgtctaatctagagtgataggaaacg

SEQ ID NO: 44861 - DNA, 1063 bp, Homo sapiens
cactttgggaggctgagatgggcagagcacgaggtcaggagatcgagaccatcctggctaacacggtgaaaccccatctctactaaaaatacaaaaaaattagctgggtgtggtggcgggcacctattgtcccagctacttaggaggctgaggcaggagaatggcatgaacccgggaggcggagcttgatgagctgagattgcaccactgcactccagcctgggcgacagagcgagactctgtctcaaaaaaaaaaaaaaaaaaaagtccatttagaaatcttgaacccatgtgtttctttcatagatgctatttaccatcaaaaagaagaaaattcaaactgagattattttaaaaatcaacttgaaatgcttgtataattaaacaaactacttaagactgtggtcttgggaatgttgatgacagtttttatactgtaatgttgaattgaatttacttcagaaatcaatacattttctgcctttagaacttatttatctttgcttctccctacccctcaaatatagtctccaaaaccactaaatagcttttctgaatatatgctatatgattttttttttccttttttgagacagagtcttgctctgtcaccaggctggagtgcggtggcgcgatctctgctcactgcgaactctgcctcctgggttcaagtgattctcctgcctcagcctcccaagtagctgggactgcaggcgcatgccaccattcccagctaagttttgtatttttattagagacagggtttgaccatgttggccaggatgctctcgatctcttgaccttgtgatccgcctgtctcagcctcccaaagtcctgggattgtaggcgtgagccaccgcacccagcctgtatggttttttgagactgttagtgcttgagaatttcattttaaaagcaaattataagcatacttttcatggagtctgatataagatctgggagtcggagggtgcggtggctcactcctgtaatcccagtactttgggaggccgagatgggtggatcacgaggtcaggagattgagaccatcctggctaacaca

SEQ ID NO: 44862 - DNA, 1028 bp, Homo sapiens
acagatgttcttttagctatttcttcatcttactggctttagtagaattctcatacttttcatattcccggtattaggagacaggaaatacaaacagattaaagactcaaagactggtctttatagttctagtatattgtaaacttcctgttcttcttggcgtctagaagtagagtagttctctgtgcactgagtatgtttactttctaacacagccacaggatgaggtgccagattcttaaactgaatcaggtaaggtgtgaagttaagcatgtaccacgttctctgtggtaggaactaacaataatcttgtccactttcatacgtattcttattgtctatcactgatgtctaattatattcaagaaacgtgtgtgaagtgacaaagcagttcactggaagaaggcttgattctgtctgacttttttttatattactctgtgttacatggataaggaagctgagtaattttctacttcttgattaggtgatatcttgagattcctttattttaaagcaatgtgaacttgcagtatgtcagacacttcaatattcatatacaaatataaaacacattttatagtcatatgcaaattatgtttagattatcttccatttgtcaagtaactgcttattcttcattaggatgggcagttgaatattgattctgatcatgcattaacttttggttataatgggttttccacaaaggatagtaaaacattttttcttgttaacttacagattaaacccatgaattgcccctcttgggagctgaggagttgaggtagggagggataagaaaaaataaggtgatggtggtaaatttataaaagttgctgtggatagttgatacgtaatattgtaaagggttttccctcgaggcctctcaaaggacttagccaagcagtgtcactaatatttgtgtcctgtgtgtgaggcagatgattcagattacctaccagtttaccagtgaagaaggagaaagttgttactttgccacagtctgtagagctgatagaaagttg

SEQ ID NO: 44863 - DNA, 1061 bp, Homo sapiens
ggctcactgcaacctccatctcccagtttcaggccattctcctgcctcaggctcccaagtagctgggattacaggtgcacgccaccacacccagctactttttttattttgggtagagacaggttttcaccatgttgaccaggctgggcttgaggactcctgacctgaagtgatccgcccgccttggcctcccaaagtgctgggattacaggcatgagccaccacgcctgaccttaactatgatttttaaaatgcaactaaaaattcagattatcagtttctctagtcacgtttcaagaatgcgatactcacatgtggctagtagctaccatattgggcagcataactctagaacactgggaagttactaaccattttattgctaaagagaacaggctaagaccacacaaccattacttctaaacttttctcctgacacccagttcagttccctgttcattgtactagaatacctgttcttaaatctctattttagaagagctttatgagtaaggcacaataggctgtacatgatatgatgaggttctcataggttcctccaaaggatattaattaagttgaaagaagaaccctggtttattaagtgaatgtcaccgctcattcagtgctgaagataccattgtgcatcaaagaaatgtttatcttatgttctcaagagaaacataatagcacgaggatattaagagagaacagaactcatcactctttttgtgtctcaaatttaatctggtatacagagtcagtgattattttctttgaatggtagaagtcaaagaacttcaatgagtagtttattcagaggtgaaactcttctgttaaaaaaacaaagatgttaataattgaagaggattctaaaaagaaataaaaagaggaagtaaaattctttaaaaatgcgaaattttgcaaatgaaaataagtactacatttatatcaaagagttttgatttgtttttgtttctctgatttggctaatcagacatagattatgccttagttgcaggatactatatatgcattataggcacattacctcagtgtag

SEQ ID NO: 44864 - DNA, 1053 bp, Homo sapiens
ataactattctgaggagaggaggcatttggaaattcagcagtaaagcagcgacagcaacaagcagccacagtggtagtaaagagagggcaggttcacagttagcatatttcacagtgtgagccagcgagcacatagcttcccatactgctgcttgaaggaggcaaaccaaaactctacattgcaagatttttctagtttcatgtttatgatgttaagtcatgtgataatattgtaccataagttgccaacttcatttcactctagagaggctcctttgctgcagtgcttttttgctttttttctttttttttcttgaaagagaaaaaatttgtgcaatgtatgtttatgcctacaccatgccgagacgacacttaccagtaaataatctctgtatccccgaggtaagatactgtttctgctttccctgcacagtgctgctgcagcacggagctgacccaaacattcggaacactgatgggaaatcagccctggacctggcagatccttcagcaaaagctgtccttacaggtaagaagacagagagctaccgaatgattatatctgtgtaactccttacttgattttataaaatcttgttatgctgaatttttcttttcactgatgaagctaagcaaatatatctgccattatctactactttattattgatttgatatctgtctcattaattgctatgctgtcgtaagcataagcagtaagattgttggtctacttagaatgatagcattaaatcataacatctttcactcgtattttagtcatttttatggtttatatcataatttttctgtatctcatcctctcagttgtttaagacctttactgttgagcaagcaagggcatttatattactataaaagtagttttgattggaaagacaacctgctgcctgctgccttatttcttggatcgatagtcaaataaaatatgccgctgcctctcccttgccaccccgtttatactttaatcatatgttttcacttttaccatgatagctaagttatttttaactgaggcgtttattatctttt

SEQ ID NO: 44865 - DNA, 1950 bp, Homo sapiens
agctctgttcttcaagatttttattaaacttttattttgacataattgtaagttcccatgcaattgttagaagtaataaaaagaagtcccttgtacccttttcctagtttcccctagtggtaacaccttgcagaactgtagtgtaacatcacagccaggatattgacattgatgcagtcaagatatgggacatttctgtcatagaaatacatacatactgttttgtacttttctctacttataatacctttaactagtttttttaattagggtaaacctggccttatagaatgagttagttttccttttattttctggaagagactgtaatgtgttagtaatacattcggccctaggtgtcctcaggggtactggttccaggatcccctgaagatgcagatgttcaaatcccttataaaaagttacatagtataacctatggaggcatatcctcccgtatactttaaatcagctttagttataataactaataccaagtcagtgctgtataagtagttttgttatactatattttatttgtattattattattgctatttaaatctgtagttgcttgaatccataaatgcagaacccacagatacatagggccaactgtatttctccttaaatgtttggtagaattcactagtgaaaccatttgggcctaatcatttcattattattattatttgattcaattttaagtaggtctgaaactaattgggttatttatttcttcttgtgtgagtcttagttatttatgtctttcaaggaattggtcaatttcatctaagttgtcaaatttgtgcatagagttgtttttagtttctttttatcagatatttggtgcctgcagggtctgtagtaataatcccgtttcattcctgatattggtaatttgtgttttctccttttctttgtcaattttattgatcttttcaaataaccatttctttatttcattattcaaattctttttctgttttcaatattgttgatttttgttttttattatttccttttttctgcttattttgggctcattttgctctttttctgggtttttgaggtaggagcttagaaaattgaccttttttcccctttttcctaatgtatgtatttaatgttataatttttcttttaagtactgcttttgctgtgattcgcacattttgatttgttccattttcatgttcattcagttaaattttgtatgtttttaaatttctcttgagatttcgtctttaacccacagactatttagagtatggttgtttagattctgtttggagatttttctgctacctttctcatgttactttctagtttgattccattgtgcttgaacaatactctgtatgatttcaatttttttgatttttaaatctttatttggacaaaggtaggacaaagttcatggctcaggacatggactatttttgtaaatgttccatgggcatgtgaagagaatgtattttctgatgtttttggatggagtgttctataaatgcctgttattaatagattctgttggttgatggtatcattgagttctatatccttgctgattttctgtctggttgttctatcagttgttgagtagtgaagtttctaactataattgtagatttaattatttctcctttaacttctatcagtttttgtttcatatattttgtagctttgttgtttgtagctttgttgcatacacatttaggattgttataaatgtgattgaccctttcttcattttataaaaactctttcataattttctttgctctaaattccactttatatgatgttaacatagccactcctgcctttttaaaattgagatttgtgtgacacagatttttcgattcttttactttcaacctgccaatatcattatatttgaactgaattccttttagatggcatattagttgagtcattttttctcat

SEQ ID NO: 44866 - DNA, 1065 bp, Homo sapiens
tcgatagatctttctcatgatgattctttctcttctgctccacatccagctatgagaaaggcccaggttaagtcctaggatttttactcctccccatctaactttggggtgatttcatcgagtccattttaaatggcatctatgtgctaaagacccctctcgttcagacctcctaccttccagtttatagctctagtgttgctctgccctcttcagaggtacatatcctactacctacttgacatttccaaatgagttgtctggatgtctcaaccttaacatggccaacacagaattctttatctccctatccaaccctattgccatgcccaccaaacttgaaccccattctttccctctcgggaaatattaccacaagctacccggttgctccagccaaaaacctacaagtcggactttattcttctcttgttgtcttaccttgtgttcagttcatcatccagttttgttggttttacctccaaaatctattccaaatccatttttcttagttgttgtaactgccagcaaacattctgatttatactaggtctcaccaacgtgtagtctgtaggctggtttcaatgacctgtttgtttctggcctgcaatgaggtaaggggctggcactagaatataaatcaatggtatcactaagcacacctttagtttacttgacttctttttctaatagcaagacttccttgttgaaaaagcagtacattctgatgcagactcctaatcttgccgaggagtgacattgcagcccagctgtagactaatagctgatagccctctgactgctgtacgtcaggcttccttaagtctgttctctacatagcagacagaaactttttaaaaatgttaactagtttatttcattcacccccttaaaaatcttttcacttggaaaaacattcagacttttaatctggcccctatctacctgtctgactgcaatggttagtgcttttcctgttgctcctgtattccagccatagttgcctccttgctgttactcaagttggtttctctcttgggttctttttctacctttcttctcttc

SEQ ID NO: 44867 - DNA, 1029 bp, Homo sapiens
aaatattagccgggcgcggtggcaggcgcctgtaggcgcggccactcgggaggctgaggccggagactggcgtaaacccgggaggcggagcttgcagtgagccgagaccgcgccactgcactccagcctggacgacagagcgagactccgtctcggggaaaaaaaaaaaaaaaaagtaatgaactgctcaaagaaataatggagacacatgaaaagaacataggaaccatcctgaaggggctcccaatgaacatatccgggatagtttgactatcaaagtgtatcataatagtgatggattgtatagcccattgtatgaaataggaattcttcagtggtaatacatgaacgaatggggagggacactttcttactgtagaatgcctactaatcaatgtggagggactgttggaattggaaaatcaccatttgcaaccatgatagtaaagactggttaggacaacaatcgttagtggatgccaaatctcaggggcaaagtttgatgagcagctgtataattatatgattctcagcatgattgctcatagattgataattacttgggagaaactatacattgacaaaatctgacaatactttttttggatatcaaaattaacatcactaatgagaatgaattaagcctgtgtgctggcagatgtaatacctgagaaggtcacaacatttcttatgttgtattctggctagggaggcatgactaaatctcatgagaaaacattaaacaaattccaatttaggttcattctacgaaatagcctgtatttttaaaaaatgtcagtgtcttgaaagacaaaggctgaggaattactccaaatcaaaggaaactaaagagacatgacaactaaatgcaaaatatatgatcctggactagaggagaaaaatgctataaaggctataataggaatgactgacaaaattggagcacatactgtatattagatgaaaagtattgtaccagtgttacttgaatttaattactgtactgtggttacatgaaaaaagtattgt

SEQ ID NO: 44868 - DNA, 1032 bp, Homo sapiens
aatgaaacatttattttttattgaaatgaaaaaataaatatggtcactttaaaatgtatacatagataattttgttttcactatataatcttgtttatctaagccttttttttttttggctttctggtttttcctgagtagctttcaatcttgtatcttttcattatgtaagagactgtaaaatatatttactatgttttagatatttattgtagttcagtaacttttgtatttatccctgacttaattaaataaacttaattttaactactgaggctattcctcagcaactgtgatgagttcttgttatcttaggggattctggtttgtgctataagtgtattagggtgaaagggttagttgaaaagtgtggggaagcaaaagggcttctttgagtatttgcagctctattagactctttcattcactttcctttaaaacacatatatttctacatatatcttccagtaaattgtgtgaagcttatgttccaaaagactaatcgggacggttcaagaacagtgggaattgtgcttttacttactcaacgaaggataattgtagaaaagcatcgtgggctgctataaatcttttccactatgtgtgaactctttagctaaaaagtgcctatacagggaatatatcaaggggtctttctggcaattttgatagtctcatatcttgattataccaaagttagggtttccttaaataaggaaatccattttgtgttgctgtaacagtataccatagactgggtgatttataaagaaaagaatttttatttctcacaatttctcacaaatttggaggctgggaagtccaatatcaaggagccagcatctggccagggccttcttactgtgttattccacggcagacggcaagacagaaaaatggcattaatccattcatgagagcggagccctcatgacctaatcacctcttaaagttcctccctctcaatactgttgcactggggatttttaacatatgaactttgggggatacattcaaaccatatcataaagc

SEQ ID NO: 44869 - DNA, 1365 bp, Homo sapiens
ttggagaactaatatcataataacagcttgactaaaagtatgtaagtactgtatttctttatgtactattgttataaagtaactgattatactctacccccataatagtaaggagagattaatattttacctaatttttatatacttttttaagtcagtggaaggaaaaccctaatctactttattgaatataattgaatatgagaaattactgagatggggttgcccgtgtttttcactcatttataaaagcttgagaagtccatttttattaaaaatttactcattagacataatcttggaaagaaatacataagaacttcggcagtgccaccttgcacccattaggatggctattgccttagtccattttgtgctgctattaatagtataacacagactgggtgatttataaagaaaagaagtttatttttttcagttctagaagctgagaagtccaaggttgagggacccgtgtctggttagggcctgtttgctgtgtcatcccatggtggaaggcagaagagcaggagagcaagaagggactgaatttgctttttataagaagctcactatcgtgataactaaatggcttctgcgataatagcattaatccattcatgagggtggagccctcaggacctaatcacctcttaaaggtcccgcctctcaaaactattgcattggggattaagtttccaacatacaaacttggagggacacattcaatccatagcagctactattaaaaacaacaaccaccaccaccaccatagaaaataagtattggcaaggatgaggtgaaattgggccccttgagcactgttggtgggattgtaaaatggtgtaagcactatggaaaacagtatggagactcctcaaaaaattaaaaatagaattcccatatgacccggcaattctgcttctgggtatatgctcaaaagaactggaagcaggggcttgaagtgatatttgtacactcatgttgatagcagcagcatttgcagtaaccagtaggtaaaagcaacccaggtgtccatcaagagataaaccgataaataaaatgtggtatggaatacaatggagtattaatcagccttaaacagaggaagggaatctgacacatgcatagcatggatgaaccttgaacacattttgctaaatggaataagacagtcacaaaaggacagataatgtggattccacttatggagttacttagaatagccaaactcagagacagaaagtaaactagtggttgccagggcctgaagagaggggggaatggggaattagtgtttaataggtacattttcagccttgtcagttgaagagtgctgtgaatggatcttggtgatggtagca

SEQ ID NO: 44870 - DNA, 1069 bp, Homo sapiens
tactcatacttttttagattatcagggtttttttcaaattaaattagatagaaaaaattaaacttaagcatttattaggttttagtgctatgcatataagaaataattaacaattgctcatctgtgtggtttgaattgaataattcctatttagatattattctcatttacggcacagagtaattcttattaaatgtaccagttgcagtaaagccacagggtgttaaatgttctgggtgctaatggagattgggacaagatcccttggttatgtcagtttgtttttattttcttcctgttgttatcaagaaaacaaatctagctgctaaaattacaagtatctgtcctagtagatatgtagtccttttttagaacatttctatgtgtttatttagaattagaaagtcagattgtgtattaatgagatgataaaggtactttttcatatgtagtaaatcaggcatataaagtttatttcctgaatttcattttagaacacagcgtagaagcgaatccttttttggaagtttcctaaattactgtattattgcttaactgagcccttttcttagtttttactacagttcctggtttgtaaatttaaaaagcccatgaaaatgttaattttgaaatgtttttggaaaagaaatgtctcttatacagtggttagtaggtggggaatttgcctagagatatgtgggggtttgagactttaggtttttttttaatgtaatatgtgggattatacaatgagagtgtaaattttaagtactcttaattctatactgtgacttgatgattatctaattaggtaatatgtgagaagttaatattttgtttcccaaagacaattgttttcctaacctttagaattctgaaaattataaaacatcaataaggttttatacagtttatattgttactatgcttttattttacacataaatcaaaattggctcctggctacactagaaattttattggctttttttttccctaaaagcagaatttttttttgttctaaaatgctaccttttgttgttgctctaaaatgatacttttatgcaat

SEQ ID NO: 44871 - DNA, 1049 bp, Homo sapiens
atgtgataatacatctagacatactgatagttgtcatgattttattgctcagtggggaaatcaaaagatgtagtcattaaatttttgtgttccaggcacataacagtatataggtcttccaaagcagatagctacattatgaatccataagaacttttaattctaatattaatccttaggaagattttaccttccatcattgtttggatttattaagaagatatgtatgaaattaaatattcatattttgttactgacttaattttttcagaagttactttaattctcagtggttctagctaactgataattgtggcatttgagttgcatgaagtggagtggagtgaagaaaggggagaggaaaaggtgaagttggaaagttgtgggatgggatgtagtcagggagattgcttatggccttctagaacattttaaacacttcagtttcttcttagagtgagatgaagacccactggaagattttgagcacaagatttgtatacctaacttaggttttaacaggattactctgctgtcatgttgtgttactctaaggggattatactggaagcaaggagacctagtagaaggctgttgccactagccagctgagagaggatactgtcttcaagtaggtgacagtagatgtggtgagaagtgattggattctggatatattttggaggcatagtctccaagagaaatagtctgatgggttgagcatagtgtgtgggaaaaagatgggaatgaagaaagactcccaaagtttttggcctgagtaactaaaaggatggcgttgtcattaacaagaaattctgcagcatatgtttcaagggaagcactagggggagctccattttagacaggagaaaagcatgagaagtcttacatatatcatgtagtgatgtcacataggcagttggattatagcatatgactatatgtcatttactccatatagtaaccagtaacctccacagtatggaagttagcaaagaggactaggttggagatataactggggagttgtcagttcatgggtgctattt

SEQ ID NO: 44872 - DNA, 1027 bp, Homo sapiens
attcatcttctgtaaagtcatttttgctgctcagttagaaatgaaaatacgtacactaaggttgcaatctctagatacaaggaaaagtgggaatatgttttacctctaaaactgccagacatctattattctgactcctgaatggataggtcaagccagtcttaagcatttaattaccacagttgaggggtaacattaaatgtaggagtctctttatttgagacagtttctgtaacctggtgaaaataatcactttagtgctgaatgttaagtattttttagtgacatcaaatcatgttcccatgcttcaataagttggattgggagttcccattactataatagaataagttagtatgtttcttacccagtttccagaaaaatgttaatgattagaatgttcacaattttagatttttcttttgtgctgaagaagtaacaaagaaatcaaaattcaagttagtttggtagcttgtgttatccattgatacatgctaatggctgtgcttttttgttggtatgtatcagcagtcatttttcttctggcaaatgtgatagagttaaatatgttactatttcatgggagttttgtgaaagaccatcaagaatttgtatgaaccctttcctgagtaagtacaacagccttactggtaatgataaaagactggcgacagggagactagttgtcttttatcctttcttttcttaatcttgtatttagtgggtgtacacaaatattttcaataatcaaccagcatataattgagaatttactgtgtacctttagcaggagctttctagaggacccagaaagtctgtgtgtaacatgcactcatattctcaataaccttagtttaactcaataaacaaaaattaccccagtattatattttataagacagtaaagtgctaaattgacatagatgttcagaaaaggagtaatcaaagtcttcaagaaatcaaggaagacttcttggagatgaggagacttatctacactggatctcaggagccataaaggcagaaa

SEQ ID NO: 44873 - DNA, 1089 bp, Homo sapiens
ttttctcagaggttcacacatttattctaggaaagcattcctgtgatccctcaacagtggaattattcatatgcagaagatagattttttccctgtgtagctctacttgcttcaaaaattttatcagtctgtatttgtggtatagaaacaatggttgtagttttattttttttcaaatatagtcatattctaatactaagtatgcttttttaaaacacacatttcccatctataatcattcacttagggatgaagttagcaaaagttttttgtttggagattggtcttttggggtttgttttttgttgttttttacgagacaaggtcttgctgtattgcccaggcaggcctcaaactcctggggctcaagcaatcctcttgccttaccctgcctactatccaagtagctgagactacaggtgtgcaccactgcacccagctttgcctttattatttttatcgaaaagttaatagcaaatttgctattgacactcagtactttttacgacatactgtcaactttgtcacctcttcttaagcaaactttttgcgatttttagcaaactaattttagcattcttgataacatatactggttgaaagtgacggtaaacacgttttaagctctgttgcctagaaattttatttttgttttaatatgtgggcacttccaggatcacatccaacttacgatagcatctaagttatttaaagaataatagtaaattttagttgtgatagccactagggagaaatttttatgttgtcttaaatctaaaactgtacattttttcttaaaaatgcttcatcacttgaaatgtattctaataaaagaaaattcttaaatataagacgattaggcttcctttcagagcatgatcatctcagtgcttgaattgctatatgtgcttattataattaatacatactttatttttaaagcatacagttttaaattccatgtgttttgtatatgataagcagatgtatactacagcttttaggtttcttaaacaatccattcacagtgaaggcctaatttattttgatctgtggaatggaagtagcaaaagaaaacaaagcagcaca

SEQ ID NO: 44874 - DNA, 1031 bp, Homo sapiens
gcatgtcactcctacatttcacagccttaggaataatctatatatttgactggctcagtgctgtgttaaataaacacagattaattgactaggctgaggatgaaataataatctgaggtagctgtgaaattacatagttatttacttatgtagttatttattgatcattattccttcatacttatttacttttttcccctagagagctcaatctgctctgtgtgtgtctttgagccttttttgtataaaaagaacctcagtttttccaaatggagaaaaaaatacatatttatttaagaagcatcaataaaaattacaagttgcatgagagttgatattagtggtagtgtgccttactgtgtcggtgttctttatataataatgccttgtgttatatttgaatacatgtttatacaagacagttaacttttctgctaagtcagtaaatggcattgatacttattaccacaaagcatgtaaatttatatcttataagagtaaatcaattgactgattcattttctctcaactgtttttattttccagtgctttctctaaaatggataacatttggggaatttcatgacataattgtaataaagcctctgtacaattaaatggctttaactgaagccaagcatgtttctctttcccctacttcccacctttttaaaattaaaagcttcccagtctttttaggttgtatttgtcatttaaagcattttgtattgcagctggattctgaaactaggttaaattgtctgtttctcctggaaacattccaacagagatcagtttcttttctggaccttctagttcaatactttgctcttatatactgtgttgaatagaactgaactgctatttattggatttgtcagccttaaattccagttactatttttgcctcaatggtgtagctatttaaaagaattaaacagcttaagaactgtatttttagtctatttgggtagtaatatactccttcctgttcattgttctttcagacatttgtcagaaaatttcacaag

SEQ ID NO: 44875 - DNA, 1030 bp, Homo sapiens
ggctggaaagcagtggtgcaatcttgactcactgcaatctccgtctcccagattcaagcgattctcctgcctcagcctcccaagtagctgggattacaggtgtgtggcgccacacccagctaatttttgtgtatttagcagagatggggtttcgccatgttggccaggatggtctcaaactcctgacctcaaatgatctgctggcctcggcctcccaaagtggtgggattacaggcctgaaccaccacacctggcctattttttgtttttgggggcgttttttgctttgtattattagagcaaatgtggaagctttccttagtagttggctgatctgtacttttgtttttagataaatgttcttcactttgttttcagaaactactatttctaaaattaggaaatacagatatttatattacataaagttaaatactacctcagaaaaagtgcctgttctttttgaagtgagtgtcttcaagagtgcagggaagacgatatcttaaggaagatagaaagtgacatgcattaagttgcatcttgggatctttcttggccttccctgtcttttcccattctcataaatgtcttccttaaaagcctcaatgtgtggtagtcgagcagcagcatgagttagaaatttattttcaatagatgatgtgcttttgagttaattatccaaactgaccaagttatgcccagaaatgtgtctgtaagggacacaaatgtgccagttgcaccaaattatagcatactggagttgaaatggatctcagaaatacttaagtgctaaccagcctaacatcctaaatgtatttataaaaatatacaagttatttttaatattcttaaaaagcctatttgttgaatcagtagtgcctattgtgtgatcgattgtcttagcttattttataaggatttttgggaagaagctgaagccttttgctatgtggagctcttgcttgagtgaacctggtctccatggaacttgcttctgtattggcttttatagtcctgctcctttatagtt

SEQ ID NO: 44876 - DNA, 1047 bp, Homo sapiens
aaattaaaatatgacggcgccccatggttttcacatcataagcctaggttttctaatgcatggggcccatctgtctttttattctggagattttcttgaatctcatgcaaaataaataaggagcctattacaactattttcttatattgttacagtgccacctaagaatgacatagaatgaaaaactcttgcctcatagagagcaaatatgttctcatccttgtttttatgcagttataaatgtgactataaaataatatgcctaatcgtcacgtatgcttctgggtctgcctcattattctgcataacatttttccagtcacagttcttctgagcccctatgaaggctgtttgtgtaaccctcctggtggtcagatgccagtgagactcctgctccactgacggcttatgcataaacaaacagcctaatgccattgttataagtaagctacccaattgtgttatgcacatacctaggcagaaaaaggtatgcctaattcttgtttgtttgtttaattagtgctcattttattttcattcccaggctaggaacttgcatagggaactcaggaccatgaccccagggctgtatttcagctcatacgtagcgcatcaggaaggcatcatggggtccggtgtcttactacctaattctcctagcagttagtacattttgataacaatgtcaaaaatgtagtgactcttcacaagtggagcagtaaggaagagaattcattttttttattgagttaattctctgagaaacttagatctttaaaacatttttcttttccataattatttttaatttagagagtagtcagaagacagttattccctttagtagtacattatagtcaatgtcccctggtctgtgtaaatatacttagagatcccaagctgaagactattgagataatatggaatatttcacctacagaacaaatattttttaaaaattgtttatttttagcatttgtccaacgggcatttaaggagtttttgtttgacttaatcagagtgttagttcttcttctcaataagata

SEQ ID NO: 44877 - DNA, 1078 bp, Homo sapiens
aactgtggttcagtatttaaactgccagtgttatacgtctcatgctctgtgtgccaggtgaaggtactgtgtaaggaagacatttgcggtgcttcttgtcctataatgattcaagtatatagtagttcttgaaagagtgtgcatatattactcatctgcttaagagagtgggttaatggatatatcagaggagccaaatacatttttttcagaacttgaaaaccaaaggtcatcatgagtgcactcaaaagttaggacaagtttattacatttgggattttcatctgtagccgtatgaagaaccctttccaatataaaagcatggcattaaattaggctgaagtcttttattttttgtatatgtactatatagaaatactagcaagttaggatcatccaatatggcctaccccgaaatggcccctctgtttccctaaccacatggaagaaagaatctgaacgtctccaccggctctacccgagttccaaaactaaagggcttctccagacctgatggttccagtttacctgctgttggcctgctggatacttgactcaggcataaattaagtgccctggtcccgaactttctccctgtatttgacctccttccctctttcctaaattactagtctggaattaaaattagctccagcaatgacctttgactccattcattttctcctcatcttgggtcttaaaaaaggagaccagatacctcctagcttttgtatcacaaccaggaatgggtattaggcctcatgcgctttgctcagaacactgccgctttgttaacaaatgacagcatggaacccagagttttgattcgatgcaaaataacagcagtgcaaccaggattcttgttttccttttccttcttggagtttggaatttctagcttttcaagcagcataagtagaatcaacattaggatgttttcatgaaatagcatccttatacttctttgagcttgatgttagtggctagactgatttccctttgctctcaaaatacaaagtgcattgaagtatacagagaaatgcctgaatatggcaagcaaataatgtagattaacatt

SEQ ID NO: 44878 - DNA, 1027 bp, Homo sapiens
ctctctggccgtcaatatcttaatgaaagtgacattccgttggccacggtccactctgtccacgtggagggccgggttccagcctctgcagaagtgcttgttctcagcacagaccagctactcattgccttaaaaatactccatagtcaagaagatgggtaatttcacgagaaaatcaaagcttactaatttaaaagggtggaaaatggagggcaggggattccaagcttaatttgtgaagattcttggtacaattaaaaaatattttatataaaatattagctgggtatggtggcatgcacctctaatcctagctacttgggaggctgaggcaggagaattacttgaacccaggaggcggaggttgcagtgagccgagatcgcgccactgcactccagcctaggtaacagagcgagactctgtctaaaaaaaaaaaaaatttaaactttactatctttgaacataaatttgtcatccaaactaggatacattcgagagtaaaaagagtgctgtgaacaattatactgaaataatgaaataatgagggataaacctggagggttttaggcaattaggatataatgtccccctttaacgaggttgtatattataacgtattgcaccaagaataataaatacacaccaagttaagtagaaatggaaaaataatgaacttggatagacaaagtgaacaaatggaaaaaattgcaatgacatagattggattgtatataatgtcacatccacactagtagttacgctaactttggaaattatattcaataaatattgttgtgttcttcctgaataacttcagtttgaaagttaatgcgtattcataaaacctagtttgtgatacttcaataagagtgagggaattgatctgattttacagttgcagttttaatattgtactaatactttccagggatgtagggtaatgaattctccattacttgagatattcagatggtagagtggtcatccttaaccagtttggaggtggggctatgtagcctttaaaac

SEQ ID NO: 44879 - DNA, 1047 bp, Homo sapiens
ttgagaaaatgtcatggttatctgtttctttgttcccagggaaatgggtaagttgcatgctagaagcatcccttctcggtctgttgtattctctatgctgcaatgtttaaaacccatctgagtaccgaaagactgttgttttcaccaacactgaaacatcatttatttgcattggaaaaccctaaatagacatgggtaaatgtcagttgatatgttatggtttggggattacatagctcttcgtctttaaaaaattttttttatctgtgcttttgtttaaagcatgaagttatgatttaaaatgcccatggaaaaaccctgaataattcattgacttaccttagtcaaaaagaaaaatcccccctccccaccgtatgcctagcaatagggataaaattcttcttagtccctttctgtagctttgaggttaaaattacgggtgttattatgaactctaaataagaacctgtgaaataaatattttaaaagtgcccatttctgggaggcaggcacccatatttctgtgtatgcagccacgtagacagctagatcttaggcataatggtttagttgcatgtgggtgattattttcatttccacttattactgtgtgctagactccctgtgtatgagtacagattgccctttcttgcactgtatttagaaatctctgtattacccttgggcatttgttcattaatagggggtggggaaaggaaaagcttgtaataatgggctttacatattaaactgtgtgcatccgcatttgggccaaatggaaaatctggtttgtatgactgccctctgctggctgtaggcctttgctgcagtggcaggatatgagtccctgggtggagcccctgtgcagatgccggtatcagtcttttattcacttgcactgagttccatccaagtacatcagaaacagcctaagattctacctactgcccaggttgatggtggaagacagcattcttgtgaggatcaaggagacatttttgattttagtagaagtacagtagaagtatagacacaaaataatcctgg

SEQ ID NO: 44880 - DNA, 1081 bp, Homo sapiens
gagctccgatgggggcttgtaaaggcttcagcccctttgaacgcgctccttgtcattgtcacactgtggtggcctgggtttgtcctccttgcatgtgccagcagtgattgatgactcacaggggcaattccattgtcccagagcctggagctcctgttgctccggggtcctctttggtgttgaagagaagcactcatcccttcgtcagaagacacacacacacacacacacacacacatacgcacactccatgtaggcttagtaagcccagccagtcagtgcccagtcagccgtcccccttccttgtggctgaaccgcaggaggtgggggtgcatctgctctgcaccactcagccagagatgcaggagcctctgcccagctcagaatagatgatgttttcttactagtggctttatttaaaagccatcccagtcatttcacattttttttttaaagttttgattgacatctatttggtcaacctgtgctccctatggactaaaatagctgactggggcattgtctgggcttattaaacctgcatgttgtgtgtgtgtgtgtgtgtgtgtgtctgtgtacacgcacgtgtgcacacgcaggacaagcatagcatggaatttgatggagtggatgtggagggaattgaagtggtctccgtgcagaagggggaaggtaggaaccaagtgaagtgccttgtacaggcgtcctgctgccgctagagggcgaagtgagtctagaatccacatgcccgcgtcctgcctgcgagttttcccctaaagcagctgtgctggctcccggacagcagcttcaagttgacctcttagaagcccgaccctaatttccgatgggctcagggtcataaattagatttctgttctaggaaactaatttcataccaccacaatactttaaaaagtgatcacaaaatgaaatacacatatacgttttacaaataattacatgaaaacctaacacttaaggctaaattcctttggtgggtgtaggggatggggattgcttggagaagacataatgaggcttgcagtctgatgaggtttgaactgcaggtaccctctttctt

SEQ ID NO: 44881 - DNA, 1102 bp, Homo sapiens
agtgagcagctctgggaacagaactgacatgagtgtctgggaggggacatgggaaggatctgcatacaaattgaagatccaattcctataaattttctatacaattgtatattttaatatataattataattgattttaagtctgtctctggaaatataagctttaataatttacatcttcacttaatcacttatgaaatcattttataacccttaataaaattagatagtgtaacttgtcaaactttgttctcttataaagttgcttttggttatccaaggtcttttgcatttccgtatgaattttagaatcagtttgtcagttttctacaaaaagaattctgctgggatttcaagggtttgcattgaatcagaatcaatttggaaagaatttacagtttaacagtcttaggtcttctaattcatgggcacaatatggctctccatttaattaattaaatttaattaatttatttgatttatcttaataatgctttatagttttcagcatccaggtcttgcacatctttggttagatatacccctcagtatttcccatttgtatggcattgttatagtattgtttttaaaattgtagtttccagttgttcattgctactttaggcaaatctgatggatttttgtgcattgattccgtatcctgccgcaatgctgaactcacctatcaattgtggtttctttttttggtagattccgtgggattttctacgtagatatgacgtctgcaaatagagacagttttacttcttgtttccaatctgtgtacctttttccccttcccccttaccctgtcgcactttatctccagtacaattttaatataagtggtaagaggggaaatactcatctgttctgatgttaggcttgtattagtctgttttcacactgctgataaagacatacccgagactgggtaatttataaagaaaaagacgtttaatggactcaagttccatgtggctgcggaggcttcacaatcatgacagagggcaaaaggcacaccttacatggcggcaggcaagagagaatgagagccaagtgaaaggggaaattccttataaaatcatcagatctcgtgaga

SEQ ID NO: 44882 - DNA, 1134 bp, Homo sapiens
cctctcctatgcttatgcatacactccccaaacgtatcaatccagttgctattgcccaaggaacagaaggctcatcactccatggagggtttttcctgcagcccctacctaagaccttctcactttctctgacagtcctatcatcgtgtcgtaaaaggcctgcccacttagtccaacacactggaaatggatgattgacaacatgtttatttacccatcccctgggggaaagtctcagattttgtgaggttgttgcccctgcaatgtgctttaaactcagctttctgttgcttgtgtctctgggtcagaagaatttgtcagtgataatgtttttgttaaagtcctatgcccagttaatgccaactcagcgctctcatcccctagggctcctgtaatcatttttcttgccttctcttacagtttctgtatgttatagaagttcaaagaagacaaactctagccaagagcagtgtgaagaaaagaagacgctatattaatcacagtccagggatgccttctggcttcctggcagcaattccggcctgagattccttctctgtgcatacttcctgtcaacattgtgtgatgtcaagctgtggccgtcacaaaagtactgtgaacacctgtaaatcccaactatcaaaaatcacacccaggaatccaaattagcattattatgtcaaaagaaaaacctgatttcttcactgtctgataactgctttctttattgtcctaaactagcattccctaacctttgagtgagatagtgacactttagtttcttatattctaaaatgttttcaggggcagctggtggcagaggagagggcagtggggatagggcagggagacagatacctgcacaaggaaggtatggggatgaggtgggagtcaagatgatgaacggagagagggatggtaaccgatttagtcacccatttgagagggtctccagacttgcactgctggctaaagactcctgtcctaagtgagaaagcatcatgtcaggcaggggctctatcccggtggttatgggtggacattctggagtgatctaaggaggcttcccgagtctcactgttggctctccctgaccccttctaaagctttctttctagcttctgctgccctcca

SEQ ID NO: 44883 - DNA, 1077 bp, Homo sapiens
catttgaacacttacaggccattgtagggttattagttggctggcctaatgtcaatattgttgtgatccctggaatagagagtctccctgaagagagagtcaaaggaacagctggttagtggagcagtgagaacacacacagcatttgttgattaagttcactgtcttatatggacgtggttcctgatgcccccaaaacttgtagaagtaacatcaaagatcactgatcacagatcaccatagcagttgtaataataatgaaaaattttgaaatattgtgagcattactaaaatgagacagagacacaaagtaaaacatgctgttggaaaatgggtgccagcatacttaattgacgtgggatagctgcaaatctcccatttgtggaaaatgcagtatctgtgaagagcaaccaagggaagatccatgaacgagctatgcctgcaactgttattatcctagttctgaagatgacttacaaacatggaaggatacgagtgtagaataagagtgagaatagaggaaattgcctcgtattaaagctctatgtagtgtatatgtacatgggtaaaaactgacagtagtaaccaaacccgaagcttttgtgtgaagttggtggtttttattttttccaaagtttccttcattgtttcaacagaaagggtagaagaaggggaggggagaagatgtagtaaatttagttttggtgttttctttcattctctttagaataatggggtcccagacacttctgagtctcatgatgcagtggtatctttacaactgactttctagattgacacttttatgtttgttttttttcctgttgtcgtgtttctcaaagtgtggtctaggtctcattttccagattgaattacagtttatgaaggtgtccttatagtcagctgatggtggaaaggtagagtcaaagtcagaaaaataattttagtgtatgtctatagttttgatgagaagaggctttaaccaacgattaaagcagaaagggtaaatgccttctgtgttaagagctgctttttggttttgaaaagggaaagaaaaattcagctaaaaggttctgt

SEQ ID NO: 44884 - DNA, 1044 bp, Homo sapiens
ttaatacctatgtattgttaaagcgattctgtaatagaggcagtattgctgcgcggtggttaagaagtaggttttctaggggagtggtgcttgcggtagtgctgtgaagcactcaccagcttttggcatataaacagcaaaaaatattaggtacttataatagtggaataagaagaaccaactccattacgaactgtccgtgttgttgaactaaaacttcacattcaattaacaatttgttgggtgcctccttcatgctttccctttgtggagaaagagatgaatacatttgtacctgttttatatctttagggtttcctttcccccgcagttccagtcttttcaatttttaaattaaaaaaaaaaaacaaaagcctttttaactgtgaccattcattattttgctttcgggaattggaattgtctttcagtctcgaatgttctgggaaatgttgtctctgggcttcctcaatatccctttgcacttgctgaaataagtgactgtaagaatccaagttgttggctgggcgcggtggctcacacctgtaatcccagcactttgggaggccgaggtgggtggatcacgaggtcaggagattgagaccatcctggctaacatggtaaaaccctgtctctactaaaaaaaataaaaaaaaacaaaattagctgggcgtggtggcgggtgcctgtagttccagctacttgggaggctgaggcaggagaatggcgtgaacccgggaggcagagtttgcagtgagccgagatcgcgctactgtactccagcctgggcgacagagcgagactccgtctcaaaaaaaaaagaaaaagaatccaagtgcttacctggtttcaggtgccagcagtggctacagttagtgttcctgtaagggttgcttgaggaaaagctcaggcctttcccgtaatgtggcccatcctggacacctgcctcatcactttgggcctgtgcagtaaaagcagagatgtgccatggtgagaaggttctcttctactcgcttatttgagaacattagctggggtgaaggg

SEQ ID NO: 44885 - DNA, 1071 bp, Homo sapiens
ctatttgcaagaaacctgtaacttgtccgatttgacgtccacatggttagtgtatggatgagggtttcagaaccctcttcaggaggcttagcagacaccgttgttcacttataaacatttggactctacttctggttttttttttttttaattacaaacaaaactttgttaggttgttgttttgtgtaaagtttgtccttgtccccccaaggacaatctaaagttctttctaggccagtctccccatctttcttggggagagatggggaacagaggagatgagagatttcttgggtcccaggcactctgcattaacgccaaacttttggacttacaaaaatatgcttgcagaataaggtaacattaaagtccttcctgacaagcaatacaaaaatcattgaccaagatcacaaccaataactgcacaccaaagacccgggaagcccctggtccctggggcgcctctccccaggcttgcctgggccgcctgacccaacgcctggacaaaacaaaggcccctgcttcccggcaccgcgcggcctccggagctgcacccccaaatccccgtggcgacttcatttgaagcgtggaagaagcaaccacgcaagtggagagtgggttctgaaagctctgggatgaaccaccctctctctttctgtcgttcctcttttaggaccccggctgcggcgaggaggaaggagccagcctagcagcttctgcgcctgtggccgcgggtgtcctggaggcctctcggtgtgacgagtgggggacccgaaggctcgtgcgccacctccaggcctggacgctgccctccgtcttctgcccccaataggtgcgccggaccttcaggccctggggtgaattcagctgctcctacatcagcttccggaaccaccaaaaattcaaattgggattttccggagtaaacaagagcctagagccctttgctcaatgctggatttaatacgtatatatttttaagcgagttggttttttcccctttgatttttgatcttcgcgacagttcctcccacgcatattatcgttgttgccgtcgttttctctccccgc

SEQ ID NO: 44886 - DNA, 1076 bp, Homo sapiens
caatgaagaaatcatctgatgccagggactttgaagtctttctccaagaggtagatacgatgatctctgttttgctggaaagaaagctgatacccagaaagagcctgtaatctcaggtccccgtgggtagtaaacagccctggtttggaacccaggtaagtccaacctgcaggattgtactttccccctttccccacactttgtatttgccaaatctgatatgagggcacttggctcttcagaaccagaagctatgtgtgattgaagggctctattaaaccttaggattttccatgacttgtcgctcccatccgcttcctctccccagggtagcttcttgtctgagtttccgtttgcttcccaccaatcactgtctctctaggagcaatgtcgtcctacggaatcttccgtatcattcctcaactgtaagctctgcagttcaggaatgcaatgttaggaatcccagtgttgcacaaacttcctttctagccgttggattctggtgtgcagagaactaaagagacttcccaggattcagacccttccaatgggaggattctcctaactctaggggaactgttggctgcttaagagcaaaaccatatggctcactcaaaaatccctttcctaagagaaatctataactgaccctctgtgttcccttttctctgaagatttcaaatatatttgtggtaaaagcagagaaagaagaggagaaaatcataataaaagcacaataatgatgattttagtaaagataagaatggggcatggatcaagacaatgactaaaaccccaggcaggaaaagccccgtggaattggtctgaactgaatgtagcagcccatcagtggaagttttcttgtttctggcaggtggcctatgcttttatctattactgctctgtaatcagaattgagccacgatattcaagtttcttatctgaatgatgggaatttggttttctggccttctgcattttgcaggagcccaagaattgacctgatgttttaaaatatattttccctccaaaggaggagtaaaatccagacaggtgggccattctgtgtgtttaaa

SEQ ID NO: 44887 - DNA, 1042 bp, Homo sapiens
acatttaggtcatagaccccatatccaacttactgtctataatttctcttacataggggggcacatttagataagcacagactaattggggttatagtcatagctttagaatagtttaaagacctagctgacggccaggcgtggtggctcacgcctgtaatcccagtacttcgggaggtcgaggtgggaggatcacttgaggtcaggaattcgagaccagccgggccaacatggtgaaaccccttctctactaaaaatagaaaaattagccatgtgtggtgacaggtgcctataatcccaactactcaggaggctgaagcaggagaatcacttgaacctggttgcagtgagccatgatcgtgccactgcactccagcctgggtgacagagcaagaaaaaaaagatctagctgagggagttgggaccagatgattttctccagtgatgtttgaacaaaaagaaaaaatgcagctgggcgcggtggctcatgcctgtaatcccagcactttgggaggccagggtgaacggatcacgaggtcaggagttcaagactagcctggccaacatagtgaaaccccatctctattaaaaatacaaaaaattagccaggcgtggtggcatgcacctataatcccagctacttgggaggctgaggcaggagaatcatttgaacccaggacacagaggttgctgtgccactgcactccagcctgggcaacagtgcgagactgtgtctcaaaaaaaaaaaaaatgcagaagctacttaggttgaacacagaaaggaagaaggactgtgtagttcagtagtgtgtgttctgagaaagccctcacagcgttggtctctagtaatctctggaaataagtgaatcattccagcttgaattatcatgatgcaaaattgtgttcgctgaaaagcaggggttaagtccgctgccttgtgaatttccgcctggaaatgcatctgacccatggtggttgctcaattctgagtgagtttggagaaggaaggaaaatgaggagttacttattagttagtcgttat

SEQ ID NO: 44888 - DNA, 1026 bp, Homo sapiens
agagatggggtttctccatgttggtcaggctggtctcgaactcccgacctaaggtcatccgcccgcctcggcctcccaaaatgctgggattacaggcgtgagccaccgcgcctagctgagaccttttgtttctacgtgacattcttctgtaccgtttgcctgtttgaaaaaaaaaatttttttttgagatagggttttgctttgtcacccaggttggagtgtggtggtgcgatcataactcgcttgcaggcctgaagtcccaggctcaagtgatcctcctacctcagcctctggagtagctgagactacaggcgagggccaccaagcccagctaattattattttatttaagagatgtggtgttactatgttgcccaggctggtattgaactcctgagctcaagccatactccgacctcacaaagggctgggattacaggccagagccaccatgcctggcctgtttgaatttttgtagcaattaaaaattgcgtaatttaaacacaaattgaaggggacagggactaaaaacataaatgagagttagaatgcagtgccacgttgaatgctttcacaggtaggagcctagaaatcatctgttccaactactgcacttttgagttgtggagaccagaccaagagaggtgaaatgactgttggctaaggcgtccacctctacttgcgtctggaattgcccctgcctctgcctttaagtctggtctgcgtggcttctgatagcgaagccaggggcggaccccgttcactgcatcaggagagccctgagcagcgcttggcaggaactctgcagcccagggcgccctctagaggctggaggaccttcgtcaagaccccggggggtgtggatgtggacctggaggagtggtgggcagaaggcggagccaccctttcacccagtcaattgcattcctctgtctttaatgttgggcttcctcagattagattttctttgaagaaagagttctgcagcttaaaaaaaaagtgacagaagaatcactggtgcagagt

SEQ ID NO: 44889 - DNA, 1051 bp, Homo sapiens
agtgtcgaaggtgcattaaacagacatacatatggatgggtggacagaccagtggatgggtgaacacacacacacaaatatacacgtataggtgtattagtctgttttcacactgctgataaagacatacccaaaattaaaaagtggcttaatggactcacagttccacatcgctggggaggcctcacaatcatggcggaaggtgaaaggcacgtcttacatggcagcaggcaagagagaatgagagccaagcaaaaggggtttccccttataaaaccatcagctctcatgagacttactcactatagtgagaacagtatgggagaaaccgcccctgtgactcagttatctcccatcaggtcggtcccacaacatgtgggaattatgggagctacaattcaagatgagattttggtggggacacagccaaaccaagtcaatagatatatatgtgtacagatgtttgagaatttttttaaatgtaagaatatataacaggctgttaaatccatttgcctcactgggataggattgacggtagtagagtgagagggctgttgttaacttagtctcatgtatcttttcatgatttcttgttataatgaacaagcaaatggctaaagttatgaacattcataagaaaatatttctacaaagcatgtatacaaggatgtttgttaatcactgtaatagcaaaaatggaggaaagaaaacctttggaaggaaaatggttaaactattgttcttcaatatgggaatggtacaagaaacttattgggaaatattatataggtattaaaaagattatattctcagaaaataaaaaaatagaattaccacatgatccagcgtaccatttctggatatatacccaaaataattaaaggcagggcctcaaagagctatttgtacactgctgtttatagcagcatgattcacaattgcagaaagatgtaaacaacccaagtgtccacggagaaatgaacggataaacacagtgtgatatacatacacgtaggatattactcagcctttaaaaggaagggaattc

SEQ ID NO: 44890 - DNA, 1050 bp, Homo sapiens
tcgcaggctgccggctgttcgtttgtccctgccgctgatttgggtgtgctgactctgcttcattccagctccttcaggcagtgagagccttcctcccgccagcggtgcttccagcaactccagcaacgccaccaccagcagcagcgaggagatgcgtcccatcaagacggagcctggcctgtcatctcactacgggcacagcagctccgtgtcccaggtacgcgccatggctggggcgccagggctgtttgtggggaggccgactgcagagtcccagaggccagcctagtactgggtgggacttgcagccaggcctcacaggtgcaagcagtgagctaccctctgcgctaggaagacccagccattgagctgtgtggtgccctcagggccgcacgaggctaggggcatctgcatcgggctgtatttcaggacatcttatcaagatggtgatgtggacatgactgtgactcacaattttttaacagctcctctatgccatcatctttggaaacaaagagaggggagtccagggctggcatacagcatgggtggcaggggcggaaaacaacacagaagtacaacctgaatgagactgcgtgctggggcgaggggaggcgtggttgcgctgtcggaggccgagcggaggttctctaggcaagtctgcctcctacgtgcagggaggttagacttcaacagggagggtggggaaggaggaggaagctggcatggggaaaggcctggatcctgcagagggcaggcagggcaggctggtggggaggtcacaggcaggatgccactttcatgagacccagctctgcacgtgtgtcaggggacgccctggggcagcccatgttccctctggcggaggacgatggcgtctcggcctccctgcctcctcccctctgcagttccctctcttgggaccaggatgcaccaagcttgatcacggtctcctttgaccagccctggctgttatctcgtctctgctcttaactgaaggaggccgtgtcttagtgagcttcttattgtctgggagaacctgatcccaca

SEQ ID NO: 44891 - DNA, 1063 bp, Homo sapiens
gagccttccccctgtagggcccgggtggacgcggccgtcctggctgacctgtccctgcccccgcaagccgccctgggcatgagcgacttttgcgtggttcccggtggttgcgctccccgtttcgtcccctccgtgagcatcggcgcttaccggtattttaacccgagggttacacatctgaggcaatgtgggtgggttacgcgggagaggacgagtgagttttttggtaagcggaatgaactatgcagataacatcacatgaaggccgtttctggaatgaagtctgactcctccagtttcaccacctcttccggagctctccccgccttgctgccttccatcgcttcatcctcggtgcttcctgagttttaaaatcgcctatctacgcttccaagttccaatgagttatctaacgtctatggattagctaggtggttggtggaaggtcagaacttggttttacttagatttttatctgcctcatgcctgtactatttgtttaatgaatgcataggaggtgtttttattccaacaagaaaattattcgtacgcgattattgaatgaatagacaaattcagccaagttcttctggtctggaccagcctggctgatttctgtaacttttttgggccaacaggacagtagcaaatgtgactcaggccgaggcttgataggtgcctgaacatcggagtctttctttcagtgtccatgtgcttcagtaaacacactagaaaataaatttctggtttttgtccccagtagactacaccctcatttggtgttatttttcacgtgctatctttaatacaggtacatccttcagtctatttgtagaacattcagttttcttcatcttttctttgccggtgctacattatttgaattattttgctacagaataacttctattatttgatatggcagatgtcactttttatatttagatatagcattcatttatttaacaaatatttgacgaccagttgtatatcagatagtgttctaggtgctggaggtacaacagtgaacaagctaggtgaagaccttgattttataaaactt

SEQ ID NO: 44892 - DNA, 1279 bp, Homo sapiens
atcaatctgattatgtaaatttatgtaaattcagttctcaagtttgtggtttttttcccctcctggagaaatctattctattttaaagtgaggaaggctccgtggagggctggtagctggtagctgttcacttgtggaactttcagcctgaggctggagccccttcctgggagtctggtcttgtcgtcttcctgaccacccccacacccttcctctaaattccctccatccctgtttttctcccgcttgcgagcttttgggagtgtgctgaatctcagactgcaatagataaacccaagagggacaggcaccagtagcctgagcttgctttctcccctggctcatgggaatcaagcagtagaaatttttagtgagtgttgttttccatagtatgcttactagttgtgtcttcctgttttgttcttggtgatttgaagaaacctgtttacaaggtaagggactgaaacaaataggtgacaggaaaaagagcagcaggggtacgagctggaggagtaagtggcttggcttgctctctttcagaatggagggctgtatggaaaggaggggtagtgttcttgaagagtgttggggtttaaatctagggggaccgtgtcttggcattgattgaaactcctggcttaacatcaccccgaaactgttagttggactgaacatgacatttggcagtgcagttaaaaacacttcctgctgtagcctggtaatggtcaggctatgtgaagagctgctctggagctcagtccagagcgggtattctgtttctttcactctgaaatcctgcctctcgatattttgagaaggaaggagttggtgaattgttttaaaatcctcgatgaatgtcttcatttattcatgacaccacttctgaatatatttatgtgccagacgctgaagtttactaatattatggtgcccagtaaatacttgtttttactaatattttttatggcaataaaatgactttttcaggattatgtgatttaaaagattgacccttttggcaaaatacgtattcatgataggaaatatatacaaataaaaacaacatagttcacttaaacctcccaccagagcccagggttcactgttaccattctgaagtgactatggaatttcctagaagtggatatgccatatttttttaaccactcctattggatatttgttttttatttttttgagatggggtcccactctgcagtgtacaatatcatagttcactgtaacgtgtatctcctgggctcaagcgatcctcccacct

SEQ ID NO: 44893 - DNA, 1944 bp, Homo sapiens
aaattagctgggcgtggtggtgcatgcctgtaatgccagctcctggagaggctgaggcaggagaatcatttgaacctgggaggcggagtttgcagtgagctgagatcgtgccattgcactccagcctgggcaacattgcgagactccatctcaaaaacaaaaacaaaaacaaaaaaaatgtgtgacctaaattaggcttatagatgaaccattgcagtcatgattaattccgccattgtttgccttgtgatctttggtgccatgtctgtacatatttcatgatttctgtgtttttacggtttccatttcagatctcccttgagtttagaaatctggctgagaaataccaaacagtgattgccgacatttgccggagaatgggcattgggatggcagagtttttggataagcatgtgacctctgaacaggagtgggacaaggttagtctcataaaacagtgtctgtgtgtgatgtattagacagagctggcagtcctcatagtgaagctcagaacaagaaaagttgtccagtattttcagcccctctggttttacaattcatctgtttaggttgaatgtctcatcataaacagtttattccagagttaattccaaaccagcagctatgtaggatatcagccaggctaggagtagggtactggagagaagtgcttatctagacaaagggatgtaattgaccatgaagattaaaactacacatcaaaacataaggtagggttaggagtcttgcctatttttcataggaatggtgtttgtgagacttactcatcacttctgtggaagtaaagacattttatttatttattttaaagccagtcagatttagcaggcagagacatttcagacatctaaagtgttgatgtatttcatacctttaactgtgcttaaattaggatctccgaaaagatgctgctacatggtcactacgttagtgtaggtccaaggtcttgggcctcttaatttttcaaacctcaaaacttgacagcagttatctttggaactgctgatttgtgcttcctaagttaacagcatacaatgactgctagaaatcaatttctgcatttaaggtgaagttagccgggtactatggtttacctgtaatctcagcactttgggaggctgaggtgggaggatcatttgagcccaggagttagacacaagcctaagcaacatagcgagaccccgtctttcaaaaaattaaaaaatgagcagggaattggtggcatgtgcctgtggtcccagctactctggaggctgaggtgtgggaggattgcttgagcccaagagttgaaggttgcagtgagccatgattgtgccactgcactccaacgtgggtgacagagcaagacaccatctgaaagaaaataaagttgaagttaaaacttctggccaagaaccagcactggttatgatagtaactcattttctgttgtgcagatttattcaggaaacttaattttaggttgttgaatagaagttttgatcagataaaattgaattaaaaaaaattttttttgagacagggtcttgctgttatccaggctggtgtgtagtggtgtgatcacggctccccgcagcctcaacctcctgggctcaggtgatcctcccacctcagcctaccgagtagctgtaactacagtgcatgacaccataccaggctcatttttgtacattttttgtagagagagggttttgccatgttgcccaggctagtctcaaactcctggcatcaaacagtcctcccactctggcctctcaaatgttgggattacaggcatgaccagccaattatttcaaggagttattttttttcttctactttgggggaagatgaattatataagtctccattttaggagtatttctaccaaaagaactattatcttcaaatatatttttggatagtactatagatatactaatt

SEQ ID NO: 44894 - DNA, 1031 bp, Homo sapiens
ttccaaataaaatggaacttttgtggctacattatagaattgttttagactgcttaattctgtgtgttgttgagaaagggaggagtggggaaggtaaaaatcttgacatactttcttcgtgggtattttttcttgagcgattccatcttagttgattagcagttagcaattgcccattcaacagaaggttttcttacctttttgtgataatgatagctaacgacatcatttcttcttttttccctctcttcttgttgtctctaggtgatggccattgccactttggctgcctgttataataaccagcaggtgttcaaaggggcagtgaagattcggaaagggcaagcagtgaccctgatgatggatgccaccaatatgccagctgtcaaagccatcatatatcagtatatggaagaggtgggtttttatttaactacttggataatttgtagctacttttatgatttagtaatgtcactgtttaaccaggtttggatattagatgatcctaacaattcactatcctgtggcctaaagagacaggaattgatatcctttataaggaaaaaagtctattcacaggagccgagcagattgctcactgctgtgtagtaccctggtgagaggagataaatggagcaaggctgtaggttggagcccctcagtagaatcatagattttgagctgcaagatgatgcaggaggccaaccaagcttcttgttgctggtgaggaatgtgaggttgaagcttgtctgtgctgatgcagtgcgtgattgagtggatctctggctcccgtccatgtgtcctgacacccagtctggtactttcattatgccacaggcctcaattgaaaaatcacagtagggaatttaggccaaggaaagccatcaagttgcaattatttcctaaattttctttggaaaatttcatttcaaataccaaaaccatcctataaaaagaaaacttaccttcttaggtcaaatctctaatatttgactaggttcaaaaagtttatttctggccaggcacag

SEQ ID NO: 44895 - DNA, 1032 bp, Homo sapiens
gactcaaaagttttgccactaattgtattaccggggactgtcacaaccaagatttctcttaatttattcaccttacttatctcctggaagggcatattgaagtgctcttggagttctctaaaagggtttttgttggttgtgtatattcacttgggtgccagcgattgattccaaataagtaaatcttttttcccaaaaggatgtaagatggcttatggttataagtacaacaggctaacaaagtacaagtagatgagaaagtaaaatgaagaaataaagtcataggagccacagaattaacccaggaatgaataagtgtgtagtttggtgctgatgttatcatcctttatttgtacattgcttgtacagttgctctgagaaggtaagtcttaaattttcaaaagtgaaatgtcaccgagcatggtggctgatgcctctaatctcagcactttgggaggctgaggcaggcggatcacttgaggtcaggagtgcgaaaccagcctgacttatgtgatgaaaccctgtctctactaaaaaaaaaaaaaaaaaaaaaaaatacaaaagttagttgggcatggtggcaggtgcctgtaatcccacctacttgggaggctgaggcaggagaatcgcatgaacctgggaagtggaggctgcagtgagccaagattgcaccactgcactctagcctgggtgacagagcgagacaccatcttaaaaaaaaaaaaaaatctacaatataccaaaaccattacttacctgagaaactattctcagggtcattgtagtgaatgcctattttatggcttttgatggcatcagggcactcaggtcatttacaagagtagtgtgtgagaccctgtgtgtcactgccactcatcttggccttcggccactgctgtagcaaccagtttccaagtagggctggaccttgccttctgctccagagacctctcgcttcctgcccttgggcttctgacgagctgcaggaactgcctggcacgtgggtccccacaacccagaggaggtgagggc

SEQ ID NO: 44896 - DNA, 1154 bp, Homo sapiens
ataggccttcctgccttctgtttcacttctccactcgtttccaaataaatggctgcatgcaagcttttgcctcaggttctgcttttaggaggaaggctaagacaagcagtaaagcaacatgggcaggcagaaggatgacttctaatagaattatctcatcactatatattttactttatggatgcttgtattgaaaagtcttggctgggtggagtggctcacgcctgtaatcccagccctttgggaggccgaggtgggtggatcacttgaggtctggagtttgagaccagcctgaccaacactggtaaaaccttgtctctattaaaaatgcaaaaattagccagggatgcacgcttgctgtgtgccagcacagggctaggctggagataaaaaggtgagtaagtaggtgcggtgtagtcagggtgaaaactacagatggtccatttccacgtaagtggaaaggtaaaggtatgtacaatagggtggctcctggctgaacctggagctgcagacaggttttctagaaggcataatcctgaagttgagacttgggggcctaggtaggagccagttgaagggacgtgggaggcgcattccagagagaaggagtggtatgagactggaacagaggtgtgcagcagcatcgcatgggcgaaacaacagtagacagttgttcttttgtttttgtttgttttttgagacagggtcttgttctgtcatccaggctggagtgcagtggcatgatctcggatcactgcaacctccacctcccaggctcaagtgatcttcccaccccagtccccaagtagctgggggaccacaggtgcatgccacgatgcccggctaatttttgtacattttgtagaaacagggttttactgtgttgtccaggctggtcttaaacgcctgagcttaagcagtctacgtgcctcagcctcctgaagtgctgggattccaaacatgagccactgtgcctggcccggcaactgttactagactgtagagagggaggtgggcaagggctggtgacactagacaggtgcagtaggtctggaccatgggtggccttgcgctacacattacagagctcaggctttttttctccaggtgagagggctggtgccactgaggcatcaagcagaggtttgagatct

SEQ ID NO: 44897 - DNA, 1282 bp, Homo sapiens
acgtttattgggcctggcactgtgaggtgctggggatgtgaagatcattgtggctcagccgctgctctcgagggcctctgggtgcagtatgcacacctgtgcctcctgtttgctcaggaagacaggctttgagatgagctggggctgacatccccaccttatcattgggatggctttgggtaagttatgttcatgttctctgagcctccctttcctcattggtaaaatgggtataaaatacctgccagtggagggttgttgtaagtagccatggaaaatgtaaagcacatagcacttatcattttttcctgtgtctttaacagatttatcatagaatccccgactcagacccatcttctagcaaaacaaggcagatcatctccaccatccggacgcagaatcttcccaactgtcagctgatttcccgaagccactactcccccatctacctgtcgtttgtcatgcttttggctgccctgagctggcagtacctgaccactctctcccaggtaacagaagactatgttcagactggagaacactgatcccaaatttgtccatagctgaagtccaccataaagtggatttactttttttctttaaggatggatgttgtgttctctttatttttttcctactactttaatccctaaaagaacgctgtgtggctgggacctttaggaaagtgaaatgcaggtgagaagaacctaaacatgaaaggaaagggtgcctcatcccagcaacctgtccttgtgggtgatgatcactgtgctgcttgtggctcatggcagagcattcagtgccacggtttaggtgaagtcgctgcatatgtgactgtcatgagatcctacttagtatgatcctggctagaatgataattaaaagtatttaatttgaagcaccatttgaatgttcgtaatagtagaaaatgatgtgaattttctttctgttcggctcctatttttctcatcattttgttttctttaattgggttgaatggagtagatagaaatatttatggtttaggtaacagttagatgtttcctaagaatgcaaactgccttttccacacaaaggctgggaataaaattctgggtattctcgtattctcatttaaaggagtttagctttcagagagaaacagcaggattgcttttgaccttttagaagattggtctccagtaaaggtggacatttttgagatttttataataaagaatttaattgctctgcatttgtcaagtacagttcgcttgaaagcctgcctgactgtggaaaagat

SEQ ID NO: 44898 - DNA, 1022 bp, Homo sapiens
caccccagtcagtgttccaggagttggcaaccagccagtagggtgtgccattctccactccccagcccaggatgcggatggcatggccacccatcatctctccggtgacgtgttggtacactcctgaaaagggaagaactggctgagaccgagaccgggccactgtcccacgccccacagcaccccccacactcagctggtcatgctccgggaaggagaaacagcttccagagggaacctgctgctccaccaggaggctccagggggggtcccacaatactggggaattaaatatatttttgaaggcccaacacactcaaagttgttgagtaaatattgaaatagattcctacaaaatgtgcttgttggctttaaaaatagaatttctaatacattctaattgataaaacatttaatgctagatgactgattcatctgttctttatactgggattccatgtaagtaagggtttgtcaaaagcgttacacggcttaaagagttttaatagctgctccaggtacaccctgaagaggtgagggaggagaagggaggactggtggcagctaatgctagctgatgggaaagatactggctaaggggctcagggctgcccaaccaggctctcgggtggggaaatcactgtcaaagtggaaatgcatcttttaataataagggcgaggactatgctaagaagtgccatcttcacagaaactttttcttgccagaatcatcttcctttgtcaaactgttgttttacaagtttccaatctagcaaaatattaatgggatagatgcagtcagcaaagactgttcatctggagcaagggatttctaagacaggacttggggatggggactgtccagattccttggttggagtccctatggcactacccagggcaaggtcctccctgtgtgttcatccactggtgtgaggcacgatctaggcctttgcaaagagaaagatgaagaaaatgtgtcagccagtgcaaacacgaacggcctgccattataacagaaa

SEQ ID NO: 44899 - DNA, 1048 bp, Homo sapiens
aattaggatgattttaaggatggtgatgaaatgagtgggctgtgacctttggccctgtttctttcctttgtcttttcatgggccaggtgtgcttcatcagaaggcttcctatgcccgatgtaaagtgtcctgggggaagaaaggagcactgcttagaaagatgctccacagggagaaaggagccgccattttcagaagaatgttccccagaaacatgagcaatccagatgccgtggcttcacacagggtgttggatggtcttatctctttaagcgggacctaggaattgttgtcctttaatgctcataactgcttttgaggtgagccgaattgatgtcctgcctgcgtgtcatgctcattgcactttaattcacacacatgtcacacacaaacactctgaataagcacatttttgttcttgagcaatatttcacccaagattctgtggttctaccgagccctgagttctgtcctggacatctcaactctttggtaggtcaactttgatctttgtacctaatgataaatggactatgaaatcttatcagcaaatatacaaaagtaaggggccattctccacaatcgtttctctctggtaggtcatctttgataactgtacctaacaagaaatgaatatgtgatgattcctaatcaaaaaatttcttgattttttgccattttaattaattctgttaatgtttaaatagagttttaaacccgagatttggcatgaagtctaatcgtcaaatacacaaaaggaagggtccattcttcaaaatcttttccactgaaagaccacctctgatatacaagtctcgttgcattacagggatcctgcttccaagatgcagctttcacagcttgatgattgacccagaatctcctctaatgccatttttttacacccaaaatgagatttatttcagggcttccggattttattttagctgaatacatccactcttctgtttccatttctttcaaactcttttaaataattatcttgctgcatcagcccttatataactactgtccacccaccgagacc

SEQ ID NO: 44900 - DNA, 1107 bp, Homo sapiens
tgtgttcctccgctgatgtgctcctctcgaagtccagctgcctgtgtctgcctgctagggtctcagggtttttataggcacagaaggggggtttggcagccagggtggtcttgggaaatgcaacatctgggcaggaaaacaaaaatgccagtcctcacctaggtccgtggacacaggccctggggtggagccctagccagggaccacaccctcctctacccagtacttcccttcctcacttccatatcatttaaagggaccacattcttcccttctgagcacttcccttctgtatcacaaagttttgggattataggcatgaggcactggtcccagccaattccgttcttttaatgcaaactagaaaataggtgttcagaaaggcctgccctatccacctcagggagttgctatgaagatcaaattagaccatgtgcaacagaagtttagaaaagattccaaaagcactgtgcaatgggaatgtatttttaaactccactgagtggacttaaaactatggttttctttctttctttctttctttttggttgagacagagtttcactcttgttgcctaggctggagtgcaatgatgccatcttggcttactgcaacctctgcctcccaggttcaagtgattctctgcctcagccacccgagtagctgggattgcaggcgcccaccaccgtgcctggctaatttctttctttctttgtttttgtctttttagtagagatggggtttcacagtgttggccaggctggtctcaaactcctgagcttaggtgatccacccaccttggcctcccagagtgctgggattaaggctttagccaccgcacccaacgtgtgtttctttttcaagcaagaaaacaaatgcctctccccagcgctcactaaacaaatccctctgttatttttttttccataggattcttatccttcttgccccactgcaaacaatctattttcttttggcccttccgtctgtctgtgaaagggtcaggctttctagctaacccttaatcaaatatttttgatgaccacagtcaagacagtacttattatttttttggggggacggagttttgctcttgttgcccaggct

SEQ ID NO: 44901 - DNA, 1025 bp, Homo sapiens
cagcctattgattctctatccgagtgaaattacctgccagtggagaacaagagaagtctttgcatgaaatgctcttgtggaagctagatggcaagtaataaagcatcaagtggtagaaacatgcactaaagtctgaagagatactcagtgcacaatgtagagtgtgtaagactttggggaaatcatgcaatcaccgagagactaattgatgacattccgcaaatttatgtgtgccagaaaagagagatgaaaatgacattgtatagtgaatggtttcggacgtgcgacggcagtttaagaaaacctgaaacaaaaaacttgagaaatcagaaggtatcccaactataacctttggtttattaaagaattgatgaaaataaaaacaacgtatctcacagcatgggtgataatattttcatacgtatgtgataatggatcaacatttgatagagatgaaatgaaaagttctaaatttgacaaaagcaaacaccgaaaattgcaccgtagaaaagccctggtgacgggagtgaggccctgtctcaagaagaaaacattggagagatttaaaagcagagagtgaaacccaggatagcataagattgttaatactggcccttgtttcagtgggaaaaggcaaaaataagccgtgtgtctcctggattctcgcatcgattgttcaggatctgagatgttgcctccatttacagttacgcattgcatggtggaattgcagttagcacatttggtgcaaaaattttagtgctgacgaaaatggacatgttccctgaactaagagggacataatttgggtgtgtcttcaggctctctggcttaccaggattgaagatctaggctctagggattctcccaaaatgtcttagacagtaagcactggagcagaattgaggcccggcgccaaggtctcgaggtgtaaagaaacagccgtggcctcagggcccatgaaattaggatgattttaaggaggatgatggaatgagaggactgtgacctttggccccgtttct

SEQ ID NO: 44902 - DNA, 1028 bp, Homo sapiens
tgtttcttaaaagaacgataaaaataattgcaatgtaacacacggcctgtgtgataatgttttaatacatatctaaaaatgccttaaaattcaatagaaataaaataacaacttctaaaacttgacaaaaggaaacaacaaaaattacacactggaaaagcctggctgactggagtgacatcctgtctcaagaaagaacagacaaacccacaaacaagcaaaggattctaaaagcagggaatcaaacagatacttgtacaccattcttcctactagcactcttcatagtaggaaaagtcaaaaacaacccaaatgtgtggtgaattacttcatcagttttttaggatctgaaatactgcctcaattttcagttactcattgtggagagaacctgcagttaccacatttgttccaaaattttatggtgatgaaggtaaacctgtccggcattctcagagggacagaattctggtgtttgtccaggttccttggcttaccaggaatgaagatccgaactgtacagacttttttcaaaagtatgtacatatgtatgtatgtatgtatgcatgtatgtatgtatgtatgtatgtatttcctctttttaaatttaaaaattacaggatacatgtgcagaatgagcaggtttgttatataggtatcctttgctatggtggttcgttgcacctattgacttatcctgtaagtttccttccctcacccccagcccccaacgggccgtgttgtgtgttgttcctctcactgtgtccttgtttcctgaatgttcaactttcacttattagtgagaacatgccgtatttgttttttttttgtttttgttcctgtgttagtttgctcagtatgatggcttctagctttatccatgtgcctgcaaaagacataatctcattcctttttatgactgcatagtatattttggtgtatatggaccacattttctttatccagtctagcaatgaagggcatttgggttggtttcatgtctttcctattgtatatagtgctgcaat

SEQ ID NO: 44903 - DNA, 1075 bp, Homo sapiens
cattcctttttcttcaggttgggcagggccacggtcatctgtggggcctggtacccatgcactgttattaacatatacttcaataggattatctatccaagtgactgctcgaattaagggtgggaaaatcacataggcccagtaagtatagttagctgtagcggctcctgaagacatagggagacttaccaccgttgatacaatcattaaatctgcaagtagcatattctctggagtttgtgttacccttgtgttttccaggcttttttcagctaactgtgtcagcttctttagctgggcccaggtcggcggccccactttcttggtggatggcaacttcatctgttcttctgatatcaccatttcgttcaccctgcgagtcgatgatgttcgattgcgggttctctgtctctgcggaggtgccttcccttgcacctctgatgggttcattgtagaacttcaaatgtctagtgggtacccaaagaggaagctgattttctgctgttggaacacaagcaaaacctcacccccatgttatcaccttacctatttcccatgttttatttttgttgtctttccaccaaatcagttttccctcatgtgggctgttctttttaccagtaaaatgttgttctgcagaagtagtggtctgatttctatatatatttaaaaaatttaaagtatagagtgctagattaagttgcatctggggagtattatactccttactttttccttcttttgtttaaccaattgagcttagagtgttctattagttctttcaattatggcctgtccttggaaattaaggattcctgttgtatgtgtaattttccactgatttaaggatttttgaaatgctttactacagtatcctggcccattacctgtttcaattttttctggaaatcccatgactgcaaaacaagataataaatgtcttttaacatgggaagtactttctcctgtctggcaggttgcccatatgaaatgtgaataagtatcaactgtcacatggacaaatgacaattttgcaaatgaaggtacatgtgtgacgtccatttgccataatgca

SEQ ID NO: 44904 - DNA, 1050 bp, Homo sapiens
ggtgctggaaaaactggctagccatatgtagaaagctgaatctggatctcttccttacaccttatacaaaaatcaattcaagatggattaaagacttaaatgttagacctaaaaccataaaaatcctagaagaaaacctaggcaataccattcaggacataggcatgggcaaggacttcatgtctaaaacaccaaaagcaatggcaacaaaagccaaaattgacaaatgggacctaattaaactcaagagcttctgcacggcaaaagaaactaccatcagagtgaacaggtaacctacagaatgggagaaaatttttgcaatcaactcatctgacaaagggaccaatgactttcttataaccaagagaatatggcagaggtgatgggatgtagtgattatgttagataggatgttaagttgtcttgctaggaggttatcttgctggctttgaagatgtgagctgccatgtcatgagtggccagatggagaggcccatgtggcaagaagctgaggacagcaagaacctggggccctgagtccagcagcctgcaaggaactgaatgctgccaacaaccagatgagcctggaagcagatcaatcaccagtcaagcctccagatgagaactgagccctggctgacattatggttgtagccttgcactgaacccagctgagtcacgcctggattcctgacccacagaaaccacatagtgataactgtgtgctgtctcaagccacaaagtttgcagtaatattgttgcacagcaatagataactaatatgaaaactgtcctacatcatgtacattactgagtgaaatgtagaacctggatttaagctctgatttcagagttgtggtttcagtctccccagggagacctgtcctgggagacagttatgccaggctgtgatgctgtgatgattgttctcttcctacccagaagctttcaataggcatgtcaagcatgtgaccccagctacatataccaaatatatttctgacaaatgacaggacatcatgagctttcttgttttactgagagctccat

SEQ ID NO: 44905 - DNA, 1034 bp, Homo sapiens
tttatatttttggtagagacgggatttcaggatgttggccaagctgctcttgaactcctgatgtcaggtgatctgcccgcctctgcctcccaaagtgctgggattacaagtgtggaccactgcacccagctgttatttattttttctttttttgtacagacagggtcttgccatgttgccaaggctggcctggaactcctggcttcaagcaatcctcccaccacagcctcccaaagcactgggatttcaggtgtgagccaccatgcccagcctggaatctatttttaaagccaatcaagcgttgaataaaattgcaacttgggctgttttttctttgcattttttacatttcaatggttttcaatatattcagagatatacacaaacattaccagtcaattttagaacatttcatgacctcaaaaagaaacctcataccctttagctaacagccccatcctcccatgcccctaccacccctaagcaaccactaatcgacttcctatttctgtagatttccatctgaatgaaatcatgtagaatgtgatctttcatctgttttgaaggttcatccacgctgtagcgtatgtactatcctcctttttgtgatcaaataatattccaccatgtgggtagacaacaataggtgtatctcttcatctggtgatgggcatttggattaattctctctttgggttattaggagtgatgctactgtaattattcatgtacaaaattttgtgtggacctgtgctttcatttttgaatatgaaaatactgcgcatctccaaggaagacatacaagtggtcaataagcacatgaaaagatgctcaatgaaattcatcatcagggaaacagaaatcaaaaccacaattagataccacttcatacccataagcatggctagaatcgaagatagagaaaattggcctggtgcggtggctcatgcctgtaatcccagcactttgggagaccgaggcaggtggatcacctgaggccaagagtgtgagaccagcctggccaacatggtgaa

SEQ ID NO: 44906 - DNA, 1022 bp, Homo sapiens
tcaaaatcaacaacaacaacaaaaaaaactgaacatctccatattactgacacccaattcaagaaacaaaatattacagccccttccaggatattcctggggtctcttccatctctactaacccctgactacaaacagcctccacctatttcacctgacattgtactttatgaaagcagcagttctcagatggggctattttgccccctggggacattagggaatatctggagacactgagggttgtgtctacttggggggagttgtgttactgcatccagtgagtccagggatccagggatgccgctcaacatcctgaaatgcacagggaacccccacacatagaacagagaaattgctgagccaaaatgtcagcagtgtcacagctgacaccctgatatacacactatcacacagtatctgctctttcgggctcaggatctttttcattctaatcatctcataggaaacagaaatgtcatttagaggtaggtagagtccaaaacaaagaagaacctgagtttttttttttttttaatcagcctggtgcctttagagctaggatttagtttctattctttctgtctcattttcaagtgattttttcttcaaatggcatctactgggctcaagaactggagatccccacaaagctgagattcacatgggaattttgtacacacccacacaggtatacacttccatttacatgcagacatccacccacagatacacacatccggagaccaagacagaacgcaaactgccccataaaagcacggttccccaaacaggagaaacacaccattcactccagggaggtatctatttgtttaattcagcctctgatagtcaggctgttgccaagcccagctctgaaactcttcccctctaggaaagaaagatggattttttctttactcaagaatatagatctaaaaaaaaaaaaacacttctgcatctcaaagcaggctctacctcctgagctacacgtattgatcagctttttattgtcaattttc

SEQ ID NO: 44907 - DNA, 1046 bp, Homo sapiens
ttgaaaagagagctctgtatacactctttttctaactccaaagaaattttgtttctagaaagattcaattaccgtaatgatgttctttggaaatgtgcctttttgcgtgtatatcttaatatggataaagttccaaggtagttcaaaggttttaataaaattttacttaccagagtgatgtgaaattgggaataccctgtgtgaatggttaactctactttaaattggaaggtcaatgggagtggggatcttcccagtaaatcttaaatctctgtgtacgtgtatctctgacagcgaaatcttactggagattgcaggggttgtaaagaagagaccagaccttatagtatttctgatacgcggatatgtgaatgcttaaatgcatttcacttgtaaagaatttatatgctcctttagagaactagtctccaaaatttgaaacacatttatgaagaaggctctatcattgctttgaagaagacacaagcaagacatatttggcactatacaggctcataatattgagagcaaaatgcaattaaatgcctgtttactacatgtcactgttctcatttgtgtttttaaacaggaattgagtgaaagctctcattgcgattaagcccctggtataatgcattattgaaattaggctgtcagcgcttgtctgtgcaatcttatgtttttactcgtagataaattaggaattcttctgaaaagaatggcatgaaagcattaagataactggagaattcatttaaggacagactgaagagtgatgccaaatggccatttaaatgtccttcagcttttgtgactcacttcttttgatgccataaagaaagtaccttgcatagaactcctagctgagacatcttcaaaaagagttaacatcattcattttggatactcacttctcatccagagaaacttctaaccactcaaagaagacattttaagagtttgaactagatcacctggattaaaaagcccagctctgagccatttccttgtctgtgaaatggagataatgacacctccccaggtgg

SEQ ID NO: 44908 - DNA, 1056 bp, Homo sapiens
gctgtcacacttgcatcttctccaccctagacaggcctttgactcagctaggttaaagaagtaacctgtggttgtttttagagatgatgatgaggtggtaggggaaggagggcacttgaggagtttggtgtatggtcctcttcacacatatgcgtgtttttattctctttgcctttccccgttccctcctatcctcccttcttttctctctaggggtcccgatcattatttcccagcctttgttaatatgtctcggcatcaaccctaagccgtaaagggttgttagtcctgatttgggtagtcctgcaaggtgcagcctatgaacttcttgttcttaaaggtgtaactgcgaatgtcaaataggcacaacctttgccacttccatggttcttctggggtgttacgtcccattttgctgtatcgaatgtgctcatttctaccttctctttcttctctgttaggttgcagataatggaaactatcctaactatttcgagcaggaaggggttgaatatgagaattagatgctcacaggaaggttggaatgaaggttgcaactgaaagtaggggaggggacctggcctgagcctcatgcgttggctcccgggcggcaagcttgatgggcccccagggttgctgctgtcattgccacagcctgggggctgggaatcagaaccaccgctagaactgctaacatcaagggtgcaccttttgggctgtgttccattgatcagagaggctgctgcaaaatgcctctccaccctaggaagctggtgactgaacattgctaccaacaacaaaaacaagaaagcaaatgttttccttagatgctctccactttccttcttacgctactcatctccctgcaagaacactgtgcccagaaccctagctgcaagggactctgggaaatgcagcttataggtttctagcctcaaaggtagagggatgcacacttgaaggagataggagtgaatgttctgtgacaatccatcatgcctaacacatatctaaaatatatttcatccgagatttggctagagtatttatttttaa

SEQ ID NO: 44909 - DNA, 1031 bp, Homo sapiens
aaggagacaggctacagcagaatagggagcttccaggtacccagaaaagtattcttcctttggctgtggaagtagacacctgaatgccagtgtcaagaacatacgtgcagctgatctcaattcagacaatccctttatggaagtggagacatcaaattgcaactcttcattggaagttttaagtaacacaatttccactggagctttacagtcctggaaagtaatgtccatgcctctgggacaaataaggagttgctgcatttactatatgggaattgctccccctgtttaattctctgagccagttttggcactctaaggagtcaacagaggaaatctgctcatttttagtggcagccttaagggaaatagttacatttcagtcactagtagtaaccaagcttaagaaaatatatctgcaaaagctacctgacaatcagaaatggtagctgagaaccaaacacgtattaaggagctttcagaaaaatggagcccacggagtatcttacggcagcccagaatggacagtgttcccaggcctgctctccttggactgtacctgtatgggtgaagactgaaaaatgaacaggcaactccacacagaacctgcacacaaatgtctgtagccactttgttcctaattgccaaaaactggaagcaaccaagatgtccttcaataggtgaatggataaacaaattgtagtatatccttacaatggaatattatttagtgattaaaaagaaatgatttttcaagtcacaaaaagacacggtggaaccctaaatgcatattactaagtaaaagaagccagtctgaaaaagcctaaatgctgtgtgattccagctaattgacatatgcaaaggcaaaactctagagactgtaaaaagatcagtggttgccatgggtcgagtgtgggggtaagagaagaataggttaaacaccagggatttgtagggcaataaaactgggctgggcgcggtggctcacacctgtaatcccagcactttgggaggccaaagtgggtggatca

SEQ ID NO: 44910 - DNA, 1047 bp, Homo sapiens
ctttggagagacaacaggagaataaaagccgaaacatgcgtatatacaaaatgaaatatgaatgtgagcttagaggctacacgtggtctctcggatactagaactatctttcttgccttggaccagctaacgtgccttggttgcgccagtgtactgagccctgtggacatcacctcattaaatattcaataaatgttatttttttcctattgcctttctctcttctatatgagaatctgtaagtattcgccgaaggcttttcttttgcttttgtgaataccttcacaccatgttgtattctgtcttggttagttaaaaaaaaaaaaaaagttggccaggcacagtggcttgcacctgtaatcccagcactttgggaggccgaggcaggcggatcacctgaggttgggagttcgagaccaacctgaccaacatggagaaacccgtctctactaaaaatacaaaattatccggtcatggtggcacgcgcctatgatcccacctactcgggaggctaaggcaagagaattgcttgaacccgtgaggcagaggttgcagtgaaccgagattgcgccactgcactccagcctgggtgactgagggagactctgtctcaaaataaataaataaataaaaggttaattatatttcttgttatgagacaaatgaagtatttcacattttccattgaggatagcatgtaacgcaggtttttctcttataggttgtgggactggaaaatatcttaaagtgaacagccaggtacataccgtgggctgtgactactgtgggccactggtagagattgcccggaatagaggatgtgaagccatggtatgtgacaaccttaatctcccctttagggatgagggcttcgatgccatcatctccataggaggtaaggcagccagatcacacattcaccctttgccatgagaataattgacccggtttagtccgttctcatgactcaacatccgttctgtgtagaaatgtcaatgtaatttattttatctaatttaaaaaaattgtttcaactacttgactgat

SEQ ID NO: 44911 - DNA, 1047 bp, Homo sapiens
atatataagtggagtataaattaaaaattaatttggtttcttctatttcttttttttttttttttttttgagacagagtctcgctctgtcgcccaggctggagtgcactggcgcgatctcggctcactgtaagctccgcctcccgggttcacgccatcctcctgcctcagcctcccaagtagctgggactactggcacccaccacgacgcccggctgtttttttgtatttttaggagagacggggtttcaccgtgttagccaggatggtctcgatctcctgacgtcgtgatccacccgcctcggccccccacagtgctgggattacaggcgtgagccaccgcgcccggcctgttccttttatttcttaattcaggacactaaaccatgactgcaagggatttccttggtaaaaagaaaagattctcagagtcaaaatggtcttacaactcgggcttgacggcctttgaattatgaatggattgttcctctctctgaagcctattgtcacatgggtttttaatcctggccttgctgctagaaatctgtgcttgaagtcctctctttctgctgctagcctaccagttaaaagtcaagacttggtggaactcagtttaccagactctttagcctttgagctaaactgtctgagcaacctcttagatgtgcacacaccactttgtatgaaagggttctctagaacggttctttggagagaaatattttcatgtacgtttgacaggggtgtaaataaagcatgctgactaataagtcttttactcttcatctaatgaacataagaatctatgcatccagatattattttgtatacaaatatttaatttggtgattgataatctctctttggggtagtcacatggaaagctcttttaaatttaacttccgcctttggattttttttaaaaagccattgaagagcaaaactaatgtaaacgtcttgatcatttaaaaagcttgcttgtcctcgaaaggaaacacaggtcatcagtgagtataaacgtagacagttgatttgtgaatgctgtcgg

SEQ ID NO: 44912 - DNA, 1497 bp, Homo sapiens
gtatttgtataccatattccaagagttttagatttaggagttcacgagaaaggtagaagagtgaagaaaaagtagacagttttttttgtggattaccaaagcaaagggcaataaaagatgatgaagaactccatggaaattgtgatgttttatctcctaggacgatccctaggaccacgccaattttcatttgaagggtgtgaaccccaaagtattttaagactgaccttaatcaatttttttttttttgccagtgttaaggatgcactggtgacacagcctctggaggtcctgatggcaggtgcccaaggtggtcagggtacagctggcttttatacattttagagagacataatacattgatcaatacatgtaaggtctacattggtttgatctggaagggtgggacaactcaaagggggaggggcatccaggtcataggtagatttaaaaattttctgattggcaattggttgaaagaattgttattaatagaaaggaatgtggagaccatggttttattagccagatgaagcctccaggtggcagacttcagagagaatagattgtaaatgtttcttatcagacctaaggtctgtgttgatgttaatgctggttggcttttccagaattccaagaagaaggagggtataatgagcatgtctggctcacttttcccatcgtcgcctgaagtggtttttcaggttagctttgggatatgccctcggtggagaagaggggccctttcagatggctggggcagaggtcggagggtgcttacatttttgtttttcgtttacaaggggaaaaaaaaaatctaaaaagtgtacatgtttacagcatctgagtatctccaataataagatgactttaatatgtgaaaacatttgtggatttagtataattaaatctaaattacagcaacatgtttctattaaaattttttctcgaaatatatttttgaaatgaaaaattagggagaacattgttgaggattaaaaaagtttttcttgcaaattagttttatttctcctaagtaggagcacttgatttcactgtatgacagtattacagtgtatgtatattttactgaagaaaagaagagcaaaataagagcttaaatagttgatgttttcaagactgtactttcagggatcatttctatagtttgttaaatacttggtgttctgatactttactcaataagcatgcgtatctctgaaatacaggccattccgtatctggtactcactaagttcacaaactgtgatctcttccaatattggaagggaaacacgctatattggaaagtgtggtcaccaatgtggtattttcctagtgatagcccagggttattttgacagtatgtggtctctttctgtctagctgactttaaaacctgatgcctatgataagatttggcacaatggaacctggaagtgtagcagttgaaagttaatttactattaatataataaatattattgacatatgtac

SEQ ID NO: 44913 - DNA, 1033 bp, Homo sapiens
aaataaatatgatgagtatgggtaagttgtacagattatggagttgtcaagaggcattatattttagtggtcaacttacattcttattacatgttttgttgtcattctgctctcatttattccctaaaacagtgttcctcagactctctcttttgcttaggccctttcctgtaactggaagattgttttctatttttaatcgttaggttagggtgggtctggacaatagatattatttagtaaagcattcagctgcctcttcaccccttgagagtaatttataagttggtaatttttctgataactgtctcacaaagcttacttttagggttttgacccatagttgcttccatgagagctagcttttatttgatagctaacattttttcattttcttttgagaatttgagagaaattttctctacagagaaatggatcaatgaaacattattttaagctagatgttactctttatgttcaaatgggtttttatccaggtgtaaatcacttggaaaacatttagagcaatcagccagttagaacctaataaacatattcaactttatactttcaattataaggagtgtctcctgctgtgaaactaactattctagtgttattgtattttaaggttattttgaaggagaatagagagtttaactttggggtggttctttttctgctgtgcttcatttttatttcttgaagtatttagaaaatttttatactgactataaacttatccgtagcaattaatggtttaaaaaatattattagattgtcatgtaaaatgcacattttatgggacattatgaactgaataattttgcgatagatgtattttttttgcatataaacctatactactttatgtttggaattaataggaattaaagtggattttgtgtacttgatttttaacactttgttttaaaaggactaagactgctttgtcatgtagccaatgtgttgtattaagattcctcagtgagaattatttgattttattttgcaatgatattcaaatatattt

SEQ ID NO: 44914 - DNA, 1015 bp, Homo sapiens
aatatgatatgtaacacttctcctttttagaagacctacaaccttctctttgttcttcagacatactgaagaccactcagtctgtatatacctcaaattgcaattcttgcttcccaaatcaaatcttacatttagagatctgtctgtacatttttattttgatttcaacaacatgtaaagatacatgtagctaggtgaccatgaagttgatcaatatgactggaatacaaatgagaatgaaaggagaggctagtaaaaattaccccatggcaataagaataaactagaactgttctaaacaaatctaatgcaaacagggtgagattttatgtcgtcaaaatgaaattaaatagtatactttagaaatctttttaaagccatgtaagacattaaacatttaatatttgatcacagtgattatagaattcagaattatgttcaattcttttttggtttaagttcatagtcattttgtaataaaatgcggaactaataaaactcactttagatttgaaagctagagctagcgcagagaagattgacggtgatggtaaaagtgaaaatcctgctacatgaggattactggaagtaatttgccaagtttagcttggaaaatgaaaaataataggcttattattgttccctttgaattataaaaatgtgttctatggttaaggctttttctttgtagctccagagagcaaaactagatcccgtggatggtaaatatatgcattcaatgtaagaaagaagaattttgaaatatcattgttttgaagtgcaattggctgcttagtgggatagcaggatagcaagctaatttgtactggaagtgttcacctttagtgctcagctgtcaagactgtacatgccatattttgtgggaggtttaattaaatttaattaaaatggattttttttcttaagcaagtattggaagagtacattaaaagaagtataagccatttatgtatatcctaaaaccagaaaaaaaccacaaacccttattttatta

SEQ ID NO: 44915 - DNA, 1034 bp, Homo sapiens
tgtctgattattttgttttttgtacatcatttataaccattatcatcttacaaataagcatacagccttagacaacttaagtaatatagtcagtgtcctaccaaaagtgagttaatggttgagccaagccatgaacaaaattctgattctagaacttcttttggaaaagttcgaaataagtataaattctcactatccctagtgaggatagagtaggaaagaacggatcaacttcagcttaacttaatgtagacttgatctttttggtaggcgtagatttcactttataatgtttgtctgtaatttcataatgcttctctgaaaattccatttaaatttggagttaggccccactctattaatattctgttaaaagcatctgacttagtatttaggaggtcacaaattgtattgtaacagaggtgatagatgacatttatggatattttaaaattatcttagataattccaatgtacagcctgctaatgctttacacaggagtttctgattggacttttcactctgctctggtttcaggcctttatgtctttaagtctttaattttgcagatgaggaattccagagtatctccagagaagttttatagccagttaatggcaaagacagtttatggcaaagtcaaacccaggcttcttcttatacaaaacccaagctttaggccatcatgcctagtgagagacgtcatgagtgaacattagcttttgttttctttctcctccggcttctaactttcttctctctcccagcatctaagaaaataaattctttcttgccaattcccccattaacatttaatttttgttttgaattttatttactatttttagaggttctagaatagaaggaatttccctgaacaccactctgccatgttgctctatgtgggggattcttcaaagtatttataaatatttatttttatttatttatttattattattattggtttttgtttgtttgttgcttttctgagacagggttttgctctgttgcccaggctggagtgctgtgg

SEQ ID NO: 44916 - DNA, 1033 bp, Homo sapiens
gcaagtattttgatcctttaagttcttgattataagatttgttaggcaggattggagcaacattcagtgtagggataattattccctactattgccagagcatctgaatactctacataatgtcttatgagatttttcaatttggctggtgggaacaggcactattactggtcctctgtgagtgctggatactactcttatgaatcaggttcgctgcacactagttatcaacttgagtttggtgagatggaatgtctttttatgcaacaagttacataagacagattcatgacttacaggcaggcagcaaaggaccacagaagcctaggattcattgctggttgcccacggctcacggaaacttcatgggacagatggagttttgactggatgcgcgtcatcttcactgcaattgagggaccctggaaagttgtctaccctaggttttatacttcggggcaatatgatactctgggctaaagctctgaaggacatcctgtttctaagggggactggaacagaacttgggctattcccaccagtccctccctttctcagaatattgcattcccatcactttgttattctcaaactgcaagtgagaaaaatacggaaagctgggctcttaaggccgtttggagaactgtcctgtagttctcattatactttcagatagatacttttcccagcctctggtaatttctttacacataggatttgatcagcactcagctgaatattcaaggggaatctctagatttccaggcttctctttgtgtaaatctttcctctttagtactctgccctgtgattctaggtgccttggttacctggactttccgctctgtttccatagctcaggagtcagctggtctctgcctgtactctccctctctgtgctgtaggcttgaatctctcaagggagtagggtggaacagacatagggctcactttgttccctgtctcttaggcatcagcgtcttttatatcctgatgaccagcgtcctgaaaactgttacatatgttttgtttc

SEQ ID NO: 44917 - DNA, 1024 bp, Homo sapiens
gtcataaaatgtttgcctatgccagtgtccaaaaggatatttcttaggttttcatctagggtttttatagttttaggtatttttaagtctttaatccatcttgagttaattttgtatatatggaaagctagggatcgagtttcattcttttgcatatggctagccagttactccagcaccatttattgaataggtgtttattccccattgtttgtgtagactttgtcaaagatcaggtggttgtagatgtgtaactttacttctgggtcgtctattgtgttccattggtctgcatgtctatttttgtaccaataccatgctgttttggttactgttgctttgtagtatagtttgatgttgggtaatatccctccagctttgttatttttgcttaggattaccttggctatttgttctctgtttgggttccacatgaattttagaatagcttttttttttctagttctgtgaaaaatcatgataaattgagaggaatagtactgaacccgtagattgctttgggcagaatggcgattttaatgatagtgagccttccaatccatgagcatgggttggttttccatttatttgtgtcatctatgatttatttcagcagtgttttgtagttgtccttatagagatctttcacctctttggttacatgtgtgcctaggtaatttgtgtgtgtatgtgtgtgtgtatgtttgtggcagttgtgaataagaatgtgttcttgatttggttcttgacttgaacgttattggtgttttagaaatgctactaattttcatagattgattcctgaaactttactgaaatcgtttataaagccttttggtagagtatttagggttttctagatacagaatcatatagtctgcaaagagagatactttgacttattcttttcctatttggatgtcttctgtttctttttcttgccttgttgctctcatgaagacttccagtactatgctgaatagtagtagagagtggacatccttgtcttgttccagttctcagg

SEQ ID NO: 44918 - DNA, 1099 bp, Homo sapiens
ggtatattttcagcctggcagcccaagaggcttgagttctcctgacctggtgggtctcccgccagtgtctgcaccaggagcaggcccaaccggctaagcttgtcgtaagccttctgcacctagatcactgttctaggcatttgatgccttgggactccctggggaagaagctgcagctggctgtcaggctgcgttcctcccggactggtcttatgaaaggagggatgcccagctctgatgtcagcacatgagcccatgccacagtcttctctgtgttctgagattgagggctgcttccccactcaagctaaggccacagatctgcagcttggtatccctgggtggtgtggtcaagtcctggggagttgggaccagatccaggggtttgttctctagcccctggatgtaaagcagcagctgtgctgcaggagagcagactgctcctagacctccagcaaaacactcagatggggcaatggaggctgtgctgtgggcacacttctgcaagatcgttcaggcaggcaggcttaggaggggccacggggttacatggatcagatgcaccccagtcctgtggcaatggtggccctgctctcttgcagcctagcagacagcagtagctacagccactcagtacagcatggcacacctcggggcgtgaacacctttggtcacattttgctggagctgcactgcgtagtgaaacatttgggggtgcatgcaagtttgagctgtgcttctgcctattctctgagtggcttccctgccggttcagaggtctttgggggtcttgggaaacctgtagctgggatcccagaggtatgtggtgggagtgtgctgccgaaattccttcactcaccgcttcctcaggtctggttcagtacaggaggccggtcctagtgcccagcgactctgagtggcttcctggcttcctccctctttaatcacagtgtccatctcttctctattgacttgatgctttctcacaaaatctttattcagagtgtgatggtttatttgatattttggttcctcttggtggacagttcccggctgtttctagacatcttgaagattttaaaaattcttaaacagttgg

SEQ ID NO: 44919 - DNA, 1050 bp, Homo sapiens
atccaaatacatttcaactccaaataatctctgggtccagaaagccagttgcactgactcagaaaaaagtttatcatgcttttccaccagacagactcacacttcaagtcatttatttaattcaattcaatgaataactacggtatgcttttccctctgtgtagctctgggggtgtaacagtattctgggctgaattcctgtatttgtgaagttcataatttattcagggctgcaggtgattctacagttaatttctgatagaatatgagactagctataatcataatataagcaaagtgctgtgtgaacagagtaagtaggagtgaaagagccttttccttaggctggatattgtaggaaaaaaattaaatttcttcagttaatggacaagtggaaaataggacagaatgaagaaaggccatatgccttgttgagggaacagagagtaatttgatgtggttagtgcctgtgagtgttgagaaatgaggctagaaagataatttgttactagattatgagggaccttgaaagctttgtggtaatttgctcctaatcatctgagcagtaggaaatcatggaatgatttgaagaaagagtggtgttgggtacctaagaaactgtttgtttaaagagacagatgtctctttcagtgtttgtctgaaaaagaatgtttgttgtcccttttctggtcctttcactagagggaatggctggagcttttttttttttttttttgctttgcctgttggtgtttctgggttgcccacttctccagtatcatccagtccaggatatgtgaagtgaaaatcattgtgttagtccggaggtccctattctgtgtgctttcttctctctacctttcagaatcttcttatgtttgttttatatgtgatgtccagggtgtttggcagtatttaactagagggacaaacacaagtacatccatcttgtctggaattagaaatcttaaatggactttaaaaaaatgttacagaagtaaaatgtacaaatagcgtaatacacagatcttaaatgcctattttaataag

SEQ ID NO: 44920 - DNA, 1047 bp, Homo sapiens
catttctcatataccttgattcacactgatagtttaccgattaaatataaagatgaattttgttcatctgtagccttcaaatagcaagcttaaagaaatataaaattacctcaaaatttaagtctcattgggcagcctcaaccagtaacactcattattagttaaacccagtctgaaggcctgcaaagcaaagccatggtactgtcaaccatgttatataggcctaatgtctgaatccttaccagtgccatttttatttcttagacacgtttcatttatcatactgttgtgctatatttcacatcagatgtcaagataaagtctctgatgtcaaagatttagaagcagtgactttccagatttgctcatcagaatgcagtggtcctggacatacagagcaaatggatgacattagatttctaaagctgctggcattaggtgaactttaggggaaatgtcattcttgagaccatataagagaagtttcaagaatgtaaattaaagctatctgaagtactggacattttagcatgatataatggcactaagagattttgcttatattgcgattgaggcagtgaccacaaataaatacaaatccagataatgatcgaagggcaatataacaaatatgttaaaaggttccttattaaagagtaattccctggccacccagggttcttgtcatccatgttcatgtgctgacagaattatgaaagcattttcatgtgaatactgaagagtattatggacattcgtattcataggtacatcaaaaaaagaaaatgtaagagatagactatgcttcgaagaagacaatgattcttacctattttttgtttaaacacatgttatagactttgcttgataataacatctttttttatctcctaatcaccccataagtaagaaaaaatgatctgtacttagaaaatgaattacagagtggttacatagctttcctggggaaatcattcaatttattagcaaatctggattagggcacagagaacctgttcctaattcatttcttagacaatcacaagt

SEQ ID NO: 44921 - DNA, 1035 bp, Homo sapiens
agctttaatgaaaacgaaggaatgaagttgagaagaacaagattacaaatcgcgtttatattgcaggagaacgaaaagatacctttctgaaactcattgaacaccactgaccatcttcttcctgtgtctgtctccattctcaacatttttatttctcccacccttgatgatgcatgcttggatacatacgtgaaattgggcacatctgcagcccatttcttgcttacatttacttacttgcctgtatgctttatggtttcaaaattaagaaactactgtgaggagtacttgtttggctctagtttgtctcatagactggaactggaaatacaaattttgttgtatttttcaacaaatgctcagtttctgcacacctgctttaatatggtaagagattaatgctttctgcacatcagaggtgccttcggtgagaaaaggaagtctttgtgtatatgtttatagacatatctactcctctctattaaaaaataagggcaaagctgtatttactctcgacttactatttaaagatattcaggaagcaaaacatgttaacattaaagcaaatggatagaaacataaagcatttgttgcaggtaagtttttaactcatttatttaaatattatagcttctttttgtttttttttttttcctaacttgtttcaatccatgatgtagcatcttagcagtatactttatctggataaagtgatgactatcgaaacacatcaggaataccgagctgaaggatgaaaagctgtgttgagatcatccttttattgtatggcaggaattctccaaggtttaatttcatggatcattgacatcaagctgagatttaggattcaaataaatttcacaagcagtgtgaatgttttcatatagatcttagcagtgatacataaaagaattaaaagtctgtattctctttatgctaatagtcattatttgttgcttcatttttcctgtgttttttattttagacatatctattactaagaaagagaaaaattcttttaaaatggtggactca

SEQ ID NO: 44922 - DNA, 1025 bp, Homo sapiens
gtagagcaaaggaagcaggagtcgctggcagtcgttctggctgctggcaatggttcatcctccagcatgaacctaagtaagggaatggagagtgactcagctgctgttttagaggaagaagaaacaaaattgataataaatgtcacaagtaaggttcaagaacaggaatcagagatgattctgaagttcagctatgtgttgtaggatagaaatatggaggagaacaaggtttggagggcaatgtttagcccaaaaaagttcctaagattgattaggcctcataattggttgatgagaaagggattaatttgtttaaattgcttaagatcataaagccaatcagttgaagagtcaagaacttaaaacttttaacccattgtttttctacttagtaatattttgccaataaatcaaaacctctgtggtgaataggccagtaatgttctcaccaaattatatattgtgtttatttgttgtaaatatctgaaaagatcatcataataaagatacagtggatatgttgatttattttttatttttattttttgagacggagtctcacttcttggtcgcccaggctggagtgcagtggcgtgatctccgctcactgcaagctctgccttccgggttcacgccattctcctgcctcagcctcccaagtagctgggactacaggtgcacgctgccacacccggctaatgggttttttttttttgtttttttggtttttttttgtatttttagtagagacggggtttcactgtgttagccaggatggtctcgatctcctgacctcgtgatccgcccaccttggcctcccaaagtgctgggattacaggcatgagccaccacgcccggcgatatttctttagttattctatcgtatttttgtacagaagacaatatcctctagcagtataaaaacaaatgtgtgtggggatatgtaaacataaatacacacatacacgcaggtgcatgtgctttgtgctgagatacaagagtcacaaaacctgacaagatgtctg

SEQ ID NO: 44923 - DNA, 1050 bp, Homo sapiens
tatttttttaactcatataatttgaaaaatgctatattgttactgcatttgctcccaacaaaaatagtaaattataaaaatgatttaaagcagcgtgaaacataagtgatataaaggtaaattcatagacatctttaaaatggcaattttgtgagttattgcaaacttatttgtaaaatctggaatatgtttatggagtagtaaaatgtatttgaatgctctgtgctttatgaagaagatttttattcttagcctaaagatatttcatgctgaaactgggctagcaattatgttctttgcccaatgcttgttatcattttcatctaatcctgatatcatcttacttcattacttttgtgcttttttgctttgcatctttcactctttagttttgtgactttgagcaagttgtttaaacttctctgggcttcagtttccttgtttgtaaacagatggtaatgtctacatcagagagttattggtactgggtaagatagtgaataaaacaaagttcttgcccttttggagctaaaattgtagtgctggaacaaagacaataagtacattgtaaaacgtatacaatctgaaatttctttcaaaaacaattttataataaaaaaaaatcagagtaaaggtgagaggaggcttctctgacaagattgaatttgaacagagacccagtggaagtgagggagtaaattacatggccatcccagggaaaagtacctcaggcagtgggaataacaagttcaaagatctccttattacctgacttgctttgaaggtattaggagaaaaggctagaaacctagaaggaggatttaatttctaaagcaggaaacaaccaccaaaactcataaaggaaaagatgcataaatttggccacattaaaattaaagttttctacatgacagaataatttaaaatacaaatataaaggagaatctgaacgcaatacttcagtcaattcgtatctggaaaaaaaaatgttgtcctccaagttaagaaaaagcaactgtgcttttggaaaaacgggaggaaaaaaaaaga

SEQ ID NO: 44924 - DNA, 1054 bp, Homo sapiens
aaattgaagtttcaggttataaatttttaaagttaaggcatatttgctcacaaagaatggtaattttatgttatataaaggtaattgattgtatttacctctgtgtgcatttgtagtttaaccattctggaacattgtgttcagagccagaaaaattaatagattttattcacatctatgtctacggcttccttgacaactactgcagatgccgctatcaccatggggatggttcttctaaatgaagcagcaacttcgaaaggcgatgttggaaaaagacggagtaagtctctgtgttgccatttttgtaatttcgttttagtcttaagattcatttaagtcaaatgggaaatacataaaagccctttgtaaacaaacttctaaagaaatgttctggtttgaagaagattttaacttttttctattgctgggatgtgttcatatacttgaaaatatatttcttccaaaggggactgggtcgttttctgttgatttgcttataaagtggagctgtccttcacccttgtcagggtgctctaatccatccctgctgaagccatagtcttggttgtaattccacccggcacagagagatggaaaattttgagggcagagtcttcagagattttattggcatgtaacatattccctctgctacaagaatcaggggtgcgctcaaagcgtgacttagatgaagcttctgcataggtattgtacagtgagatactcttattacctttctattcgttccaaagcttcctttaacattttttaaaaggcatctattgatactatcttttccagggtctttgccttttccattgatataccaagatttacaactccctcaagttctccggcattatgtttttaagcaagttaattctgtggcttttctttgatgggaccatttctctcagagttgtagaaaaacatatatgaggtttttgagaagtaaagagttttctagcaaaaagagaagaacacacagggaaaatgtgctctgaggagcaaaggacagtcgattgtttcctgccacagacctttttatagt

SEQ ID NO: 44925 - DNA, 1050 bp, Homo sapiens
ttcctggcctttagtacttctgcaaagacatttgtagatgtccattttctaagaacattaggctgtacaatagtaaatcataaactctagggaccaagagctgaaccactccaaccatccaagacagaaataaatacattgaagtaggctgacaagaggagaaaaatagtttctcaaccaagactctatccttgacttccccaattttaacatgaatacatgttgcagagatcaactgctagtacagacacacattcttcttcacagtagctcttggaaagcttcctacttctactttggatcatacctgtacttgggataagacacttaagttaccctttagtgaaaatgcacatttgaacataacaccttctactttttttccttttcttaagaaaagcacctttagtaatggcctttaggctccaatgccaaagtacttgcttgggtgttatgcctccgccttttagccctcagtgtcttcgttttgcatttttgtgaattataaactgttgtaccactgatatacaggactgtatccataattatctttatgtacagaaccgtgatcataattgtctttaaactaattttttttacattttttcctcacaattttgaattttatttaaaatacagtccttaagttcttctatctgaagtgatcctgttcggcttattcatttttattttaatcttaagccttacaaaaccttaaacatctatgcccttcatcatattttttcagtacttcatagtactttcaaaattgttgttttctttgctgacacaggtacctgctaaaggataaaaatctactttaaatatttatcctatagtcttaaatcttcccctaaagtttacccttaacagtttacgtatgaatctgtctcatgccattactaaattctctcagattgtcttttaaatttaataggcaaacttccctgattggaatacccagcctgctcgttactagctgtgtgaccttgggcaagttacttaacttttgtcaagctaagttctcatttataaatggagatgatttgt

SEQ ID NO: 44926 - DNA, 1076 bp, Homo sapiens
accgcaaaagtgaaaagcacacatcaggggaatacattcagttttcattattgacagttgtttttaaaaaagtatgatacgaaggcatttatacatttttgtgataggcattattagaaaaaacaatatccaggcactcctgaaccataagtttgtgagaactattatactgttagattaagaagcaaaagtatttattagacagataaatgtgaaaagggaaaaaaatacgtgtcagatcttgtttagaaatgagagactaattccttgagtgataatatcaatataaaacattcatactggaacatactttggaaatttaatatttataatttaatatttatataatgaaaataaaagtgaaacctgaaatactgattagagaacagcagttcatacttttctcagaaacgttttaaccagtcaaaacatttttgacatttttgtgcttcaagtgtttccagtgtcttgaacaaataaagaaatttttataactatttaaaatgaaaatgatagttttgaaaatgatagaagcataggaagtactctaattgtcctacaataaaggatacatctaactaacaagtaatcagtttcagattaaatatatatttatcatttcataatgatataaacaactgattgttacaccaggttaagaaaattactaaatgaaaaaaacagtagcataactaaagataacattaataaagtactcacagagatccttttactgtgaatatacctaagtatcataaaactgctaaaaagttagaaggtataaaattaccagtatggatcagattagtatttttgcttttacaggggtaatatcgttagcagcaataaagattacctttagtgctccgtaacttgaaatctgcagagcctttaaacactaaacaacaaaaagctacaaatccctagttttaagtatcagttcattttatgattaaggtttcttttttcattaaccctcattcttcagttagcttcatcttcagagcaagctgatgatggcttgtgtgtgctagcaggatgaacgctatcttttcaaaacataatgccacagttca

SEQ ID NO: 44927 - DNA, 1012 bp, Homo sapiens
gggagctgagcgtggcggcggcggccggcggggggctggtcggcctggtatgctaccagctgtacggggaccccagggccggctcgccggcgaccgggcgaccctcaaagagcgcggccacggagcccgaggacccgccccgcggccgggggatgctgcccatcccagtggcggctgccaaggagacggtgagtgcgcgagcgcgcgtcacacctgcgcgggggatgtgaccttcgtgccgggtacgcaggaccctggaggctgtggggacggtgcaagcgctgtggccgcgggtgaggaacttcccgtgagcgaggctgacacctaggccggacagcctaggatccggtcacccacgtattgggaagaccagtgatgctgtccctgatgcatcaggaccttaaaggtggctgcagctaccaagtatcaatccaaacccaaaaccaacacccctccccctcttacaaaaaaagattcagaaatgaaggccatgacaggcagaaagtggaccgctgtaggtgtgggaaaaaggaactcctagattgcgcggggcgacagctaatgacccaggaggtctgttgcattagaatgagtttcgaagcagcggtctgagatctcaaaagccactactttagcatatgagaatttattagtcccaagaaaggaaatgctaaacctgcatgctaacgcccttatcatacccagggaatgttgatgttaccaggtctgaaaagaaataaaaaattgttcaaaaagagacataagtatttctctctttttccttcccccactaaagccagaatcccgttagtaggtaacgataaaacacaaaatggataggatagcaaatgtaggaggctgtgaatgacacaaactcctacagaagaaagtcacgtgaaaatgttcaactgtcattatgtagttaataatacaaggtaaagatgtgtgaaaggcaacagtgagtaaaggagcgtgattttttttgtcgcatcagtatatttaatagtcatgt

SEQ ID NO: 44928 - DNA, 1051 bp, Homo sapiens
ctcctgtaatgttttgagaagtcttagtcttcagaatgatggaaaagattaatcatttgcctggcttttcgtttaataagatgtaacttagaaataaagtagtattcttgccaaaagtttctttgggttgtttttgttatggcttctcaaggtactaaatatttaaacagttttttcttatatgaaatcattttataaaatacgtgaaagtataatttgtgtgttactgataatcatgtaaattgctataaactccatgaagacagtttgactaaaaagtcttctttgactaatcagtttcactcctaaggattaagggaggctaggcaggagagtcgcttgaacctgggaggtggaggttgcagtgagctgagatcatgccactgtactccagcctgggtgacagagtgagactctgtctaaaaaaaaaaaaaagaacttatcctgaagaactgttatggatatttctgaatattttcaaggttggtcattataccattgttttgtaatagcaaaagattagaagtcaacatgaataaccaagtagaattgtttatgttatactataaacattttctatggaatattatacagttaacaaaaatggtcttctacaggaatagtgacacaggaaaatggccccgaagttttagtaagtaaaaaggtcagattactgaatgatatatatggtataatcccattttctttgccaaaagaaagcaaaaacaattctatctataaatttttagattctgtcttctaattttatacggtaactactagaatatttagtgacatagaaaaatggccctgataattgataagtgaaaaagatcaggttattgaagcatgtatggtaaaatcccacttttttgccaaaaagaaaacaaaattatacttaacaaattttttacaattctgtcttctaaattacatgtaagagctttgcatttctcttgtaatcaggaaaataaatccttttattaaaaaaaattgctctagttacttcagagagaaaataacaatggaatattatctacaaggaaaggtc

SEQ ID NO: 44929 - DNA, 1054 bp, Homo sapiens
tgtgtccccactcataatccctcaatgtccttcaaaagataaacacaatcatgacttttatgtaaatcacttacttgctttgttctgtggttttaccacctacttatgcatcctaaacagtgtagtttacccctttttgtactttatgtaactggcatcatgttatatgaatgtttctgtctcgtttcttggacccaacgtcatgattgccagtttcatctatgttgtatgtagtcctagttaattcactttttttgctgttaacagtggctttcaagcattgtggtctgtgatcccattacattgtcgaaagttattgaggatccaaaagatattttgtttacatatgttatgtatttaccatattagaagttaaaactgagaatttaaagatattagtctgttttaaaacaataatttaaaaactcatatgttaacataaacattttaatgtaggaaaaacaacttcaaaaatatagtgagaagagtgatattgttttacatattttgcagatctctttaatgtctagcttactagaagacagctggtttctcgtagctgttttgcattcgatctgttgcaatatgttattttggcaataaatactgtcagttgtttactttcaagtgacaggctctcgcttggttcattttaaaaaaaaaatgtctaccaggtactgaaatctgaataaccatggtttgtctattagttgttctttcaagtaaaagtggtggctcatgaaaaaagtggctagttcagcttgcaacacaaaccatcacacaggtgttctttcttaagacaaccatggtacttcagcatgcagcagtagtgctgtatgcacgcttcctgtttcatcacaccaaatattaaaaagatactcattcttctatgcctcttaatttctccttaacagtttgccgtatttttatcttttcatgctgcattgtgcataattcttcatgtttatcttccggttcattaattctactagagatatataatctgatactaaatttcagcggttaaatttctaagagttttatttgactatta

SEQ ID NO: 44930 - DNA, 1080 bp, Homo sapiens
aatctttattttattctttattgcttatcagagtgagtggatgaaaacatttgtaaggctgcaacataatattaaaatgtgaataaataaatgttctgataaaatagaaaagaaagtaaattacagtgatttccatcatattatcactcttgaattttatcatctataaaatgagagataaaaatatctcactgaattgttacttatatcaatttaaaatttgctagtggtttgaaaataataatgtactgactacatgtatgctgttattgtcagtgtttccttctataaactgttctttggaaaaattaagttatacataaaattcatattaaactttttacagaaagcatacatgataaacagtttatggtacttctcagaatcatttcataataagcaatttatttagcttaagttccaacttactgttcttattataaattgcaaagcaacctgtcttacattcttacattatcttaaaataaatatttctgcccttgaatcaagaaacattgtacttggcttttatatgtatctgtggactaataatgactttctgaaaatgtaaccttcaaactttggaaatctttatgggttactaaacctcttttgattttattccctcttctgtggcaacacatgctaatgacatttatctcatcaacacctttgtgggtaggtaactcacagagctataaggcttctcaaagtaaattgtaggaattcctaaattatagaattatggtcattggtactggaaaacttttcagaaagtttatatgtgacttaatggagtattaattttgtaggtatcatcttactaaggtaacacctagaaatgtttcaaaatacactagttattatcctactacttatagccatatagtaaattaacactttttaaaatataatgcttttacttccaaaagatataaaaatatgaattccataatattcagaaactgtaataaaaattgtaagtgataagaaatcactgtggtttgtaaaaaattggtagcatttttaatttcttagtagttcataaaataatggtacaccttgcaatgttgcatctta

SEQ ID NO: 44931 - DNA, 1020 bp, Homo sapiens
cccacatcagggatagcaatctgctttagtctactgatttaaatgttaaactcctccaaaaacaccctcacagacacacccagaataacatttgtcaagtatctgggcaccaaatggcccagtcaggttgacacatgacgttaaccatcacaacacctttatactataccatttcattcagtgataattatttgagttcagttgtatattctacttacaagtcaagatttatgggtttcattatccaggtcatgcctgcttcttacaattatggtctttcctataatatgcatacctattgttgcttttaagaatggacatttggccaggcgcagtggctcatgcctgtaatcccagcactttgaaaggccagggcaggtggaccacaaggtcaggagtttgagaccagcctggccaagatggtgaaaccccatccctactagaaataccaaaattagccaggtgtgatggtgggcaggagtagtcccgctactcgggaggctgaggcaggagaattgcttgaacctgggaggtggaacttgtagtgagctgagattgcgccactgcactccagcctgggcagcagagcaagactgtctcaaaaaaaaaaaaaatggacatttttccgttagattttctatctgatttttgttggtatacagagaagcaactgattttatttgttcagcacttaactgaactcttggtagtactgaaagtttttcaattgattctcttaggttttctggtgggcagtcatattacatgcaaactaaggcaaatgtgtctttgccctatctacattattgcttctatttctatcttctgtattattgcattgatcatagcctccagaagagtgtaaaatactaatagaggcagcagaaatctttcgaattcccattttaataggatgatctctgtaattgttcaaattaacattttgctgttgatcagaagaaagtatcctttatttcctgaatttggaagaaaaaggattgagtgttgaatcatctcaaa

SEQ ID NO: 44932 - DNA, 1055 bp, Homo sapiens
tttgttgcgtttaactggagttgggatgctcattaagtgcctcatgttcgaaccgagttaaacaaatgttccaaaacaatagttccgttgttgctgtattatttatctattgcggcattgcaaattaccccaaattgcagctgcctaagaaaacaaacattatttcccacagtttctgagtcagtcaggagcagctttgctgggtgagtctaactcaaggtctctcctgagggtgcagtcaagctgttggctcgcactacaggcatcagaaggaatgactgcagctggaggactgacttccagaacactcactcacatggcgacccccatcctctgctacatggccctctcgatggggctgctcatgacaacagggcagctaacttctcacggctcaagtgatgtgaggctgaggaggaagccgtggtgtctttttttgaaccagtctttgaaatttcccactattaattctgctttattttattcattagaagtgagtcactaagtgctatggtctgaatgtttgtgttctgccaaaattcatatgtgggaaccctaacccctaggtgatggcagcgtttaggggtggagcctgtgttagtccattttcacgctgctgataaagacatacataagatggataatttatagagaaaaagagatttaatggactcacagttccacgtggctggagaggcctcacaatcatagcagaaggcaaaaggcacatcttacatgatagcaggcaaagagagagtgagagccaagtgaaaggggtttccccttataaagtcatcagatctcgtgggacttattcatgaccacaagaacagtatggggaaaccgtccccatgattcaattatctcccactgggcccctcccacaacacgtgggaattatgggagctataattcaagatgagatttgggtggggacacagctgaaccatatcagagccttgggaagtgattaggtcctgaggatgaagccctcatgaaagaaattagcacccttataaaagaggccccagcaagcgcgttggccacttctacta

SEQ ID NO: 44933 - DNA, 1080 bp, Homo sapiens
tgctcccccagcctggtaacagcgggtccagtgttccagcctgggcagtgtccagctggcagggctgaggtggttgcgcccacatctcaggctgcatggtccagcgagctcaggtgtttgatcttttttcgttaccatggtgagaagtgtgctagcggggaaaaaagacaaatgtatcccatagatgagtatatatgggggcgaggggttctccatgaaatggtcctcattgatttttttgtttcatttgtttttatgttttatcttgatggagaatttgtgattttccttctcagaaaaatagagctatacttacatttcataatttatactgctgatttatgccactgcgttttgacagttgtatcatatcacccagccttctcttctccaggaagtggtgtattcatgggtcccctgagattccagcactgcttatgatgagtgtagaaattctgtcttgtctgtcttgcagaatgacagattagaatatggcatagattcttaatgctgtctgttgggaaaacaatattctaaagatgattagaaagacagttttaatattatgtggaattctgttattacatattaccatttagaaatactacagagaatttataatgaaagcataaaataattgaatgaggtttttaatagtccattagaaaattgttgaaaattttttcctaattcctttaagggaattttattataattgtcttgattgttgtttcaatcaaatggcagtagtgaaaagggcgaaattatcaaggcagggggtaggaggaggaggcgctgggtaggatgctctgatttcttaagaagaataggatagctgtaaagaaaccagacatgattgcttgagaattttcctttcaaaatgataatatcacactttatatcatttatgtagcatttttcctaatttgactttttatctggccatgacttttaaattcagttataaatattaattgcctgaagtgttataaaatccatttttatttgagagatactcacaagcaaaattatatgctgcatttctcgtcttagcacttcactctgaagtgcatacttaat

SEQ ID NO: 44934 - DNA, 1057 bp, Homo sapiens
caaactgataaagaggagtgggtgggaaggaggggaagtatgccgtgaatgcatcgtgaatacatgtgagtgcatggtgtcaatcatgaactcgattctgatccgcagcacagggactgaacatgatttataaatgaagagcaaggtttctgttttgcccaaagatccagagtaagtgaaatgattttagtaagagaaagcataaatccatacataaaatgaggggagagatacaggcgggaaacctgagatgcagtttacacatggagcagaggaagagactcattccaaatattgatgactggattcttcaattccttgcataatttttttttagaacttctcacttacattaatgaatacatctagtatataaacaggtggtacttgtataatattacactattacaatatgttgtgtctttaggcagtagtcatggaaatctttcaactgtgggtggccagataatgacaatgtcagatttattttggttgtgactgaatacacatactgtttcagcaattgctgtcagagagattgggctagtgctgtaggtgaatgcagtgttgggcgagagtatgatttgctgcaagtaagaagagaaaggcattgtataattccagctgggatcaagaaagattgtgtatgtttactttatgaatatatgacagtgaagttacagaagaaaatagtgcttctcagtgacccaatactgaagggtgagctagtgaatagctggatactctcgaatgttttaatagatattgtgacccagtgctatcgtgcagcaattactgctggtgctagtgttggtttaaatatttgatttcatctcttccggtgtgccactgtaaattttattccaatgagctcataaacacaaatgtaggaattacatccttatatagtttctttctctggagagttgtaaagtactcataagtgtcaaataattttatgaacctagaaataattggattaatttttaaatgtgttacgtgtgcctgtactctggtcatatagtactcaacatatagctgctaaccctgctagatg

SEQ ID NO: 44935 - DNA, 1029 bp, Homo sapiens
aacttatagaccctgtctgtcttcaaagttgcttgaagcccagttgaagccagtatctccctcagctttttcctttttaaaggaacaggaaccattttgtcttctccctctctcctctctttagagaagtgttttcttcacctcacagaagagattactttcgcttttttcaactatcagttgagtgctatggtgtgctaagctaacatggtaatagaaataacttttctcttgagtttttcatgcccacaaaagaaaaatgaatacttctcatatgtccgctttgatataccagttttatgtgattcaaattagttgtcatggtctgtttgtctaagtcagtctcttactcagtaaacattaatggggcagatgctctatgccagttcttgtgctttaatgaggaattaattttaatatgatccagcagagctggaagttgtaacgtttttgttacaggcaggaaatgtttaaattgaaaataaaagaatttctaaggtagaattaatgtgctattcgtcgtgactttgagaataaagctcatttgctttagtaaaaactgagtaaacctcagttttctgttgacaaaaattgaaataactattaatttatctcaataactggtttaaaggaaatgagataaagaaggctatacaacacttgaaatttctctatggtaaaaattgaagaataggtatcagcatcattgttaaatcaaacaaattgaaattctgtctgtgaagtaagaaaattaaataatcctggattaaaactcaaaatccacattaaaaccaatagttatttttagaagacctgtcccaattatgttcagtattgctatttagtttttgtattgttataaataatcaaattatatttgattaccatctatattgtttcaaaaatgagtctctatttttcatatgttatctttatatacataaatattagaaaagtgtttgaggctaaatttgagcaatcttttcttgaacagttacttttgaacaaaaatatttgcatttgacaata

SEQ ID NO: 44936 - DNA, 1027 bp, Homo sapiens
gcccttttgaaaagctgaataaggacaaaaatatacaaagtcagacttgctacagctgagatagggcaaaacttccaaagactctagtacaaagagagagaccaaatgggaaaacaaatagacaatacaaaaggcgtacatatgtcttgattactaaatacaacttcttgccgcagcttgctttagtgcttgtggcccctgtcctcatctataatacctgctagcttggaatatttacaacagccgctgaggagtggcagtttcccagcactgcctggcctttcgttgtgcaacagggagcaagtaaagtcactgtgcataagcatttgtacttttagaaattagggggaaaaaaagtgtgtgctgtggacacattttattctttgtggaaagctcaccaggtggttgccagtttatcaagagcaataaatgcctgcggaaatgtaatgacctggagagcattgcttttatctgaactctatagttggaaggaaaaccagtcaaccaaatgatacagaaataagacccgcaaggggcacacttgacaagttttgttccgcaggacaggagccagggctgaagtgcgcaatggaggcatggctgactgcagcctccagccgtttcctgcaccctctccacactgtgctcacctctcctccaaataaagttgaataaatatttagagaatgttggtttgaagggaagccacattattaagctacttaaatgccttatgtctgtgtcaagccccgtttgccataagcttcatgtaacctattacctttttttctctttacagtgtccatggaaaacactggcgaacaaggtaagctagattatattaatgttatagattttttaaatagtttgaaaaaaaattgtattcacttagatttggttgggattaataaattgttgtttgagaatgtggagacaagctagggttaaagatgtctcatttctcttaagtttgcagattgaattctgtcagacccttggcaaagaattctatcctgaaatggctgtc

SEQ ID NO: 44937 - DNA, 1059 bp, Homo sapiens
ttccacagttccatctctcttatgcagagaaagatttgttggagagagagccaagaggagaagcccatcaggaagttcttaggcgagcagccaaggatcttcccatctataccaggaccatgtctggaggtaaatgttgataatgagtgctttgcaatggtatgcaaataacatcattaaggtgactgtaagaaagtgtgtttatgtacttgaaatggtaaaacactcatttcagaatgctgtgttatttcttggattgctgttaaatctttcctgtgtgattccataaaacagaatggaaacacgaatagcactgtggcacagagatcgcaaggaaatcagaactgactttaatcctgttctgcctacttagttatgactcagtgaagatgtgggaactgctgaaatcttgatttatggtagtactcatgtttaaggttttaattgtagactttcctatttatatttaatttaaggcagcagtatctgtaatgaatataaaatgaatacttttacatgtattttttcgtaaacttagaacagtcatataggtgatgtaaaatttcatttaggtattggtataattttttatctatctttaaaattttcttacaaatgcaataaattaacaaatctcttacttgggacatattttaaggtaatttgacaactatccacttaaacagttgtcttaaaactgatgtatatggactagtgatgcttacccaccaagacttgcccagagcttctgtgacttcagacctgtgctgtccattatggtagccgctagccccatgtggctgttgagcgcttgaagtatggccagttcaaactgacatgtgctctaagtattaaatacacactggtttcaaagacttagtatgaaaaatatatataaaatatctcattaatgaacagacacagtggcttgtgcctataatcccagcaactcgggagcctgaggtggaggattgcttgagcccaggagttagaagttgcagtgagctgtggttgcaccactgcactgccgcctgggtgacagagtgagaccctgtctct

SEQ ID NO: 44938 - DNA, 1113 bp, Homo sapiens
gtgcttatatatgtttaggtatatttaccctgtaaggctaaacaaacactgcagaaatttaagccccctagaaataaatcattgctgagtttccaaagctagttagtgacagtaaaaggtgcaaaaacctggtgtccttattcctagttcagtttaaaactttttttgataaataacagggtacaagaaataaattggtttaattgagggagacattctatttattttgattaacatggacatatttgtaccctttgtgagccttattataactactgacaattgaaaaagcatcagaaaaatttccttaggaggttctctcttctggttaaacctccagagaactgtggctgtaggcaagtcattccatttttgtatttaaacagcatcaaatatcttatttttttaccatatttaaatttcatatgctttttaaaatttaaatttggagagatgataaaagccatttaattgtattttcaattcagtgttaactctaagactaagtggagctttttgtccctagccatccgatactgtgacagatgccaacttataaaaccagatcgctgccatcactgctccgtctgtgataagtaagagaacctttaacttctaaaatatctacatgctggtggtctttttcttcattatgtttcttttctcactgttttcctgattatcttctccatattctcgcttctcagcccttgatttaggaaatggagttggtataacccgctggcattcataccagtgaggcctaaggccacagtcaagtgtcaatttgcccccagattcacggtgccctgaagtatgtgatttttagcagttctgacttggctggttcaatttaggaaatacttctatgagtgttttccatttttataaagagaactcagttgacttcaggacagtcagacgttgttatatatttaatatactccaaggacagtatgacttggcataaggattgatattgaaggggaagttttatccagactttccgtaaatccgttgcagttttgttctttctttagcctaagatagttgtatattaatacattatattgtttttaggaaatgagttgctttgcatcttaagcatgtata

SEQ ID NO: 44939 - DNA, 1048 bp, Homo sapiens
ataagaaaatttactgcaatggtttccacttgaaatgagggaaaaaagaaagtatgattgaggatacattggaagcttcaattatacttgtaaaatggtgttattaatctaagtgtgagtaaaaaggtgttaattgtctatacattttggttgactgaaatattttttaaatgtagtgcttaaaagaaaaaaaaatgtaagtcaaaattagctacccactgctcaggtaggcagacagggtaaaatcgcccctgacccaccatatctttcctttctgtgataactgttagagtaaagaaacttgaggcttttggagatcaaatggacccccagacaccttcttgacaactccattttaatgtatattatggacttagtgcccttggaagacctctaaggattatctgagccatttctgtggagagagaagccagagtcttagaaattcattgtctggagacttttgctccagctttaagtttgttttgattccagactatcaagaatttgaggctggccagagaaagacctgacatttcattctgaacgtgctaccaactggcaaaaggaaaagttacttaaacttttaaaatgctatgtatgaattttcagtggtttgaaacaccagtttttatacctttgtgacagatttgagtataaccattcctctgatttttcaatgaaagccagtagcaaaagcataaccataatatcattcttcattaaacgttagagcttttcttagttgctgcagtgccacatacacagtatccacaccaacactccatattgaacatttcttactgatcacaggactttttcctagggagcctggagtgaccccataaacctcaaggcagtgttcctggtagccattctaaagttctttttgttgttgttgtttgtttgtttgtttgtttccattttagttttgagacagggtctctcttgtcacccaggctggagtgcagtggagtgatcatggctcactgcagccatgaccgcccaggatcaagcgatcctcctgcctctgcccttttaaattggg

SEQ ID NO: 44940 - DNA, 1064 bp, Homo sapiens
ttctactatctcccatgttgagcccagataaaattttcgtggcaagttctgttctcttctttactccagagttgaatatcttgctgtctacttgacacacccacttggacacctaaaaatcatctccaactaaacaggttcagagcagaactttgaatttgattcccagccatgtgtaccctcatcaccaccctaaaccagaatctcctccatgcttccattatcagtattagtgacctccattctcccacgtgttcatgctagaaactgtggggtcatcctggattcctctctttcaattactttgtatttactccatttgcaaatcctatcagatgtctctttaaagtatatctataatctgaatactttctaaccacctccaaggcagctttcctggtcctagccctcatccctgctcccatggattacttcagtagttttctaactgatgtaacatttttgccccactccaatctattttcccttcaaaatataagtcagattgtgtcactcttctgctgaaagctctattagtttcccatcttactcggaataaaagctaatgaatgtctgttccatcacttaacaagactgatctgaccccagacagtcattcttttttttttctttttttaatggagacagggtcttcctgtctctattaaagcaagttagtaatgtctctgttataataaaatgtctccattaacagcccgttgcccaggccggagtgcagttttgtgatcatagctcactgcagcctcacactcctgggctcaagcagtcctctcaccttggccttctggatgtcattcttttttactttcctttcacttacaatcctcagacacagatcttgctgttcctcacatggaccaagcatgttccttatgtagtgccttgtccttgctaattccctttccttaccattcttcctccagatctcagtgagctgtgtcttctctttatttatattctgttcgggcgtaacttcagaatagagggaatctttgataaccctttgtaaaatagtaactttctccgcctcttcctgttacact

SEQ ID NO: 44941 - DNA, 1068 bp, Homo sapiens
aagtacctgctgatgaataatcaagtgagtaactacaggctttaaacaacttacgttttcacaagccttaaaatttgaccaaataaactttttttctgcttcatgcatttttcccagcatcggttgcatcacatcttagtagattccacttcaggttgtactgtttatcaacttttttgaaaatattcccacttgtagttccatacaaattcttcgatcacttcaaatccagcaatggtttctcaaaaaataaagctaggcagtactgactagtaagaggcaaagaattaacagtgtcatttgatgttgtgtccaaaatcctcattcttcaaactactgttctcatcaaagggctgatgtcttaattttctctggacacatgtctttgggttggttactatcttcaagcacgatgtaattcagcattagtaaatggttttctttgcttggctaacaaataggctacttgtaaacattttggttgcagcctcatttttattacttttgtgaaattttgctgtgatgtttcatttaaattttctaattcttctgactgttgctttcccaccagttgggaatattgtgatgttagtctgatactgtcagtctattcttttaccagttatggtgacactgcattataaacacaatgtaccagcatataataaaatagtccatattccaatgtgccttgaaagtgtaacattcaaaggtacttttcttgttctgagatacagggcatgaactggtagcagaaaaagtaataaatctagcaatacacagggcattccaaatgctttcaggtaatatctgcatcaccatgattctgtagcttgccaagcggcaatgtgaaacaagacacacatacacaggttctgtagcagctactcaactttcccattatagcaaaaaagtatccatagataatatgtaaattagtgtggctgcattccaataaaaacttatagacactaaaatttgaatttcatgtaattttcagatgtcaggaaataatcttttgattatttttcccaaccatttaaaagccattttcagttcatgggccac

SEQ ID NO: 44942 - DNA, 1066 bp, Homo sapiens
gagcgcctcctcctccgcggctgggtcccccggtggcctcaccagcctccagcagcagaagcagcgcctgatcgagtccctccggaactcacactccaggtgactggtcgctgcctctccaccggaggaaaaagtagggtgggagggcgggcttgtcctaaccaccctcacagcgcctcagtctgctccccaccagctcctcatgtggtttacctcccttggttgtgggtcacacgcttgctctgccactcctgcccccttttactgttttcctccggaccctccctgcctcctgccgcaccactgctcagcgcttctaactcggatttcctcatccctcctgacacatagctgctgactgtaatctctcaatctctctcatagtctatttccagtatcccttgctgcccaggcttcgccactgatctttccctttgcccacctgattgccgcgtcagcagaattgttaaaatacaattgtgaagagtaatctccaggtttcacaaagaatggaaaatagaactgttgcaacatcaaaggaaagggaagccagagttttcatcagtgaatgcttctcgtctgagagtcacttatcacgtagtcagtcttcttgagtctctaagatttaccctgttggagcagtctctccccatctcacagcgaccagtgcatgtacatttctcacttctttcatagtcttgtccccacgctcaagaattactttatgttcatcttgattgttctgttgtcttcctgtgagtttttcattttatcatggtcagtttagaaatatttttacaattcatattatttcaacttttactgtaaattggtttgctgcagccttttacattgcaaatgtctatggtctctaatggttttcaaaaattagaactgcttctttatattttatgcattttgcaagtatatttacttaacagtttcacactattttaaataaagatgacaacattgttaagtccctaacccctttttttttttttttttttgccgggggtacggctctcctgttgcccaggctggagcgcagtggcgcgatctcggt

SEQ ID NO: 44943 - DNA, 1024 bp, Homo sapiens
ggaggaagtagaaggaaggcaggaagggcaaaatgggctcatatcagttgtctattattttgttccctttaagatattttcctacaatttctccctacaactttcctgtacattctactggatgggatttaagtctatagcaacaactagctataagaactaactagaacattgctacccagaataaaatcaggcttctctacttagaaaaaaggggatatttgtttttggaaagcagccagcatcctctgtcataagattgtaggatgcgtctcatctagacttttaagttcaagctgttaagacccagacttccccagctgccgatattgcttaatagtggcagttaaaacccagatggattgctcatctgtattaaccggagagcacacaattgcttctgctaatggtaaattggatagagtgatagtaaaacagtgtagcattaatgaagagttttttcttgcctctttacatcatcatcccccttcccctggatagtttagaatgttactgtgtgcttagatgatgagcctttctaactatgatcattttccttcccctcaagatacaagttatgctggctatccagattctgtgattaaaaataaaggtagttttagtagattctagcacttaacattggtttttaacaataatggtttcatgactttgggtaaattttttaaaattttctcctgcagtatagccgaaatacagaaagatgtggaatacagattgccattcaccataaacaacctgacaattaacattaatatgtgagtagaattgtatcctactttttcatgtaaaaggacttaacagtttttttattgtttcttagttattagaaataaacttttaaggtgaacttatttcaagtaactataatttataaaatagtgcacaattcagtgaaataaaaatattcgaaagctatcactgttatagtgttataagaaagaaactagaaaagaggaaatgcaataaaaatgtgtaatactaattctgagtactgtaattg

SEQ ID NO: 44944 - DNA, 1030 bp, Homo sapiens
ggtcccaaagctactcccacactttagatttttgttgttgttgttgtcatagcagcattccacttccaggtacttcagccctctccccctcatctttttcttcctgttttctatgttctagagtcctgagtccttattttcagataaaaaatgtattcaaaacccatacctctatcttctgtagtaatagggctggatataaactcatttaccttatttgaaaatacaaaccgacaagtttacttgttttcatttcagataagttcggggatatagtaccattattaaaaatcaagtttgatgcatttcttagattattttgtgggttgtacctgctactgagttcaaaataaagcagattgggtcagaattattgatttaaattcaaagatattacaaatactctctcatgttggttttattgtttctaaatagcttgttatattcacatacatatcactaattccttcagataaattttaagataaagatgagccatcgtttgaaatgaacaagctgattagaaaacttaattttttctaggggtcatatattcacctggctcaaaattcaaaaagtataaaggagtatagagtgaaaatctccgtgtcacttttttcccttgcagcttaattttttttcctcattagcatctaaagttatttgtttgggtttgtgtatatataattcctgagctgttttattcatctacaagaaaatatatatagtattgtattttcccccttttttatatgaatggtagcatattttgcccttcctttttttttttttttttttttttttggtggagggggtcactaaatgatatggttttggaaagtttttcatgttagtactaaggcacttcctcattattccttatagccacaaagtatttgttttatgggtgtattataatgtctttagcaagcctgacagatattttcatgttttctaaccctccctcaaaagcccatcctacttcattgccgtcagtgctgctccagtaaataatctttaaaataatatt

SEQ ID NO: 44945 - DNA, 1050 bp, Homo sapiens
gaccgtggaaaaagcgtagtttctgggctgggtagcacagtccctcaaggcttcccttggctaggggaggtagttccctaaccccttgcacttaccgggtgaggcaacaccccaccctgcttctgctcaccctccgtgggctacacccactgtctaaccagtcccagtgagatgaaccaggtatctcagctggaaatgcagaaatcacctgccttctctgttggtctccctgggagctgcagactggagctgttcctattcagccatcttgcctgggagccactgtgggcaaatcttaattggaagataatgtaaagagatacatattcatcttcttaaatattagaggtattttttattgttttctttctagattttcctggaaacatgaactgccaagagaggaatgggacacaaaaccaaacactgttttatatttatggtttgcaaactggcatttcatcagtggctaaattcacagatatcctatatagattgtatacagaactgagactgattttgtaccgattagaatgattgctatgatctttgagaaatttttctgcactatttgcactgaaatgtttatttattgttgataaattgtatcatatttaagttccactgctgttcctcttaccttgattaaatgcctatgcatgtacttttagctagtttttaatattttataaaacttcatttaaatttgtatttttaacttgaagttccatttctttatcaaggatggtatttagatttttttcctcttaaccttttttcaaaaactattttcaactgtgaggaaacccttatttttctttctttgtggataaaactttcaaaagcaatttaagatattcatagtgttaggaaacaccaaacctgcctatgtgccatctcacaaaagaaacttttaatacctacaataaatcaaaagaataaaccagctgttcttatatattgtttcatttttaaaactaaagatgcatttaagaagcaatacaagtaaatattttacctaataggaaaaaaaaaagttgcctttcattt

SEQ ID NO: 44946 - DNA, 1031 bp, Homo sapiens
cagttcaatgtcagtctgatacggatattcttgtagaaatctctgagatttaataaacttacagttgagtagaactgaatcatactaaagaccagtggaagcatccttgcagggccttatcagtttttacaatgtaaaataactaacccatagcgtttccttttacagttaatgtttgtttaataacatgcttaaggtataatattgagacgaagtgaggaattttaatgctgatttagctactgaaaaattatctcttgcaacacttgctttacttgtagttaggatttgtaatgttttattgcaaaagaaagccctcttttaaatgcgttgcatttgtggcatagtggttgtgtaggtggagtaggacttgtgtctgtacaattcatcaagaacatagcacagagcacttttacatgccattcagagacaatagtgggtgttgataaaatttgtagtactagagctgtgaaaacaagtgctgggctggtgcctgctttaaactctcttgaaacttagcagaatttcatttttataacaaaaatcactattttctttaaagaggattgataacatgaataagtctaggtgtcctggaaattcatttggttatatcactataaaaatggtgagacactgttgtggtagttggttttgtattttaaagcgtaaacttcacagtacatttaaaactgtcctgtgcgaaatttcagaggctttggacacgttcctttctagcctccctcgccgtggacagttatcaagtttctggcacggtgctagacgaatatggaagagaagtaagtgcctcagaatgacattttagaacgctctttttataggttaagagactgagatcttgagaggtgtaactcatctgaggttagacagctagggatacagtgaagactggagtccaagcatattgaaaagtcagaccattctgtttttgtgaaaacaaataataattactagaatgcactacttctgtggaatttttttttttgagacagactcttgctttgttgcct

SEQ ID NO: 44947 - DNA, 1050 bp, Homo sapiens
gctgaacacttagtagtgctgctatgttacgggttttggttggttggttggtttttttctttcctggcgataggaaactgactggcatgacttctcctcttctccctctgggaatcggatttttacgtaataagaaagtaccttcaagaatagaggaaatttcatgtaaaacagatggatcagctgggcacagtggctcacgcctgtaatcccaatctttgggacattgaggagggtggatcacttgaggccaggaattagagactagactggccaacatggtgcaaaccatctctactaaaatacaaaaattagccaggtgtggtggcgcacacccgtggtcccagctactcgggaggctgaggcaggagaattgcttgaacctgggaggcgtgaggttgcagtgagtcaagatcacgccactgcactccagcctgggcaacagagcaagactctgtctcaaaaataagtaaaataaaatgaaataaaatagatggaccaagataagaaaagggacaaaagcagaggagaactaccctggagaagaggaagaatttcacacaatttaatttctttacctgttgatgttttattaagcatacacatcttttgtttatatttccttaggtgaagaagttcggaatccccagaaagctattcccattggaattgtgacgtctttgcttgtttgctttatggcctattttggggtctctgcagctttaacacttatgatgccgtactacctcctcgatgaaaaaagcccccttcctgtagcgtttgaatatgtgggatggggtcctgccaaatatgtcgtcgcagctggttctctctgcgccttgtcaacaaggtacattgcatcgcctttggggcacgggctgtttgggactctacaaagtagtcagtgtctaaaaatttgcttttgtctgtttaaaaagtatcctaatagaaacaaaatattatgcaactttgtatttattgattggcttgctcagaatttccacataaaaatcttaaaggataaactcccctgctgttagttgagtcagt

SEQ ID NO: 44948 - DNA, 1475 bp, Homo sapiens
aaatctgaagcccagaattttctctcaagctgcgtggtttactggagagaaggagttggataagcacaggctcgggtattttggtagggactgtaggcatgctcataaatccttgctgttgtcacagtacgctgaaaacccgtttgattctatacccaatcaagaatagacccttcacacaggaaatgtgaacaattgttatatatgaacactcaaatcttttactgtaacgaaaccaagaaacttgtttagaatgtgataggcagctaaaactgttatgcccactgtgctcaatttgaagcagaatttagtgaaaaattatttttccacattgaaacactttgcagacacaaatatctatgaaaagatgctttgtcagccactgtgcctttttttctgtgaagactcaacggatgtgtgtgtttgtatgtttgttaacagttacatatgtttgtatgagtgtatatatatatctgtgtgtgtgtatctctaacgtcagtgtataagtaagttgggtttatggtgggctttgactatgtcattaggtgggtacaaaacccaactgatgtggagaaaaattgatgtttgatgttgatagatatgcttatacctaatttttagtttttaaactattttaaaatatactatgattttatatgtatatttcctatagactctttaagacgtatttataatgtttctaatatgaaatcactaaactctagtacattatagcaggtgctttgtaatctggaatggagaagaggtaggggcatttggggattcctgtttacttgctgctgccacaccttttccgactgatctgtcctggtaggtgtttattagcaaaagtcagtatcaccagctctttggcacctttctgtttctgcttgtgaattcataatgttttcaactaaattttttttttctttctcagaattacctaaatgttttgtagagttttgactagtaatcaatcaaaattatataaagtcttctccagtaattaagaaatacatatgcaaattcttttgtgattgagtaaaagcagcttaaattacttttcttttctacattaagaaatatattctcaacattttcagtgagaatttcttgtaatggcacctcaaattttatactcttaaaaaaaaacaataatttgtgaattaccaccaaaaggcaatggcagtcctacatttaagaatagagctatgcaaactctgttaaaaactatgaggaaaacttatattagaacttttgatatatactaaaatactgattatcttaatcacattttccccagagataaacattgagagaacgaaagccaaagtgtcatttaagagagatatatatgaaaaagtaacattaatatatagaactttaccatcaccagccgtagttgatagaaaatattagtttcagaattaccctcctttaaaaaataagagactatttgttttcttttaatttct

SEQ ID NO: 44949 - DNA, 1043 bp, Homo sapiens
gatgatttggtctaaaccccacaatcctattgtgtggcttagttatatctataaatatagaacctgttttacttcatttttgtgtcaggtggtttgaaggggggaaacatacaatgctctgctaagtaattagagctacttacgcaggcattggggaatctgaaacttagcttctaattgtctccacataaaaacagaagttaacttctagggacatcttcagggactcctcaaggcaaatattcatgaaatggggcctattggcttttcttttcatcttggttctgggcatgttgccatgttcctgatctctgaactctgatgctgacctgctacagactccaggagcaatattaaggataaaataataactcacataactttgtggctctttattctaaaaaaaaaaaaaaaagttggctcaattttttttcctccataagaaaatgcaaattgcaactgtattgagaaaccattttttcacttatcagattgtcaaagattagaaagtttgataatcacagtgttggtaaaagtgtagactagcagtcacaatgaaaatgtaaatgtaaattataatgacctccctagggggaaggtcaggatacctaacaatattgcaactatacgtataagagtttatcttggccctgcgtggtggcacggtgactcatgcctgcaatcccagcacttggggaggccgaggcgggcagatcacctgaggtcaggagttggagaccagcctggccaacatggtgaaaccctgtctcaactaaaaatacaaaaattagccagacatgatagcaggcgcctgtaatcccagctacttgggaggctgaggcaggagaatcccttgaacctggaaagcgaagtttgcagtgagccgagattgtgacactgcactccagcctgggcaacgcaccgcgactctgtctcaaaaaaaaaaaaagagtttatcttacaacacacaggagaaatggtatgtatctacaaccttgtttatttcagcattgtttataataagatatatttcaaatacaaat

SEQ ID NO: 44950 - DNA, 1089 bp, Homo sapiens
tgcgtaaaacattctttctccagatatattcttttttttttttgagatggagtcttgctcttgcccaggctggagtgcagtggcgtgatctcagcacactgcaacctctgcctcccgggttcaattgattcttctgcttcagcctcctgagtaactaggactacaggcgtgtgccaccatggctggctagtttttgtatttttagtagagataggatttcgttatgttggccaggctggtattgaattcctgaccttgtggtaacgccgaccttggcccagatatattcttaatacatttatcttactttactattacttcattattctattaatagaaagtattgctaacatactcttttaagataaaaatgatatgtaataattttgacttaaatatcttaattttcccttccaatttacgtttcaaaacaattgcttttagtacttttaaatatggcatcacttctgttgcctggctgttttattcttcagtattacaaattatgtcagtatatgtagaatacagtagttgcaaaatgttttatttaaatgagtcattttggttcactggatatacttctatgggtattattttttaaagttttaaaatatatttctagtataaataattacgtaaactgttcctgaaaatatgagacagaaaaaaagaagaaaaatcaccagtgcctaccctgtaaccaataattgcttttgtgaaagcactttaataaagtttcttagcttttgtttaaaaaaatttatgtataatttttcatactgcttttttacttttttatattactttttccatgatacaccgacaggttatattgtccaggcttcataattacatattttgaagggtacttagtattctacccagcaagtgtagtacagtttgcctaatagcattgattttgtcatttgacatttagtgttgttttttaatttatcacaattatagcgtaataaacaacttcattatagttctttccaccatatttaaggttgttttcttagattgcatatagagaggtagaattactgcgtcaaaaattcagttttagttcttgatacagtattgcca

SEQ ID NO: 44951 - DNA, 1033 bp, Homo sapiens
tggaaataaccaagttcatttgtcactgaggacacgttaaggatattagaatttttcattttttgggctctatcctagtactggagcaaaaccagatgactgaaaaatcgagagaaagactagtaaatgggacaggatagcatttacattgtgacttattcacaatgagaaaaatgctgtaattgctgacttggcaaaatggaatttgttgaagtactgtttttctgaagaatagtaatttacagaactttgaggaaagatttctaaaacttagtgtggttcaatgctagggtgtttttaggcattttaaacaggcgtgcctataaccatgcattattaagcttttaacacctattacaggctagtaaagcttttgttttgagaggataagcatatatctcttcgggttttgaggtgttcaaaatgccattcagcattaggaatttgaaggtttgtttcctattagtattgacctgcataattcttacctgcctcctttctcttcccggaccttcctaatttgaagaggtgatttggatttcttttctctacattattttcaacaggagatacttagagagcctgatccaaacagttgttgaagaatggattttactgtggggaaattctttttctatttacagtggtgcgaggcataatttcttccttaggttccagcagaaatggaagggttaggacgatgtgggtaaaggaattctgttggggaggagtgggaacttgtatagatttattgtaatttatataaagtattcattgtgatggcaatttctttcataatataaaatgacggtatgaaagttgactaataacatgtagcagagtaaatgttaaaaatgtgctttaacaactgtgtggtatggtaattccgcaggatgtggtacttgcttagttacagtaagcaacagtctagtctacagaaaacttaaaagactaaatatactgctgcttggagggggatgtggattgatttttgtttttttttttttttaaaaaaaaggtggactggtacttt

SEQ ID NO: 44952 - DNA, 1007 bp, Homo sapiens
gagttgagatcacgccactgcactctagcctgggccacagagtgagactttgtctcaaaaataaataaataaataaataaataaataaaaaataaaggaacatgagagagaagtggtgggaaaaattgataggttaagaagttaaagtttacagtggtagttctagaaagaaggcaagagagagaatgagatttttgaaggtttattttatgtaacgtggcattgttattacttttgattcaattactgatgtctagtgaatccaagacctctgtgtggtcatgtgtctctaaaactatgtagagtcagctctcagtatctgtgggttccacatccatggattcaaccaaccatggatcaggaatattttggggggagaaataacacaacaatttttaaaatgcaaatttaaaaatataacagctatttacatagtgtttatattgtattaggtattataagtagtctagagctgatctgaagtatataggaggatgtgtgtagattatgtgcagatactacaccattttatataagggatttgggtatctgttgtttttggtgtccccaggggtccttgaaccaatccctcatggatactgagggatgacttcatatgttaatagtggcatatcaggaaaccgtatttaatttgggaatagtaagggtatatacttacctaccagcacagcctagcaaatatttctttctctttataaagaatatttatgcatttaaaaaatgagaatgcatttaattgcgttagtcttaattcttcttttttgttgtttttttttaataagcctccagctgttccagacaatagaagacaggcagaaagtctttcattaactagggaggtttcccagagcaggaaaccatcagcttcagaacgtttacctgatgagaaagtcgaactttttagcaaaatgagagtgctacaggaaaagaaacaaaaaatggacaaattgcttggagaacttcatacacttcgagatcagcatctt

SEQ ID NO: 44953 - DNA, 1050 bp, Homo sapiens
ctcagtaatgtctgtatacctgattttcctgagaggtagtatttagtagtacttcacacttttgatacttgagaaactagaaatctttttgacatcaggttttctgctattaacatttacacctgcttaaaatgaacaattaaattgaaattggttttcttacacttttgtccctaaaacagcataagaaaataatgtgagattttgagtaagctgtacttggcattaacctcattattttacagtcataccccctggagagttcactaggtggatattccattaggtctaaattttgtttctgttagctgctatgatatgaaaataatgtctgtattattttgctaaaatgggtgtaaatcgtatacataaattttttgtttatcaggaagttaaatgaagttcgaaagagattgaatgagctaagagaattagttcattattatgaacaaacgtcagacatgatgacagatgctgtgaatgaaaacaggaaagatgaagaaactgaagagtcagaatatgattctgagcatgaaaattccgagcctgttactaacattcggtaagaacttttctggggatgtttttccagcatattcattctgtcttgatacttataatgtgggaacaaaaatacttcgttgtagtatttactatttgccttttatttaagctttctactattttggtcagtgtaatcatctctgccctgtgaagaaagatgaatagggaagtatggagtacaatagttcagtaaatttgccctttgttagactgaattcgagtaaatcatgagatgtatctaacttagcattttgctgtctttttctttttaggcgtaattttcattttttcagatgtttttctacttaaatagcacatatgcagaagttaatgaaaagcaggagtcgattattcaatttgaatttaaatggaatagccaacaatgtgcttggtttggtgttattttattagcagttctaaacttggatttctttctctctttttttgtgccttaaatgacttcaggctgttttctttcttctagaa

SEQ ID NO: 44954 - DNA, 1049 bp, Homo sapiens
cagacttcaatttcaactgcttggtccccacgttacccacacttctgtgcaacatggctagaaatttgggagttcttacaatccccttcaggtttatttgctagaacaactcacgaaatacaggaaaagacttacttacgtttcctcatttcttataaaggattctgaactgccaaatggaagaggtgtgttaggacagtgtgtgggttggggaggtgtgcagagcttccatggtttcctctgtgtgtcccaccctccccagcactttgatgtgttcagtgacccagaagctgcctgaattctgtttacggttttttaggagatttcattgcttaagcgcaattgataaaattgttgactgttggtgattgttctcattagcaaaaattcacatctggttgaaaggggcttgttacggataacaaaagacattatcacttgggagattccaagggttttaggagctctgtgctaggaaccaggcacaaagaacagatagatattttattataccacaagaatgttgttccagtagatccaggtaaactggatcagtcttcactcctgctgttgagaattaagcaaaaataacaaattgtagatagtgaaaagagtctgccaacaaagatgttattacattgttactaataattataactgaaaatttcttcatgaataacagatggtgaagtagatacagtagctccacttgatgaaatactatgtggttgaacttaaagcgtgaagaatggaaaactacttgtgacataataaatatttttattttgcagaatacttaattatatggacactgctgtgtaaaaacatacatgaaaaagactggagactaatgaaaactaataattgtacaaagctaaagatctggacttctcccccctctatattttttaatactttgtatgttcttttaatttaaaacagaatattggcccataggcctgagtatcagagtttattgctgtattttaaaaaccaaattattatgtatgatgacttaatgctttcaatcttgtgttaggtggaagaac

SEQ ID NO: 44955 - DNA, 1055 bp, Homo sapiens
taatgttgagtactattagattataaaaacaacttttgtctcataagttttgaggatgcatggtattaatgatatttaggatttcttctgaaacagagtttttgactcagtgtgaaaggttggctccgttgaacctagtctgtcagatgtatctctctgattgtctttcctactccataaaaatatatataattcacattatatttctctttagctatgtgattaggaaggtctcaggctcttatattagcattttgacactgtttaattactgagtcattaactgggatttttttttttttttactcgattaaccaataactctgagaattccaactttgtattcaccactaggagtgctatgattaacatccgttactttgttgactccttttttttggttgttctatctttttcctgttaaatctcatgttgctctataaaggtattctgttgtcagaagcctaacacagtgttagttcacagttgccattcagaaatgattgttgaatgaatatccatcacgagcagtaaacatttattcaaagcttcggtgaatagactttcctattagaatgtccctacttcattattttcatataattgatagtaaaaaattactctggttttaaattatttatatcatttttaggatggatctgaatgtctaatattattttagatatttggcctacttcagattagacctcatttcccaaaatctcaactattgtaatttcatggaattaaatgactagagataaaaagtcagataaaatcctgtagtcttattcaggggtcagaaaacttttcctataaaagactagatagtattttaggccttgctggccatatagtgtttatcatagccattcatctgtgacagttttgcacaagagcaaccataggcaatatgtaaacatgagtatggctgtgttctgcaataacactttatttatgggcacagaaattttattttcatataattttcatttgtcacaaacttttaactttttttcttccaactatttaagaatataaaagccattcttagc

SEQ ID NO: 44956 - DNA, 1077 bp, Homo sapiens
gcttgaccacaggaatgagacttccatgcaccctcatcttgccattattaaagctatccagcatttgggtccagccttaagagaaggtgagagtcatgactaggccagtgaatataacagtgcatataaaagggacctagttaccagggagaaaacagaagtagaccactgaaagaggcaaaacctagtgaaaatagaattattgaacaaaatattgaacaaatacacttgaacaaaataataagggcacataagcagattgaattataacaaattctttagagctagaaaaaaatgacattaagttttaatgtttagattatttaaaaaagaggacacgtgctattaagttccaaattacaggcctagaaaatcagggggaagaattatgtcattaaatggaatgaaagtactaacagataaaatcaagagaagacgattagagacttacaagaagttctgaaggggaaaataaaaaaccaggtggacaagcaataactaaataatagatgggatgaagaaagacttgagactgcagatcagaacagctggctgttgtctagccaggagagaagtgagggaaacacacaaacacctatgcagagtctggcaaaatccctgaattccaaggaaaaagtaaaaatcctctaagcttccatatgaaagaccaagttgcatacaaagaaaaagaaccaaaccgacaccaggcaatcttccttaccacacaagcagaagtagaaaaaagtggaatgacgctacacagttgacaaagaactgcaactcaggaaccttgtactcagccaaaggaccctccacatgtcagaatgaaaaggagatactagtttatcctatctgaggaaaactaaagaaacaacctgtgaatcaaaatagagacctttatacaggggaagataaagaagacagagaacagtttaataaagaaaacagtagatcagtctcactaatataaattcaaaagtaaaaataaaatattagcaaattgaatctgccattgtatcaaaagaattctagactatcaacactagagtttatttcagacatgtaatgatgatttgt

SEQ ID NO: 44957 - DNA, 1163 bp, Homo sapiens
aatgatacgcaatttagattgataattttatcacatacagaggtattaaatatgtcattaaacagttatagctttgaaatgaattttttaaattaagtatgattaaactgcaatatagtatataagataaaagtttgcatatcaaaattctttttacctggatttttcccattagaagagattgcttacagagataattttggttcctgcttattataataagtgtcatttttgtgatagttcataccttaaaactacgagaactttagtgtatcacttgattttatacctgtaactgaggcaaaatagggaagttgcatatttattgttacatataattaatatatttttctattgatatcttatattagtaatgttattatttcatgcttgtggaaattgagacctgaagatattaaattattagccaagtagtggaaaatttttctattagagcacattctttttccattttcttattcctctcacaaaaatgagtttttatgatcttgtatacttctttgaaagcgcaatgtattaagatactcaacattttaaatggatacctttgagtgtaataattttgtgttatcaacaagtaaatttagccgaattgtagctaaataatagagtgatgcctagattctgtgaaactgaaaacttcagttggatcacttgcctgctccaatatacactgagtatgtaaataagacacaatggtgaaattgacctattatgttaggttacagatttggttactcatcatcacagcacttttctgtgtgatgtatgagatttgataattagtagactatactggatagaccttaatctagtagctttcattggcagcattcagtttattctttttaacattaacaaaatatacaaacttccttttctgtaatgaagtccatattagcaaaagcaaaaaagaaattagcacttagcttatttctaagtgttgaaagattttcactgatttttcctataaaatgtataatattttctgtatattttatatgatcagaaataaacatggttcttagtaatgctaggtaatgttattcattaaagtttcatttttagtataaaatgcatatcttgatattttaagattttatttatcttggtaatattaagcttcttttctactttaaaag

SEQ ID NO: 44958 - DNA, 1052 bp, Homo sapiens
tttttcttacaaacctgcaccagtagctgtgtctgaagtagacatagaattgggaaatttcattgataggcctttttcttacctaatttgcttgttttaggttgcgttgttttcatcagaatttgcatgacattttggaattcacttgtattgtttaaatgaaacaacaaaatgaaataaatatgggcttcagagtttgataactaagtttaaatccttgttcctacattgaactgtctgtgaaagcttgagcaagttacttaaattttctgcaaatgaaagtaatgtcatctactatataggattattttaaggattaaataagtgtgacaatgtatatgaagtgctcaagtagtatagtgtgtagaacttgttaaagctaattttcctcccttttgtttggacatttttttattaatgcattttgaggaatatatgaaaaagttcacttttacatactcaaaaaatatttttgttccaaatgtaggtaacaccgtgattcacttagatcaagcattagccagaatgagagaatatgagcgtatgaagactgaggctgaaagtaactcaaatatgagatgcacctgcaggattattgaggatggagatggtgctggtgcaggtactacagttaataatttagaaggtatatatttttgttttcggtaggtttttggagaacaggtggtgtttggttacatgaataagttctttagtggtgatttctgagattttggtgcacccatcgcctgagcagtatacactgtacccagtgtgtattgtttgatccctcacccccttcccaccctttcccctgaaaccccaaagtccactgtatcctgcttatgtctttgcatactcatagcttagctaccacttatgagtgagaacatgcaacgtttggttttccattcctaagttacatcacttagattaacggtctccaactctacccagatggctgcaaatgccattactttgttcctttttatggctaagtagtatgctgtggtgtataaataaataaacaaatatatctgtctatctacaca

SEQ ID NO: 44959 - DNA, 1047 bp, Homo sapiens
tatgaaagaagtcattccttttttgaaggtaagcaattattttaaaaaataaacgaaaccttctatgttttgttttttaattcatacagaagaccttattgtgataaagttcaacggtataggtaaacaacaacaaaaaaactatcacccataattttttcaccctaccaacattctctgaacctttcagtaatattttatacacatgtgcatattctgcctttttcatttactatatcataaacttctttctagatcattatttttctgctgcattttttcaggatttatcacctttatttttagttttagtttttgtgagtgtatagtaggtgtgtatatttatggggtacatgaaatagtttgatacaggcatgcaatatgtaataatcacatcatggtaaatggggtatccatcccctcaagcatttaacctttgtgttacaaacaatccagttatactcttttagttattttaaaatgtataattaaattattgactgtagtcaccctgttgtgctgttaaataatagatcttattcattcattctgactactttttgtacccattaaccatcttccctattccctactacctttcatagcctctggtaaccatccttatacagtttatctccatgagttaaattgttttaatttttagctcccacaagtaagtgagaacatatgaagtttgtctttctgtgcctggctaacttcacttaacataatgacctccagttccatccatgttgttgcagatgacaaggtctcattattttttatggctgaatagtactccattgtgtgtctgtaccacattttctttatctgttcatctgttgatggacacttaggttgcttccaaatcttggttgttgtgaacagtactgcaacaaacatgagtgtgcagatagccctttaatacactgatgtcttttcttttctgtatatacccagcagtgggattgctggatcatatggtagctcttgctgtattttcagttttttgagcaacttccaaactgttctccagaggggttgtac

SEQ ID NO: 44960 - DNA, 1052 bp, Homo sapiens
aatgtcctgcagagtttccccactgttttcatataatagtttcatagtatgaggtcttagatttatgtctttaatccattttgatttgacttttgtatatggtgagagatagaggtctagtttcattcctctgcatatggatatccagttaccccagcaccatttattgtgaagagactgtcttttccccactgtatgttcttggcacctttgttgaaaatgagtttattgtaggtatgtggatttgtttctgggttctctgttctgttctatcggtctgtgtttctgggttctctgttctgttctgtcggtctgtgtttctgttgtttgtatgccagtaccacgctgttttggttactatagctctgtggtataatttgaaggcaggttaatgtgattcttccagttttgttctttttgctcaagatagctttggctgttctgagctttttttgtggttcctataaattttaggattcttttttctctgtgaagaatgtcattggtattttgatcacaattgtattgaatctgtagattgcttcggggagtacagacattttaacaatattgatttttccaatccatgaacatggaatatctttccctttttgtgtctttttaaatttctttcatcagtgttttatagttttcattgtagagatctttcacttatttggttaattcttaggtatttaattttatttgtgtctgttgtaaatgagattactggtggcatatagaaatgctactgatttttgtgtgttgactttgtatcctgcaactttactgaatttgttgatcagttctaatagtattcttgtggagtctttaggcttttccaagtataagattatatatatatcatatacaaacaaggataatttgattcttcctttccagtttggatcccctctatttctttctcttgtctgattactctagctaggacttccagtactatgttgaataacagtggtgaaagtggacatccttgttgtgttccagatcacaaaggaatggctttcagtgtttccccatttagtatgata

SEQ ID NO: 44961 - DNA, 1049 bp, Homo sapiens
taaatatttgtcaacatgtcttttaaaaactaataggtatgcttgtagtaatatttatttgatatgtacagttactttataagggttaaaaaaaaagcctaaatgatctatccttatgcttagggagtgcagccttcagttaggaaattgattgtttttacttttttgtgtctgatttgatggaagaattatgtaagttacatgctatctgctcagaaactgttatacaataaaatatttaatacttgagcgaaatagaagtcaccttgagtctgtgaaatgtttaaaaagtcttgaatttaaaagaattacattttttaaagtgatttttcttaaatgtctaagatattaggaaatatcaatggtattttagttggctaaagtggctagtgacactcatttaataggttttccatttgaccttttaagcgctactagcatatctagagttacctaaatcacaacacttatcttgtcaccttgtgtaaaatctaaattgttccttctcactttacctgtgtagccctgatttaagtgatttcatttcatgaggaaatgaaataataaatactaatttagcatttcaaaaagtgtctgaggccagtaaagagtagaactaataatctgattttaattatttatgatgtctcatttcacttcagatcttgactttttttgtaggactgtagaacttctttgttaattatgcccaggcagcattacacccagtcacctgagttagacttcttgactctctttatgtcatcactagtgagtcaaaaatgtattctcctccttagagtcatcaatttgacttcactttcttctttctagtagcatgaccttaattcatattcttaccttttgcttagactacctgtcgtaataggcatgaagtgcatttttactaagccgtgtcctacccaaactccttagtcttcaagtggcttcactgctggatctggtgtgctttccccctctagctactctccatctaggtacattcacttcacattattcaacattttccatatctactgttacttttt

SEQ ID NO: 44962 - DNA, 1031 bp, Homo sapiens
tgtaaacccagctacacaggaggctgaggcaggagaatcgtttgaacccagtgggtggaggttgtcgtgagccaaaatggtgccattgcactccagcctgggcaacaagagcaaaactccatctcaaaaaaaaaaagttcccaagggtttgactctgaagacaataatcaacaccaatgggacatcaagggattctctggtatgttactctccataaggcccttaaacaaacatggggaggaaactaagatcagcatcagtgggagtcacgtacagtgttggtggataccttatccactttcaaccccatgctaataaatcagccagtcccttggaggaaagaaaatatttcacgtttccaatcaagttcagagaatcctctgtgaaccagtctaaatgacagttggactaatctcagaaaagcatgccttcctacaatatgacactaaattgagagggcacttaaagttctctctggaaggaaagttaattttagagcttcctgacccttctaaacctgaactgctctgtttcctacaagcaggaattgatcatattgaaactcactcttataccaacctagacctttctgaagtacccagatgtttgtgggcttgtttctcaactgacaaagggaagattaaaagtggtaagcctataaaaatacaaatacattattccaagccattgcctaaattgccctcatgccccctagggtcagaggcaatccaagggctttacccagttatagaggatttaataaaacaattccttgtacttgtctctataatactataatcctacagttaagaaatccatcacacctttaatcccagcactttgggaggccgaggcgggcggatcaggaggtcaagagattgagaccatcctggccaatatggtgaaaccccatctctactgaaaatataaaaattagctgggagtgctgatgtacacctgtagtcctagctactcaggagactgaggcaggagaatcgcttgaacccgggaggtggaggttgcagtgagct

SEQ ID NO: 44963 - DNA, 1029 bp, Homo sapiens
tgacacatatttaaaatcagaacttcaccatgatacccttgactatattagtagagaacggactgaaactgacattggttcaaaggaaactctagaggcaaatggaatacccctgtagtttcactgtatacaatagggtttttaagatcagtattcagggcatatttgaaaaggaaacaagtcatccttatttggcgatggtacccatgtgtaatacatagaagtgtttttttattcctctttctatttaaatcataaccattctacctggcagtgtgcagatgcagatatgacagagaataaccatgacaatcacatcattcccaattggtgggtaataggatctcctttgcccctttctctcagtaatactggattattcatcttgtatggcaacaaaatatataaatgttttcacctatatggtctggacactgtggtttgggctatttcctacctaaaatgaccagatatgactctttaaatggttgtgaaattcttaatctggggttgtttgtacatgaagtgatcccttacaaaagaactccctgtgatctcccaaactcgaatatatgaaggggttctagattttgttctttggtaagatcgctttttctttagctggcagtctctgaattggaaaaatggcttatggatatttcagcaacccttgaaaaaaagttttaatgatactttcgatactcttcaagcaatacaatctgagatgagtcatttggtctcactggaactccagtagaagtttagctgctcacagggatgagctttgggtgaaacgtattgtttttatgttaattagatattgttgccccaaatttaaaagatcttaataaatcagaattttttttatcagataagcaaggcctcctccattgatttattcagttggttaaattttaggcccctgggaatctttgcttagagggatctttaagttcttgctacagttactgtgttttcttcctttgtgctttatatccccacaaggggttcaaatgctttccagcagcc

SEQ ID NO: 44964 - DNA, 1044 bp, Homo sapiens
aagaccctgtctctacaaaaaattaaaaattagccaggcgtgagagtgcaggcctgtggtcctagctactcaggaggctgaggcgggaggatcacttgagcccaggagttctagactatggtgaactatgattgcccctgctgcattccagtctgggcaacagagtgaggccctgtgtcttaaaatttcttcttaaatatatatttacagttatgattcataatttcttagaaagggggcttataatctttgaaaaacgttagtacaaagagtaactcttctaactcttttgtttgcctcactacgagtacaattatacatttaaaacttcgaaaattactggttagatttattcttatctgatcattgtctagttgccatagaagacatttaattgaaattaagtcaaaggtagattataaaagctcttgaatttgaattttagtcagggatcctactgaatgtttttgtgcaaggaagtgaaatggtcaaatttatgggctgtgaagattaatctgctgactatagcatatactatcaagctagattgggggatctactattatataagtatgaaatataagctgaacaggagcagggtgagaaacagtgcaagaagaagaaaaacctaagatttctacttggataattggtagaattatgatactattaaaaatcagaagggagaactaggagggaaaaaaatagaattcaagtttaggaaaaacagtttaaggtgatcacaaaagacagttactaaattcatacctcagctttctaacagccccatcagagttgatacactgaaaagtttgtaagtggttacttacattctgctgggtacagctctcgtgttcagtaaacatatgaaaaaacaagagttgtctttctgtttttagtcctggttgtaactatttcttcagcatgtatgaactgcccccctgcctttttttttttttttttttgtgacaaaatggtaacagcttgacagtatgtttcacagctgtgattgtagcttttcctatgaactgcatatttctaaat

SEQ ID NO: 44965 - DNA, 1075 bp, Homo sapiens
ttgttattttctgttttcctacttggaacaatcctcctcacgcatatccttaggccttattctctggcatccttcaaatcttagcgagtgttttttttttggtgtgtttttttttttttttaaaccaactaatttaaaattggagctctccctctgtacttactgggtcctttctttactttagttttcccagggcacttactacaatctaacagattgcatgttttatccatgtattcaatttcctatatatgtcactccaactcccactaaaatataagatttttgagagtaagcaagcactagaacagtaggaaacacattatagctattcagtgaactatttcttgagttaatcaatcaatggatgagtgaatcaatacagttctttgagcgggaaactttgtataaggctcagctaaaagggaaattgagtgggtcaggtaccacggatactatacactctattgcatgattctcctgcctacatcagaagacgtttataagcctattttaaaggataccagttggaatctctcttttattaatcaccaagagaaccatgaacaagctgtttatcatttgactcatcatttaatcttgatttccagcttctcacacttgaaagaagacataatacatttctcacaggattctgggactattaactgaacttatgtgtgtaaaaggaattcatacaatgaaagcactagaaataattattatacttataaccattgtatttttacatgtttaaaatatagccataattagcctactcaaatccaagtgtaaaagtaaaatgatttgctttcgttttgttttccttgcttaggggatcatggacattgaagcatatcttgaaagaattggctataagaagtctaggaacaaattggacttggaaacattaactgacattcttcaacaccagatccgagctgttccctttgagaaccttaacatccattgtggggatgccatggacttaggcttagaggccatttttgatcaagttgtgagaagaaatcggggtggatggtgtctccaggtcaatcatcttctgtactgggct

SEQ ID NO: 44966 - DNA, 1033 bp, Homo sapiens
atgatgaagtagtggaaattacttcttgcttataccagtggcctcttgtcggtccttgagcaaaacataagtatgttggaattctgtgctctgtgcattttcatggggagtcagactttctttatcaggtaccatgtcaacagtaagtcataatgttaattgtaggctacttttttcttacatctcaggcgcccaggatacatctgatttaatgtcacctagcaaacgtagctctcagaagtacataatagaagggctgacggaaaaatcatcccagatcgtggacccttgggagaggttgtttaagattttgaatgttgttggaatgagatgtgaatggcagatggataaaggaagacggtaataaatagcttatttccagaattgcctattgattcttttggatccttataaaaacaaaatcatgctttttaaatctgtgtaatgcgtaggtatagtttttgggcaaattttgtgacactcaatgcaaaagaggatggtttttcattttatcaaaacatttctgactgggcacaatggctcacatctgtaatcccagtgctttgggaggctgaggtgggcagatcacttgaggtcaggagttcgagaccagcctagccaacatggtgaaaccccatctctactaaaaatacaaaaattagccaggcgaggtgatgcgtgcctgtagtcccagctactcgggaggctgaggtgagaaaatcacttgaacccaggacgtggaggctacgatgagccaagatcacaccactgcaatccagcctgggtgacagagtgagaccctgtctctaaaaaagaaaaaaaaaaagaaaaacagatttctaactgaaatatgaactcttaagacgatgttgtgtttgaacgtctcctagatacttcagagaaaagagaagctacttagcatgtttgtgtcatgaaatcttgatcaccaccctaattcagaagggaaaagttaccatttatattggacaataaagaatagttttacatgcctagggcaacatttggtacatgt

SEQ ID NO: 44967 - DNA, 1052 bp, Homo sapiens
gttgctatttgttgtttttaacaactaatcaagagtgagtgaacaactatttataaactagatctcctatttttcagaatgctcttctacgtataaatatgaaatgataaagatgtcaaatatctcagaggctatagctgggaacccgactgtgaaagtatgtgatatctgaacacatactagaaagctctgcatgtgtgttgtccttcagcataattcggaagggaaaacagtcgatcaagggatgtattggaacatgtcggagtagaaattgttcctgatgtgccagaacttcgaccctttctctgagagagatgatcgtgcctataaatagtaggaccaatgttgtgattaacatcatcaggcttggaatgaattctctctaaaaataaaatgatgtatgatttgttgttggcatcccctttattaattcattaaatttctggatttgggttgtgacccagggtgcattaacttaaaagattcactaaagcagcacatagcactgggaactctggctccgaaaaactttgttatatatatcaaggatgttctggctttacattttatttattagctgtaaatacatgtgtggatgtgtaaatggagcttgtacatattggaaaggtcattgtggctatctgcatttataaatgtgtggtgctaactgtatgtgtctttatcagtgatggtctcacagagccaactcactcttatgaaatgggctttaacaaaacaagaaagaaacgtacttaactgtgtgaagaaatggaatcagcttttaataaaattgacaacattttattaccacactaagtcattattttgtatcatttttaaagtaaatttattcttaggtcagattcactcagcatattttgactaagtaaccactgtacttagtaaaccgaagagcttctgagaattatagtgtaccttatagatatttttaacatttatatttgtataaagctaaagaaagccttacatatcctttaaactgactatagaagaaaatgatacagaattttgcctgcataaagtacacagga

SEQ ID NO: 44968 - DNA, 1093 bp, Homo sapiens
attgtttgtataatccagttacctcacatctttatttctgcacatgtcttcttgcttacccttgcatatctttgcaaaaagtacaaaatagttttgttgaatgaataccctaaaacatcctggtttcgtttatgattacgattccaaaaagtttatggtaaaagttattttgttgtagaaatgttattttagatttcaactgaattcttctactttgttcatcagattgcagctcagatctgtcgccaggctggtttggtaaagaaatccaaagatgtagtagactacagtgaggaaaattttgcaattgtatttgctgctatgggtgtaagtagaatttttgttttagtatgatatgtaaaattttgcttgtgtcgtgagaacattgtagtaagctgtacatatatagttgaatttttctttaggtaaagaatttgcaatctggcattttggccaaattaaggactaaaatttggcatttgactaatttgaaatttaagaataatattgtttgtgccccaaaccggctctttgttctgttggtttttgtgaagatttttggggtacttgaggttttaaaagaaggaacaattcaaatctgtagcttggctttcatcagaaataaatgttaaggatttttcttctcccagcactgatgaagttattgttatttaggtaaacatggaaactgcccggttcttcaaatctgactttgaagaaaatggctcaatggacaatgtctgcctctttttgaacttggctaatgacccaacgtaagtaacagagctatttctttctgtggcccagactcgggatcaaaagtgtgtcttaaggttggggaggtaaaatgtggtaataacagcatttggacctaacaatgaggtaaccctgtatttaaagtccagccctgcttcttggtagttatctggcactgggcaaattacttaggttctgaagctcataagatgtgacagctgatacttgtctcatggagttgttttgcatattaaatgagatcatacttataaattacctaatacacaatcaactctctgtaaatgattttttcctcctacctcaaaaatctggcttt

SEQ ID NO: 44969 - DNA, 1933 bp, Homo sapiens
attttaccctcgagactctgcaaagcattagctgctgcttctgcattgctccgcgctcttgtgaaatactggttctgttttctttattccttttgcactctcggttcccacctttgtgttggagtttaccatgttaccctgtaattaaaaacaaagaataggtaacatattgtgccagtgttgcaacgttttaaactgctaacagaccttaaaatatccccctacctgggtcctcagtgctatgtttaaagtgctgcagggatggagtggcgttttcttattgctgtatgtattgtacatagtggagtagttagttacctgataacagtcttgttatttgggtctcttagaccttacctctcaactccctcaagagtaccagtctctgaagttataatgctttggtctctacattaggggcaagatccagtctgagagaagtctcctttgagaagggccaagaggctctttcctgagtgtttgctttcggtttgttggtatgcctgtattgctgggctgtgctgctgctcgaagcagatggttttgactgtctttttgctctttcctatataatgaatagatgagtgaaaggagttttctttttctctttagtacttacgtattgggattcctgtgtcttacagctctccctctccaaataatacacagaatcctgcaactttttgcacagctggtatctgtctggtagcagtgagaccccttgtcttggtgatccttactgggtttccaagcagaggagtcacatgattacaattgccagtagagttgttgtttggggtacaagatgagaagaaagaaaaacctacagcctttctacattctgacatgctaacagtggtttaagtttctaaagtgtttaccagatgctgaaggcaaggggagggagcagaagcacttatgtttacggatattttaaactctgttagagagcagcctttgaaaatccccaatttggttctgctttttgacctctctctaccttttcagggtaatctttgtggcacaaacgatagcatttccaagctttagagttttctgaattcctgcgccttcctgacgtgagccctgagcgatcttctatgcagttctgccatgcgtcctgttggtctctctgtgttctttgttacttgggtgcaatagcaacttccctaccccgtgcattccatctttcatgttgtgtaaagttcttcacttttttctctgagggctgggggttgggggagtcagcatgattatattttaatgtagaaaatgtgacatctggatataaaatgaaaataaatgttaaattaaatggaccttaactaaagtgactctctatcttctaacgaggaaagcaacaagcaaatatgtaatcacacatctcttcaattcacagctctgagcatcataaccaggattgggaaccagcccttgtgttgcagggacatggcttccacactgcccttgtcattctttttggtactgtcccttacagcatgctgtagtttgatccagggctgagcattcctacaggtgctccccagcgttcctcatttcaggcctagtcaggacctctagagcccatctgctgtgagcaaaagagggtgctaaatagtgaaatacagcttgaagcaagccaaaacctgtttcacataaaatctcacatggatgtcctgtatatatagaaacctggtgaaagcacagggcatgctgtcatggagcctcccatttctccccactccagttcaaggcagctttcaggagatggagaggaaaaagcttaatcataagaagaactgggtagacctgagttctctttcggattctaccagtactatatggccttgcttaatcattcaacaaattcgagtctgcttgtctgcttgtatgccttttagggttgttgtaaggactggagatttttgtgtgt

SEQ ID NO: 44970 - DNA, 1025 bp, Homo sapiens
tcacagaaaacagatccgtaattgcttgtgtatgggagagaggcaggagggaggattacagagcagctcaagtcaacatttgccagtgatggataggttcattaccttgattgtggggatggttttgctgatgtatatgttatatcaaaacttatcagatatgtgtagtttactgtgtgtcaattataccttaataaagctctcaaatttaaaaaacaaaaagaataattggggaatagagaatgacaaagggtggtgtttttgataggaggttcatggaaaactctctgggaaggtaccatttgtgtagacccaaatgaagtgaaggagtgaacaatgtgaccagctttggagaagaacatttcaggtagcaggaagagcagatgcaaatgccctagactaggactgtgctgggcacgttagagtatgatgtggctgcaagagagtgaacaaagggcaaaggaggtcagagaggtagagaaggcctagatcatgtagaacttatcgttttttcactgacccggtgaggtgggggtggggggcaagccccaaggggctcttgcatctggcaccaaacacctggctgcacgccacccaggcacaacccgctccagggacagtgccaggtggagagtttaactggggcagtacactgtcaaacagtaacgcaagtgtcctaaggtgagctcagggagcacagaaacctccagtggaacagaagggcaaaagctcatttgatcctgattttcagtatgaatacagaccgtgaaaacagggcttcacaatccttcagaccttttgggctttaagcaggtgtcagaaaagttaccatagggatagactggataaagaaaatgtggcatacatacaccatggaatgctatgcagccataaaaaagaatgagttcatgtcctttgcagggacatggatgaagctagaaaccatcatcttcagcaaactaacacaggaacagaaaaccaaacactgcatattctcactggtaagtgggagttgaacaatggag

SEQ ID NO: 44971 - DNA, 1033 bp, Homo sapiens
acttggttggtcatagggaaagggggataccagtattaactgagtgtctgttatatgccaggcaccatgctaagccttttatagtgttatgccatttaattgggaaactcgtttggtctctgagcctggattaagtgatctgtgaagtcccttgtacttcaagcattctggatgggatttccagttgtcatccttgtattctctccccaatatagcaccgtgttctcaattcatatgtacatgtttgtaaaattccttaaaatatttatgctcaaaccaacatttccattttatctatcttaaatatatcttcctcttctttacgcctaatttcttaaactcccagagtttttttctgtaagatctagtcatctgtagcacttctcacaaattgagctctcttatgccccaaacagtaacgaaagaggtctcttagttggacaataagcagtgaaagatatttcttatgggacaagaaattaacattattagtcaaatgttgatgccggtaggctgagaaatgattctcacttaaaagcccctgggttttaaacctctcttagaaaaacattagttagatgaaaaaaaaaatcaaaatattttcctctggaaaacaatgttcctctgaaaacaagcagattattaaaatatcccttgtactacttcaggaaattgtaatcttataactgtagtggccttttagcttttaaatatatgaacttgagttggacacatgctgatctcattggtactttgcatgataagaaattatgatatttacaatgtgcagtctcagaaagaactgagagttttgctagacatttgccctaaagtttgagtcaatttatggtttaaaggggtgtatttaaggctagaaaagggaaatgaagggttttcttaggattttttccaattctatttaaaattgtttgcaaagttttgaaagcatatgtcatgagtttggcaaaaattatttcaaagcttgttttttttttaacctcattcacctctgctaactcctgaacttcagtgc

SEQ ID NO: 44972 - DNA, 1023 bp, Homo sapiens
tgccttggtgttacatactggccttagcaagataaaaactcactctgccatcaacctttagatcactcttaacggactcagactttgactaatctgttagttccaaaattataccttatttttaatgcatagcacaataagaggttaaaagtttcaaaactgcttatcttgtggaatttttggcatggctagaaagtgtttagattaacgagtaatttatataatcaatggtagatatgaccaccatagagcatacacaaattcatattagtcgaataaatgaatcagtcttatttggatgtgttaaatgtatttccaaaacacagttgagttcagtcattaaactgtttgctttttaaaacatcttgatctgttatgtttcaggctgaagcacttttaatgtcttacggtaatagttaccaagaagattaaacctcttagtacgcatgtaataggaaggacttttaattgatgttttgctggcagactccacaggagctgagtttagtgtacttttccgactgtgcttgtctagtttcctaggattctgaagtagctcatggctgtttccctctgttcccatcactgcttctgtcactgcagtgtccccatctacaacagctgccatttgtcaacccagggaaggtatttctttttggagttagttcatcaattattaaaaggttcactgaaatcatcagaagttatttattggtaaccctgtttaattgtagaggatcaagcagaaattaaagtaccctggaccaacaaggaaatcagtacccgattcttggtatctttgttcctcttttataaaaggaatatatatttgttaagcagatattatgttcaaattgatcatcagtttttgcaagtaggaatgttacgtaaatgagaatcttcaaaggttttggagtaatttataaagtagatacaaattttgcattaaactcccactttcattaaacttttattactaaagcttcagagaaataagatatagataatatttatgagcctttc

SEQ ID NO: 44973 - DNA, 1028 bp, Homo sapiens
cgggattacaaaaagatacatagttaggctttttttttttttgagccggagtctcactgtgtcacccaggctggagtgcggtggtgtgatctcggctcactgcaacctccatctcctgtgttcaagcaattatcctgtcttagcctcccagtagctggaattacaggtgcatgccaccacacccgcctaatttttgtatttttagtagagatggggtttctccatgttggccaggctggtctcgaactcctgacctcaggtgatccacctgccttggcctcccaaagtgctgggactacaggcatgagccaccgtgcctggccagtggtcaggcattttcatcgtcctgtatagtcttgccaaaaacacttcctgtatgtaatcttgccataggcggggtagaacctcagtctgatccaatctctggatgcatctgtagttttcaggaaataccccaaacagaggtacatgccgaattataccaagcatatgtaatcagcacaacctaaacctagggaactctaggtcaaacagcctgagttcttcagtaggtaaattacagtcatgccttggtgtctgtgggggattggttccagacctcccccatatatctaaatctgaggatactcaagtccctgatagaaaatggattagtatttgcatataacaagcgtatcctcctatatgctttttttttttttcttccctttgagatgaggtcttgctctgtcttgcaggctggagtgcagtggcacaatcatggctcactgctgccttgaccacgccacaaccccgctccctggactcaggcaatcctcctacctcggtctccctagaaggtgaaactacaggcgggtgccacctgactagttaagaaaattttttttttagagatggggtctggccctgttacccaggctggtctcaaactcctggggtcaagcaaccctctcgccttggccttccaaagtgctgggattacaggcaggagccactgcactcagactcatatactttaaatcatctct

SEQ ID NO: 44974 - DNA, 1073 bp, Homo sapiens
ttgaaaaaatcactatctttggcaagatggaagtcttgggaagggtgggatccccccagggtcccatgaaagggcatcatgagaggcatatcccagctagacttcagcagcaagcactggccttcttttgataaagtggcaacataaagtgcagtcctcatatttttcctaatcctcaaacagcttcccagtcgtgcttacctatattacgctctttcacagatgaaagagaaaacaccaagaaaaggcacatatattagccatcattcttgtgtgtgtggaaaaaggtgaaaatagaaatgataatgccatgtggtattctgaacaacagtaatccctaaagaattgcttaatcaaaatttgctttccaaaaagtatccttaagactggaatgaaatgtgaaaaaatgaaagttaattggttgagaggatagaattctagttgactttatttttgactttttattagtattataatattgtttatacagtaaatagaacaaattataattggttgaaattatccgttagtagctgaggggtataacttttcccccaaatatctgaatgatacaaagtcatggtcaaagactgtgtggtggtctgttctgttttacgcacatagtgttttatatattgctcttaaatcacttggtgtttggattgatgcacttgtatttgtcctgtgggagatgcccagctagctctgccagctaactcctgctggagtgacagtacagtctctctcaccactagtcttaaatttttatacctggtggtattatgtaatattaacataaatggatagtctgagggactaccatcttaaggactttctgtgtcatagaaaattgtccttgacccttgattaaaatactttaatgcttctgagcctgttcctgttttatggcattgtatataatatagccacatggaggaattcttccttaggcattttgatcacatggaatgctttgagtctccgtaaggttaaaacttgttaaacccacatttgagaatgtgataaagctattccattgcttaaggcataattctcctttctcacaaataacc

SEQ ID NO: 44975 - DNA, 1071 bp, Homo sapiens
cagatttgacagtcttcctttgtggtgacagttaggttttaagtccagcaaaacaacagttttaaactatgattccttgctgccttgtctaggcagttttactaatgacacaggaacccgtcattcgaaagtatgagtgcattccaaatgccaaaaccaagcacacatgacaactctttctaccttatactttttttaaccaggatagtgttgaatactgcatcattggtgtcacaattttatctcagctaaccaatgaaattaatcaagtaagtgctacagccttcctcattgaagtaagtgccatattttttcttagtattggtgttttctgctgtgtgtgggatgatcttttttggcagttgtgtgcttttgcggtaagtgattaatgcccttttgaaacaaaatagttccattgggttttcctctgtaattgcaactcacctcactttttgtcctgttccctttctgtctccaggttgttttccccttttccatcttagcttttttttttttattggtactaattatcattttagagataaaagcgatcgcagcactttgggaggccgaggcaggcggatcacctgaggtcaggagatcaagaccagcctggctaacatgttgaaaccctgtttctactaaaaatacaaaaaattagccgggcgtggtggcatgtgcctgtagtcccagcgacttgggagacaggcaggagaatcgcttgaacccgggaggtggaggttgcagcgagccaagatcgcgctgttgcactccagcttgggcaacaagagcgaaactccatctcaaaaaaagcaaaatactactgccttgcccatgaaggagaatgacttcaaaaaagagaccataaaggtcgaccttttgtgtgccccttctgctcctatatactttaaattttttaaatggtcattgatgccacagaatactacagaggaaacaccagtggctttcttttgtcctggctatattttagtcatttacttttttatccagctaaaaatttgtgattatagaacaggcccttatcaatattagctataacatctcaccctt

SEQ ID NO: 44976 - DNA, 1030 bp, Homo sapiens
acagatagtaacctgggcttcctctttttaccgggcctggctggtgtttgtaacatggcactgtgcccagcttgggtgtttttaactctaaggaaatactacactaaaaataatggccttgtctgatacaggaacattggttacctaacgaatttccctcttagcattgcccttaccaaagcagagaagtagccattctctgtaagaaaagtaagacttcatggtttcaccacagtgttcttaagattaaggaagttcagagtgaggaatgtcttcaagaaactatcactggaggtgacactgggtctgtctcctgctgcaggaaggctgacatggctggtttacattattggagcagtgatcggtggccgggtttcttttgccagcactgatgagcaagacgccatggatggtgagcttgtctgtcggtaagtgctccccacagaagctctccactctgccttgctggcacttctccactccccgatagggtcctctccacttacagaacgtaatctgaacatgctaactgcccatgagacacagctttcaaggcttttgtaagtgccatgataactctgcctatgatctttactttaaaataaaaaaccagcaataattcagaaaggaaataatggatacggaattaggaaaactaaagcagagattctctgttaggtctttttacgaatagtatctcagagttagtaaaatatggactgcttttgccatcccaaaataagtctaaaaggaaactgcagttctttaaagttcaccagagatggaattacagagttcctacagcctttcaaatctcttggccatacatttcaagttatttttcatctgtgcaattctcattttatcaaaactttttttttttttttttttggagatggagtctcgctctgtcacccaggccagagtgcagtggcgctatcttagctcactgcaacctctgcctccctgttccaggttctcccgggttcaagcgattctcctgcctcagcctcccaagtagctatgatta

SEQ ID NO: 44977 - DNA, 1077 bp, Homo sapiens
ggaagctagtgaagcttagtgcggtacagttcatgctgaacaatcacacggtgagtgattttagctttttttcctggccctcctaccacccacacatacactttctcgacacataaaggagatatgtaaactgaggtcccgggtattgctacagcaaagacggtggtcctgattcccacgatactgccagattatacttacgtcatcagagtggctctttgagatccagatgatgtgagttatggtgaagtcacctactgctactcatactgcagataaattagtagtagtgacaacggtagcctgccttcaaaaaaaaaaaaaccttcagatcctcaaggaatgactacataaccattggcttgaaagggctcagtaattctctgattactggcttgcattctgcctctaactcatgtttttacctttaacttcttttctttttttcaatagagcgagcacttttcatttttgggtattaacaatcagtccaacctgacagacatgcggtgtcggactaccttctacacagcacttgggcgtctcctcatggtggatttaggtaccgtaagaaatcgtagtggctcatgaagtcatctggcactcttctaaatttttatttgaggactgaaaactagatgttggggaggccttttctgttttttcaacagtaacaaaactatctgaaataacagcctgatttcaccaagaacagatcatgctgtcgaggtccttataactggaagagagtaacagtctgctcctgaagttttcatctgatacgcagtggctttaaaattctcttcacattcttcgggtgttaaataagggaattgagattcctaaatgtatctttttggccagataacttctccaccccacaatgaggtgtaaacccacttgaaacagtcaacaccactttttattatccagttttctagcacagatgagccagaagggctttatcacttttgtagcagtagtggtgatattagcagtttcaggtcagttaataactaaagctcagtggtattactctaatttcgagctgtttaaatttaatcctactaaaatgac

SEQ ID NO: 44978 - DNA, 1028 bp, Homo sapiens
ccaggtgcctctttaatagttatgtaaaggaaatgagctgatcccatataataccatagaagtgatgaaaggacaaataacagtatgaaatacatcatgctcttcagaagaaaggccctatgtaaactaaaatgtattatgagatgcctttcacaggttaaagaacacaaaatcactttagtatcttctggttagaaagactccaagattagcaagcaagagacaggaacttaaagaactgtagtttgacaagtttttgcttggctagtgctgaaaaactattttaaattctgtacctttctggaatcagaaatctttccttagcttctcatttacagatatccatcctatatgccaattctccaacgggcaattgagctctggtaccatgatccagcctgtactacacctgtactcaagttgatggctgaattggttcataataggtaagcaggaggcagagcttgcaagggcacatctgccctgttatctgagagaatttgctgtatctagtgctttgggcagattgtgggaaataataagattcactactgcattttaaaattcgaaaagtttttgtgtttttgtttgtgtgaaagaatagtattcctaactacacaaaaccatagtcaactgcaggaaataagtcactttttttggtttgtttgtcttgttttttttgaggcggtgtcttgctgtctcccaggctggagtgcagtggcacagtctcggctcactgcaagctccatccccctgggttcacgccattcccctgcctcagcctccggagtagctgggactacaggcacccgccaccacacccggccgattttttgtatttttagtagagacagggtttcaccatgttagccaggatggtctcgatctcctgacctcgtgatccgcgtgcctcggcctcccaaagtgctgggattacaggcgtgagccactgcgcccatctaataagtcacttttaaaaagagtctccagtggggcatggtggctcatgcctgtaatcctagcttctt

SEQ ID NO: 44979 - DNA, 1051 bp, Homo sapiens
gatccattggtaagtgaagttcaaaccaattttaagaacaagaaaggaaatgaatatcttagaagaaaaggtaaccttgaaatagaagactcagatgaagcttcacaaactatttgtctgatttaccctatacagaaaaggccttcagcctaatatactcctgtatttggaatctgtcgttttatcttgggtagcaatacattaggtcactgcctgaaattctccattccattttcagatgctgtccacggtgctgaacatcatcatctttgaagactgtaggaaccagtggtctatgtcccgaccactacttggcttgatattgcttaatgaaaaggtgagagagccagctccctggtgccaacccagaagcagtggcaaccacgcacttggtatcaccaagccctgggagaaatgtgtatagaaacaccccacggtggtgaaacagggaaaatgggtcatttactgagcaagtcccatttgtgctttcagtatcacataatcatttaactgttagaagtcagcatgtgtggtagctcacagacacaggataaaggagtgtttcccctaggcagtaagagaaacctttcaaggaaataatgtacctgggtatcagaggacctaagacctaagttctagttctagctctgctataaacaagtcttgagattctggtaaaagaaaggtctggataagatgacccttttaaagtgctttacaatttaaaaattcttgatattcttagtaggatgaagccatattatcccacaagtgcttgcctgaatttcttttttaagggtccaattttagtagacattccattcctccttagagaagaacattcttcaaccctgcagatgacggagggctaatctgccttcccctgcttctctaaccttctgttccactccttgccccacagtatttttctgacctaagaaacagtattgtgaacagccagccaccggagaagcagcaggccatgcacctgtgttttgagaacctgatggaaggcatcgagcgaaatcttcttacgaaaaacagagacagg

SEQ ID NO: 44980 - DNA, 1031 bp, Homo sapiens
cattattgatcatactaattctgcttctgctggttttttctgctttttaatcatttgatcaggttttcttttatttttgttttaaagacaaggtcttgctctgttgcctaggttggagtgcagtggcctgatcatggctcactgcagcctcaaactcctgggctcaagtgatcctcccactcagcctcctaagtagctgggactacaggcatgagccaccatgcccagctaatgtttattatttttttgtagagctggagtctcactatgttatccaggctggtttctaatttctgacttcaagcactcctcccacctcagcctctcaaagtgctgggattataggtgtgagccaccatgcccatcctcagctttgggtgttttatatctagaaagctgcatttggttctttttcttttcataatgtcttgttcttatgattatgattcctacttttatatttacttggttttaaacatatacatatatatatatatgtacatatttctgtatatacatattttagagacaagatcttgctctgtcgcccagtctggagtgcattgttgcaatcatagctcactgcagccttgaactcctgagttcaagcgatcttccggcctcagcccccccgagtagcctgggctacaggcgtgcaccaacacacccagctttatctgatatttttttagatcagtgttctaagttcttggtcgggctagtctgcagtcacttgatttctttctgttgactctagctggattgtttcttgtatgttttgtaattttatacggtgagctcatctttagtttattttgtttttttccaaaagaattcgatgtggcctgagtttggggagtgttccaacagagtggtttcgtgtttgcttctgccatttacctcaggaatatcataagcttgggattttctgtacatttcttggcttggcagtactcactgagtaaattcagaccccataagtgagaggtacagctatggggtatgggctctcactggagacttcttttatt

SEQ ID NO: 44981 - DNA, 1046 bp, Homo sapiens
ggtgcatgcctgtggtcccagctcctcaggaggctgaggaggttggattgcttgagcccaggaggtcaaggttgcagtgagccatgtttgtgccactgaactccagcctgggtgacagagtgagaccctgtctcaaaaaaaaaaaaaaaaaaaaaagaaagaaaaaaaaaaagagaaaaaagaaacattcaagtgtctaagtcttggctccatcttcctttctccctcctcaggttacttccaacttgggaaagatgatcttgaaagaagagatggaaaagtcattgccgatccgaaggaaaacccgctctctgcctgaccggacacccttccatacctgtgagtgctgtggagggggctcagagtcacctggccagagatggaggcctgactctgtgcatctgttgacttgtgacacatacaggatgcaatccctgacccaaagcacggctgctctcttgggagcaagaatcccagtcatggaacaatgtcagatgataaatgagagaatcggctaaaatagaattcagcaagtttggtttaatttaacaaccatttattgagcgtttaccatgtgctaggcactgggcatataagcagggaaaaaatctagtcttgtcctctggtagcttgctgttggcggggaaactgtcatggaacgtgggatttcgatgcagtgtggccggtattgtgatcaaggtgcgcggggtgctttgggagcacagcaacagggcctgggaggccaaactgaggggttttgttgtggttgtttgttgtttgtttgtttgttttattgagacagggccttgctctgttgcccaggctggaatacagtggtgcactctcagctcactgcaaactccacctctcaggctcaagcaatcctcctacctcagccttctgagtagctgggattaaaggtgtgcgtcaccatgcctggccaatttttaaaattttctgtagtgacaaggtctcacaatgttgcccagactgggctcgaactcctggactcaagcaatcatcccgccttggcctcccaaactgtt

SEQ ID NO: 44982 - DNA, 1030 bp, Homo sapiens
cgaggtgggaggcctctgcgcgcttggccaggccgaggtgggaggcctctgtgcgctgggccaggccgaggtgggagaccctctgagtgctgggccaggctgaggtgggcggtgggcagtgggcagcctggggctccctggattccaggcctttctgcctatgctcttcccagtcctgacactgaaagtggcagttcgggcgagaggagcaaacaggacgggcactgtggctgtctcacttagaacactccaccatcccagcgctcctgttcccagttcactccacaaagatgggcctgccatgtgccaggctctgctctagatgctggggacacagcagggattcatactgacaagagccaggcatggtgatgcgtgcctgtagccccagctacgtgggaggccgaggtgggtggattgcttgagcccaggagatggaggctgcagtgaactgttatcgtgagaccgcactcctgcctaggaggcagagcaagacactgtctcttaaaaaaaggaaagaaaactcgacaagaatcctagtgggagaggcaggaccatcctgtgatgggtcaataatgacccagtcatggagcacagtgatgcaggaaaaggggttgtgagtgccaggaaggctagtttcgaacaacgtggcaagggaagcaggcctgtgagaacgggccctctgagccggaactgagggaggagttgagcctggggctctctgggggtgcagtgttccaggtgggggacacagctctgacaggcgctctgtccctggcctcagtaccccccaggcatgcggcaggcaggggacacggctctgacaggcgctctgtccctggcctcagtaccccccaggcatgcggcaggcaggggacacggctctgacaggcgctctgtccctggcctcagtacccgccaggcatgcggcaggcaggggacacggctctgacaggcgctctgtccctggcctcagtaccccccaggcatgcggcagcaggtgttccagttcttcagcaaggttctggcg

SEQ ID NO: 44983 - DNA, 1427 bp, Homo sapiens
aaagattgtaggtaggaagaaagcatgcggagaacccactgccctgcctaaggacacaaccagccacggggacaaggactgctcccacgatggtgctcctgccaggccccagctggacggggagtcctgtggggcccaggccttgaacagccacatgcctgctgagaccgaggagctggacggtgggaccacagagagcaacctgattacctccctgcttgggctgtgccagagcaaggtgctggcagcagagatggagaggttgggggtgggggaagggtgggttgacggctggggggtgatttgggggctcacatgcatgtccctgaagttgtatcctcatcccctagaagagtcgggtggccttgaaggcccaggagaacctgctgctcctggtgagcatggcctccccagcagctgccacctacctggtacagagcagcgcctgctgccctgcgatcgtccggcacctttgccagttgtaccggtccatgcctgtcttcctggaccccgcagacattgccaccttagagggcatcagctggaggtgggtgcccagcccgggaaggccggccagcatcttcagttgctggcagccctgcctgtctttggtggccagctcccctggggttccacgttgctagggacccctgctggccaccctctccccaaggctgcagctgatccccaggggacttcttgccctccagggaagtactggttttgctgcctctgtccataaaacccccaagataactgatccccagccacagaggttccacaggagaggggaagggcccagtttcaggacacattgaggaagaccttgaagctccttctccactctctgagacttcactcccctcttccttcaggttacccagtgccccgtctgatgaggcttccttccctggcaaggaggccttggctgccttcttgggctggtttgattactgcgaccacctcatcacagaggcacacacggtgagcaggggcgggcggaggccgggctctcatgctgttccctgtaccatctccatctcgaggaccaagtggagcagggacatggaaacatggggtccaggagctaagcggggccccaggcgggccgggaccctctcctgtggcatcaggcgccgcgcaagaacacggttatttctcagctggaattgtaatgagggcaaaacacattggcgctctctggcacccaggtggttgcggacgccttggcgaaggctgtggctgagaacttcttcgtggagaccctgcagccccagctcctgcacgtgtaagtgtctagttccctcaggcatgactgtggtctacagtaaaccacctaccccacccagcctcgtcctgtccctaaggccagacaccttcttgaccagaatcccatttgtggaccccattgggtgatgtttgccagg

SEQ ID NO: 44984 - DNA, 1099 bp, Homo sapiens
gtctccccagccccggaagggcaggtctgagccagcaccagggcggtgggagactcctgtccacacctctgccccagagctgcctcctgcctggcactgccgccacactcccctcctgggatggggcttctgctcccgggctcactcaaggagactgcggcatgttgaccacaccagactgggtttcagggaatgggcatgccaggtgccaaggagccaaacagatggctttccaggcagcaaggtccttggggccttcttggaggagcttgggtgacagccaggtgagcacccagaccccagaccctcatgtgctgtgtgcctggccccttctgtactggccatttgtggccagggccaagcctgtgactcaactccaggggcaagatggggagtgagctgatggctccgagactggtcaggagcccaggccagtgagatggggcctggagccttgtctgtgtcacattaggtaccatgggagctgctgagacctgacattttgtcccctgcctacatggcttggcccatggagaaggagcagtgaatgggatcgtcggggaagcccctcttcctgctctgctcccctggaaactgttgcaaaactcccagccgcctcatggcaaatgcccaaagcatgttccgcacccaggcgggggcccctgctaatgagaaccttggtgcagctgcagccaggaggggagcgggcccaggagccaggctcaggtccagctggttcctctctggcgccttctgaacccgtctcagcaggtccacagcacctgggcagaggtcagagaccaggggaggccgggccttgccctcccttctgcccagggcccagtgttcttgatagaagacccttctggggagccagggagctcaggggacagataagggaaggacgccccctgactccaggcccctgagcctggcgggaagtggctgcggcccaggcagccagtcctggtggtgttctccctgcatgccctccgtggctgggctgccaccccacccggcccgaatctgtcttgacctgcaggaatacacgggcggcgccaggcattacctcacagcgggactacacagttgctggctt

SEQ ID NO: 44985 - DNA, 1032 bp, Homo sapiens
cctctgagagggggcccggcagaaacactctgcaaatatcgaggagagactgctcccagctcacgaagcacaggaggcccagcagggagggccccaaagggggcggggggacatgtagcaagtgggaggaaggacatggagttagggaggcgtgtggagcaagggaaggcttagggctggcttggcgagtacaggaggatccagtgagggggcgtagctaagtcaaggctaaaggatgtgcagaacagagagcttcccgagggcaggagtagtcaagagaggcttcctggaggaggcgggcctggagctgggcttccctgcaggtgtgcaagtacgacttcgtggaggtgcgcagtggactcacagctgactccaagctgcatggcaagttctgtggttctgagaagcccgaggtcatcacctcccagtacaacaacatgcgcgtggagttcaagtccgacaacaccgtgtccaaaaagggcttcaaggcccacttcttctcaggtatccctggactgcccagctcctagccccacctctcctcggagaacagggctccctttctccctgcccctgcacccctgtactccccagccctccctggtgccaggcaggcagagtctgccccctgctccccaccacttcactctcccatcaagccagcccttccagtatccaaatctcattattcctgagccctcaggactgtaatgactggggcctgaggatgggcagaacataagcattcagaaatcagcacccagaagtgaagaaggggatattccaggtgtcaggagctatgcaagccaaggcctgggagagggcaggtcctaggaacaggcagttcaagaacgtgggtggatggaggagagacaggtgtttgccttggactgtgtggagcagagtctctggcagtggcggacttctaatcagaccctgcacacgccaaataggttcacactggggccttcagaaagatgagtcgtggccgggcgcggtggctcacgcctgtaatcccagcactcaggaagg

SEQ ID NO: 44986 - DNA, 1072 bp, Homo sapiens
gacaggagaggtgagggaactcagggacagagaggaaagcccccagaggtccccctgagcgtacgcgggccaccgcagcagcccagccacacaccaaccctgaaatatactctattcattctctgatatttatttttttatttttatttttatttattttttattttttgagatggagtcttgctctgtcgcccaggctggagtgcagtggttcgatcttggttcactgcaacctccacttcctgggttcaagcgattcccctgcctcagcctcccgtgtagctgggattacaggagcctgccaccatgcccagctaatttttgtatttttagtagagacagggtttcgccatgttggccaggccagtctcaaactcctgacctcaggtgatccgcccgccttggcctcccaaagtgctgagattacaggcgtgagccaccgtgcccagcccattctcctgatacttattgacatgtaacatggatgaggcggcatcctaaatgcaggtcccagaaacagaccaagcaaagatcccagcccttgaggggcttgctcggctttcacttgcttgtttatttagcagccatgaactgagctccgctctgcgagaggactaaggggcacgtggcctgaatcaggcatgagcccttcactcctgccccccaccccatactaggaactcgcagtccaggagagagacaaggcaggcaccgcccgtgacagcatgagcccaagcgggagccaggcaggaagaaaggcaccccggcctaactgggcatgtgttggtagaggcattcgaggcagggggaggtgcccaggcagagacacaaccccagcccagcccagagtgtgcccaggtgacagcaggtcatttactttggccgaagcaatgggtgtgtgaggacagcaggttgtgggaatgatgtggctgcagagaaaggctggagtccagggggatgccttgagtgccagaccaaggatgccacgagggagctttgcagtctcctcctgggtcctaagccacctgtcagggcatccccagagctgatggtccacagcctcccctcttcc

SEQ ID NO: 44987 - DNA, 1033 bp, Homo sapiens
gtctgtgatcctgttccctttaccaggtcattgtactgtgttgtccctggaggaacagcttctcctcttgtcttgacagtagggctggggttttccctggttcagctggggagacgtttgcaggttagaaaaaggtctcatgcggcagcgtgtgtggctgttagacgctgatggcacaacttccctttgctggcgtcgtggcacctggcctctgggacagtatgaaccataggggctcaggaagaaccgcttcccctccacccccatccctgattcctagtggccccttagattttgggtacatcttccttcaggctcaccttccttcttttcaaagttcctcaagcctgttactcatttgtcaaggctgggcttctcctacaaagccctcaacctgcccagccagcagctgtgaggctgactgaatatttggtgaccatatcaccctttctggtgctgaagctcatgtcagctccattggacagtgttattctgggctcttctcactgtagaggactggagcagaaagggttccttggaaacctgtgctgggaagccctgtttggtctaaggctaagctttggttaactctgggctccagccctttcttcctttaaatagctgatgcacggccagcaggtctccattctcatcctctctttctattctgtttctttggttcagaaatactcttctgctttttttggacgaactcaatggcccgatgttagatattgggtatttttcaatcttctgttttctgacccttccaagaaagtttgaggaagaacatgtactgctttcacgttcatttcgcccattcagatgtcttggcttgaaccttatgactccgtatcaaagtcctcacaacctgtctcagatccctgatgcacaaattaggtcttattaataagtgtgggaaaagagaggagagtccaccttcttggtcaggcccctgaggcatgcatttctaccaaggaatatggacagatgacagaggagaagagcccaaagccaaatttatacatgagtg

SEQ ID NO: 44988 - DNA, 1652 bp, Homo sapiens
accacctatatattatattataccctaaacttctaccttagaaatttctcaaagactcaagatgacacaggtacgtgtcacatttcatgtagcttctgaaaagtgagagtgaaaagcttttaatttttgtatattagaataaaaatagtcttttacttcagggaccccaggtgtcatataagacagtaatttcagaattactgttcgagatcacttagcttaaatttctcagaagtcagacatttttctttgcatttattcttcagggttttttgtttttgttttctcgtttttttttttttttccaaggcagagtgtctctctgtcacccaggcgggagtgcagtagcgcaatctcaccgcaacctatacctcccaggttcaagtgattcttctgcctcagcctctcaagtagctgggatgcagacacgcgccaccacgcccagctaattttttgtatttttagtggacatggggtttcgccatggtggccaggctggtctcgaactcgagctcaagtgatccaccggtcttggcctcccgaagtgctgggactgaagtgctgggactaaaggcgtgagccaccgtgcccagccctcagttgttatttaaataaatcataatcatttaaataaatagaacctgcataaagaggtttgggaataggcacagctgttggcatgggaaccctcaatggtgacagcaggtggtggggttggggggaggttggccacctggcgaggggcctgttggctgcagggagggactggagacctggggtccttgagcagtccagtggcgctcagctaagagagctgctgagtaccatctccattcccgagatgcttgtgaaatgtgtgaggagctatgcatgtgtggaaagtcagatgcaggatggccttcctgaagctgcagtaagtggaacagaggaggggtactgggtgaggccagaggagggagtggcaggaggtgacagagaaggcttcttggggagggactgagccacatcttgaaagctaggaagcgggagagagagcagggtcctggtaaggagagccgtgtgaatgctggtgggatggtacacgtggcccagagtggctgagagggagcagcaagtgaggtagctggaaatgtacgttgggtctaggagtcttgaatggctcgggtgtctaaggtacgagtgttctcttggaactcagagctgtttccatatcagagacttgccagcagccctctgtcttggggtgcagcctgccagcctgctctttttttttttttttttttttttgagacagggtctcactctgttgcccaggctagagtgcagtgggtatgatctcagctcactgaaacctcccctcctgagctcaagcgattctcccatcacagcctcccaggtagctgggactccaggtgcacaccaccacacctagctaatttttgtgtttttagtagagatggggttccaccatgttggccagcctggtctcgaactcctgacctcaagtgatccacccgccttggcctcccagagtgctgggattacaggcgtgagccaccgcgcctggccagcctgctcttatctggagcaactccatggccccacgtccatgtcctctgtaccagtccacttcctccagcctcctgccacct

SEQ ID NO: 44989 - DNA, 1230 bp, Homo sapiens
cccaagtagctgggattacaggcatgagccaccacacctaattttttttttttttttttttgtattttcagtagagacagggtttcaccatgttgtccaggctagtcttgaactcctgagctcaagtgatccacccacctcagcctcccaaagtgttgggattataggcgtgagccactgcactcggccatgttggagtatttttttactggtgacatttatctagattggctggtgtctgcttgatttccacactgaaaaaaggtgggttttctgttgttgttgttttacaaaaactgaatggggccaggcacggtggctcacacctataatcctagcattttgggaggccgaggcaggcaaaggccgacgtcgggagttcaagaccagcctagccaacatggtgaaaccccatctccactaaaaatacaaaaattagccaggcatggtgacatgcacctgtaattgcagctactcgggaggctgagacaggagaatcgcttgaacctgggaggtggaggctgcagtgagctgagatggagccactgcactccagcctgggcaacagagtgagacaatgtctggggaaaaaaaaaatactgaatggataaactgaagaagttatctttctttccctttgtagtttcaggagatactttgagactatgcaaatcctgtttctccttgtactttcatcccctaattttagcacccatctgtagaccctgcttgcaacaatgatgactgtgatgtttgactaatgattctctatttccctcttgtacatttatttattggaattctttgtaagcaagagctggccctgcttccccatttatttatgcatttggttattcataatcagattttgttctgtgggttaaagttgaataatattttttgaggctcaaattgttctagctttgaccattttgggagctccttccggttgtctcctgtgttcttctggtaagcccctgccatttttttttttaagtgtttccttaatttcctttactacaaaatattccaggctcatcttgtaacttcgctgccccagccctagagtcaggcacttctccacggagtcctgctttcctttattggagaatgctgtttagaaaccaaggtctggttgctaggtatgttcattgctacagcagttatcattgcttctgggtcctctcagcagacaaagctaggaaacagataattcagcacctatctgta

SEQ ID NO: 44990 - DNA, 1079 bp, Homo sapiens
gggtttcgccatattgaccaggttggtcttgaactcctgacctcaagtgagccactgcacccagccaggaaaatcttgtgttttatcttagaacacatcttccatttcattcttgggttcccctctccgggaatacgagttatccttttgttagtctctttgtcttctcactgtttttggtttaagttttcttgtccatctgcattcactgtgattatctcaaactttccttgagccatttatgcctagtgttccattttttgaacaccaagcatataggagttaatttatatcctgctcaaggtcatcgccaaagtctgattgcaaaaattcaaaaacttgcaacctcaggcttaaatgggttaaatgactggcagaattttgttctgtatttgtcataatgtattggttcttcagtgaggttttattcctcttttttagtaagcctgcatcctcttttggtctcacgttggttataatctcatctttgagctctcgtctcgtggaactgatgttttaatgaggttattcctccgtgtggagcagtggtgaggaacagctttctctggagttgtggtttacctgtctgtggcttgctttgcctgccgtttcttttcctcttcctcatgtgagtgcagttctgctcacatgttctgttggctctaaaataagaaaggaactttcctctccaggtttgtccccacctctcagctccaggagtgctaaggactgggtatttatgacctgttttctgtagcctgaaggaatgctagctgtgtggtgaggtgggtctgtcctctattcagggatttagtccctgcagtgtggctctgctcacttccttgggagttgtattccttttccgttagaagagaaggcacacttggccaggcacagtggtttccgcctgtaatcccagcactttgggagaccgagacaggtgtgtcacctgaggtcaggagtttgagaccagcttagccaacatggtgaaaccctgtctctactaaaaatacaaaaattagctgagtgtggtggtgcatgcatgtaattccagctactcaggaggccgaggcaggaga

SEQ ID NO: 44991 - DNA, 1044 bp, Homo sapiens
tctggaccaagtgaagggtgacggtaggtggaattccaattatgggcctctggatggtaaggcaacttctgcgcttccatagagggttccagaacaggtgtcttgctttttcctatgtctccctcccacctccccaagggttgggtctggcgccttagacacagaaggagggcactaaaataattttacttatttgaccctgaggcaagtgcaccctcaggcagagagactccagcccctctccagcaggaagagctggcctgggggcgctcccaagccacagcacacttcgttttgtctccttcccacttgtctttctgcccctgaaaggtgtccatccttacttgagggcagctggcctgacaccctggggggactggagtggctctccaggggccacacatggaatggaacctggcgtggggcttcctcctgcagctggggccatgcgcgcggacccctgcccggcctccccgtcccagcggcgtcaacagctgtgtgtgtttccctcttctttctttcctctctaataccttttacaaaccttttccccgctaagaataacttgtagttaaaaagaagacaagactccactggagcagaaaactcccctttcatgcctgccaaaaggccggggtcacttggacttaagtgtcactcgcagctcctagatcctccccaacccttgcgggtgagtgcatgtctcaagcgctggccaggcaggggggctgtgctcgctgaatctgcacaccccatggagacaggtctagacctgagcctggatgctgtcttgtgggcgtcagtgcccagtgcagcacacgtcctggaggaaagagcagctgtgctgcaggggagaaaaggtcacctgggagaagcgaaggtggtcctgtgggctcattcttctgatggtacaacttgaaggtgcctcttgcctagcactccaggctgtcatagcagccacctgaggggccgaggggccgctgggtctgggaaaagtaaatgcttcgtagatgctcacctctaggtgagtgccagccaggcaaa

SEQ ID NO: 44992 - DNA, 1885 bp, Homo sapiens
ctctcagtaatcacaagcagcatccgttttgttttctcttcttgggagacatctgtcaaaccaggaatattcttgaaaagaacgtgagcaggaaaaactgctggtgatactttttttaagttttgtttttatcttgcctgttggcttcaatacatttgagaatacgctgaagagggaaaatttcagtgatggagattctagattaaatatcaggactgatttcctggtgggattatggtccagttttaccaaagaaccaattccttgaatgttggaatctaactttttatattgtcattattattgttgtttttaaacggttctttgtcttttctgttttatttttctcaagctgctttcaggagctagcagaaaataactcaaagttgaagactctggaagattttgctttaacctaactcgcattgatgtattaaatttataattttagcattcccaatagatcctatcattccttaaacataataccctttgtcttggagtagaatactaagttagagttagtggatttctagtttaggagaggagctcaaaactataatctttaacaaattgaaaaatgaaatagggtgttttccctttttgtgcacacctatattaccttaagaaatttccttccatagacagctgcctcaaagggaaatcctctttaaaccgtagttggcgcagaggtcagtcctagtcggagcttaggaggggcggagacgctcacatcgtctgacttgagtcgccactgattgtggcaacagctttgcctcatgagtcaaaaattggcaatttcttttgatttttagttgttgaatttgctgtttcaagcatttgtacatattagaagtctaaggagtagcaagtcagtgggaggactttttcacccctggcattagcagcttcgacctcattttccagatgcaccagctcctattaataagttagcaaggaaagtgtatgtcacgtgcaggaacagtgaggcagggacaggggttctgctccttctcacttcaccaccggcacacagcttgcccctgtctttgcccccaaaggtattttgtgtctagtgtcaaattggagctattcttcactggtccttaaccttgggttttaaaaagaaggcttctctgtttgggtagcgtaagagctgagtatagtaagtcctcttccaaagagatggcaatatgctgggcatctactttaaaacaaagttgtctgatttttgcaagagaggttaggattttattgttcttatttccctttacagttctgcagttccatcacagtatttttttaaataactcaggtgtatgagaagaaattagaaaagaaaattaacttatgtggactgtaaatgttttatttgtaagattctataaataaagctatattctgtaattgttgagaatcccacgggtgatcatttgcaataaatgtggatgtaatgaaggctgttgaacacaaggtggcgatggtgtctcactgacgtacaaagttttgttttaccaggtctggtttaacatttgactgggattttagaaggttttttttgttgttgttattgagacagagttttgctcttgtcgcccaggctggagtgcagtggtgcgatctcggctcactgcaacctccacctcctgggttcaagcgattctcctgcctcagcctcccgagtagctgggattacaggtgcccgccaccacgcctggctaaattttgtatttttagtagagatggggtttcgccatgttgtccaggctggtctcgaactcctgacctcaggtgatctgcccgccttggcctcccaaagtcttgggattacaggcttgagtcattgtgccaggccaagaaggaaacttttgtactctcttctctt

SEQ ID NO: 44993 - DNA, 1076 bp, Homo sapiens
cggagggaggctggggccgggctgcgcccaccctaggagggctcggaggggtgtagacagagccgggcggcagcctccgagagcagccacccggacccggcgttttctgctgcacctggtcaggtgcctggccgtcagtgccaagttccctcccgaagggttcagggtgcagtggggacttcttctcccaccgccccgaagggcccggatccctgtctttttttctctttaagaaacgactcgggggaagccatcgggggtggtgtgagcagggagtcgactcttccaagtaagatatttaagattagatctttcttgacgtccgccccccacccttttttaggacgtataccatgtgccttttgacccgctttctctagatcattgcaagtcactgctattactggaataaacttagtatgaacaagtcagataaatccattatatgatgtttaaaataagtttacggagctcttgacagggtaatggtattttattttccctttggttataaagacttggagaatgacgttttctgattcatatgtgtacctgcgttagatttctgttgttgttataagaacaaaatgtaaagggctctttgctctctaaatcttgtagagttttaggttatagttgtttctccctttaaactaagaagatggattacacataaccactaatttatgtgctgcttttattcagccgtaagtcttaggcacaacccttctctctgagattaacaatcggtttgaaagcgctattttgtaagaagggaatagacttagaccagctgtgttagtggcctctggatgcaggggttagcgtgacagtggggaaaattattaagatacttttcttctttttcattttggtattagaaggagaaaggcaactaatactagtgacgggaatacatttttaaaaggtgaaacgccttattgcatgttcagggagggggaagaattttagtgtataacttaggtttcccccctctctccccaaatcagcctcataaatgttaattatctgtactacataattataatgggatttttgagatttatctgcttagc

SEQ ID NO: 44994 - DNA, 1050 bp, Homo sapiens
caccataacatgccataagatcaaaagaagattaaaaatcttaaatgacccttaaatatagtaataaatattgtaaaataaaatgtaataaaataaaaaagttaaaatgcaggggctaggggcaggcatggtggctcacgcctgtaaccccagcactttggaaggcccatataggcagatcactgaggtcaggagttcgaaaccagcctggccaacatggcgaaactccatctctactaaacatacaaaaattagctgggcatggtggcgggcactgtaatcccagctacttgggagtctgaggcacgagaattgcttgaacccgggaggcggaggttgcagtgagccaaaatggtgccactgcattccagtctgggcaacagagtgaaactctctctaaaaaaaaaaaaaaaaaaaaagcaggggctggtttattgctacgcatgcttattattaaataaacactgtcatcatatcctgcaggatgcaaatttgttctttaccaaaattaattaccgaatattgtgtacttttaagactgctcttaaataaatgaaatagaaataatttcaggtccttagaatgtatggatttctctcctatataaaaacttcggcataagagcttgaccacagcatttgtggcttcatgatgacttatggtgcttttttcagggttttccagagtttgaaatagttgaagaaaatgaggtgtcacgtgtgcatagctaaggtccattgtaacgggtactaaaccctggtctgatgctatcttgtttagtcacagctgtctgcatttattcacagcttgaaagctttttcagaggtgataccacaccccagctatttttgtttctgtcatttcctgttaactttaaagtgtacctaattgttctatttgagcaaattttggagaagagtgggtatgtgggagaggtttgtattttaggtgtcctttaaatagcagctttcttaaattgaaggatgtggctgggcgtggtggctcacacctgtaatgccagctacttgggaggctgaggcaggagaatcg

SEQ ID NO: 44995 - DNA, 1107 bp, Homo sapiens
acaccggcagtaccacaaatgtgagtagtagtgccttatgccgtgatgttaagacaggtgaaaacatcactaggtgatagaaacttttcagctccattataatcttacaggatctctgtcatatatatatagtcttgtagactgaaatattgctatgtggcacatgactgttttctaactttagtcttagatattgaaaggatttaaggctgggcgcggtggctcacgcctgtaatcccagcactttgggaggccgaggcgggtggatcatgagttcaggagatcgagaccacggtgaaaccccatctctactaaaaatacaaaaaattagccgggcgcggtggtggacacctgtagtcccagctactcgggaggctaaggcaggagaatggcatgaacccgggaggcagagcttgcagtgagccgagattgcgccactgcactccagcctgggcgacagagtgagactccatctcaaaaaaaaaaaaaaaaaaagaaagaaaggacttaaacctaaaatgcttaagaagaaaaatgatgaaattttccttttctatagtatagatagaattttggaagtgatgtattcataaatatttgatgagttcctattacatggagcacatttctggttatgcttagaagggttaaatactacttgaaaagtactcatgcggtgtagcatataatagcctctcaaaaatgtcacagaaatttagaactatatagtgacctatgactaatcccactgcaaaaggagcaggtgactaaattgtagacaatacctggtgtgaaatgtttgttcccttgatctataaattgataatcctttaatgtttaatctgactgtgactagtggcctgaagaggtaagacttttgtgtttttttatgtgtgtgcctacgtatgtttttttcttgtgacctaaggctttgtggaagtttaaaatagagtgattttaatgaatggctggagtaataaagatagttggtgggcttctccatggaagcaagttggttatttttaactactttgcactgctttatggaaaacatatgccactatagaagttattgtttctgttgactgtgactggtggtggttatta

SEQ ID NO: 44996 - DNA, 1076 bp, Homo sapiens
acatttgttttcagagactcaaagtttattaatctgccacagatccctttactgataggtagattgctatttatagtgtttcatatgctcatatgaattcttgctaccagtatcttcttacattggagatagtagttgtaatgaaaacatccctcctagtagagcctcaaagaaaaggtctttgttattaaaagaaattttagaggataatcacttcttaaaaagtccctctgtcaaaagtcagctgcaagagggcaagatacaaatccttccagcccttggtgacttactggaataaacactttaaatcagcagctaattaccaggaagttttaaatctactgttggtggatgtttaaattggtgtaagttgagcatggtggctcatgcctgtaatcccagtacttttggaggctcaggtgagtggatcacttgagcccaagagttcaagaccagcctggtcaacatgttgaaatcccatctctacaaaataaaacacaaaaaattagctgtgcatagaggcacttacctatagtcccagctactcaggaggctgattgaggtgggaggatcacctgagctcaggagtttgtggctatagtgagttgtgatcaccactacactccagcctgggagacatagtgagaccctgtctcaacaacaacaacaacaacaacaaagatgtgaggtatttgaagagcaattttgtaatatatttataaattttaagtgcatgtccccttgatctagcaatttcatttgtaggaatttattatgcagattgtgttactttttaaatgctgcataaaaaattatcacaaatttagtggctaaaaagaacacatttattatctcatagttattgtaggtcagaagtccaggccacagtgtggctagattctctgtataggatctcactgaaatcaaggtgttgccagggtttcagttctcatctggggcttagggtctttatccaaggtcacttgttggcagtccttgtaactgtaggattaaggtccctgttgtcctgttagttgttgaccagggatgactcttagcttccagatactgcttgc

SEQ ID NO: 44997 - DNA, 1049 bp, Homo sapiens
agacctccccccgtcgcactggcttctccttccccacccaggagcctagaccccagacccaggtgaggtagcctgcctccaccagagagtcgacctcctcctcacccctcatcccccacccccgtgacttgtccacacttgggactccttcccagacagccctgggacataggagtggggtgacagggcagaagctagtatggcagccccaccctggcctgggggacctcaacctaccgagctctagccgagggagctctagatggaatcccaaagccggcccaggctcctgaccctgggtgttcttggttcatccatgctggcgtccagaaacccaggcactgaccttacttgggcctcagttttctggcccctgtgaaatgaaatagtcacagcaggtgtccctgtgccctgggggtttggaggctaagatgaagccgtttgtaaggcgtgctggcaggtggactgggaacgcccattttgggcctcctccctcaggcttacatgtacccatcgtcttcctccctctgacatccctttcttcctgtcaactcccagaatcttggcacccctggtccagctctgtcccactctcgaggtcccagccatcccctggacctggggacctcctctcctaacacctctcagatacactggaccccgtgagtaccatctgagggctcttgatcagacgtggggggggtcactggcaggcaatgccccatattccaccctcccccaagtccccacctgtggatttgggaaacttctaccaggtagcccttgtcctcgaagagcttatggtgatttggggcagggaggaggcgctggtctgtgatgttcccaatccctcctggcagctatgtggccttgtggccttggtctcctcattgggtttctagccctgaggtcggtgcatgtataattgaagtgtggaactggtggaatggacaggaaggcaccaggtgctcagaggaggcgagggttcagtgcttagggcccagagggcaggaggcaggcctgggaaagactacggtgagcacaggctg

SEQ ID NO: 44998 - DNA, 1054 bp, Homo sapiens
attgctcagattctttggtggttgagtgtgggaagtgtagctttgcccatctaagcttctgccgctagggggcaggaaggaggagagcaaatccaattccctctctgggctcccctacagaactcccctacagttctgggcactgccggcagggggcaggccctcacccctgcatccctgttaaagaagggagtggggaaagctcttcctgcctttcctctttcaggtgtctcccggaggacccagaaattcggaacgttccctggaaattacgttgccccggtgtgagtggtctccatggcaacttggagccagccaggatggggtggggagcggtggcactcgtgggagggagaggacccccgcccacatcctccttccccaggacctgagctcccagcatctgcagacgacccccgcagcctttccctcggacccccctcgaagccccctggactgattcccacccacgactcacaggcattcctcccacagccctttcatttcctccccaccccactccccaaatacagaggtctgctttgaagcggagaccatttccaggccttattgagaccagaccccaagtcccccacccccatcctgctccagcgtttcctctaacagggaccagctctccgctttgcccccacggggttcctctaaccagaaccagcttcctagcctcgtagagaccaaaggccgcccccgcctgctggggttcctcccagcaccccagcttgctggctgccctctttgccttctggcctccagctgggtgtgggggggcggagcaaggcgggggacagacgcagcaccttcttagcgatctaggcctggcaagagctctggccccaaggcctcctcttcccaggggctgccaagtcctggccctggccctggcatatcaccccgcactgtggggccaggcaccactagcctggctcaaatattccccagggagactgctgtgtgctgcccgcctgcctgctggctctcccccagccccacatcccctctggaagagaatgtaaaataaacctggacacaaggg

SEQ ID NO: 44999 - DNA, 1075 bp, Homo sapiens
ggtgtctttgtccccccggtgtcgctgccctggcccgcaggtgggttggggggccccctgccgcccctctgccccttcgcccctccgcccctccgctggccgaggggctgcgagggccgggcggcgaagatgcgtggggcgcggaaggggccgagcccctctttggactgcaagtcccgtctccctggcaacggcctcggccttgggggcgggcgggaggaggagaaaccgcgcgcctcagtcctcccttggtggcctcgccgcggctctgctgggagacccggcgctggcggctgctgaggccggagcggagggcccgggagcgtgggagcaggagggtggcgcgcagccggtttcgcgtttggtcggccagggagctgccttcccaccagccggtcgaggaaacaacgggtcgggcttccggggagagggcccacacagtctcctcgccggcaccggcctcctccatttttccgggccttgcgtggagggttttggcggatgtttttgaacgaaggaatgtcatcggggctctctcgagcccctcaccccgccagctactctgggggtggcgtggcatagtgagaggagcgctaagttgttgggaggcctgggtgtgagtagcagttttgtcactacctggttatgtggccccgggcaagtctcttgatctctctgagcatcagtttccttgtctgtaaaacagcatgacagtatcatgcaccactaggttattgtcagggcaaactggaacaatgtaatttcttgtttcatttctttcttctctatattctctccatccattgctttcattcattcttattacccacctccctgttttccgaaatatccttacttaagattctccacttttccgggtatagatggaaatttcccttataagctgttaatttctttctttttggattgaagccttttccccacgactctgaaagaggacagcgttcccaatgtcccagtttaagcgccagcggatcaacccgcttccagggggacgcaacttctcaggtgatcactgttctccctacctggcctcatcctgggaagtatgtgc

SEQ ID NO: 45000 - DNA, 1024 bp, Homo sapiens
ctgaggcagcatcatcatcctcagttttgtgtggccttgcctctggcgcaggctctctagaactgcagggcctctgcgtgccctgcaccagagcttcagctctgaaggcagctggaggtgtctatgcagaccctctcccctggggatttcagtacagacgttcttcccttctgtccccagttccactgtgcgtaccagctggccgactggtgtctccaccacatctgcaccaactacaacaacgtgtgccgcaagttcccccgagacatgaaggccatgtccccaggtgagcatcggggccagtcctggcagtacctgctgccctccccttaggggtgcacagctcccatgtaatcccagggaccccgaggctgccagtaatccttgaccttggggctgggagcagcctgcaaaggagcctccagccaagccaaggggccccaggaaaagtgctggcctggagggcaactcaccctgcctctctgggcttctcattctcagaggtatgaagaggatactggactaaagttggtagatttcagacttttctggacagaataccgtaagaaatacatttcatcttgtgacccaggacacatataggaaaatatatacatctttctaatgctgctcatggcccactaaattgatggtacaacccaggaatgggtacaggccacagcttggaccacccaggtctgggcatcctctgaggcctcctgtctcttcttgattaatttcttaggccctagaactcaacagaaactgcacaggctccagggagaggtgtccctggcctccctgaagggtctgccactctttccatggggtcctctctgggctccctccagtctgccgtgaccctcctccctgctgccgtgtttttgcctcatgctgccaagtctccaccccgatctctccttttcactactacaacacttttaaaaaaaaattatttatttatttatttttttgagacagtcttgctctgttgcccaggctggagtacagtggcacaatctcg

SEQ ID NO: 45001 - DNA, 1049 bp, Homo sapiens
gatccagggagtcagaccagaggtggggacatcttttcaaaggcaagaagatgctgccagtgcgtgtatatacatatgagggtggaaggggtaaacccagggtgtgtctttaactgaagaatcaagaaagctgctttccttagtcacccgcctctgtggttcgtttgctaaacgttggcttgcgttagcctgattcacagtaatgtggctcccaaggaagattcacatggtatttgtgaaaatgtagcttcatcccctgcccttcattgaatgactgaattacagtcagcaccacataacgatgtttcggtcaactatggactccatatgtgatgagacagtgatcccatagattatagtggagctgaaaaattcctattacctaggggcatcacaacgcattgcatttcgcccgtgtttgggatgatgctggtgtaaacctactatgctgccagtcatgtaaaagtatagcacacacaattagtaggtaatgcttgcaaataataatgaaagactctgctactggtttatgtatttactatgctatactttttgtcattactttagagtgtactcctacttttttttttttttttttgagatggagtttcactcttgtcctgtaggctggagcgaagtggcgcgatctcggcttactgcaacctccacctcctgggttcaagcgattctcctgcctcagcttcccagagtagctgagattacaggcatgcaccgccacgcacggctaattttgtatttttggtagagacagggtttcaccatgttggccaggctggtcaccaactcctgacctcaggtgacccgccctcctcagcctcccagagtgttgggattacaggtgtgagccaccgcccctggccttttttttttttttttttttaagttaattgtaaaagagcctcaggcaggtccttcaggagggattccagaagaaggcattgcgatcacaggaggtgccagctgcattgggacaagatgtggaggtggaagacagtgatattgatgatcctgaccctctgtaagcctag

SEQ ID NO: 45002 - DNA, 1031 bp, Homo sapiens
gtgtggggagaagggttatctgtgaaaggagttagaaacctcaagtgtacataagtaagactggagatctctctgttaatgaaattgtgcttaaaaatttttttttcttgaaccttggcttctcaggcaataactgaattttaaggtgtgtgtgtatatatatatataggtatatatatatataggtgtatatatatatatatatatatagtgtatatatatatatatatatatatatagtgtatatatatatagtgtatgtgtgtgtgtgtgtgtgtatatatatatatatttgggccaggaagggtgaagtgttaaattgccttacttagaaaattaaggtagatttgtatttagcccttagagcttcaaaaatatcagctcagaaatgacttttaattgtgcaggtgataaaatcacaagaaaaaaattcatctacaagttggaatgactcttagctacttatttgtttttaaatttttttttcaaattttggaaggaagtagagaaggagttagaactgtaatttgctattatgggggttggggtgcagtgcgtattagtacaatgttaggtggtggcaggttccgtttatccttggaattagcactgctccccccacaggcttctgggagttgggagcaggctggttggtgacgctttgcctggccttggataagaactcttgttttcaaattcccttgaggtctcttccaagaatcttttgcattttttctgataaatcaatcataaggaagtttctgaaattctctttcagaccctacaacccacaagttactgcaaagctgggcttctaccagaagtgagtgatttgaaattgaaaacagatttcggatctcacctgagtagctcgagtgtaagggagggactgggagagccacagagaacatttgtcaatccagaaccaaccattcatggtgttgcttgactggagggcagggaaggaaaggactagaagcaaggcgaaagcagatctttctgtagatacacacatataagtcttggatttg

SEQ ID NO: 45003 - DNA, 1066 bp, Homo sapiens
ctgtactccagcctgggccacagagccagactccatctcaaaaggaaaaaaaaaaaaaaaaaagggaaatgctaattctggccggcatggtggtttaaaactgtaatcccagcactttgggaggccaaggcaggcagatctcttgaacccaggagttcaagaccagcgtgggcagcataatgagaccccgtctctatgaaaaatacaaaaattagccaggtgtggtggtgcatgcctgtagtcccagctgttcggaaggctgaggtggaagaattgcttgagtttgggaggttgaggctgcagtgagtcgtgattgcaccactgcactcagccagggcgacagagcaagactgcctcaaaacagaaaagaaaacaaaggctaattctcaggctttacaccgaacctactggatcagaatccctggagctagggaccagaatctgtttattggtgattctgttgcatgcttttgcactattctaaaacctatgtgtgcatacacacacacacacacacacacacactcactctcttagcccttgttaacccttatcgatcctagacaaatgtatggggaacccatcagaggctattctttagggctagtgttcaatttgactgtttttaatatgaaagattatggatcacatttcaaacagatgtgaacgtggagagaataatacgatgtaccgcagtgtgtccatcactgttcttcagaaattcacattgggtcattttgttttagccatctctttccacattatcttctttttgttcttttaaatttcgggggtaatatgaagcaagcctcagctgggcagaccagagtctgttccctttttatatatcccggcgtcttagccgggtactcgtgtctgaatagtgagtaccttttgggcctggcactgggcaggccttcagctgggtcattctctacctggcgatggctttaggtgagttgtggagctcttttcacctttttgcctcatctgaaaatagttcctggccagaagggagaattggtgagaaaagtttcaacattttaagtctcatgctataagtttg

SEQ ID NO: 45004 - DNA, 1089 bp, Homo sapiens
gactctaaattgcagaggagtggtctttgggatgcatataggaaattattttgtaaagagacagaatccagggttagaatctgagaggtgcagcaggagtcagagtggagacttggtggctctaaggtagcacagaaggagtcattatgtgatggaagggcagtgcccactctcataaacctgggctggaagtgtgggtctctgttgagcaggtgtactgctcacaaagccccccaggggcgtgtggccttgtgccactctcctttgtgtagctctttaaggaattccagtggctaggatattttttttttaactttggttttttggaagtatttgtgggtttccggagaggatgcctgtccttccatgttggtgcaatagagaggcatgagtgtgactcccaaagcagctggatggagccgtggtagaggctccccagctccggatttgagaagacccagcagggctgggagaagtgctgcacaggaggctgagggtaagtctcgcttctgttctctggaggcgttggccacactagccttccagctcttgctcacagacttctctccactgtaaatgttctccttccatctttccactgatcttagtctttccagccttcagagttcagctcaaatccccatgctaccataaaaactggctggccctccagagaagacagcttctgtctctgtaactcctttaagctgtaatacactaactttgtcatcagagaggctgaattcaaatcctggctctgccatttgtcatccatatgacttggcaaattacttaacctctttgagcctcagcttccttatctgtaaaacagagataattataatgacaataatcctagcacctcttctggaggctattgtgagcattaaataagataatacacgtgaggtattagtaaacacatggtaagcatttaataaatgttacttgttattagcagttatttgacactcagatcagacagccttatattactaacattttcacatatgatgttctctctttttgtgcagggtataatttccttgatgccatatacattgtcgttttcctgttcaataaatattt

SEQ ID NO: 45005 - DNA, 1030 bp, Homo sapiens
ggccgagcagaacaaggaggccatccgctccgccaaggaagagatcgccgagtaccggcgccagctgcagtccaagagcatcgagctagagtcggtgcgcggcaccaaggagtccctggagcggcagctcagcgacatcgaggagcgccacaaccacgacctcagcagctaccaggtaggaaccgcggctgcgcggccagcctgcgccagcgccagcgccgcgcgcccccgacacttgggctcgtgcccaggcgccctctccgccgcgctccctggtggccgctcgctagagcacgcgcgccgcagacctagggtatttgcggatcagcgtcctcgcccatctcatcctccacactccgcccccacccacctgccccagctgctaagggtcttgacctttttcagaaacgtgcatcttttccagttctaattttgcacgcttgcacgtttaaagcaggagggatgaattcggtagtggataaatcagcaactttaggatagcttatgcagaaacgcgtgtattctctacttttccggcagtgatcggaagagctctcaaaattggcttcagcccaaagggctcagatgggaatggccaggtcagccatggagtttccccatgcatgtttgtgtcctgttgagacgtgttctaagtccactggtctccgtgcgtgatgtgcccaggaagtgtcctattgtcttactgatcttgtatgttcatttgagaatcgcttagatttaaaagaaaaagggggtgggacggggggctgggagtcaggtgtcagcgaggtttgcagaagtggagggagacgggaggaggccagggggaaggggtagcaagtggtttgcgaaggaagttgctgtttgcaaggatgagtctggggagattctctgtgtctgtttcaggacaccatccagcagctggaaaatgagcttcggggcacaaagtgggaaatggctcgtcatttgcgcgaataccaggacctcctcaacgtcaagatggctctggatatagaaatcgctgcgtaca

SEQ ID NO: 45006 - DNA, 1730 bp, Homo sapiens
gtaattctatttattcaaaggtagctaccacaatacccagaatgtaatgaagctcagaaggcctagtgaaatttttactatgtcttatgttcttggattttctccttagaaaactcctggagggtgaagagactagatttagcacatttgcaggaagcatcactgggccactgtatacacaccgacccccaatcacaatatccagtaagattcagaaacccaaggtggaagctcccaagcttaaggtccaacacaaatttgtcgaggagatcatagaggaaaccaaagtggaggatgagaagtcagaaatggaagaggccctgacagccattacagaggaattggccgtttccatgaaggaagagaagaaagaagcagcagaagaaaaggaagaggaacccgaagctgaagaagaagaagtagctgccaaaaagtctccagtgaaagcaactgcacctgaagttaaagaagaggaaggggaaaaggaggaagaagaaggccaggaagaagaggaggaagaagatgagggagctaagtcagaccaagccgaagagggaggatccgagaaggaaggctctagtgaaaaagaggaaggtgagcaggaagaaggagaaacagaagctgaagctgaaggagaggaagccgaagctaaagaggaaaagaaagtggaggaaaagagtgaggaagtggctaccaaggaggagctggtggcagatgccaaggtggaaaagccagaaaaagccaagtctcctgtgccaaaatcaccagtggaagagaaaggcaagtctcctgtgcccaagtcaccagtggaagagaaaggcaagtctcctgtgcccaagtcaccagtggaagagaaaggcaagtctcctgtgccgaaatcaccagtggaagagaaaggcaagtctcctgtgtcaaaatcaccagtggaagagaaagccaaatctcctgtgccaaaatcaccagtggaagaggcaaagtcaaaagcagaagtggggaaaggtgaacagaaagaggaagaagaaaaggaagtcaaggaagctcccaaggaagagaaggtagagaaaaaggaagagaaaccaaaggatgtgccagagaagaagaaagctgagtcccctgtaaaggaggaagctgtggcagaggtggtcaccatcaccaaatcggtaaaggtgcacttggagaaagagaccaaagaagaggggaagccactgcagcaggagaaagagaaggagaaagcgggaggagagggaggaagtgaggaggaagggagtgataaaggtgccaagggatccaggaaggaagacatagctgtcaatggggaggtagaaggaaaagaggaggtagagcaggagaccaaggaaaaaggcagtgggagggaagaggagaaaggcgttgtcaccaatggcctagacttgagcccagcagatgaaaagaaggggggtgataaaagtgaggagaaagtggtggtgaccaaaacggtagaaaaaatcaccagtgaggggggagatggtgctaccaaatacatcactaaatctgtaaccgtcactcaaaaggttgaagagcatgaagagacctttgaggagaaactagtgtctactaaaaaggtagaaaaagtcacttcacacgccatagtaaaggaagtcacccagagtgactaagatttgagtccattgcaaaaggttaagccatatgacaatttcaaaatgcatgtgattggcagcttcaaaacagaa

SEQ ID NO: 45007 - DNA, 1134 bp, Homo sapiens
aggccaggaatgcaacaaattcaaaaccactgcttgtcttgatatcttaatgtcaattatttataatttctcatcctggagacagtgagaagaagaatagaatgaatcagcaattttctttgcaaagctgtgcagagaataaaaagtatctgcctagcaggggcgagaaagaaaggtatatattctttactatagtacttaatttaaaatcacaaactggcctacccttactgattttgttattttattattatttttttaatgaccagaccacagtccagtaataggtgctctaattaggcagcagtttatgtgaggcagcgtagctcttccatggctgcgagaaacaaagtgatgttttgagtggcatcagaacaagatgttgcccgcgagtggtggtgctgcctgcattttatgtctggcattgccacttatgcaaatctcaaggatctagtctacaggatctagtctcttttcatccacggggccaaataagggtaaaagaatgcaatggggccaggtgtggtggctcatgcctgtaatcccagcactttgggaggctgaagtaggtggatcacctgaagtcaggagttcaagaccagtctggccaacatggtgaaaccacatctctactaaaaaaaaaaaaaaaaaaaaaaaaaaagaatacaaatattagccaggcgtggtggtgtgctcccgtagtcccaactactcatgaggctgaggcaggagaatcgcttgaacatgggaggcggaagttgcagtgagccgagattgtaccattgcactccagtctgggtgacagagtgagactccgtctcaaaaaaaaaaaaaaaaaagcaatgagattacaaatgttcagcaggcttcaggagaaatgaagtatttgttatggatggctggggtctggcttatttgcaaatgaaaatcttactctggggctataataataataaagttttctaagatcccaaagctaaattcatgtagggtcctctcagggattgaacagtatatcctgagaaatgtcttctagctaaagtcagggcaaggcagagcgtcccccttaataggagtctggggatgtatttcccttccaggaaagagaggacagtgataatagcttccaaagcg

SEQ ID NO: 45008 - DNA, 1017 bp, Homo sapiens
ccgtatgtctgtggtcaaggaacacacagtttgttcttcactaaatattttggctgggcaccgtggctcatgcctgtaatcccagcactttaggaggctgaggctggaggattgcttgagcccaggagtttgagaccagcctgggcaacatagtgagaccctgtctattatttaaaaaaaaaattagtagaaagaaaaatcgttttccccttcctcaaacaggtaaaatcacccagaatatgcctactctccgtggacattaaaggacataataagccctttgggagtcctttgactgatttataactacaccagcatacctccggaataatgggggttttattgtcaagctttataaaagtgttttttgagaaattattttgaggcagagatgtggatgagcacgttaattgtgtttttccaagtaatgtttgggccatgtcctctcagagcctgggctcactcaaacgattgtctgaatgctggcagccacttcccaagcaagagacagaagtgggctttgtctttcagaaagctctgtgccattgcaaagccactgttgttcgaatgggttcatggtcattatccaccttttcccaaatgtgccgtttgctctcatatttccacagctgattaaaccctgtcactatccacatcagataatagttggaccccaaagatgccctctctttaaggatcgtgtctttgtctttttttttttttttttttttttttttgagaaggagtctcgctctgttgccagggtggagtacaatggcgtgatctcggctcattgcaaccttcgcctcctgggttcaagagattctcctgcctcagccacccaagtagctgggactacaggtacatgcaaccatgccaagctaattttttttttttttttttgagacggagtctcgctctgtcacccaggctggagtgctgtggcgcaatctcggctcactgcaagctcagcctccctgtttcacgccattctcctgcctcagcctcctgagcagc

SEQ ID NO: 45009 - DNA, 1142 bp, Homo sapiens
gatgctttgattagtaaacctgttacaggttgtgtgtcccttatggaaagtacttgagaccagaagtgttttggattttgtatttttttcagattttagaatatttgtgtatacatactgagacatcttggggatgggacccaagtctaaacacaaaattcattggtttcatatacaccttatgcacgtagcctgaaggtaattttgtacaattattttcaataattttgtccatgaagccaagtttgtgtacattgaaccatcagaaagcaaaggcatcactctctcatggcaacgctctaacagtttcagattttggagcattttggagttcaggtttctggattagggatgctcagcccttagcaggttctgttgtctccctcactgacccctctgcttttagagaacgaattctctgctttgcctgttcctctttgatcttaaccttggatattttcctctttctcctggatgtttggtatccaggagggcacagagaggtgagcctggaccccgtgttgggtgtgtgtcttggggtcaagggatcctgggcacatgagtggggaagccatttctgagcacctttgaaaaaggaaaagtggcattttcacagcaaatatgggttgtgtctaatctggtagttcccaatttcaatctcctatttacctcttcaacatccaggcgggtgacacacactgtcagtatctataagtatacacagtgattcctgtaccttcactgtaagactgtcagctgccaacccctgacccccaagccccactgccacttctcttaaagtgtgacttaaatgccatcccctggcacctcttttatcctgtgggaatagtcttatcgattcagcagtcatcggttggtcattaatcttccacaaaccacgcactttatcattgcgaaaggggacagagaggatcaggatgttgggttgtgacacgcgagagagccccatctgtccctggctgctccgctgaggtcatggtacagcacagaggaccagatgggatggctagaatctgtgtcctaccctaactttgtttttatccgccactggccagctgcaaatttgctcttgccagcagaggctagggcctggaatgaaagacttcctatactgctggctg

SEQ ID NO: 45010 - DNA, 1090 bp, Homo sapiens
gtcttcaaggttagttcccaacatcccagtttagttccccacagagatgatagtcagcaaatcatttgccgtggcgcagtggcacagtggcacagcggcacagcaggcagaagaaacacccagagttccttaggcctcctagggacaggcctagagcttccgaactgcagaaatcaggccccagaggaatcacacgcagtttttgaactgaacaccctcctttctcattgctatattcatcagatgtttactcagtgcctgctgcatgcctggcactgcaaaggacagttccctgttttgatcattaaaaaaattaaatagaccaggcacatggctcatacctgtaatcccagcactttgggaggctgaggtgagctgatcacttgaggttaagagttgaagaccagcctggcctggccaatatggtgaaatcctgtctctactaaaaatacaaaaattagccgggcatggtggtgcatacctgtaatcccagctacttgggatgctgaggcaggagaactgcttgagcccggagggcggaggttgcagtgagccgaaattgtgcgactgtactccagtctgggcaacagagcaagactctgtctcaaagaatgaataaatgaatgaacgcatgaatgaataaatagtcagaagacttatctccttctttttcacttcgatggtgtgcctatgcgtgtatgttttatactgatagaattccatggccaaactcacctgacctgaggggtggcgcattgagaaagtgtcctgtctactgtgccccacagtagacacacatttaatttttgttttcaattatttgatcagttttccaaaatggttctgaatcccacctccataatgaaagaggtcattgtcaccttgtgtctgtgtgtgttcttggtctcatcagtaacgggattagaattcacactcatattccccacgcctgcccccgtctcaaagcgaggaggagaagggatgtactttttatttggggctttgtgtctggtggggaagcacatgcaggatccactctgtcatcaccaatgctaggggcagtttaatctcaaatgttcttgctgtttcc

SEQ ID NO: 45011 - DNA, 1025 bp, Homo sapiens
gggaggagaggatgttatgacacaggcgtttttgttgcagtgacttgtggataattgctccttattaacactgctaaaattatgttcacatgttttactttgtgtgggagccgatgactcttgtcctttcgttttttgagtattatctttcaaatgagcgttggcctcaaacccgctcattccaaaatgcatcacagatgggaatttaagcctcttcacaaagcaaaccactggaaattcataggtagtatgcaacattggtctgtaactgataatagggcaacatcatttctttggaacgtaattttcttgattccacaagaagtgacaggataagaaaactcatagttaaatgagaacagtcttgttacaggacagttatctcccaggtgtatgtcatcaattctaatttccgtgttgttaccaaagggccttattttcattctgactaacaaccaatcatcagaacacattgaaactgttgctgggtcaagttcaaaaggattccaaaacagtaaaaaaaaagaggaagggcccaccaagagcacagaggtcttcatcgctccagactcccagatacagcacagggaacaagaaatggcagaaccatcatttcatagacaagtggtcaagatgtcctcaaagccgtacagctctttggtggcagaaccaggaccaaaaaccaggtctcctgccctgctggagaagtcctctttccggtgggccgtgggctgcctccactgccacccaccatgttggaggaaacgtaggtggggaggcacattcacaccaattagggttatacaggatgcccagttacattggcaattcaaatagtaagtaatttttcatagtaagcatttcccagatatttcatgggtcacacttattctaaaaaatcttactataccagaaattcaaacttaactaggtctcctatatttttcctcattgagcctggcagtcctaccaccagttccaatttgtttgcttgctcttgctttctccttttttctttttgctaa

SEQ ID NO: 45012 - DNA, 1035 bp, Homo sapiens
ttaaaataatatttaaaattatattttctagtatttcttatctctgaaattataattatttctccattcataattcactcatttagtacatttgctagagtgcctacttataccagctatattctagggacacacaaatgaacaaactctctgtcctataaaggcctaccagctaagcagggaggcagatgagccagtgtaacccagggttctccatgctatcatgggaacaaattctgggcactgtgggtgggaccgctaacatgaagttgaagtttcaaggtagagacatctaagttgagactgaagaaatcagaattaccagttggcagagggtgtagtgtgagtcagaaaaggataggggtggggtagatttggaggaagaggacaaaagaagaaataacatattgagaggatctggagccttggagagaaatggatgtgactttgcatggaagggaacatagattgttggggtggagactggtatgaaatgcagctgggaatgtgtggaagagtcaagatatggaaggatcaagatatgtgtctggaggacattgagactcactggagggctttaaacccaggaggggcatggctagagttttagggtacatggatgatttgatatgtttgtgagtatgacccactgtttaccctacaatcaccagtttccacagttgcaagaggggagggtgtagaaatggctcgggagaaagccattcctattaatatattttcttaaaatccctggatgcatgcagcttactctatgacacgattgattaaataacaccttataaagaatcaggctaggcgcagtggctcatgcctctaatcccagcactttgggaggccaaggcgggcagatcacttgaggtcaggagttcgagaccagcctggccaacgtgatgaaaccccatctctactaaaaatgcaaaaattagctgggtgtggtggcatgctcctgtagtcccagctattcaggaggctgaggcaggagaatcacttcaacctgggaggtggaggttacag

SEQ ID NO: 45013 - DNA, 1030 bp, Homo sapiens
atgttgggggaaagccagcctgggagcatgtgaaaggatccttgcagagctttactgaggccctccatattgagctgcaggagctggagccatgggtaggccattgaggagctgttgggagcagattcaagccgtgtcactctgaagaagtgcaggtgtgaacgtcatgacctgctccagcacctgcacaggcagtggaggcctagtggaggccaagagcattgccgggaccaagtcccaccaggggccatcgtgccagtcagagggcatcatctcagctcacttgcagctgccactgcagacaagtagaacaaactgagaattccacaaaccagccagagtcatatatttgagttaatatatcactttttacaaatgatatcacaaattagtggagaaagatacattatgcaaaaaaaaaaaaaaaaggtttttggagaaagttagctagccatttaagatcccgaagttagattccagtctcacaacttatgccagtgtaaattttagatgattaaacatacaactgtaagagctagaatcttaaaatattaacgggaaaatagaagttttatgtggtagtcatgggagggaggccgttttaaagattcagccaaaaaaagaaaaattgataggtttaaccacccaaaaactgtaaagaacttaatacatagaaaaaaatcgatacagtctttgcactgtgtttgagaaaggatgaatatttgtaatatataaagaattaatagaaattaataaggacatgaagggaatacacacacatacagaaatggtgttgtacatttattgaggatgagtgaaatgcaaatcgaaacatcaaggtttattttttatcttgaccacactttagtgtttgggtagatataaggagacatacattacttatagagaatatgaattgttacaatgcattagaagtcttaaaatttagatatttcaaaaaatgtactccatgattaacagtgattatttctgttgatgtaactcttggtgattttgctcctgtttttgt

SEQ ID NO: 45014 - DNA, 1013 bp, Homo sapiens
atttttagtaaagacggggtttcaccacgttagccaggatggtcttgatctcctgacctcgtgatccacccgcctcggcctcccaaagtgttgggattacaggcgtgagccaccgcgtccggcttgtttgttttttaagacggaatctcactccctcacctaggctggagttctgtggcactgtctctgctccctctaacctctgcttcccaggttcaagtgattctcctgcctcagccccctgagtagctgggattacaggtgtacatcaccacacccagctaatttttttttttttttgtatttttgggagagggggggtttcacaatgttggccaggctggcctcaaactcctgacctcaagtgatctgcccaacttggcctcccaaagtactgggattacaggcataattaccgtgcccagtcagcacttgacttttcttttttaaaaatgtcattaatattcttgccagttgtttgttggcaacattaatattgttgccagttgtatgtaaggacctcctgggagagcggttttaaggagaatctaaagtcagctcggtatttccaacagttcctaaaagagcaaaatcatgtgttccttaatctttaattagaacaatctgcaagtggttcattaattagagaattttgtctttaaaacaggaacctcaggaagtaacaagcaagtaggaaaagatgacccttttaaaagaaattattcttctttagtctatacttattgcatgaccttaaaaaccaggggacagggaaacagcaatgtgttggatcccacaggagagctggttacatgcatcccttctcaaccccacgttcagtgatatcacattagtagctggaaattgaccatggtggaagtctttacaccagggtaactggcaaacatgataaagcaagcgtttttttgttttgttttgttttgagatggagtctcactctttcgcccaggctggaatgcagcagcatgaacttggctcactgcaacctccac

SEQ ID NO: 45015 - DNA, 1033 bp, Homo sapiens
aatatatttacttgcttgttttttattctctcctctagaaggtaagttctgtgagagcaagatcaccattgtattcctgttgtccagctgatcttctctttgtgcaatacatatttttatatgaatggacaagtgattttgaaagacattttacaagacaacctgggcccaagtgttgcttaaaaaggaatcatgtgtgggctaccaatggaaactgctcatttcaaacatggctatgtttgcacttgcccaggcaaccacacctgtgagacaaattactcccatgcctggggcctaggaaatctctttggggaaaaaaaaatgattaaagagattatatttacagtctagagtggagaaaatagtatttaatgcagtaattttctattagactttcaggattggctggggactgtggtacattgcttctgttctctgtcactctgtttctgtgccagaagacacattgcttctcctcattctcttatgcagtgctgtttaagtggtggtccacaaattgttgctggatggtgatgagatcgattaggagtttatacctcaatgtaaattaatgcacttccttccttccttaagaatgtcttgccatgaaaatatcagcatgcctgtggatgtcattgatttaaatgagggcacaagttccgtatttccttgcagatgggtccagactgtttgcagactggccatggtccttgggccacactggaagaagaactgggctaagtattttttatgcctgtgatttaacttctccaataaaccgcagctcttgtaggatatgatggtcgctgtcaggcaaggactagattttcagtgagaacttgatggtggggattgaacgttggctggggagtgcagtggctacctcagtacccggaactccagttgcctctccactcttcctatgtaatgacttccctttctgtgtctcacctgcagaataaaatcttcatctatcggggaaaggagtatgagaggcgagaggacttcagcctgaggttgttaacccagttcc

SEQ ID NO: 45016 - DNA, 1071 bp, Homo sapiens
atagaacttacctagtaaagcgtcacagaaaaaaaaccaacatgcctctggtcaaagcacctgttattctgtctcccctgagggttatacaaactgattggtggaccccagaacccaggcgcactggaaatgaagcagcatctctggggatggcagagccacactctctttagaattagcttctaggggccaggtgtagtggttcacacctgtaatcccaggatttagggaggccaaggcaggtggatcacttgaggtcaggagcgcgagaccatcttggccaacatggtgaaaccgcgtctctactaaaaatacaaaaattggccaggcatgatggtgcatgcctgtagtccgagctactcaggaggctgaggcacgagaatcacttttaaccccagaggcaaaggtttcagtaagccgagattgggccactgcactccagcttgggtggcggaattagcttctaggacccctgcctgacttggtgtgccagaggttgtatggacaactgatggccctgactctacaattaaattagttcaactaagtattcttagttgagacatgaaagcagtacttggcacaatttaatccatgggatagggttaggatgtaacagcatttaaaatacacatcatgcattcagtgtatgttaggtataattaatggaggcagaatttttcattgctgtggtatgtttacagtggttaaatattttttgaatataaactttttggatataaatcaacatttgtcaaggacgcccctgtggagccgcctggagagtgggtagaaattaaaggagccagaggggaagggtgagcagcattaattgggtggcactcttgtgtccgtgtgtgtgtgtgtgtgtgtgtgtgtgtgtgtgtgtcccgggaagagcaggagctttgcactcagttgctcccaggacccagttctggcttccaattggccactgtgtgctctgggcaacatgcttcacctctctgagctccatatatctgcaaagtgagaagaatgcctgacttggccaggcacggtgactcatgcctgtaatcccagcactttggg

SEQ ID NO: 45017 - DNA, 1040 bp, Homo sapiens
tgctcatccacggaagtgccccaggactccgttagatttgcctcatcccacagtccttccccagtttagggccaacctgtattcttggtgtgcacattttcccacatcattgaccaaagtccatccagtccacaagtcctacactgagaagtggccttcccattggccagcactatgtctagcagtttacctttccaccccatccctcccttccccaaccaaatcaaaacgatccctcttcctgaagcacactgcactcattttttgcccttctttccagatgcccctgctaacagaagggatccgcatccatggggagaaactcacagagcagctgaagccgctgcatgagcggttgtcttcttgcttccgggaactcaaggagaaagtagaaaagcactatggggttataacactggtaagcatgatctaagtagccttcacacctttttctaggctctgtgaccttttatgacactgattcgtttttcagatgccaagtgagttgtaataacttagctatggcatggaaatagtgaggctggtgggagagagtgtgttcccctcttggtgaccttgagcagtccttgtgctggtcagaggttctccaacttgaacaactatcagaacctcccagagcgcctgtgaaaatacagatggctgagccatcataaccctggagtttatgattccatagatctgggggtggggcccaagtagttgcaattctgagaagttcccgggtgatattgatgctgctggtctggggacaacactttgagaaccactgtactagaaatcaggccaggtgcagtggctcacagctgtaatcccagcactttgggaggccaaggagggctgatcacttgtggtcaggagttcgagaccagcctggccaacatggtgaaacaccatctctactaaaaatacaaaaaattagctgggcatggcgtcaggcacctgtagtcccggctattcaggaggctgtggcaagagaattgcttgtacccaggaggcggaggtttcattgagccgagatc

SEQ ID NO: 45018 - DNA, 1064 bp, Homo sapiens
gccataccctggctattaagataaaaagatttgtggacattaaaattatgaatatgtcagtaataatccagcacacattgaaatattgacacagattaccataatttgtgcaacatcttataaacaatgtcatttccatagtagtctaaggcttcaccagcctggcccactgtatctagactttaggttcattttaataattatgctttccttctctgtatcatttgggaagttgataaatatcacttccttagataccttcattcagtgatatatctggcttttacaattaaattggaaaaggtaagtttctctttggtgggttgagagttggaccatcaattctaatctacaaaaggaaattcatgatttcactctgacgcctaggatctagccaaggctggtctgcagtatcagatgtccaaactcatctactattagccatattttgtgagtcgtttgtctaaactttgtcaaaaatgcctttgccatgattttgttgctatctggatttcaaacatggacagttaggaagatgtgcattgaagtaggaaaattttgttcagatttgctgttatttattttttaaattaaaaatggaaatgtattttaaagtttattgtgtgtttagtttgttattgcccttaagttgatgaaatcattcctgaacttggcagtttttccttatccatgcctccttcatgacacatcacacctagcatttttctggcttgtttccttacaggtcctgttaggttaaacctgcactgtggggtcctggagtcatctttgcccagaaataagaaaaattacaaaccacttgcttcctttcaccctatctatttttttttctatctaggctgacagttttctgatagcaattcatttaatgtacataggttctgtttctttacccattccccatagatatttagacaggtaaagagagaaataaaaaggttaaaggggatatctaataacttacatgaaaaggataggaactggttctaaaatggttgaatgtttgtatcacctggggagaggccattcccagaccaattaca

SEQ ID NO: 45019 - DNA, 1034 bp, Homo sapiens
cactttttgacctgtcacctaggatacaggagggtgtatgatatgaatagtaataatgcattttgttttcatttatggcaaaaataagagaaagtttaagagcaattaagaaaatataatactgaaagagcaggatgtacctcctttaacaatcacaaacagggttgggctcagtggctcaagcccgtaatcccagcgctttgggaggccgaggcaggcagatcaccggaggtcaggagttcgagaccagcctgaccaacatagagaaacctcgtctctactaaaaatacaaaattagccgggcatggtggtgcatgcctgtaatcccagctactcaggagtttgaggcaggagaatcgcttgaacctgggaggcagaggttaccgtgagtcgaaatcgcaccattgcattccagcctgggcaacaagagtgaaactctgtctccaaaaaaaaaaaaaaaaaaaaaaacacaaacagaagattgattctggctaatgtccttcgagcagtagaaatgaagtttacttgtgaagtctgacttagatggaaaagaaggaaatactatatgagaatggaattggatcagagaatagcatttagaattggaggataatggaagtcttgaatatcacagggcactagaccaggtaatacataagacaaggcgaaagtggcacgccaccctaactttcattctcaaaaacatcactcttagacctttaaaaggctggattcattttgtgtgcttaggcatatgtccaaaattcagggtagtgctgatggtaggtatcagaaagaaacaatcatcttgaagaattaagaacctgagactgcatgtacctaggtggagatcttacctttcagttgctggggataaaactgacttatttagaaaaagaaaaatactgagtcaaaagcaaaagccatctgtgtgtaggaaataagaaacaaaaatgaaaacttaaaatgtgttcatgtatttattcaacaacttttaataactgttctatgtaccaggcactgttctaggagca

SEQ ID NO: 45020 - DNA, 1050 bp, Homo sapiens
aaattatttgacctttctctgcctggtttccttatctataaaaatgtaaagttggtaactacttttagagtaatttgagcattaaatgggataatataaaatcaccacgagtgtctggcacttcagaaatacaaatctttttttcaaaccataagcattttaacatacaagtatgcctacaagcctgttctgatttgttctgaagccaaaaggaactaaattaccttctatttacatggatcattgatggtcaattgctatttgtaaagctttaacaattttgttcaaagagctgatttggggccaggtacaatagctcacacctgtaatcccctgactttggaaggccaacactgaaggatcgcttgagcccaggagtttgagaccagtctgggacaaaaaaaaaaaaaaaaagctgatttgggtctgtaatacacacagcactgtttgttcatatcttctcctcaaaaagacttaacatctgaacgatccatggaactcttactttctaacaatatgacacagcaaatattaagtcttgtcattagaatcatgtgaaaacatttacaactggccgggcgtggtggcttatgcctgtaatcccagcactttgggaggccgaggcaggtggatcacaaggtcaggagatagagaccgtcctggctgacacagtgaaaccccatctctactaaaaatacaaaaaattagccgggcgtagtggcgggcacctgtagtcccagctactcgggaggctggggcaggagaatggcgtgaacccagggggcagagctttcagtgagccgagattgtgcccctgcactccagcctgggcaacagagcgagactccatctccaaaaaaaaagaaaagaaaacatttacaactaatgatctttatactaagatggcaaaaattaggaggcatataaaatgtgagttgtttgctgacttttctgatttagttaaaaataaatctaaaagtaaacatgagctttgttgtataagttaacttattttgcaatattggtatgtacattttcctggtcagaaaa

SEQ ID NO: 45021 - DNA, 1030 bp, Homo sapiens
atcaaaaacactcagggctgggtgaggtggctcacacctgtaatctcagcactttgggaggctgatattggaggattgcttgaggccagtagtgcgagaccagcctggtcaacatagcacaaccccatctgtattttcttaatatattacttaaaaaaaaaaattcagaaaaacccaataacaatacaacaattaaaaaaataaaaattttaaaatacagcatattaactatgtagcatttatattgtacttggtgttaagtcatctagagatgctttaaagcatagttattatgctgtatttttacagtataatgctgtaaaaggaagtttacatatgctctatgcaaatactgtgccattttatgtcggggacttgagtatctgcagatttttggtatccacaggaggtcctggaaccaatttccctacagatactgagggatgactgtgtttactgttaaaatgaaaaaagcatgttataaaacaatatatgtggtcaactactggttatggactgaattgtgtcccttcccaaatttatatattgaagtcctaactcccaggatctcagaatgtgactgtatttggagatttggtctttaaaatagttattaatttaaaatgagatccatagggtgggtcctaatccactctgactggtgttcttataagaggaggaaattcggacccacataaggacaccagggacgagtgtgcattgagaaataaccatgtgaggacacagcaagaaggtggccatctgaaggccaaggagagaggccccaagagacaccagccctgccaacaccctgatcttgcactgctagcctccagaactgggagaaaattagtttctgttgtttgaactacctagtttgtgacattttattacagtagccttacaaactaatacattaccctttgtctaagaaagtagagtacacatatagttttgatttttcagttgaagaataaaccaaagagaaataaaaaactggctatagggagaagggaggagacaggagaga

SEQ ID NO: 45022 - DNA, 1474 bp, Homo sapiens
taaaaggaaaaaaacatactgtaaaaagtactataaaagtcagtatagtggctacccttaagctgttggaaaggagttgtgatcgggaagggctggggaggcccttgtgggctatcttgactgggatggtggttgtacagatgtttgtaaagagtaacctggacatttttgtttcaatttttggttttctttatctgttacattttacagtaagaagtttttggaaatctaataatgtattaaagggtttaggatgaaaaatggcagtcccctacctccccactccttaatccctagtccatctcctaagagcagttgttcaactcttccgctgggttccttggtgcttcatttcctttttgggaataaaatggtatttctatatcttgtcaattttagtatttccagctgacttgctcctctagtagatgataactaagctattcacattatcacccccatttctgtccccattgtgccccgatgttacatcacacactatgattaaattggacgtcagtgcttaaattgttatgaccacgcacacattctctgctgaaccagtagtgctctgcagtgtttatttcatcctcaaggtaatacagtaattgcttgtttgttaatttgactatttggttttttaaaaaacgtaatcaatctggaacattacagaaagtatgtggaatagtataatgaacccctgtcacccggcgttgtcaatggccagtgttgccccatgtatggttccatcactggaccctttcccatccttttgttatttaataatgtaatacttgtttttaaaatctgaatttaacaaaatagaaagccaagttcatttcttaaagtcgaacagtaagaaattttttctaatgattttgataatgtgtttaaattttacttgtggaaataaattattaaaaattcaaatacatgtggataatctgaagtgtgtaataattggtcaaaataatagaacaggccaggtgcagtggctcacgcctgtaatcccagcactttgggaggccaggcgagaggatctcttgaatccaggagtctgagaccagcctggacaacatagtgagaccttttctctacaaaaattaaaaatattagcagggcatggcagtgtgcaactgtagtcccagctactaaggaggctgagacttgagcctgagaggtctgctacagttaggctgtgattgtgccactggtctccagcctggacaatagagtaagactctgtttcaaaaaaaaaaaaggaacaacttaaccattcaagatagttattttaattattttaatgtagatttttcattgtttagtaatcttaaaatatcagatgttattaaatatttaataatgaacctcatctgcatatttgatagtcttaaactttcacaggaaattattttaggatattatcttataaagtcttattttatgaaacttggatccaagtacattgtgtgtt

SEQ ID NO: 45023 - DNA, 1043 bp, Homo sapiens
tttaaaaatgaatatgaatgtttttagttaattttggcagtagttgattacaatatcatctagatctttgctcttggcatatgtggaatccttggcaagtcgttgaatacttctatataccacattgccgggagttacgctcttgtagcttttagtttctattggttaaatcctctctgtatgttcaaataccagatggagttttctcttctagaatcttcgaatgatctctctttttccagttcacagggtctgtggaccggtgatctggtttaagaacttctgctctaatcttgagttatgcctgtgtttacacacttactgaaacttctgtgctggattctaaatttggaagaatcaaggatatttgtgtggtaataatggtgtttagactatttaggagggtattttttcttaccggtcctcttattactttttcctgagataatatgggagggattaatcatctgtaaaataccagacttgacagatttagtgtgttcccatcttttttttttttcctttattaaaaactgtctctcatgggtaaaaacattagaaggatatattggattttgaaccagttgcttattttatactttaatcagaaggaaatttaagtttttcagtagcttgtattaagagagaaatcagagtaggtaaaagggattgggggcaaaattttaaaaattttctaaagatccagaagaacatggttagatctggagcagtgttacttttcaaacctgccattgcaggctcattgtaggtctgtctgctctgtatgaaagtagaaatagtacctttttggtgttaccctgcgtgtctgttttttcctgcttaccacaaggtaagattcttaagggtggatgactttctaagggaacaaaagaggaatctttccttttggctaatagagtgggaaggctctaattcaagagaaacaggctattgtaggcaataaatagttctgaccaaatttcttatcaaggcatgcaacatgcaaaaatgtttgttaaaggaattggtagtagcaaaggcat

SEQ ID NO: 45024 - DNA, 1034 bp, Homo sapiens
atattatagaaaacatataacattaaatttaccatcttaaccattttcaaatacactgttcagtagtgttaactctattcatattgtgaaacagatcctcagaactttttcgtcttgcaaaactgaaactctatacccgttaaataactcccttcttcccctcccctcagctcttggcagctaccattctactttctgtttctgtaaatttgactgctttagattcctcctccaagtggaatcatacagtctttttgtgactggcttatttcataatgtcttcagggttcatccctgttgtagtatgtgacaggatttccttcctttttaaggctgaataatagaccattgtgtgtatatatcccttttgtttattcattcattctttgatgggcattttggttgctttcatgttttaactctcgagctcctagtctttttatatatatggggttcggtgggaaggaaccaggtaggtactttctgtaattaatttgagtagtctaggtagaacatgaaagtgtcagtttaaaggatttagagattggtgtagttttatttttaaaactcctgtttgattgagtctacatctctgatttttatggggagggggcagagctaaggtgagacacagccacaagtcaacaggtatctgttgagttcccagcactgtggagaatgtgaaggagatagaagacattattccttcattttaggtacatggaggtccattttattgaaataaacatttcccatagcacttggcatttggtattacaccctacgtatggtactgtgaaaaccttctctaatgccatgtaaaaattttacagatgatactagagtctgagtagtaaattactttcccttttctaagttgattttatgctgcttgatattgagatggggatgtagtacaaatatttacttgtttcttggagttaaattttaaaaaatcccatattgcaggtctaagaccataaatttgtcttttactgctttcaaatggtcgtgagttggaattttccaattag

SEQ ID NO: 45025 - DNA, 1102 bp, Homo sapiens
ttttatgttttagtaactaggttaaaaaaatctaataaaggttgggctttattagatgatgcatgcctgtagtcccagctactcaagaggccaaggcaggaggattgcttgagcccaggagttcgaggttgcagtaagccatgatcgtgccactacacaccagcttgggtgacagaaaaaattaatacatatatagaatggtaaatcaagaggaatacagcaaatgtatgcttctctcttctttctcccagtttcttcgtcctctcaccagagatgccatcacaggtttcttatatatcattccagaagtattttattttgtatttgcaatgtttttaacagcgcatctttatcattttggacttgaaagtaggaaaatgtattctaggaatccatgaattattaagcaaggtctataggccctgccttaaagaggatctgatgagttgcctgagaaattagcattttcttttaaccagtagattaaaaccatacagatttctatatggagagttgctgagaaggttgtacacatttggaatttacatctagatgtgtaattagtggactctaaacaaagctaagtaaaatctataatatctaagatatacaagtctttaaaaataacagtttgggttcacagatactggagtcttcggattgtagaccttaagtcttctttctccacttgaatctgattgttcctggcagtgtgtaaagtgatcggttcattttggtgatttatttaattaagactgtactacacattatagaataggctagatcctaaagacataatgtgtgttcttaagtgttcagtaaacacgtaggcctttttggtcacttgtccaccatgtctaattctcgacctaatttcttgggagttttgttaatattccttaaaatgccaaaatgtcataatttgtatactgctcaggttgattggaataaagctttgttaaattcttgctatgcagaattcttttaatctttaagaatttttgtttgttaaaggaaaaacaactttgattataaatgtctgagaaatttaaaaaataagtgctcaagagactgagctgtctataagtgctttatatgcatt

SEQ ID NO: 45026 - DNA, 1108 bp, Homo sapiens
gcttcctctcaaattgataccttctcaaggtcaggttcagtttctccagaaggtaaatgtgttctctattttagagtctagcttctctgtgtcttgcatagatgtttcaaccaatagctgttttgagtctcatgcttcactgcagccctgcaaggtacctggtgcttctgtgtcctgacttgacaaccccttttgcatgctcagaggtttcactttattttgctgagttttctatttttcagcacattggttgttaccttccttctgctgttgccttgcgttttctttgttcttattttagactgtttttattagtttaccgtcattttagtgggtttagaagataaatgcgtgttttacatctacatgtttaacaagtgtatcaaaatgtttatagtttcttttcattcatgtctagaacacttggtaatcactttctatgcaatagaaaaggggaattcacagaatttatataaaagtagatttgttttcttaaatctaaattctgatattgtgtacttctttttttgaggtggagtctcactgttgttgcccaggctggagtacaacggtgcgacctcggctcactgcagcctccgcctcctgggttaaagcagttctcctgcctcagcctcccgagtagctgggactacagacacctgccaccacgcccggctaatttcttttgtatttctagtagagatggggtttcaccatgttggccaaggtgttctcgaacttgtgagctcaggtgatccacctgcctcagcctcccaaagcgctggaattataggcctgaaccaccatgcccagcttgtgtactgtttttaatggccttttctttcttcaattaatagcaaaaaaatgatacaaattaaaatagcttttgtctaagatactaacctgcatttttagacctaaatttcaggcatgaagcagtcagccaaaagccgtgaggttttaaagaacttaatatatcagagaaaacttcagctttcttagataaaaatcagtttatatttttttactcctgaaataatttaaattaacacatatatttgtcttagaatgaagacatttgtcaaagaccttttgggctgctgttaac

SEQ ID NO: 45027 - DNA, 1041 bp, Homo sapiens
atgttgtactccaaggtgtcagatcagcaaatacgttgctgcctgattcagttttggttgattcttcccctccgatatcattaatattctcaggagatagagtgaataagctattgggagagggtaaaagagatacatgatgtagggaacgtttttttaattgttaaaccagaagtgggtattttggtttgtgagttaaaatactgctggtattctaacttacgattagtctttaagtattatgtatattccacagtgccaggtgcccactgctgggcatgcagttgtaggtacttctttataactctggctagtttatcctgtctgtgcaattagttcatactgctgagcagctgtgtctccctgccttttacaattgtaggtatattgttagtgttgctgtgctcactaagttttgtgatgttttaaacggaaccaagtttggtggtattattattatttttttaaaagaaagcagttacttaaattaacatggtagaaaatatcctggggattgatggtgtagattaaaaatctttgttttatccaacaatagaattgaattatatggctaggaacaccagcaagcacttcctgtcacagttatcgaaacagtcttttaaagaatgtctagagggccttacttaaacaaatagcttgtcttgactttgggaggaggatggttacctaagcccatgtgttaaaacagacagatgacacactgaaatgaccaacgagcataataaggagaattcagtatccttggaaaccctggaacggtgccataactaaactaaaaaaattttagcaggaaacagtacaaacaagaaacatcgtgagagaaggccttagtgttcatttctgtggttgtgaagcgctagtaggagtaagtgacaggacctactttgaatagccagagttagaattgaagggggagccactggacaattggttcatgtattctgtactttgaaactgggattgaaaactaaatggctcttaccaagagaaatgtgaccagagaaatgtgacctgagagag

SEQ ID NO: 45028 - DNA, 1081 bp, Homo sapiens
gtatgtgcaagcacatatggccagacagcagaggaatatttactaaaataatagtggtttcctcagaagtggggttaagagtgatgattatcctttttctacaaagtagtttatttgtgagattaaggaatgaagttaattttaattaaaaacctatgttatgataatctcattactacaagtgatctttaaaaatcatattgtatataaacacatctgatacataatttgcagtttgcatgaatctgctaaatgactgttccaggggtgagatttcagggtttcttacactttattttttgtgaattggttagtttatagtgataattgtatcttttttatgaacataatgccatcttaaatatttacatatttagattcctataaaactttttaaagtacctttattgcagtactgattttaaggttcctaagtggttgatttaaccattggctattaatctttagctattttgttgtggtcagacagtatggtctttataatttgatttcttggagtttctctgtgactcttaattgcatacctttttagaagaaatatatacttttaatttggtataatttttctgtgtatttgtcatttatattttttaggtgtctatcccttctccctcccagctcccatcactgttcctgtcttctactacctttttttcaactccttattcctaataaccctgaaattgtaaagttaaaatctgcattgggcattgggcataaaaatttatgactgttacattctcaccataccttttatctacctacctgcatagtacaaaacccccttttcctattgaattctttttaaaaaaattccaccagactttggggacatcatctgtatttattaggcatgggtcaagtatgctagctatttggcagttagcaggacagttttgaacaagaaaaattgttcgatggtctgcatagcttagaatatactgccaaatgttcgtgatgctggaaaaaagcttggttattttctaagcctacaaactgttttacttaccaagggttttttcaggggatagaggccacgacttttagtactaaagtttac

SEQ ID NO: 45029 - DNA, 1146 bp, Homo sapiens
aattccagcatattgggaggccgaggtaggcggatcacaaggtcaggagattgagaccatcctggctaacacggtgaaaccccgcctctactaaaaatacaaaaaattagccggtggtggtggcaggtgcctgtagtcccagctactcaggaggctgaggcaggagaatggcgtgaacccgggaggcggaggttgcagggagccgagatcgcgccactgcactccagcctgggcggcagagtaagactccatctcaaaaaaaaacaaaaaacaaaaacaaaaaaagtcagtatccactctgtaatgttttagacctgtgctgtccagtctggtagccgctagctacatatgggtatcagaacatgagaagaatattttctaagagtagattattttctaaaaacctggataccagtatttagccagccctgtttgggtgtagcatgaaatggtatccctgtttgcaggactgtgcttcctcactttttgcatgtcatggcattcctaaaaagcagcgatgtttgtatggcacactgggatacacagccgaggatgcttacaactagggcttaccgatctgagtgctctgcagcaccaggcaagaccataccccattcttggcatgccggtatgcagtggcacatacggtacaaagctgcttcagcgtgctccctataactcattcctggatgtttttcttggtctatgagcggaatttgaattcattctcccttcttatttcatcatttttatatgtcatattcccagtgagactgtgagacattggcatttcacaacttagaagagctttcaaagcatcatccataaacttagagatttagtgagtaactgtatatgatctttctcttctcttttgtttaagggagaaaggaggaaggaacaccatgacgtagtgatatatttaaattctgttttagaaaccaggaaaatagttttcctaccagaaatatgattacattaaatatatgcggtataaagatcacagcaaggagaccatgaatctgtccatctacccctccccgaaataaaattactctacactattcagataaaaagtgacttggttggctgtttctgaaactttctgtttattggcttttggcaagataaatagtaacaaacacc

SEQ ID NO: 45030 - DNA, 1049 bp, Homo sapiens
tttatttccctcaaggattttacagtgagttgacttttgtggtgtaaatctttggttcttgtcctttcctgatatccagccacttgctgtttgggccagttgtttctaggattcctcaccctacacaagggtccctcttaaaattctttacctttgctacaaaactagttcactgctaaacacataaccacatcactgtacgctaaaaatgtcatcataaaataattgttcctgccataagaagtgatacgttattggagcaaatgtcttgtttctgttgcatcttgcaatcaagtctttttcttctccccacacacccttcaccttcctcttccattcacatgttcagtgattacattataactggttgtgagagtcccctgtcttcagtttggaatattgtacctacaatcattacttgattcttgttctgtcttctcataataaaataggtaagggctgggtgttgtgttttgtggttcatgcttgtaatcccagcactttgggaggtcaaggcaggaggattgcttgatgccaagagttcgaaaccagcctgggcaacatggcaacaccctgtctataaaaaaataaaaataaaaaaattagactggcatggtggtccgcacctgtagtcccagctacttggggagctgatatgggaagattgcttgaacccgggaggtcaaggctgcagtgaggtatgattgaaccactgcattccagctggggcaacaaagcgaaaccccatctcaaaaaataataaattggcgtggaatgtgccttcccaccccacccctcagtctcaaatctcaattgttttactgtaatgctgtccttactgacttaatcatctctaggttttacgtgttcagttcacttaaggaatattaaggtttcttccttattagaaattgagcccggctgggtatggtagcgcttgcaaacttccagcagtttggaaggctgaggtgggaggatcactgaagaccacaagctcgagactaccttgagcaacatagtgagaccctgtctctacaaaaaaatttttt

SEQ ID NO: 45031 - DNA, 1045 bp, Homo sapiens
agcttatcaaatgtatataagaaaattagcaagataatgtttaagggtgctatcagaatgattcacaaattgttgatttctttgcattcacaaatttagtgaaatgttaataaattagtatttgttgtattctctgttaaaatagtttcatactggtttattctgaggagaatttttattagtggatcaaaatatttatgaaagaactttagattcatgttatttctgatgggtggttgatgtacttcaaagatatacttcatagacttggaatgtttgggaaaacacgctaagttctgaaactagtgagtcgggaaagaaaaactaatatctttttttgttttgtctcaattatacagcagatataatttctacagtagaatttaatcattctggagaattactagcaacaggagataaaggtggtagagttgtcatctttcaacaggagcaggaggtaagtgtttaaagtttattgtctaaatttcagtttgatcttaggactagagcttgtgttgcactggagaatctcatcagaggatgttggaattttaaaagaagtgtgtgtttattgaatacaatgtccaatatatagacagctctggttctcttagctttgtatgtgtgcatgtgtgtacatgagcgtatgttgttttggtttaaaaacataacactaattgtaaaaatacttgattagagaagggggtggaaagtgatggaataatccaagattttaacggttttgaagccttggcccttcattataatttttcctttgaaactccgtaaagcaaagttgctttgacttcttctcaatgcttggtttactttgtacaattgaggggtgagaggctagtttaaagaaaaagcagctcaattattttgatgtcagttcataataatactgttacaatgatttaaatgtaaaggtttaaatgacagttgcatgtacatgcatgtaaagtaacttaaaagtgcagtgctagctttttgaagaaagaaaattgcagaatcggtaattaaagtgggcttttgttttgttttt

SEQ ID NO: 45032 - DNA, 1571 bp, Homo sapiens
atgtggataaattgcagggttttacaaatacatgtctaaatcataacacagagttaggttttaaaggattgtgaaattccttaaataagcaaagaatctagtaataatactactactttgcacttctatagcgcctttgacctgaggatctcaaagtgctttacaaacactaatgaattaatcctcacaacaccccagtgaggtaggtaatttaattttaaaagaaatgattaatagtgtctgattagaagatgcacaaacactaaatatgtcttttattatttttttcgtttggaagaaaatatgaaaataagactcaagctttgcttgacaaagaatggtctcgtgggaagtggggggctaaatcagttttctgtttttaagtagccaaaaactcgaccataagaatcttgacatacttagagttgacatggaaccttacattataatttcattataatttccctttatttactaacaggaaagtcaagatataaatagattactttattacttagtggcagaactaacaagcagaacctgaacttttgacatgtcgtttttcagtattctttgctgtttttcatgctagataaccaaaatgtgaaagtttttatctagagtttagagcagaccttcccataggtgttctctgcccttgaatgtattttttactgaaagttattgactctctacactttacttttattttaaagaaaagtgtttgagaaaaactcgtaaaaattgattttgccctaggcttaacattctgagggtttcagaaagtcttcatttttaatgaaggcattgtgtcattgtcaattctaaaatacaagtttgtcaattaaaagctaatttggaactattttgcctgagaatgaagtcattttcatctcctgtggtcgtttgttgtccaagtcaaaatcaagtgtggaaaaaatggctgaaaatttttttaattgggggaaatgtttgttttaatatgggtttagtaatgtagtcagaatattagtatttagtattttcctaaaggctgttagtaatacattaatttgtaattaaattccaaatttaatagttactgaaattactcatttacttgtattagaaaataagacaaaattattttaaagataatcatttcccgtgattcttttctgaaaccccactgaagattctaaagtgctaatattttaactacattttcttgtaagaagaattgagcagaataactttttgggaagggccattgataggaaaaataggacctccttttcatgtgtctcattcttcttaactatatttaagaattctagatggagagttttgtagaaactcagtaacatgtcttttgagaattacttagtggtgtaaatatcagcatgtttttaagtgatagattaagtaaagatgatgatggtgattgactcttcacttctgaaacttgatcttgactattaatttggtgtgttttgcctatttaattttctacattttaaagccctgtcttagagtttctaatacagtattgtcttcagaatctatgtcattggtcataaatatgtatactt

SEQ ID NO: 45033 - DNA, 1305 bp, Homo sapiens
aatatggaaaaaaatgtgaaatctgaaacacttctggtcctaagcatcttggataagggatactcagcctgtaaaagcacaatggagttacttatatttagaagtagctgttgaaaaatgttaagtgaaattctttcagaagtttgcctttaagtcttgactattcttagtatgtttattgcagaaaataggaaaaatgtgtatcatttccacaaagaataaaatcaaaaccatcccataacaggaatgaaaaatgaagacctgtgtgtgtgtatgtatgtgtggttttctcagggatttttgttttgttttacagaatgagactcatgttgtacatatcactttgtaatgtttagttttatttactgtcaatgttttctcaggttgaaatattgcctcccagtcagggagatgaagagactgttggaaccattgagtagaaaggggcacttgaatagttgggaagaacatactccatcttataacttaggtgacaaggttcaataaacttgtggcttgtgggaacagcttatacttctaccagtagtatgtgactttgcctttctgtcactaaaacaatggtcattatcacatttttaattttttgttcatttaagggaaaataatattgcttagttttggtgggtgggtagatgtgtgtgtgttttgttggggatttttgttttgttttacagaatgagactcatgttgtacatatcactttgtaatgtttagttttatgtactgtcaatgttttctcaggttgaaatactgccttccagttagggagacgaagagactgttggaaccattgattgggttacttccaccttttggctcttgagaataaagctgtaatgggcatggctgtccaaacacctctctgaggtcccattttcagttctttgggataaaatccagaagtgggattgctggattatatggtagttctatttttagcttttttgaggaatctccacgttgttttccatagtggctgcaacatatgtgtggtatatattttaaaatctttatttaaatatacactgaaaagtacataaaatactagcagattattacatagcaaacatttaggtcaagaaatagaacttcctacgcttccacaaacccttctcttttcccttcctctcctttatgagcctgtcttattaatgattattttggcctgcagttttagaactttgaatagatggaatccacagtttatccattatgagtaatgttgctgtgaacattcttactcatgttttttgctgtacaatcatgagtagaaatattatgccc

SEQ ID NO: 45034 - DNA, 1423 bp, Homo sapiens
aaagatttgtggagctttaaagtgatactggagtatttatatatgttaatggaataggctgtctaattttgtgtatgggtatggtgatgagaccaaggctctgagtctgatttttaccccttgtgtatccccgatatgtggatcgttttgtgggacatgtattcttaacattggcagacttgccctctaataactgataactgctgtccaagggttcaaatacaaccatccatgaatgaacaacccagatcatcaggctgctggaaaaaacaacccaaaacatagactttcaagatgattcagtgaagtttccttttgatatggagaatagtaataggctgtttttattatcaagaagttctaaacatttcactgggtaactcacttttacttaaaatagttgactgtcaataatatctcattctattttttacttaaactttttccataggtggttctttgaactagactttcaaatttttttatgaaaatgtttttaatcgtgtgataataggtcaaaagatgaaattctgaacatgattataattctcacttttgctgagatattaatgctaaccagagtagttcaaaagtagtccctttatgagatagcttaaattacattttttcaaagtgatactaaatgaaattagtcatcagtgtgtgccaggttcataagatgagaaagcaaatttaaggcgagtaagcagttgttgatgggggtgcatggggccattgctgggtagtgctgaatatggacttgattggtagcaaagctgtctggaacagtggtcttggggtgggaggtaggggtcaaatggtatcccttcttttataagagctctttttttaagctttcagcagcgaaataaccaaaaggcgggcagcagaaaggaaaaggacaatacatcatattaaataacagatcggggagttgaccctaaagtgggcataggaagaaggtgtgcctcacctagctctttctgggcaagactttatcattatttttagatgaacttccttattatgggtgctcagttttttttcatcagtttttttcatagactataccatcaaatacataagagtaaattagcaatcaaattgatccatatttaacgtcattatttccctaatgaattgagcttatttattcagctttatttagccttttcccccgttaagttttctcatttaatccttgaaggcctttagaaatataaaaaacagaatgtaattgtataaagacacaactaatggggtattgagaatgtgcagggtcctttggaattgattacatatttgattattttgaaatatttttcaacaatggtccatatatttttgttttcattttagaacaaaatccagtctcatagcagaggagaatataatgtttacagcaccttccagagccatgaac

SEQ ID NO: 45035 - DNA, 1060 bp, Homo sapiens
aaagcaacattcacagcgatgcagtactgccatctaatccggagacccactgaaactgaccagttactgtaactatgtcctttatggcacagaacaaagtcagtctggttcagtatccagcatttagttgtcatctcttgttagtctcctttattctgaaacagttcctcagtctctccttgtctttcatgaccttggcattttgaagaacacaggccagttattttatagaatgtttcctcatgattagattcaggctatacatttttggcaggaataccacagaaatgctggcctaatgatacctttttaaagtttcaagtagccacagcctaggtgtcctaatacattaaaaccacgcaaactcagatgatatggggatgtcaatctaaattacacaagccatttttaaagaaatacagttttgtcatcttcaggggcacgcattaccttgagtttgattaaagttgttgccaagtgtcctttgggaattgacattactaaatagataataatttgtactcagtaggtgacctttgtatgtaagtattactttgaacaattccccagtatcctgtaatccttatttacaataataatttgaaccattggtaagcagcggtagcagaccctttccaaattaagagcttcaaacttacgaagttttgtttgtgaggatacttaataaatgtcgagcagtaatgggtggcaaatagaactgacaaggaagtgtcttgggcagtttaaaaattttgccacccctttaaactgatacttttataaatatttgcttaaaatgttctaagtggtaaaagtaaaatgatgttctgttaagaaaatattacagcctgggcaacatagcaagaccctgtctctacaaaatatttaaaaattatctggacatggcagcatatgcctgtagtcacagctactcaggagactgaagtgcaaggactgcttgaacccaggaggttgaggttgtggttgcagtgagctgtgattgtgccaccacatttcaacccgggtgacagagtgaaaccctgtcttgaaaaatacatat

SEQ ID NO: 45036 - DNA, 1098 bp, Homo sapiens
tgttaattatttttaacaagtgttcttttacatgcaggaggagaggtattggttctctatgaacatattttgaatataggttttattaaggatttcacaatctataaatgctactagtttttttttttttttttaccatcatgagggtattggatacattgtgtctctatttaactcattatgtgttaatgaaattgttgtaaatgggaaccaaatttgtagaacttaatttctactttttagagtgcttaatttcatttttgccttactaaatagtcaaagacttataaaacatttttaacaagttagaacttttttgttattcagtcatataaaatagcagaaaactaacatcaagtgacactgcactaaatactttttttgtattttactgctatcaaatcagaatgaaatatactttaccatagatatttttcttctatttttggttttccaaagctatatgaaagacaaatttttaaaggtacagcgttcaaaaagtgcttaatgaactccaacagctgcctcaaataaaaatctgtatatgaatacattttccctaagcggtgatacattatccaaagatgaagagtgctcctatttttaataggtagaatgtacctttgtcagtcttgcagaaactttaatggagaagaaatggactttatttttgaaaggtgaaatgaacaggcatttatattattagagaatggtagtcttattttggtggaacataatgtaacaaccttgaatttcagaggactctgagtgcttctatgtccactacctattgttctattcttcaataatgaaaaagaattcaacgagccgaccgtgattccctctactacaaatattatgtcttgtaagttagcatttttagcacacaggagaaattttatgtaataaaattactgtatcttttggatttaacaaatttgtatttgaaacacattctatgtctgataattcttaatggcacttttactaatttatttggggatcttgggtacattcttaatttgtgtttattcttcacgcttgacttgcaagtgggatattcccctgccacaagtgtcaaacagtgatattcttcct

SEQ ID NO: 45037 - DNA, 1037 bp, Homo sapiens
acttctcattttggttgacaggggcagggtagagacgtcacaatattttaaaagctccccagccgattctaatatgtgccatgggtgaagctctaatgcattccaaattgttaggaggagtaaacagtttagagaagaggttggtaccagtgtgaagaagcatatagaagcagagcaatgcttccataggattcttgactttgtcaccctgactgccttgacctggtcacggctatgtaaggctgacccttaacttgatgtgtagctgtgaacccaacagttatgagcacaaagatagtaaactgaggccagtaggagtgcccagttcgggttgactcctgtgctagttcaagacaaaaatttcctaaatatatatgacgttggtttgatacagaaccagcttttctgttttcctgtccccatttaaaaatctcctatgtcaattatactagtctaaaagactcctaggcctaatctgtctgataaatttctgacgatcttatttctgagtcagtctcaccaacgtctctatacattaattaacattatatacatactcttgataactttaatagttaatatctattcttttcagcaagttaagccccaaatattttttatttctattttagattttgggggagggtttgtgtatgtagtgaaggatccccagtgactttcagtttttatacaagaaatcattaataaagctaagaaattaacttagcacattctgttcatctcttgtatcaagtgcagtttgtgatcatgttgtttttgtctaaaaacttatttgtaaatttttacagttctaagaatgtattttgtgcaatcataaaggttttatattaatatataagttatataattcactctgaaatatctcaaagcaaatatttctgaaataagtaaaatagtggttctcaaagtttttggtcattacatacctttacattcttaaaaatcattagggaccccaaaaaacttgtttgtgggtttatatattttgatatttactatattagaaattaaaactg

SEQ ID NO: 45038 - DNA, 1034 bp, Homo sapiens
ttattttattatttatttatttatttatttttgagacagggtctcactgttgcccaggctggagtgcagtggtgcaatcccagttcactgcagccttgacttcccaaactcaggtgatcctcccacctcaccctcccaagtagctgagactacaggcgtgtgccaccacgcctgggtaatttttttatttgttgtagagacagggttttgccatgttgcccaggctggttttgaactcctggctcaagcaatacacctgcatttgcctccgaatatggtggaattacaggcattagccatggtgcccaacctgcttgaagtttgtattactgagtgtgtaattttcaattgtttaaggtaacaggtatacaaagtaacaaatgaatatataataagctcccttttccaatttacaaaaaaaaaaacactgaaaaaataaatagtttagaaataaagtcataaaaaccattatatagcaaagcctgtggatgatgacaaagcagtagcctggataaacgtgcagcttcaaaggtactgattagacagtaataaacacaaatgaactaagcattcaactgaaaacagctttttaaaatcctccccaaattaaagaaaggccaatccaaataaaaggtacaaacatcaaaaagagatgactattatttgcagttactacaattatctactataaacacaacgtagagaatcaatggaaacatccagtagtccagtaaataagaataaaacgaagtgatacctttgctccttatttagacaaaatttagattttccactgttgctagggatgtgggaaacaggcacttgaatatagtgtcggtggagatataaattggtcaactttttaaaagttttagttcttatatatatataatagagatgggggtctcactaggttgcccagactggtctcaaactctaaggctcaagtgatcttcctacctcagcctctcaaacagttgtggttacaggtatatgccaccacacccagttaaattggtctatttttgagagca

SEQ ID NO: 45039 - DNA, 1098 bp, Homo sapiens
ggtaaacaggtttagggaggccagtttggataacattgatgggccctggagcatagtggctgtccctaaatgtctggttcctgaccctggggtgattagggtaggtggatattggccctgagtttaagagcttcctgaaggaggaggatggagtgtgagctctggattagttggtttgcatatgaaagacatgcctgcaggagagtcattttactatctctaggaattggttagcttgggaggtgcagtctctccaggatcggcaaggccccagatggcaaagcatcagaaaaacagaatagaaaggcatgattcatatggcactactagctggcaatagtaggcctaagatcgttataagattctggcctcatatatatataaatttaaatctatctatctatctatctatctatctatctatctatctatcatctatctatctatctatctatctatcatctatctatctatctatcatctatctatctatatatatatttagagacaggatctctctctgtctcccaggctgcagtgcagtgatgtgatcatagctcattgcagccttgaactcctgggctcatgtgattttcttgagtagctgggactataggtgtgtaccaccacacctggctcattttttaattttttgtagagacatggcctcattttgttctccaggctggtctcaaactcctgggctcaagggatcctcctgcctcagcctaccaaagggctgggattataggcatgagccactgtgctgcctataatttttcttttaaaaacttgatgcatgttcagagttatagtcacatcactaaaaccaatggagtccaaaactgcccatccaactgctggatttttaaattttaaccgtaatttttttttttttttttttttacaaatgaattatatttctgacaggacatatgattgtgccaaagctggtggtgaagatggctggaaaagaattaactggggccgggcacggtggctcacacctgtaatctcagcactttgggaggcagaggtgaggggatcacctgaggtcaggagttcgagaccagcctggctaacatgctgaaacctcgt

SEQ ID NO: 45040 - DNA, 1050 bp, Homo sapiens
tcttttgttgcttgtacttttggtatcctatttaagagcgtatttcctattccaaggtcacaaagacttacccctgtgttttctcctggatgtttcatagtttttgcttttacctgtagattttggatccattttgagttaatttttctatgtggtatgagacaggggtctaacttcattattttgcctgtggatgtccagttgtcccagctccatttattgattagcaaaagcattttaggagatggcaagaaactagagacaaaacattgccacacagcattagagaaaccactggtgccaaaaaggctgcatcgggagtgaagtcaatgaccacagctgtcaaatgttctcaggtgaagaggttgagaggactcctggagatcccagatggagaaaagatggtagaagaattgaggcttgcaagaagtgacgtgctgctgcggtggcagggactgatgggggaacccagtgacagcctagtgacaagagggtcttaattaatgcaactgaaaagcaggtctggtgagaatgagtaacagtgtgggaggagaggaatggaagagcttaggagttaggaattgggaagaagctgggaagtccatgggctttgaaggtccaaggaatgaaatggtagtgggctgttaaggatattgaagatcttaggaacagaggagttcaatgagcaacaacaagactggttattggaattattagtgacaactagtgggtgaatccttcctagataccagacaccgtgctaagccatttatatggactatttcacttaatattttttttatttttgagactgagtcttgttctgtcactcatgctggattgcagtagtgccatcttggctccttggagcctccatctcctaggctcaagtgatcctcccaccttggcctcccaagtagctgggactacaggggcataccaccacacttggctacattttgtagaaatgttgtccaggctggtctcgaactcctgggctcaaatgatccaccccccttaccctcccaaaatactaggattgtaggcata

SEQ ID NO: 45041 - DNA, 1055 bp, Homo sapiens
caccacacccagctaatttttgtatttttagtagggatggggtttcaccatcttggccaggctggtcttgaactcctgacctcgtgatccacccgccttggcctcccaaagtgctaggattacaggcatgagctaccgtgcctggccattttttggctttttaataatagccattctgactgatgtgagatggtatctcattgtggttttaatttgcatttctctagtgatcagagatactgagctttttttcacatgctttttggctgcctgtatgtcttcttttgaaaagtgtctgttcatgtcctttgcccagtttttaatggtttttttttttgtaaatttgtttaagttctttatagatgctgtgtattagacttttgccagatgcgtagtttgcaaatattttttcccattctgtaagttgtctgtttactctgttgatagtttcttttgctctgcagaaactcttaagtttaattccatcccatatgtcaatttttgcttttgttgtgtttgcttttggcatcttcgtcatgaaatctttgcccgttcctatgtccagaatggtgttgtataggttgtattccagggttttatagttttgggttttacatttaagccttttatccatcttgatctaccaaataattaaggagtaaatcataccaattctctataatcttttccagaaaacagaagcagtggggatacctcctaattcattctatgaggccaaaattaccctaataccaaaaccagacaaaggcattataagaaaagaaatccatagaccagtatctctaatgaatataaatgtcaaaatcctcaaaaatattaacaaataaaatgcaacaatgtatacaaagagtttctacattagaaccagtgggatttactccaggtttacaagagtggttcaacattcaaaatcaattagtacaatcacatcagcacgctaaagaagaaaaaaagatcacatgattataccaatagatgcagtaaaactatcgacaaaattcaacatctattagtgatagatagaaagctaagta

SEQ ID NO: 45042 - DNA, 1057 bp, Homo sapiens
atacaagaagcaagaaaagaaaaaaaaggtatatagattaggaaggaagaaataaaactttgtttgcatatgacatcactgcctatgaaataaatcccaaagaatcaactacaataaaaactcctggaactagtaaatgattatatcaagattgtaggatatgaggttattgtacaaaagccaattggttttctatataccagcaatgaacaattagaatttacattaaaaacatactattgtttatgttaacaccaaaaaaattagatataaatctaacagaatatgtataagatctgtatgaggaaatctacaattccctatgcacaaaatcaaagaagatctaaatatatggaaaggcttggtgcagtggctcatgcctgtaatcctagaggccgaggcaggtggatagcttgagtcaaggagtttgagaccagcctgggcaacatggggaaacctcatctctacaaaaaaatacaaaaaattagcttggttggggggcgtgcacctgtagtcccagctacaagggaggatgagttggaaagattgcttgagcctgggagacagaggttgcagtgagccatgattgtcagcctgggtgacagtgaaaaaaaaattatatatatacttgtatatgtagtacttgtataggtagttatatatattagcatatatacacatatactatatatacatatacatgtattatatattatatatagtatatatagtatatataaatatatagtatatattatatatataaatatatatataagtatatatatagtttatagtatatataaattatgtatatactatatatagtatatactatataaattatatatagtatatatatactatatatattatatatactatatatagtatatactatatatagtatatactatatatagtatatactatatatattatatatactatatatatactatatatagtatatatagtatttatataatatatatagtatatatatactatagtatatatagtatttatataatatatatagtatatatatagtata

SEQ ID NO: 45043 - DNA, 1027 bp, Homo sapiens
ttgtatagtggtgaagtctgagattttagtgcacccatcacccaaggagtgtacattgtacctaatgtgtagtttttttttatgcctagccccattcccaccctccttcttctgagtctccaaagtccattatatcactctgtatgcctttgtgtattcatagcttagctccctcttataagtgagaacatacagtgtttagttttccactcttgtgttacttcacttagaataatggcttccagctccacccgaattactgcaaaagatattatatcattctttatcattctgttttatggctgagtagtattccaaggtgtatatgtaccacattttcttcatccactcattggtcagtgggcacttaggctggttccatatttgtgcaactgtgacttgtgctgcaataaacataggagtgcaggtgtctttttgatatcatgacttctttttgtcccaatctttaatgcagtatgagtgttctgtggctgctcccacagaagtggttagggaatagtgaattttagggctgccccaggattgggaggttgcagggtaagagtagcagaatgatgctgctggtgagagtagtccaggaaatggaccatgggggcccagctgtgaatgaagaggttgactcatcacatcttgatgatgtggttaggggatgagggctcagatagcccttggagtgaatggctaaagataagggcaggccaaggtcatgggtcagcaaagtgaaggaactgagggtatgtgtgtatttcacacaaattttaaattcaaacaggattaagttaggagttgtggtagaaagaatactgctgctatgataaatagactccactatgtataatgactcgagcacaaaaggagtttatttgtatatcacataatagttcaaggtgggtgtttctgttgagtgggcagagaaaggtacagggtccccgctccatgcaattaactggaaagtcaaactgctggtggttctaacatcttcaacacacagctcccaaggttgtct

SEQ ID NO: 45044 - DNA, 1029 bp, Homo sapiens
cacacctgtctgtatccatctttatctttttatcatctatctctatctatctattaatatatatttatctatctagcatgacctgggataggtgaattctatagccaggtggcctccagaagcttacgaaatgatcgtctaccaaatctaccatctatctatttccctacctacctatcatttatctaatctatctatatattgatatatatctatctggtctatatctatcttgatatgacatctgtctgtacctatggtctatcatctctatttaatccatcgtctctatatctattgattatcacttatctgttttacttatcctaatctatcattaatctatcatctttctaatctatctgtatatatctattgtttatctaatctatcaattgaccattcatctgttcatctttcatataccaaagatgcagttgcatgccacctgattccagatgggttatctcacttcactgtcacttagtgagatcaggaagaagtctcaaggattgtttcaacttcaagcctatgtacatgagtttgcgttttgaacatagcaggaaaaacaacgatgtataagaagctttcttattggctgggcatggtgacttatgcctgtaatcccagcactttgggagattgaggtgggaggatcacttgaaggcgccaggagttcaagaccagcctgggcagcaaagtgaagccttgtctctaccaaaatcaatcaatcaatcaatcaatcaataactaaaaataaaaataaaaaattagctgggcgtggtgacacatacctgtagtcctagctgcttgggaggctgaggtaggaggattgcttgagccccagagtttgagggtgcagtgagctatgattgtgccactgcacttcagtctgggagacagtgagaccccatcttaaaaaaaaaggtataatgtagcttatagggcttataatcctgtaagaagacttcttatgcaagaaaataaaaattttacttttcgctattttttttttcctcctccaaataa

SEQ ID NO: 45045 - DNA, 1086 bp, Homo sapiens
aagtccttaagttatagttggattcccttcccagcaaggaaccaacaggaaggaaaacgaagtcaaacccagtctttgcacgtggaagcttgtggcgtgactgttatttttttgtgatgttctgtacagccctgtaatctcttatttttggcaagccaactctgaatctgtggtcccgtagccccaggcaaccaaaagctgagacaaacagaggaagtgtcgttattcacatgtttctctggccacctcatcgggctggacgctgccggctgccacccgtcgctgagctggagctccccagagtgcagcctggccaggcagggactgttgaccctggcccctgtaggaagcacctctggcttgtcccccagcccccagggtccctgccactcattacttctctgcactctttctgtaatttgttcatcgcctggaatttatttctggcagactttgtggtcaaaactgggaagtgtctgtttccttaaaacagcctttcctcaaacccaggaagtgaagtagggagctatccttcctcacctcctccctgtcacatgcacatgggcatacacacacgtacacactcacccatgtgcacacacacaggcacacacatgagaaagggacggggaaagctagggtgtccaccccagcctgggctcctggtatccctaagggttttggaagaagagtttcagtttttcaaagcctgctggagatgtaactgtcgtgatgtttcgtgggatctgcaagagcctgtagcgtcaggtttctttccttttgattgggatgacatgaagtctgttaatgcgggatcgtttgtgttatctgctctgataggtggttttacttgcatttgatttttgatagaatgagagatgaattgatttgttcctgatacattctgttgggatacagtccatttgataggaaggttgtttacatcacagtgtcctgtatttgggggctgccctgggatgtgaaaagtctgtttatgtctgttgacagagggtctctatgcttcttccttttctagcatttactcttatgttacaattagtgcctgcttgctgtgtgaacaggaca

SEQ ID NO: 45046 - DNA, 1072 bp, Homo sapiens
tctgcatgggggaaaccttccccataatccagtcacctcctacaggtccctccttcaacatgtgtggattacaatttgagatgagatttgggtggggacacagagccaaaccatgtcattgctatttcaaccagagaaattgaaaccatttttacgtgattaggcccagcagctgttgccctgagaacttcagaatccccagcaactgattatggagtctccttgagggctggcagatccagggatgcaccagtatgggatgcagtttttcagctgatttagaggcccctcttgtatgccaggccctgagtccttttagccatatgacagcccagtgaggcgaggaggggggatgcagggggtttgaaaggcttggatagtggcagagcgtgattagaactcaagcccacaggcacctgccggctgacgtctcctctcatggtgagtttgtcaagagggatctgttgtgtgttaaaccctgtgtgggtgataaagagaacaagtatggaacaattttgtgtgaattttagcttcccagtctacttggggaggtgctgctgatggaatgaaacacatcccagtgtaacttctctgtagtttggtgacctatccatcactagcatgatggttctcttggatttgaactttccaaaacatgttcctaacccactaggcctttcttcccaacccaccatgtgagaccacccagtaggattttccctcgttttccacccagaggattggaaaggacactagggagtgcagacatctggaactgaaccatctgtggctgagaggagtggcgactgagcctgcgtgacaatccgggcagtgcctggcattgtggggatgcaaaacagataagaaagtgatcctttctgaagggactgtggacaaggcgaggagaaagaggtagacagaaagtgagtgtagagatagaatttgacagtggctctgagctgtaagactgatgtctgggaagagagtggggacttggagatgaggataatgaagaacccttcacagggacgggcactttccagcaggccttgtagaatgacagatgtcctga

SEQ ID NO: 45047 - DNA, 1044 bp, Homo sapiens
ccaggcatggtggctcatgcctgaaatcccagcactttgggagagcgaggtgggagggttgcttgagcccaggacttcgagcccagctgggcaacatagtgagatctgtctcttaaaaaaaaattagcctggtatggtggtgcatgcctgtcttcccagctactcaagaggctgaaagaggaggattgcttgagcctgagaggccgaggctgcagtgagctgtgatcactctactgcactctagcctcaatgacagcaagaccctgtctcaaaaaaaagattaaaaaaaaaaaggaagcctagatctgtggctgtattttgttgaaaaggacagccaattgggccaaatgatatttcctaaagagggattgccacccctgcaaattaaacgaatttttttttgttttgaaataattatagattaagaagcagttgcaaagatagtacagagagaggtcccgggtacccttcacccagtttccctcatggttacatcttatataaatgtagaacaatatcaaaaccaggacactgacagtgtcacaatgtgtgggtatagctctaggctgtgtggccacctgtggagtcatgtgaccatcaccacaatcaagatgcaggtctagtccagcatttcagagaccaacctcttgctgctcctcccctccaccctccctaaccctggaagaacccatctagcccctcatctgttctccatctctaccattttgttatttggagaatgttatagaaatggagtcatacagtgtgtgacctttgagacggtttgtgtttcacttggcacaacgctcttgacatccatctaagctgtcgtgtgtatcaatagtttgttattgaaaagtaactttttaactcgtttctgctgtgtgcctcctgtgcacacctatgctgtctccctcaggtcactgggaagatggatgagaaccagtttgtggctgtgaccagcaccaatgcagccaaagtcttcaacctttacccccggaaaggccgcattgctgtgggatccgatgccgacctggtcatctg

SEQ ID NO: 45048 - DNA, 1051 bp, Homo sapiens
acacacttgaaaatatagtatcaagtgtcacatattcagtagtatataatacttgctacccatatgaacatgtggattcatgggcagtaataattccagagtcctctggggtctgtgattccaggttaggagcactggattgggtaagaaaggtgagaggcgcgcacatggctagcctgggagtgaacccacatgcctcattagcacataccggggatgcgttgggggatgtttcatgagaaataggagatgtagattctaggccagggccatgaagttggctgggactttggaaatctacataggggtttggtgccaatcacaagcccaggagggcaaaaggcctgaggagtggggctgcagtcaggctcctgctgcatgtttgggctgggactggctcaccaaggacgcttttccaccttggatccattcctgtgatcctcccaacctcagtgtggcctcagggcccatatccaagcctgtctcagggggctctccccaggacactctgcagtgaagatcgaaacggaaatgggacctagcaaccttgcccaggcctctctgggcctccacgaagtacaaagaggagccccaaggagcgtctcactttgacctagtttctctccttatctgacgtgactccctgcagtgacgtttatcagatggagaaggacattgccatggagcaagagaggaatgctcgctaccgaacccccaaaatcttggagcccacagccttccaggaacccccacccaaggtaagccaagccatggcctcataagtcctgtgagtcaaagcaaagccaggtccctgtctgatccatgtcccccttactgcacaggcaggatgccccctacagccctttctcagtccttcacccagcatccaccatcactgtcagcgtgtcacatcagtgccctggcaggtggacttggagatagcagccaccttgtgggatagctgggtcaagaatcattcctcaaaagtgtcccctgaggggctgggcttctcttctaggtgttttcttaggaacaaatgagatccccctga

SEQ ID NO: 45049 - DNA, 1036 bp, Homo sapiens
aaaccatagtgagatcccactttatacccagtaggatgactgtaatcaaacagacaagtgttggtgaggatgtagaggaaactgaaacccttgtacattgctggtaggaatgtaaactggtgcagttggtgtggaatacaatctgatggtttctcaaagttaaactgttatgtgacctagcagtttcactcctaggtatatactcaagaaaacatgtccacacaaaaccttgcacatgaaggttcatagcaggattatttataaaagccaaaaaagtgtaaataatccaatctgtgattaatggataaatgtgatatatcgatacaataataacaatgggatgttattcagccataaaggaaattctggcacacactgcaacatggaggaaccttgaaaacattatgctaattgaaataaatcagttgcagaagatcgcacattgtatgattatatttacataaaatgtccataagaggcaggcaaatccagaggcagaaagtagatgtgtagtttccagggactgaggaaagatgaatggagagcaactaataatgagtacggggtttgggatgataaaaatgttctagaattagatagtggtggtgactggacaatatttgttaatatacacaaaaccactctgttgtacacttttaaagggtgagtcttacagtatatgagttatatctcaaccaaaaaaatgagtgtccagttttaattcccatgtacacactttgaactgacactatgtattgatgtttaaagtttccaatgtcacaaacaagcctgtttgctaatttacctaatctaggttatatggatgagtttcacaacacttgctctctcaatttctacacatatttcatcgtgtagataataggttacaaaccagtaagcacactttaaccaaaccaaagaccacactttggaatagtgttattcaagcctcttgcattctatgccacttttaaaaaataaatgccaacaccattatggggaccggatcttgggccataaatcctagtcaatcaca

SEQ ID NO: 45050 - DNA, 1057 bp, Homo sapiens
caaagccaggcgacggggatggcagcagaaggttctctcagagggttgctgaccacagttcattcagctctgaaaattccctggcagggacatctatgaagataagtttttctctgcaagcttatatacttctgtactcatttcttggaccttaatatgtaaggtcttcttatcttgaagaccttacatattaagtggaattgagctgtaaatatcttagacttgcctctctcccccataaaaatttgccactaagcttttcatctcctacagtttgggtcccctgaggtatatgaagcaggccaactaagatctgcatagtgaacttttagtatgtatctagtttgacattttcatcaattgaaagtaaaaattttgttttattcttggtgtaacattttatttttgcagaaatgttctagtgctaatggtgcttgaatgtaagttttccatcattgggttgaaaatagggttgtctagtccagcgagctcagtgcagatcatgatgtgtttgtagaaaaagccctgtggaagagaaatcctctttcagtaatattctaggcagtgccagtgttgttttgtttctgttcttgaatttacctcaagagggcaacgaacactttattttcagataaaaatttatatatgatttgggtcttcattgcaacacatctcatgaatgcctcttgagaagtaatgaaagtacaatctgggagccataaaaccatccataaattacactgaattctgccaacacacactttaaatgttttgctcttttctctcagtctctatatttttatgagatcatctggaaaaaaaaaagacctgatttgtggcgtgttgttgctttgttaaggtaaagttttactacaaacccctcataatagagtttgtatttgttttgagggaaactttgtatttgaggaaataatagtctagtttgtgctatagaactagagacagaaagtattttcaagtgttggcataattgtgaaataaaaagcagcccagagaagttgtggttttgacataatgtggccctcggaaatgtttg

SEQ ID NO: 45051 - DNA, 1026 bp, Homo sapiens
acactataccacttcacttcacaggtaatgtgatacctttataataacaaaataatcctaattcctccctcctgtcctgtgtgtcattgctgtcattcatttcacttaaatacatgcataagtaagcatttgtatatatgtatgtatatacacacacataagctatctatagcagcatacataattgaatacattgttgctattgaacaaactctgttagatcattttaaaataagaaaaaggaaaggttttattttacccttgtttttgttcaacatttctctttatgtaggtctgagtttctgacccatatcattttccttctctctaaagaatttcttttaacgtttcttgcaaggcagatctattagcaacaaattccctgaatttttgtctgagaaagcctttttctctcctttattatcctttgaaagaatactttcataggattcagaattctaggttggtggcgggtgttttttttcctatcagcactttaaatacttcactgtactctcttcttgcttgcatggtttcttaggggaagttggatataatttttatttttctctatacgtaaggtgtttccccccctccccagcttctttcaggaatgttctttatctttttattttctgtagtttgaaaatgaaatgcctacatgtaggttttgggggcatttatcctgtttggtattctctgagcttcctggatctgtggtttggtgtctgatattaattctgggaatttctcagtcacttgtttcaaatatttcttatattattttgtttcttctctttctggtgttcttattacacatgttacaccttttatttattttagagacagggtctcactcttacccaagccattctcccacctcagcctcccaaataatcgggactacaggcatgtgcctccgttttttgtggggatgtggtctcattatgttgtctaggctggtctcaaacttctgggctcaagtgatcttcctgcctcggccttccagagtgctgagattatagg

SEQ ID NO: 45052 - DNA, 1027 bp, Homo sapiens
tgagcggggtgatttccattttctaagtggaaatcagcatctgccctctttctgccatatctatctccctagctttttatcataatctaaataatagctcaatttcagatcatctgcatgtagagtttctcaaataacaagaagagacttgctcaaattaacagggaagaacctttctcttgtcagctggtatgataggtctacttcatttctatacaaggggtttcttttggcagtgggtttctctgggaacagccctggaatgccttcttgggactctagtgagttcagaagggaggatgccgtaagcattacttcctgtcaccctgcctggaagccccaccattgctctctataggggaaactacgtacgcctggactttctgtttgacttaagctctggtcacccttcaaatgaaagaacaagaacatttgctgtctggatgatgcatttttatttctccaatttagtaatctattactgttctgtgtaagtttctgaatcagatgccggagaagttagtccattattaagaacttcaaggagggcagatgtgaagagcttattattatatggtgtttttaatgttgtgtttttccggtttttgcattttgactttggtttctctgatgtgagtacagtgatgtgtgtgcgtgtgttttagttttttgtaaataggcagttattctccataaattaatccttagaatgaaaatctctttatgaccgtgctggtgtctgtgggctgcattttgtcagcgttacctcattggattagctgagaagaggcactgatttggatgggagtggggtggggaggacgggtggccaggattccattcctgctttgccagtagctcttcttgtgatctaggataattttacttactctccatgggcctttatttccgtattttaaaaaagtggatgtggttatcttttacagttctgactctagaattctaccccttagtatcttctttagttctcagcatgaccaattatgttttcctaattaaattgtag

SEQ ID NO: 45053 - DNA, 1033 bp, Homo sapiens
ctgaggaagcaagccctctccaaaagtggcccaacctatgctactcactaccagctgtctatcagaaagtctgttttaatagtttgttgcaatgttgactccttatcaatgtaacttgaatatgaatagtactgttcttttctctaaatatttgacattgccttaattcattcaatttgataaagcttttctattttagatctgttagaggcagagatttggcaggttattctttgggtgaacaggtattactgaataatgctggaaaatattggtgctgccttccttagcagcaaccaagatactagttttgtggagccttttagtttagagatttctaattccaacagaacacatgcaaggaatttcttattctttagttggcctggcttaagctgttgtctctgaccaacaactcacatttctaagacagtgcctgttagacatagaattgtagtttgtggccatgggatcatttccttatgcaccccatcctctagtccctaagcagaccactgtccacttgtccaccattcatgaataaattgctggggttcagtaaagcagtccacatgccccagatctctacctgcgtgatctgttgcctcactgcaaatcctaataattagtgtttgttctggttatttattataacataccaccccaaagtttagtgacttaaaacaacaaccctcttatttccttaatgattctgtgggtcagaaattcagcagggcatagaggggatggttcctgtctgttctgtgatgtcaagggcctcagctggggtggcttaaatggcagccagttggctgggatggtgtgtctgaagtttcagttctgactggggctgtccatatgagcagcttggttcttgtccacctgtctgctccatgtggcttgggctttttaatagcacaatagctggggttctaagagggaggagcaaaggcctggtcttagaagtcctagaatgtctatattagttatctgtcattgtgtaataaattacccaaaaacttaatggctgaaa

SEQ ID NO: 45054 - DNA, 1032 bp, Homo sapiens
tttccaattttccttgtgatttcttctttagcccattggttgtttaagaatgtgttaatttctgcatacttatgagttttccagtttccatctgttattctagtttcatttctttgtgatcagaaaaggcattttatataatttcagtctttttaaatttattaagacatgttttcctgacctgacatatgatctatcccggaaaatgttctgtgtgcacttatggaaaatgtacattctgctattagtggtagcatgttctatatatgtctgttagatttaagtggtttaaagtgttgttctagttctccctttccttattgatcttttgtcttaatttttttattaattgttgaaagtggatattgaagtatccaagtcttaatgtagaactatttatttctcccttaagtcctgtcaagttttgcttcatatattttggggctctgttgttaggtgcatatatgttgataattgtataaatcttcctgatcattgaacatttatcaccatataatggtcttctgtctcttgtaacctgttttgacttaaaatttgttttgtctgataatataatcactctatgactcttttggttattagttgttttcttagtggttaccttggggatcataattaacattttaagcctccagtcagtttgaataataccaagtgagttttaatagtatgcaaacactctgctcctatacatctctgtccctccccctctgtattgttattgtcacagattacatctttttacctgtgtatccattaacctagacttaaaattattgtttaatgaatttgccttttaaataatataggaagaaaagaggagttacaaaccaaaagtgcaataatactagcttttatgtttacttatgtaattatctttattaatattctttatttcttcatatggttccaagttactgcctattctttcaattcaggttgaatgacttcctttagcatttcttatagggcaggtttagtagtaataagcttctttagcttttcttaatc

SEQ ID NO: 45055 - DNA, 1050 bp, Homo sapiens
ttatttgttgtaatcagtagatgatgacaaatggactttaaacattagatgaagcaggaaagttcagaaaagagatactctgagattaataggaatctaggtcctgtgaattaaatatgaagctatataaactttcttgtagcaaccagtaggcaaagggccaaagactatatagactttaagagaaggaaagtaacatttgagcaatgagtgtacactgagtgtatattttgtctaacaagacaataatttccttaagaagctcttatttagagatagttattgctaatccttgcaatgcgttcttgaaaacgtgtctgaaaaaagacaaagaatatccctcctgttcgctctgtaggcactgtgtaaccagcatttactttgaaacaacctttagatgatctttctcaattggaaatgcaaaatgttacctgcatttatcaggtgtcaagaaaatgaaatctcaacagaatgatggaatggagccctttctgtagagaaagtgtgaattggaatagagttgctgaacataatcttttgttgcagaacccctttgacaagcccttagggccctcttttctcatcatcctttcttctgggattcagcctgctttcctcttcacagttgccacctcctgcgtttcccaccgagttctttgggtctgattttgcaggcagcccgggaagacagtcttccaagattggaatcccttccctttattgctgtctttcaggacaaatacttagttgattttattttaaagacttttactttttgtcatcaaaagaaacctgataaataatggttggaaatataaaattcctgatgttatacattcataaaaatagaaatgggtaagctttaaagtatctagtcctttttgttttctgatggaatgttaaccaagtaacttagtccgaaatcagctttccagatattctgtattgctctatggagaagtgaatgtgtctcttttcccatacaaagggcgtgagcaactgttgcatagcattcactttttgcagggccctggcccctgaagctgctca

SEQ ID NO: 45056 - DNA, 1051 bp, Homo sapiens
ttcccttctgttagtcaagaccatctactagagggagaaattgggaagattcagtcactgttttactttctccaaatagttatctgcctagtaactgaagcttgggacatggagttcccagtcattgatagttaatgcacagaggacagtttctttccccacttaagccaaagcagttccaggtcccacaatctaagttatcataggtgctagtatttaagttgtcctattagtctgggtctttgagaatttctgaacctgaatttctcttttcctaacctaggctctccacaacaaacataagactatccaatgcatatgaaacaaattgaaataaaagcaaagttaacatcgttactaaaccaaatcaaaatgtgatagcttagaatatacttttttcataccagacctgccttccactccacccacaccctctcagctgaaattgagaatcacacatatttttgcccctggaaaagtacatacaagtcagaaattctaaagctctgtggaaacaataactgggaattattcttatttttcctgtgactttttagggatgatttctattctctgtgcagcatggctgtgtgtaatgaccgttcgttgatgaaatatttcttagtgctacatctgtgttattaaatttttgtactgtctaaaaaataatataatattgtgaagatttcctaatattttagaaccttctatatgtcagttcagtattggttgatagaggtagcatttgtataaactaattcaatgattaaaatgtctaacgcttcatactgctttaccatttataaagtacttttgcatacattatcttatgattcactcatatcatccctgtgagctaggtggtattggaatcattttcaagaagaaaaattctaggtacatagaagttaagtggtatgtttatattcacacagctagcaagaggcttgaatctgtatcttttgacttacttttcagaccactttcacagatgccttctgctacatcagttaatacaaaaatatactattaaagattaaaacacatgcaa

SEQ ID NO: 45057 - DNA, 1032 bp, Homo sapiens
cgggaggcggaggttgcagtgagccgtgattgcgcctctgtactccatccagtctgggtaatggagtgagactccatctcacaaaaataaaaaataaaataacagtgccaatccttgcctagaggatcaaatccaaagcataatagactttcacaaattggcttctacttacttagcattccttaagtctatcaactctgtaaatgccatctctgcctggaaggctcttgtagtatcccctttggtaatatcttaattttcaaggcgtggtgtggatgttatttccttaagaaatctgggatgcctagaagttagtgactctcttctccatactcaccagtgtgttttatatgtacctctatttttgtgtgtatattattatgttggaattgttcacgtttttattccttctgctagaatttaaccccttcaaagtagagcttgtctttattcatctttgtatgcccagtacccgacacagaacctcacacatagtaactgctaaataaatgtttgaattaattcatgaactttataaaccctaaatcccttagaggtggcagtagtaattgatttttgttttagtgctatacctaagctcttaatctcctagggttataaatagttctgtggttggtggggatggtgatggtaattccagtaccaaggttaccacatacttttgaatactagtattttacttttctttttttctttttctattttttgggtggtaggggacagagtgtcaaagtgacttgaattcaacattatgtgtttgtacttataagtggtgtaattaagcaaagaaagcaacacagctttctcatttctaggcctttcatgtttcttctgcatgcatattctccatctttgcttatcaaaattctgttgtacttgatccattgttaggttgaaaaaataaagtaaggtagatagcaaaacattagtatggtatcatcctggtttggttgaaaaacatatatgcatgttcattcagagtgagtgatcgggtggaattttcaccaggac

SEQ ID NO: 45058 - DNA, 1035 bp, Homo sapiens
atgaatatattcactcaacattcattagttcaacacatgtcaattgaatgtctttggtgtgctaggcactattctagatgtcgaagatgagcagtgagcaaaacagagatcctgttcttatggagtgaaaattctaatggtggtggtaaataaatagacaatgtcagatgaaaatgaatgctaataagaacaaatatggtaggtgatagggatacaatataggagagcagagggattctattttctatagagtctttggagaaggccttattgataaggaggctttggaccagggacttgaatgaagtgagaaaacaaatgatgatatctgggggcagagcgggccaggcaaaggaaacagagcagcaagtacagagactctgaagtggaaccacgcttcctaaagtcacagaacaacaggagaccaaagtggttggagccaagtgagtgagggagaatggaaggaaataagatcagaaaagtactggggctgagggtctgagtagctctggtaaggaatttggatttgactctgagatgagaagccattagagggttttaagcagaagaggcatgatcgtgaacacaggagcagcatatctttaaaggattaccttggctgctgtgtggaaatggagatcaattggaggcccctctagaagtccagggaagaaatatttatggctcagactgggcaccagcaggggaggaaatgagaagagttcggtttcttgatatattacaaagtagaatcacaggaaatgctggtagatttcataggtatatgaaagataagggacatcaaggataaccccaaggtttttggcctgagcagctagaagtatagaataaccatttatggagatggagaaacctgaggagtggaagtcaagaatttgctttcagaagggttgaagattgaggtgcctattagatacctaagtgtatatgttgagttggcagttagatatacaaatatatccatagatatattagtattgggtaacatgggaaaattgtagtgtttgcatggtt

SEQ ID NO: 45059 - DNA, 1025 bp, Homo sapiens
attagaaaatttgaaagatttgaagatacaaatcagctacagcataaagttatgtatgtgtttggcaaacttaatgatagtttcttagaaactatttgatgcatataaaacagtaaacagctagttactgggagtctgaagtcttagaaacagatattggcaaaaaaattaaagatgaagggaattcatgacaacggtctccttagttgcataaatgtctgcaacacaaccttgttttctttgtctcgaggctatcatactttttcaagacatacaactagtattttttgctcaactgtcgaaaatctagttgtatggaccacaaacaagatatcaccatttactttatttctacatattacatttgctctccaggaataaataaggttgtgagtgccagatttggaaatccaaactgttagatcgtgatagatttccccataagtaaaaatagttctcatcttgttttgttttttaggttcccagattgtgatgagccatatcctcgacttgtggatctgaatttagctggagaaccaactgaaggagccccagtggcagtgcagagagactatggtttttggtgtccccgagagttaaaaattgatcctgatctgggttattcttttctgcatgtgcgtgattgttcacctccttgtccaaatatgtacttcagaagagaagaactgtcatttgctcgctatttcataggattgatttcaatcatttgcctctcggccacattgtttacttttttaacttttttgattgatgtcacaagattccgttatcctgaaaggcctattatattttatgcagtctgctacatgatggtatccttaattttcttcattggatttttgcttgaagatcgagtagcctgcaatgcatccatccctgcacaatataaggcttccacagtgacacaaggatctcataataaagcctgtaccatgctttttatgatactctatttttttactatggctggcagtgtatggtgggtaattcttaccatcacatgg

SEQ ID NO: 45060 - DNA, 1040 bp, Homo sapiens
cctagaattcttttagcatctttagaaccagtttgagctacactgaaatatatctgtgtgtgtgtgtgtgtgtgtgtgtgtgtgtgtgtgtgtgtgtgtgtgtgtgttgggggggattaatagtgttttctgagaaatattttcaacatacggaaatgaataacaaatgatggtaataacataggtattaaactgtaagctggagtaggagtcctagcttcttttcttactttcattaattacttaactttgtaaccttggatgaacttcacctccctctgcttcagttcctcatagtatgaggatagtaatgaatctacctcctagggttgtttttaggattatgcatgtaaatacttagaagtgtggctgctagtctatggtcacaccaccctgaatgctcccgatgtcttctgatctcggaagctaagcagggtcgggcctggttagtacttggatgggagcagtgtggctactacataataagtgctcaaaatgttggctctgtattgtctattattgttgttgctaccattatttacatatagatacgttttttaaaagcccctagtactaagctttagcaaatgcaatatttgcttcagactttttaaagaagtcatagatttagctgaaacttcctgtgtacccttccctaatcctgttcctcttattcactccccagagacaaccatcatcgtgaatttggacttgttcattcccataaaagcctgtacaattaccaatacatacgtagttataaaaaaatgtttgttttacccagtacataaactatatcacacatacatgtatttctttgactaaattctttaactcaacattttgtttttgagttgcatttattttaatactgcaactctattttttaaaatgtttccttttactaatataaaggaaatgtataacatatttcaaatatatagagatatagaaaataaatatccatgtactcacaacccaactaccttgaaatcttgaaattatggcatatgtatctgtatctgtttgtgtacctatgt

SEQ ID NO: 45061 - DNA, 1028 bp, Homo sapiens
caccacatccagctagtttttgtatttttagtggagatggagttttgccatgttggtctcaaactcctgacctcaagtgatctgcccacctcagcctcccaaagtgctaggattacaggcatgagtcactgcacctggcttaattttaatttttttaattttttgtagagatgagtctcactatgttgaccaggctggtcttgaactcctggcctcctaaagcactgggattacaagcatgagccaccatgcctgatccataaattgttctactgataccatttggttttgttagaatttgggggggctatagaaaacaaggttacagtcttcattagtatttctttttagcaataacaacaaaataggcaattagaccagtgttcatttggtacagtctttaaatcggtcatccaattaacctttaaaaagtaggttatgctcttaaattgtattggttctttaatatgtgttataccagagtatgcctcaaattttatgtagttgaatttgtagaacaaatttggggatattcattttatttttccttttatatgaaattgtataagtacattagcttgacttaaattataaaaaaaaatatatatgaagaagaatgtagaccctataatgttttttgtctttgactttttggcttttatgtacctcattttttctgattgagaaaaagttttgaaaaagtgattcacttgttggttttcattgtggcaaaactttaaattttaagtcatcacactatgagaattgtttgtacacatttataatttttttaaagtatgtaaagtaaggattttttctccattcttcactcacaaaggatagcatttttatggaacctagatttacaaaggaacttgtgattcttttcaatgcttttgtgtcgttttacagctgattaagaaaaaatgtttacatttaattcagctgtatttcctagtagctgtataatcttacacattattcttatataattttgacctattttatatgaaaataattgtattggc

SEQ ID NO: 45062 - DNA, 1048 bp, Homo sapiens
ttgttatttttaatttttttctggctatacagaaaatgtttctggaaaaattccttaattgtcatctgatataatgtagagattgaggccagacgcagtggctcacgcctgtaatcccagcactttgggaggccaaggtgggcagatcacctgaggtcaggagttcgagaccagcctgatgaacatggcaaatccccttctgtactaaaaatacaaaaattagccaggcgcagtggctcacgcctgtaatcccaacactttgggaggccgaggcgggcggatcacgaggtcaggagatcaagaccgtcctggctaacatggtgagaccctgtctctactaaaaacaaaaaaattagttgggcatggtggcgggcacctgtagtcccagccactcgggaggctgaggcaggagaatggcgtgaacccgggaggcggagcttgcagtgagctgagatcgcaccgctgcactccagcctgggcaacggagcgagactctatctcaaaaaaaaaaaaagaaaaaaaaaaaagtagagattgcattagttccatatctccgcagagttctctggtagattaaatgttctctgtgcactaggccaaggaagttcctgttacctttgaaaatcattgtgtttgctctgattgtctacattagctcatatcagtcttttgaacactggttcaaatctgggtgttgggttaggatctgatgagtagagaatagtggaaagttgatataggaaggtatactggtttctggtgtgattctttagctacatttattccttgtcttatgtcatttcactggatcatgtaactgtcctggctttcagaaattatattagatgcccagcctttctcattcagagatgcctgtattattatgttatttcgattgcctaccaaaaaaaaaaaaaaaagaaaaggtttgtttttagttctctgcctctgcaagtctttgtgatcacatttgttaaattgaatctgagattcaaatatttcatttaatattttctgggttttgataatgggatattctgtaagataa

SEQ ID NO: 45063 - DNA, 1085 bp, Homo sapiens
ctccttatgttgcccaggctaatctcaaactcctgggctcaagtgatcctcctgcctcagccttccaaagtgctgggattataagcatgagccaccatgcctgaccagcaacagtctctaattcctgtattcataggtcattttgcacatattacttttctcttaaaaaatgtgttgaaatacatataacataaaatttcccacttaagccacttttgtgtataactcagtggcattcattacattcataatctgtgcaagcatcactactctgacaaaactctcttcccattaaccaaggttaataactcccaattcctttctcctcccagcttctggcaactaccattagacttctgtatctacgaatttgcgtctcttcctatatgtggaatcatacagtatggtccttttgtgtctagcctctttcatttagcatgtcttcaaggtccatccatattgtagcatgcatcagagcttaattttgacggctgaataatattccattgtgtgtgtgtgtctgtgtgtgtgtgtgtgtgtgtatgtatactgaaccacgttttgtttcttcccatgttgggcatttcagttgtttctagcttttggctctggtgaataatacctcaatgaacattggtgtgcaagtatttgcctgagtcctttttacttcttctgggtgttttcataggagtgaagttgctggatcatatggtaattctatgtttaacttcttgaggaactgccaagctgttttccacagtggttgcgtcgctacattcccaccagcaatgtccaagggttcccatttttccacatcctcttccacatttgctattttcctttaaaaaaaaattatagcctggtgttgtggctcatgcctgtaaacccagcatttttggaggccaaggtgggaggattgcttgagcccaggagttccaggccagcctgcgcaacacagggaggccccatagctacaaaaaaaaaaattatctggctgtggtggtgcatgcctatggactcagctactcaagaggctgaggtgggaggatcacttgaccccaggaggtggaggctgcagtaagcca

SEQ ID NO: 45064 - DNA, 1035 bp, Homo sapiens
tgccttgaacaagtttcctatccttggtgatacaccactgcttcatcggtgaagtggaaatgacagtactcccatgtggctgatgaaatgtatgtgtgaagtgtgttatctagagtactgtgcctagcacactgtaaatataaatcagtagcaattatgaaaaagccctctcctccccatcttccaagggtatgtggtgcattgaagtgcggactttctgcgttagctaagggatagtgctgtttgtcttccttagctgtctatgttgattgagctgccatcaatctgaatctccattactatcaattcttcattagaccaatagttttggagttagggttgtgtgctctgcattaaaatcacctgggaactttgtcaaactgcaggagttttcccccacacctaggaattctgatttagttaatgtagcacggtcccggtttgttatttgaaaaaattcttaagtggtgaatctgatttttacacataattaaactgactggtaaaacaatacgatttggatttgtgggacattagcgaactggtgggaagggaagcagataaggcaatggcataattttcaaattgaggacttatcctgggagttgagacttctgggcccaggtttgttgccaagtaaacagataacttggagtaatcaatagcctcattttccttgttaatatctatatattcagcagcggaaggaatgctcaccacttattgatgagttccttttgtattttgtgatttgtctgctagtggcatttgtggaacaccttgggatttagaaacctactcttaagcccaaagaataaattgttttccctttcaaacagccctgtaataagggcggctcaaactctggttctctggttgcatcataatcttcactcttcagtcagtaggtcaaggcacaaccagtttttcacacttcgttttgctttttaattgctgaggatgttctgtttcccttttttcatccaggctaggttacacagtaagaaaccactgtggtcgttggattgtgaaaaa

SEQ ID NO: 45065 - DNA, 1029 bp, Homo sapiens
ccatcattcagtgtcaacagcagtcagctcacggccgatcttgggttcatttctacccgcaaacattccccgccaccctcatcctgtttattttgaagcaaattccaggtatatcatttcatctgtaaatatctcagtatatactttcaacaagtaaggacttttccatattttagtgtttggttttattcccccttagagcacataaataggtaacgtctgtctggacggtttgcctgccagagtccccgtgtatacctcttgtcccagtgtatttattaatagtctccctttccacttcaaagagtctctgtttggacagtaaattatttggtgacctcatgtacataagagaaatcttttcataggggacagtaaataggttctttaatagcactttcagtattgagtatttttctaatagtatgtcactgttctatttttgttttttgtttttttttttaaatcaggagagcaagccctggaggttcactctttcaagaagtcgtgtgctgaggtgtaatgctacacaagtcagaggaaggaagggtcctgaaacacatggtgaggaaggaatgagtcagctggattgctgtgattacgccttcttttctttttcttccattctgttgtttctttgttacaatttggtcataagtgcaaagaagattcttttgaaagcaagagatttaaacatttgaatcacaaggataatgtaaatttgagtatttggtcagctgctaattatccaagtttagattatccaaatacttaaaccttttagtaatattatcatcaactttaggtctgatgtcttgtcaggtgttctttgtaatggacaaagtgactcacaccatcatttccctcctctcattctttgctgttagctgattctaatatcctcttttctttctttcttttttttttttttttttttgagatggtatttcactcttgttgcctgggctggagtgcaatggtgcgatctcggctcactgcaacctccacctcccgggttcaggcgattct

SEQ ID NO: 45066 - DNA, 1027 bp, Homo sapiens
atttaacaaattgagcttttcagagtctttttttgtaaagtatttccaaagaagacttataggttaggaataaacataaactacccaggttggctaggaaggtatttctgttcatctaaagatgatgcccaggtgtggaacaggataagaaaagaccatggacatctttgtcccatgaatttagttggtcatcgtgttacagggctataatgccgctctagatccagttaaataagaagtggggaggggttgtaaactgcagctttttggggcacttatccatttattaccccaagtaaaagacctataccaaacagcaaacaacatctctgcattgtcattataatgttctttgagacacagccagtgttccagccattgttccatctaagatttaagcattttctagaaatgtatggtggcaggggtgttgaacataacttcttcaagactgacatggttctctttcttttgcaggcctgattgttggcaaaggcatcataagaagctggcatttatttctgttctaacctattactgtataactgtgaatagacactatgcatatttgttggtcagcaaaaccaagaaacaagagctatggcatttgaaaaagtctgtctgattccagggtgtttttcctgggtttcatcatcaggtacctcctccctttcatctcagcaagaatgtggcaccttttatcgtttgataaagattaaggacatgttctttggtcaacagccagaacttaaaatctgctggaatagggtcagagaccatttcagctgcagctgaggaaaatgaaatgttcattttatttggtgccttgtctggggagcacactaactcttctggaaacgtgtcagtgaaacagagatcgttttgtggaatagcaacccatggttatggcgagtgacccgacgtgatctggggggcaggctgcagaggactcatgacaggctataccatgctgcggaatgggggcgcggggaacggaggtcagacctgcatgctgcgctggtccaac

SEQ ID NO: 45067 - DNA, 1051 bp, Homo sapiens
ttctcttgggagagttgtttttaatttccctacatcgtgtttattgcgtgtataaaataatcttcagcttttgcttgattcacaagaaaattagctaactaatgaatgaagcttaaaaggtaaatctatatacatttattgaagtataaggcagcttttattcctgaaaggcatatgctagattttacaagcgcggagatcaggcaaaattattcagtaaatccagccatggtctccttggacctaaatacagattttgtttggcctttcataacacagccttaatttttaatgtttttccttcctcatcacaggtggtccgtactgagaagaacagtttgaacaaccgattcttaccctggaatgaaattgagacagaggccatcctgtccattgatgacgatgctcacctccgccatgacgaaatcatgtttgggttccggtgagagactaatttccaatcaaaactttaggttgcaagtgacagaaaacctggattaggctgcaaaatgaattttttggctgatggtaactgagaaccccttgcagatagtcagggctgatgtaggacgtggctggatgcaggctcgtagatggcgttggaggagtccatctctcttcatctgtaggctccgctctgtgttcccacaggcctttcctctgtggccaggaaggtggaattctttgattggctagaccctggttacctgcctgttcctggtgctgcaggtgtatcatccttaaatccaaaccacatgggcagagagtagaggcaacgggtagggtagttctctaaaggaaataggagggttttgtttttagaggaatgggaaggcaaaagtgacatgttgctgtgtgttggagcaatggaacagtgccaggatcctggacccaaaaagatttgggggaaggagggtgtcagaagcaatgatttaaaaggaaaaagaaggggaggaggaaaaggaggtggtggtaatgatgatgatgatgatgatggtaaacatatgttgaacccgtactgtgtgccagggactagcctaggactttgtct

SEQ ID NO: 45068 - DNA, 1050 bp, Homo sapiens
tttatctcttgtggagatgaggttttgctttgttgcccaggctggttttgtactcctgggctcaagcgatcttcctgccttggcctcccaaagtgctggaattaatcaccaggtaatttcatttcttattacaggctctgccctgtatttaaagagatggtttatgtatttcttcttgcatgttcaggtgttctgaggggtttttatgccattcggcctgccacattgtaatgaagctgtccctcttcatacttttttagttagacattttctaattaataataatatgactagactgtagtatggccactttcccatggctttaaatgtagttaagcatcttttttatggacagtattcaagaatgatagcccctctttgactagcccctctttgggtagtcttcaatacccaaagcccctctttgggtagtcttcaatattttgattcaaaacattgatgaaacaaacaactcggtacctacctatggctctgcaaccaagtacatactaggagtagacttactgagacagctgacactacacacgttaaggcttttggcatctgagaagcgtaggccatctcaacagaatacctgacaatgttctggagacatctggtaggcaggaggcctggggccgggctctggttcctgccatgctctgcagggatgttgcccctgaggggatcagcgtcttcaccatggacatgggagtgtgggatcggctcagctgcaagggttctgtcagtattagctgggattcccactctgtctctctctcccgtttccaggtgacctcacggtggacattccgatgcccaggatgccctcaggccctgtctcatgatgactcccacttccacgagcggcacaagtgcatcaacttcttcgtgaaggtgtacggctacatgcccctcctgtacacgcagttcagggtggattctgtgctcttcaagacacgcctgccccatgacaagaccaagtgcttcaagttcatctaggggcagcgcacggtctggggaagaggatgagcagagggaggaagatgg

SEQ ID NO: 45069 - DNA, 1048 bp, Homo sapiens
ccttcctatcctccctccttccttccttccttaagtccttcctttctttcttggcttcgtacaacatttctctttctgttggacataataccgcctgtgtctttttatttagtttgtgctaatatggttgtgctttttgtggttttaccataaaatgcatcgttaaatgcatttattattttgcatttatgctgcaggtaattatcacatcaggattgcagtgctttgcattaaacttattttaaaattgtgcaattaagttgcttgatctagctgaattatgtttctaagtcaaagttgggaaatttgaattctaaattttttttcaaatttcaattagagttaaaaaggaaaggattgcaacatctcttatttctcacagtttttaatatttaataacacactaggagaatttaaggtcatattttgtacttccttattaagttcttcaataatccttatgtgacaatttttttagtgtaacggatttttaaagtaaagaaattggcataatttctatttcgactgttgagaattgaatatattccccaaacttatcaattcttgaatctgccacctatcatcagtaagggacctttagattctatgataactgaaaaccacattgatagagtgtgtaattttatgatatgtcctctaaccattgatttaaaatttttgctgttggtcattcacacagataagggggactgaaagagtgaggtagcatgtatatttcaattgacctgaatagaaaaaaaaatgtgatttctaaatctcagatgtagaatatacaatatgttgattcaaaactaagccattagtttgtgatagaccaggattttcagaatcatttgttttaagcttgtatcttaacttgaaacactactttgcaaaaaccagagaaaaatcctacgtaactacttaacggagtgttttgttttatttttctgaagcatattataatagtcatggagttttttaaaaaatgtttaataattattttagaagtaaaaaaccaacatgtttgttaatattttaaattgga

SEQ ID NO: 45070 - DNA, 1109 bp, Homo sapiens
tgcaatttagttctgttcatttcattgtagctcttgcttctcttatttttgtatacagctctttaaacctgaattatttctcttgggaatcaggtatttatgtagaatgttgtcataagtgaaagttggcataccactcaactttttaaatacatgaacatttatagataaaccgaatagtgctcattgaaaatgtgttggttttgtttgttttgtgaaccagctttatttagttctttggcttctggaattaattttgtagctcactttgctattctttggctagatttttctgttaacagttggcttttacttcccactgtagtagaactgtaatttattaaagcattgttgtgagtgaaaagcatggcttgtctagagtgccatatatgtacacccacaatacactcatacataaaatacttttatgtttatttatttatttatgaaattggtgtatatctatcagacatgcctcccataagaaagaatctgagccacaaatagcagaagaccttgaactttgactgaagctagaaaccaaagagtaaccagcacatgttgtccacattatagaagctgaggagattttcattatcattccaaaccattattttcacagattttgttaaaatacagttctctcaaaatggaagctattgatattgaaagttttctcaaaatattagtaagtaagacgtagcatggattcctaggtgcagctattcccccacattgcccttactggatttagggcccatcataggcgcagagtaaagatttttccatgggattatttgatgtaaacttttagttgcagtgtattcaaacataatccagtgctttagataatttgttttccttgaccttagatgaaacaagttggaaatttactataacattgttttggacactttccaagagcatttagctcctggaagggccctggctttagcatggtttttacccttatagtggtaataaagttgaagttacattaagtttttccagtgattagtgtaatcttaatgcaatatttgacagattcttaggctatagtttttttttaacatttgcaaaaaaaaaaaacagtaacaatagtctgattt

SEQ ID NO: 45071 - DNA, 1079 bp, Homo sapiens
acgtcagtgtttcaaacctgatattctggtggttgtactgggggagtcgatttgccaccataccactgacagaacatcatcttttactgtaattccttaagcagtcagatttcttagttggaagcaacaaaaactgattttggcctatttaacctagaagtaaatttattaaatagatgttaggaagctcttagaattgctaggaagactgcagccaggcttgtacaatgagaagacctggggggagggtgctgtccttggcagaaaccagtcagagccacaccacaggtgcagtctgattaggacagcaatactgttgcttgcttactgctgctggcaccactgaatgctgctgcttgactttttttgaagtctccctctattgcctaggctggagcgcagtggcgcgatatcagctcactgcaaccactgcctcccgggttcaagcgattctcctgcctcagcctggcgagtagctaggattacaagtgcctgccaccatgccctgctaatttttgtatttttagtagagacaggatttcaccacattggccagactgatcttgaacttctgacctcaaatgatccacccacctcggcctcccaaaatgctgggattataggcgtgagccaccgcgcctagctgctgcttgacttttattgctgctgctcctaaaacttgcccctgctgcagtggtcatctctatttaagagggttcgttctggttgtgacaccagcactacaccattttacataagtgatttgagcgtctatagattttggtatctgcagggttgggggagggcagaggggagtattttggaaccagcccactgcagataccaagggacaactgtacagatggtccccgacttaccatggcttgacttaatgattttttaactttatgatggtgcaaaagtgatatgcattcagtaaaaactatacttcatattttgaattttgacttctttcccaactggccatatgtgatatgctaccttttcacaatgctgggccaaatcatctaaccaaaggctattttataataaagtgttgaatatctcatttaatttat

SEQ ID NO: 45072 - DNA, 1073 bp, Homo sapiens
acatttatattcatctacagaaaaactaccgagaattttataaacctgcattgtcaaagaggatattagaaaacgattgggacttatatagtaaaatctgtatttaggaacttaaggatcaaattgtaaatgtgggatcaaatagataccccatctattaaagaatggccagtgggaaatttaacatactaattaaacacttaaaaaaatcgcctcatcagaatcatcttttcccactttaaactgtggacaggcactgttttgctaggtaagtaaatatctgaacacacgccttcacttgtcttgatcaagacaaacatctgtataaacttcagcttagcattctttgaaccacagcactgcagacagccatgacagctaatgtgacattgaagcctatttgacatccctaacctaagttagagggtcagtaacatttgaattaataaaataaatatgtggttttcatttcagtgaaaatttctttttttgctcttatttcagtgagaacttccttgttagaatatattctactttatttgaacacagtgttatacttgtaatacctataatggaaatgaaatgctttataaaaaccagtgaatgcattataagcatatgcaaatagagtgaaagaactgcaaaggaaattccgcagaacatatttttatttcttcaaaggtggctatagaagtacttctggattagatatgttcagttgcaaaataacaaattctatggaaaccaacaaactataaaggaaatttatttgtttatatatcacaaaatccaaagacaggtaagacttctggcaaaaattgatccagaggttctaagatgtcatcagtaatctttgttgttgttgtagtgttgtgttgttttactttgcattctcaacttcctagagcaactctatccaataggaatataatgcctattacattttaaaatttaaatattctagttactacattttatgaagtaaaaagaaacagatgaaattcattttttttaaagagacagggtctgactgggcgccgtggctcacgcctgtaatcccaacacttttggaa

SEQ ID NO: 45073 - DNA, 1017 bp, Homo sapiens
cttgtctgttttcagtgttaaggcaaaagcattttatctttcattattaaatatgatatatttagggttttcatggatgccatttatcagtttaaggaggttctatttctagtttgctccgagttttggtcatgaataagatattatattaacttttatcaagtgctttttcttcatcttttcttatttagtctgtgattatggagaattacattgactgatttttgaatactgaataaaccttgcatgttgtattgttcttttcatatattgctggattcagttggctacagttttgttgaggattttttcatctgtgttcatcagggatattagttttcctgtcatgtaatttaatcctctggcttttgtactaggataatatgctggccttataaaatgatttgggaaattctttcttctcttctattttctggaagagactgagtaggattgccattatttcttcattgaatatttggtcaaattggccagtgaaactatccaggcctgcagttttcttggttgtgatatttttaaactatgaactcagtttccttaagagctattcaactattcatgttatttttatttttatttttattttttgagatggactcttgctctgtcgccctggctggagtgcagtggcgcgatctcggctcaccacaacctctgcctcccaggttcaagagattctcctgcctcagcttcccaagtagctggggctacaggtgcatgccaccacgcctggctaattttttgtatttttagtagagatggggttccaccgtgttagccaggatggtctcaatctcctgaccttgtgatccgcctgccttggcctcccaaagtgttgggattacaggcgtgagccaccacgcctggccatgttgtttcttttggtagtgtatgtattcaaggagctggtccatttcatctgagttactgaatttatggacatagacttgtttatagtattacttggtacttttaacctctatagggtctctaatg

SEQ ID NO: 45074 - DNA, 1081 bp, Homo sapiens
gagggaggtgctgagtgagaactcactcactcccttgagaataacaccaagccattcatgaggaatctgcccccacaacccagacaccttccactaggccccatcaccaacagtgaggatcagatttcaacatgagacttggtaggtacaaacaaaccatatgtacccactggaacaacttttataaaaaactactactcattttgggaggccaaggtgggcagatcatctgaggttgggagttttgttgcatgggcaacaaaagcgaaactcagtctcaaaaaaaaaaaaaaaaaaaaaaaagccaggcgtggtggctcacgcctgtaatcccagcactttgagaggctgaggcagacggatcacaaggtcaagagatcgagaccatcctggctaacatggtgaaactctgtctcttctaaaaatacaaaaattagctgggcgtggtggcgtgcacctgtagtcccagctacttgggaggctgaggcaggagaatcacttgaactcgggaggtggaggttgcagtgagccgagatcacaccactgaactccagcctggtgacagatcaagactccgtctcaaaaaaaaaaaagaactactactactaccataaacaactgttctaaagtaaagatgcagggtgttatgcataccagtttgccctagtatgggaagtcaatgaaaacttcccaagaaaatacctcttgagctaatatctgaaggatgaatagaagttaaccagtctaagagagaagagaaaaccaatcaaagcagaagcccagtagttagttggaatttgacaagtataaggatcagctggtatgattagactcaagaaatctgagaggtctattgggaatgcaaattgttacatatatatacaattgttatggagagcaatatggaaattcctcaaaaaattacaaacagaatgactatataagagccagcaatcccacttgtggttatatatccagaggaaataaagtcactatccatgcactctcaggttcatttcagaattattcacaatagccaagatatggaaacaacctaagttctgtccccagataaataaag

SEQ ID NO: 45075 - DNA, 1666 bp, Homo sapiens
aataccaaaaaaccatacctgtttgcaaccacactctccaagtccatgatctcttgatctacatcaggtccctatgtgaataaggcttctcaagttcagttcccccagtatggcaactcttgattcagagacctgtcaactaaatagactgccaaataagcgatctgagcttccagcttaagaaactagataaaaatgagcaaattaaacccaaagtaaacagagggagttaaatacaagaacattaatcaataaaatagaaaagcaagaaaatcagtgaacctcccaaagctgggtgctttgaaatcaagatcaataaaattgatatacctctaggtagactgatctacaaaaaaagaagaggcacaaattaccaatatctggaatgaaagaggtgatattactgcagaatctacaaacgttggaagaataataagagaatattatgaacgactttattcctgtaaatttgacaactttgataaatggtcagatttcttgatggacacaaattatcaaagctcactcaagaagaaataatctgaaaacccctattaaagtctatagtggactttaatatgttttttaaagaaattggatttatagctaaaaacctttcgtgcaaagaaaactgcatggcttaatggtgaattaattaatgttcttccaaatatttaaggaagaaataatgaatgccaatttcatataaactctttcagaaaacagaagagaaaggtaacacttctcaactcatgaggccagcattactagaatgctaagacagagacattacaggaaatctgtaggccagtgtcccttagaaacatatgcagaaatccttaataaaatattagaaaatgataaaataacaaattgaatccagcagtataaaaataaaaggttaatacctgatgactaaaaggtttgtatatcaaaaaatgtaacaatggtttaacaatctaaaatcaatatgattcaccatattaacagactcaagtagaaaaactaatcagttcaatagatgcagaaagacatcattcgtaatgtaaaagcaaaccaaaacttaacaaactaggcatagaaaagaactttcttaaactgatagagggtttctactaaatacccaaaacttagattgtacttgatggtcaaagactgaatgaatgcttttctcttgggactggcagcagggcaagaatttctgcaggtactactgctattcataatatactatagctcctcaccagtaaaataggaaaataaaaggcatatggactacagaaaaaagaaccaaagctgtctctattcacagacaacctaattgtgcttgtaaaacaaatcctaagggatatgtttgtaaaaactcttagaattattaagttagtttagtaaagtcacaggatacatgaaataatatacagaaattggccgggcgcggtggctcacgcctgtaattccagcactttgggaggctgaggcgggcggatcacgagatcaggagatcgagaccatcctggctaacacggtgaaaccccatctctactaaaaatacaagaaaaattagctgggcgcggtggcaggcgcctgtagtcccagctactcggaaggttgaggcaggagaatggcgtgaacccgggaggcggagcttgcagtgagccgagatcgc

SEQ ID NO: 45076 - DNA, 1036 bp, Homo sapiens
ttgttcacattcctcaactcatacacaagatgtagttttaaaaatcttataattcgttgacttcacgaacttcactcctaataatttcgagatacataatggagtttttttttttttttttttttttttttttttgagacagtctcgctctgtcacccaggctggagtacagtggtgcaatcttggctcactgcaaccttcgcctcccgggttaaagcgattctcatgtctcagtctccctcgtagctgggattacagcgtgcaccaccacccccagctaatttttgtatttttagtagagacgggattttaccatgttgaccaggctggtctcaaactcctggcctcaagtgatccgcccaccttggcctcccaaagtgctgggattacaggcatgagccactgtgcccagctcataatggagatttttttgtagaacttcatcaagttgtaattgtacaccttatcgactcattaagaaacaatgaaaaagtaactttcacttttttcatttttgagttagggttgggaaaaaaaggtaaattacgatatgaatttaacagattgttgaatataacattttaggaaggactttaaagccaaaaataaagacctgttttacgttttaatgtttaaaaatgcatctattaatatataaatatatgtgtaggggtatgtgtgtatacatatctgctaatatagcatatagatactaatgtgtgtttcatgtacatattatgaaataatttaaatgaggcttatcagaatttattaataatgccatacattaaggatattattcttaacaacccatgtactaaattttatgatatgttagtattttgtataaaactgaggctttattctaagttgattatctataggctaagtattttacttgcctaagtaggatgtgcatgttctgtagataagacaaaatggtcatgatctccagttactatgttattgatacatatttagtaacttttatttttgagtgattttttaaaatttaaagttatactttgtctccata

SEQ ID NO: 45077 - DNA, 1047 bp, Homo sapiens
tactatacagttactgattttattgataattatacgaaattatttttatttaatcttcacaattctatactgtaggtatgttattatttgcagtttatatataagagcctcagagaaaggaagtgactaacccatatgcaaatggattagagcaggggtccctaacccctgggctgtggacctccacacagtaggaggcaagtggcagcagagcaagcattactgcctgagctccacctgctgtgagatcagcagcagcattagattctcataggagctcgaactcttcattttcatccctaaaccaccctccctaccccccaccccgtcggtggaaaaattgtcttccacgaaactggcctctggtgccaaaaaggttggagaacactggagtagaggaggaatagatggaggccagcttaggaagctattagagtaacctatgcatgactgctgagggtctaagctatattgtaaaagcaaaaggatagaaaatggataaaaagtgatagatatcagaaaaaaaatggaagaaaaacaatctaacctagtcacacattgaatgacaaagcaggaaatatgtaagagttgagcatagtgatagtcagagagcctctgggagacagtacctgccattagaaaatgctttcactttgggcaaatcattcagcatctctgggccccaggtgccacatttatgaagagttaaatatcatgatgaagtaaaaagacagacttcagagccacacagacttaggaattagtcacagcttcactttatgttaatctgtgggaatttcagctttctataaagtggagatggttattatgagaagagttatgagaattatttgagataatatgtgcaaatcacacagtagaatgcctttctcataaccattgttagaccagtgttctttttccatctaagcttcttctagtttaatgctttgactgtgaagtcacctcaagatttctgtgttagagagttcagtggcactagaaatggagatttgggagtcatcaatatattaggtacagttaaag

SEQ ID NO: 45078 - DNA, 1035 bp, Homo sapiens
gtgtcccctttccctgctaccaaaaaagtctttcaaggatggagctaaggtcaaaaatgagtgaaaaaacttgcagtgtttgtatccattaaacggaagccccctcactctgagaggtcactagaggacttcatagtggggttgtgctgcttatcacagatgcagacacttgcccagataggagcagagaaaagcaggggacgtttcctactcacattgtggctgtatgagaacacgatgggactgctttgctgttctctttactctgtccttggagaggtgtgaaaagctgtattgctacaggcaatttatttaataattggaagccatattgataatggatgtggtaatatttgtaaagtttaatctactttaagcggcagtaactaatggaatttttttccttgatcacatatgtagcacttttgttactttttaaagatatttatatttgataaatctttttttcattttgagaactcaaaataccaaacagtgaacttgcattctaaagtcaccctgtgatcaccttgtcatctagtagcaaaatgatgaactattcatgcatcaaagaaaattacatctgctggccttgtatgaaaatgatctcttggcatcccgattaaatgacacactgtcactgtgggtaagaggaaagagccttcaatgtagcagcacagggtgcgcctgaaagaggcacaactgctgtggattttctgcctcgctccatctctcctatgtataatgaagccttgtttaaaggggcatgtggggctggatgttaagcacggcttctttttgtccgttacctgaaaacaatttctaagataaaaggaaggtgccatttccttacctcttcacccatcctcctccaccaaatgtattcaacttaaaactgtgagagagagagactgaatgaccttcctcagttttccctttctcattcaggagatactgaatatccgccagtttgtagttggtttccttccacttaaggcacacgctgactgcatcatttccttatctgttaatcct

SEQ ID NO: 45079 - DNA, 1063 bp, Homo sapiens
tacaaacagactcattgaatcaagagtctccagcctcatcctgtgaatagctcctcttctgtttccctctgactaggccttcagctgacttctttgctggaattttctaatcttgtgacagcagggaaaagctggatgtggtccatctcttaacacagacactcctccctgtcttgaccagctacgtattccactgaccagcctcatcatctctgccctcaacagtggaaatgatctctttcccacagatgttctccctccctccttccttcccttccccttcctacaaacgtgaactcttaagtctttactctctggtcttcagaagggtttggttacaagcagtcttcccatttaatttgtggctctgccttttaaaattgttttttgtcttttgttgttcagagaacgaccagagtattttctccccagtgtgtcccaacagattcttaggcaataatttttcttgttgatgatcccgtgctcagtagcacactacattgaagaaccctggccctcaccattgtgtgttggtttctgtgttaatctctgtgatctgaatcatgtcagagtgatgatagattttgtcattttgttgtgattattagtaatgttttactactgtattcattggggctgtgttgagaccagccaaatccatttatagctttactgagccggattgatttgtcaggatttcccaagtgaaagttgggcatattgcccagctcctgctggtggtatctttggggagtgtgggatggggtggggggatgtcctggggcaggggtgggaatgacacatataaggcattccattttttttttttttttttttttttgcttgtgcttattaaatagcaagggtgtttactcaggatttggggatcagttgtagccatgttgaatttggcaaactgagctgtgtgccctgaaagccctctttttatttcttcatttccatattgtctgacttacttcacctaggaatacctgagttatccagtccagtgttccctgatgagagtggaagattttcctggagaggcagctgtgcatggcca

SEQ ID NO: 45080 - DNA, 1088 bp, Homo sapiens
gatgtagattggcatggtcataattaaaagaatttctgtcttttatgtgattggaaatggcagcgctcccatcccctgttccctcttagcactaatgctcccaagaacatttggaacagcagctccataaactaaaataatgacatggtgctcgtgttctcccctaagtgaaacagcagaatttggagttgtttcagcttcaaaatggaagcctttgattattgttccccatttgacttctaagttctttgaaacttcactcaacatccagttccaacttgctccacctctggcagaaaccacagtcaggaccccagaagaagcccctctgaccggcccccactgcattccagcccatggtctggccagctccgggcccttgcttgcctaactcgaggatgttgctgcttgctgggctctctgggatcttcagatttcccttggttgcttgatatttccattgccgtcactatcagaaagcatttcccaaacagaagtttacagaaaattgaatcgaggtttcctcattgaatcctaagactcaaagcagacaacatgacaggacacatataactaacacaggctttaaacaggtggaggcgtgaatggagtactattcacgacattctaaagctactggagcacgggacacgtgtctgtacgctcctctcacaccccttactcggcagctgccccactcccgccgttgccgttgccctgagtcttccccactgttctgctgtgccagtgtgagcatctccccggcactcaagtccatgttctctccctcccgctcttcctcctgtctcttccatgctccctgttgcacgggacatcatgtgggcttgatgccgtacacagtccctgaccatggccccctactcttctccagaagtgtcacactagacaggagctgctgagtcaccaactcacctttccctagaatgtgggtttgttttttctcccccatcacttgcagaggtcttttttcaattatatgatcaagaatgagtctacaagaataccagcaccagacatagtgccaaatggccttttgtaagctgtttcgtgcccttgaggctcgcact

SEQ ID NO: 45081 - DNA, 1046 bp, Homo sapiens
cctcttacacaaatgaaatgctttgtgacaggtattcttcctcttgaaaggcttttttaagaaaaaaataatttttaactgtatactagataatctgagattgcaaaaggagcaccagataagggaggtgttaccatgctgtgcagcagaagaaggcttataattaagtttactacactttaatgttggggttattctgagctcaagatactcatagacctttgtctgatttccagggtcttatatctcacttcaccctttgtgtttagttactgaaagtttagggatgaagatagatttacagtttatttttacaagaaactttatactgtatgctttgcttccagtctcttgaagattatttgaattcatctgtgggtttatgcccatacacatggttagtcacagtaattcagatattaactgttaagcttgtaaattctagcagagggtggtgggaacagagcaaatccaaacctgtttctatgagtgagagattaagaccataaaacacttatctttcaactgtaattctgcagagttttgtatttagaggcagtactccgtgtgtgtgtgtgcgtgcgcgcgtgtgtgtagtgggggcagaatcaggaatttttttttacttcaaaagccagtagaggctgggcatggtggctcacacctgtaatcccagcattttgggaggctgggttggggggcggtgcggatcacttgaggtcaaaagttcgagaccatcctggccaacatagtgaaaccccatctcttctaaaaatacaaaaattaagtcgggtgtggtggtggcgcctgtagtcccagctacttgggaggctgaggcagtagaatcgcttgaacccaggaggcagaggttgcagtgagccaagatcacgccactgcactccagtctgggtggcagagtgagactctgtcccaaaataaaaaaaaagcaaatagaatgtctaatactatgaaagagaagcgttgtggcagtttacaaccatagaaaccagccaatagaataaaatactaaagaataaacctgagta

SEQ ID NO: 45082 - DNA, 1034 bp, Homo sapiens
ggttgcagtgagccaagatggtgtcactgcactccattctgggtgacagagcgagaccctgtctcaaaaaactaaataaatatgtactatgttcatgcagtagactataatttggccataaaaaggaacaaagtactgatacttgctacaacatgaatgaatcttgaaaacatgctaagtgaaggaaggcagacccaaaaggcctcatacagtacgattccatttatatgaactattcaaaataaacaaatctataaagacagaaagattagtcattgacaggaaatgaacagaagaggaaattggaaggtacaaggcttccccttgggggtgaagaaaatattctggaattagataaggataatggttgtacaatattgtaaatataataaatatcacaaattgtatgttgcaaaatatttaaaatggtgaattttgttgctattttcaaaacatgtgtttccctggaaatcgtatcctaaaacttaatctccaatgcaacagtgttaagaggtggggtctttgggaagtgattaggccatgagggctccacctccatgaatgggattagtacccttacaaagaagcttgagggagcctgcaagctcctgctgccatgtgagtacacatagaagtcaccttctacaaggaactgaatctgctggtgcctcgatcttggacttccaagcctctagaactgtaagaattaaatttctgttgtttctaagttatcccacttaaagtcttctcctatagcaacccagatggactaagacatttgttaagtgaattttacctaaaaaaaaaatttctgtatcagagttgttaaagaatgatgaaactagcactcaatacctgaaataaaagagcaaaactgaatttattgcttctataatgaaggagaactataccactacactggtcaggcatggtctccaggagcagaccagactgctgatctgatctcatttagggttttggagaagttcacagatataaataggttgacatcatctgtagaagtgtggtcacat

SEQ ID NO: 45083 - DNA, 1033 bp, Homo sapiens
ctggagtgcagtagtgtgatctcagctcactataacttctgcctcctgggttcaagtgattctcctgactcagcctcctgattagctggaattacaggtgcctgccaccatgcccggctgattgtttttatttttagtagagacgaggtttcactgtgttggccaggctggtcttgaactctgctgatctcaagtgatccgcctgcctcggcctcccaaagtgctgagattacagtgcctggcctgtatatatgtttatgatcgatttatcatatatatctttatgatctgtttatccataggtagaggttagagtgttatgatttgctaataaatacccagtaaataaatcaaagatttgaattactgtgttaatgagaaaatgaactttgaggaatgcaagtccttttaaatgatcaggtccagagggactttaaaatgagaccacagtcaggtcctactcccctcttgagctatatattcacctctctgtattcactgcttgctgttgctagaagtagctataaattaactaataatgctgcactggacactgtaactcactctatagtttaacaatgtatatagccaatcactaatcagtataatttgtgtaaaccaatgagaattcctggcaaacaactttatatcagcccactcccttgtccctgctcctttttttttttttttttgcctttaaaaagccacttgtaactgctttttaattggaatgcataagcccctgggttgcagtcttcaagcttggccaaaataagctctacttatattaattttgcctcaccttttatgttgctatcaacttcttttctcaatctaagctgaagagggaattaataatcattgctgtgcgaggtagtgggtctgtaatgaagaaatgttgagccttgccctgcagtggaatgttccctcctctcctcacttcaaagtgaccattcattgtatcagtatttgtgcaaggagatcccaaatttaaaatgctagaaaaggggataggtcttatcaaaattatttt

SEQ ID NO: 45084 - DNA, 1033 bp, Homo sapiens
actctgtaatcattggctagaagagggcatttcattgttgtgttttgtatttttcttattaaagaagtgtatcattttcaagtgttcattagctatttttagtttttccacaatttggttatcttttgtctatttttctgttagattgcatttttgattttgtaggcactctttattactattattattattatttttcgaggcagggtctcactctgtcacccaggctggagtgcagtggcgtgatcttgtctcactgcaacctccgtctcctgggttcaagcgattttcttgcctcagcctcctgaatagctggggctacaggcatgtgccaccaggcctgtctaatttttgtatttctagtagagactgggttttaccatgttggccaagctggtctcaaactcctgacctcaagtgatccatccgcctcagcctcccaaaatgctcggcctcccaaatctgttttagtggtacaggtactcatgcacatgagtaccgctcctggccttggcactctttatacgttgtaaacattgattgtttttgtctttaatatattttagaaatattttccctagtctttttgcttgtccttttaaagataggcccctgttatcatttgctgtaaatgtcatcatctgcatagaaaatccaagattatcagttgaaaaaaaaaaaaaaacagaactaataaacttcagtaagatgtccagatgagaaaaacacaaaaatcacagggttttaattttatttttaaaaatatggctgggcgcaatggctcaggcctataatcctagcactttgggaagctgtggtgggtggattacctgaggttgggtgttcaagaccagcctggccaacatggcgaaaccccatctctattaaaaatacaaaaattatccgggcatggtggtgcacgtctgtagtttcagctgctcaggaggctgaggcaggagaatcgcttgaaactgggaggcagaggtagcagtgagccaagatcatgccattgcactccagcctgggcgacaga

SEQ ID NO: 45085 - DNA, 1062 bp, Homo sapiens
aattttctgtagtttttgtagcgacaaagtctcactatgttgcccaggctggtctcaaactcctagactaaagtgatcctcccgccttggcctctcactcaaagtgctgagattataggcatttattccattattactacttttatggaaattcctatcttccttcaaaagctaaggctaggttccttaatatattgaaacgtatatatagcatgagtcctctctgcatccataatttaagtatgtattttatatgtgtatatttgatatgtagcgtaattttaatttcttttttttgaaatggagtttcgctcttgttgcccaggctggagtgcaatggcctgatcttgactcacaacaacctccgcctccctggttcaagcgattctcctgcctcagcctcctgagtagctgggattaaggcatgtgccaccacgccccgctaaattttgtatttttagtagagacggggtttctccatgttggccaggctggtctcgaactcccgacctcaggcaatctgcccacctcggcctcccagagtgctaggattatgggcatgagccaccgagcccggcccggtggctttttttcttaaagggttttggtaagagttagtgtacaatttgtcaggcacttcctacgtcccagatattgttctaaacatttttacagacattaacttcctaagttctcctaacaatcctaggaggaggtacagttctgagccccatttcatgggtaaaaaaacagcagagagggaaattaacttgcctgaggtcacacagctgtaatgtgatcaaggctggcctttgagaccaggcggctgctgactcttatcgatggtgttgttcttaaccaccactctatgctgcttcccaccgtgcccaaagagtgcctgcaggcttctctgtctctttcctgaaaagttacttacagtcccttgactgcactgctttaaagacgcagcacggagttcagcagtgaaatctggcagtgccggtgctgaaagatgtgaggattttgacagatgctggagatgctggctcaatgttcatgtcc

SEQ ID NO: 45086 - DNA, 1048 bp, Homo sapiens
gatggtcaagtcagatggagattccagataccttcgaagtatatctgcctggttcctcctacaaagggaatccagtctctgcaattaccagccaggcctctaagatctactcagactgtgtgaaccaacagacatggggcaggagaagcaggacacacgtcagctccctgtgggggaaacacaggaaataaaggaaactacacagcatcagactggacagcagctcaggtgtcctgctgctttctcccaattggggcagtctcagagcagagtatgaatctcatctttctctttctaagtaatagaagaacctctccaaaaaagccaaaggagaagaatccccattggttcatatttggaagaggagctccatagctgataagcactgggccatagggattagtgtttatcagatgtcaggcattaatccggccatttacaagatctcatttaatctttacaatgaatgctatgaaatatggactatattcatccccagtttacagcagaggactgagacacagaaaggttaaacagtatatccaaggtcaatactggagtagtatttgaatctaggaagtcagactcttaaatccacactcccgattctcacagtgtaagcctcttgttcctggggaggttccacaaaattgattgtgatgctgagttgggatgtctcttttataattgtgactataattaactctagctgatggtactcctagacacctagttttctcgatacctttgccagttgtagaaggggattgattaaccaagaccttcttctcctggttgcttttctaatccttctaggttcgggggcagacatgaggttttccccattttgttattggagcagttactacataccttaaacacaatgtattgttttcaccataggaatttggcttagtggtgggagggtgtgagtttgagtgccacagtttattcaaaggaataaaagtgaagccaaatgtacattgtattttaagaagtggcctagtcactaggaaatattaaaatctttttatccctctggttaatg

SEQ ID NO: 45087 - DNA, 1058 bp, Homo sapiens
tcctctcaacctgcagctctgtgaaggtcagactgtgaggagaagccaccccttgagcgctccgtctcctgatagtgccagcctggcctggtttcctgtttggtgaggctttctaggagcacctggcttagctctcacaggaggaggggcggacggggaggccaggcctcatgctcacagcgccagcctcctgtgagagtgggctgggtctcctttcctttcccaggcccttcctggaggcgatttctttctttctttctttctttccttttcttttcttttcttttcttctctctctctctctctctctctcccctctctcctctctctctctctctctctcttttctttcttttctttcttttctttcttcttttttttttctgaggcagagtctcgctctgtcgcccaggctggagtgcagtggtgtgatctcggctcactgcaagctccgcctcccgggttcatgccattctcctgcctcagcctcccaagtagctgggactacaggcgcctgtcaccacgcctggctcattttttgtatttttagtagagacggggtttcactgtgttagccaggatggtctcgatctcatgaccttatgatctgcccgccttggcctcccaaagtgctgggattacaagcgcctgggggcgatttctatgcctgcctcctgatgcagggcctgtgctctgagctgcgcctttcaggagagctctgcggggcttcatttcctttctaagctcatggcaagaaatgtagggtggaaaagacaggctctggaactccctggccacacaggagctctgccatttacacgctgtgcgacctcaattgagcaagtttcttaacctctctgggcttcaggaaaagggccaataatccttcacataaacacttaagagaatgcccggcatattagaagggcttcatgtttgctttaaaggtagcccttcccaaggatcttttaaggggcacttgaattttcagtaaggagaaggaagcccaggactaagcctaagctacccacaaggccgtgacagttaagacacaggat

SEQ ID NO: 45088 - DNA, 1556 bp, Homo sapiens
ttttaaaggggggtttaaaatcctttaaaggtacaatgtgaagcattatgaaatgataaaatacatgttttttaaaaacattaattttattttaagttccaggatacatgtgcaggacgtgcaggtttgctacataggtaaatgtgtgccatggtggtttgctgcacctatcaatctgtcacctacatattaagccccgcatacattagctgtttttcctgatgctgtccctcctccaggacccagtgtgtgttgttccccatgtattctcatcgttcggctcccacttataagtgagaacatgtggtatttggttttctgttcctttgttagtttgctgaggataatggattccagttccatccatgtccctgcaaagtacatgatcgtgttcctttttatggctgcatagtattccattttatatgtaccacattttctttatctagtctatcattgatgggcatttggtttttttccatgtctttgctattgtgaatagtgctgcagtgaacatgaacatgtgtgtgcttgtatctttataataaaatgatttatattcctttgggtatatacccagtaatataattgtataacccagtaataggattgcagtgtcaaatggtatttctggttctaggtctttgaggaatcgccacactgtcttccacaatggttgaactagtttacattcccaccaacagtgtaaaagcattcctatttctccatagccttgccagcacctgttgtttcttgattttttaataaacgccattctgactggcatgagagggtatatcattgtggttttgatttgtatacaaaaaagatttgtatttctctactgatcagtgatgttgagctttttttcatgtttgatggttgcataaatgtctttttttgagaagtgtctgttcatgtcctctgcctactttttaatgggattgtttgttttttttttcttgtaaatttgtttgagttccttgtagattctggatatagacctttgtcagctggatagattgcaaaaattttctcccattctgtaggttgtctgttcactctgatttgctgtgcagaagctaaaagacatgattttagaaaaagacatgtcaaagtcatacatgctcaacgacatagcgagtacatatgtaaataaaaaattattttatgctgtgaatttgaccgaaaataacctttacctcgtcaggaattacaatcctcacgtatggtaaaggatttccctattgcaaattattccacaacattaatgttctgtgtgctttttatctatcccaagatacaagtaaatttgacaaagatattaggtttgtaaacaaatttacgttcaaatctttgcctggaagtatctagatagaattttgcatgcaaaagagtatttacatctaaaaaattacatatttcaaattaaaatgattttagtgttatagatagaaggaaagagttattgaagtttatttctgttttggcagtgtaaatgaattacttacaaaattttagaagtctacaggtgtttttataaagtttgtgttatt

SEQ ID NO: 45089 - DNA, 1060 bp, Homo sapiens
caaagagtcagttgttacttgtaaacttcaagtcattgtttaggtcagagttgctgttgtctaaatgcaccaggacctagttgttgaaagggtaaactggaataaactttaattgggtttacaaaatgagaattcttactgtatattttctctttttcgggttgactttaccagtttgttctagttcagataatttagacaacattaactttgttgaattttttgtttgccagccggtcttcagcattttaaggcaacattattattacagttgtaatacgaatataattaccagagaaaaaactcaggaaaataaatgcttttatgaaaatgggattagaggtttgaaaataaacttgttaggagaaataatttcacaatgggatggttttttctttgttaagttttctttatgacttcattagtttataaaacattaattgataaaacttagaactataaattgaatgcttcagtgaactttattatttcagtgaacatttgttatttgatgtgaactttgtgcctgttttgaaatttactaaactcaaggcatgtgttcggaagagtgtttttgaagatgacctccccttcttagaattcactggatccattgtgtatagttacgatgctagtgattgctctttcctgtcagaagatattaggtaagtgatttgaatttcctgattttatttgaatttggacccttagaaggtactattatggtaatgtttgtgaatatactgagttttacaggtgaggtgtgttcaatagataattatttctatgtatacactatcaccaagttttacatttcaaataaaagtcactgaattaatttgtaatctgtcagtttgttcattcataagcttttctattacttcagacagtttttttttaacttttttaatatatgtgctgctgaagcgagcacgacagttttttaactttcagtacttaagatgttatatatagagctactgaacatactgtgtttattttaccaatttagggaaaaagtgcaaaaattatttaacctttaaatgcacctttatatttc

SEQ ID NO: 45090 - DNA, 1039 bp, Homo sapiens
atttcacatattttattaatgaagttcttaaattaaattctcatatttagccaagtattcatttggctgggaggtagaaagcctactaaccaactttttttcatgaacaatatttttaaagtccaagatttttaatacctacattagggaaattctagaattaaattcttacaatgtggactgcatatgaggcttttagtgacagggaatttgttgaaggctatctgtgggttgtattttggtataacatttcctaattttatttgtggtatgttcatttgatatcatttggtaatacctgaaaacaggaactgattttactgtgttgctttttcatcatttctagctgaaatgcacagagacctggagccttaacagtctggttaaacacctcttaggtaaacagctcctgaaagacaagtctatccgctgtagcaattggagtaaatttcctctcactgaggaccagaaactgtatgcagccactgatgcttatgtacgtgcttaaagatctttagaaattgtgatgtgttttaaaaacattattataaatgactttagaaaaattttattatagtagtggcagaaactctaccaaaatattttatatcaatttggcattgaaaaatgcttaggaagacatttagtgaaactattcattttcgatattaattagcaagtaccaatcaacagattgttcaatgctagtttattttcattgtcatgaagccaaattaatgtctaatttgtatgttaaaaaatgtgaacttgctgaaaacatgaaaggctaataaatccaggctgagcaagcataaatagtactgatgatggatttgatatataaacaattcagaatgaaaataattatagtacagtttctattttaaaactggccttatttcttatatataaaatgtggtgaaattttagaaaaattgcctccaaatttagcttgttgctgccattagatatatttttatatttacatgtttgtatgtagtgaaatctgggcttatctttatatatagcactattgtgt

SEQ ID NO: 45091 - DNA, 1066 bp, Homo sapiens
agggtgggatccatcagggcccaagatgagtgtttcatctttgttacttgtggcaaagcagcccttacttcttttactttgtagcattgctatgtatttggcttctagagttggggctttgtggctttcttattgcagtgacacaaccagctttctcctagtctggagattatacatccttgctataagtatttaaaatgctttctatataatgctttaaaacatgtaagatggcttatccccaagatggtagctaataaacactaagtgataaagtaggtaaagatctatttattcatttattaaatattgttggtcattttacagtgctttctaacatactgatttacatttctaattttcttctgtcatttttctccaaaaataatggtcatgtcatccaacctcagtgctgtttttagaggtcttgataagccagtgagagcagaaggagccacgtagtagagtgggtgagcccaggctttttgttgcacagaccaatgtgaatcccagccatgtgacctgggatgtacctgtttctccaaacatggaatgtagatactagcataatgtccgttttaccgttttatagaataattgtgaagacttaaagggacaaactattcgaagcatctgtattgatataaagttatcactattctcgtagcttccttttggagattttaaatgattgtgtttgttaagatgttaattaaattaggccattttgctaaatgctcttaaaaatatggcatgactgcctcatataaaatgatatgatattctttataattgtcgttgagcctctgtgggtggcaggccctcctttatatgttaaggtagaagagtctttattcttacttctcctccctggagagccacttcctatgaatgcctgctggttctctgtagtcagaggtcttgtggctgtaacttagagtcagtctccatatccctgggttctgcatctgtggattcaaccaaccacagattgagaacattcaagccaaaaaaaaaaattcacagttttaaaaaaggaaaagttgaatttcttgcatggagtacc

SEQ ID NO: 45092 - DNA, 1120 bp, Homo sapiens
tggcacatgcctgtagtcccagctactccgggggctagggaatgagaatagcttgaagccgggaggtggaggttgcagtgagccgagattgcgccactgcattccagcctgggtgacagagtgagactctgtctcaaaaaaaaaaaaaaggaagggcttacattttattttggtgctgactgggaatgaaggcaatgagggatgactgttggagaaggctgtgcttactaaacagtattattaagtagcagcatacatggtgttatactgacttctgattttgcaatagtacagacaggttcagattctcatttccaccttctccttctgcctaggtgaataactgctgggttatagtacagatgactgcagatcatttggaatttactttaaatgtaaacagtaaaaatttgaaagagagggaaagtgattgaggcaatttggggattgaataagaaggtctttttgttggaattcatttaaggaaagaaaatgaaaatttgatccctaatattatttaatgaagtggctaaatgaatatctctgctttgtggtttgaaaattaatattgattttttttccccctagaggaagaaatcctacttagcgacatgaacaaacagttgacttcaatctctgaggaagtgatggatctggctaagcatcttcctcatgctttcagtaaattggaaaacccacggaggttaaatattaccttttttttttttaacttaaatcaattctgtttatttttttatcacattttcctatatgtgaagaatactattcattaaggctgactcatagaaatttgcttgaatacacacacacagactgatgcataaatttgagaaatatctttccagttgttgaatagtgaatccaaaggtttaagccttttctgtctgctttgtaggatgttttatgaaacaaaggaatagaaattgtattcatattatacattttgaaattatatctatattatattttttgtcaaagcaaaataaattatacattaaggaaaatatttaagattcaaagttgtcattttctttctgttaatgagtatctttgatttaataacatttatagtttggtcacttgaaatctatagtgacca

SEQ ID NO: 45093 - DNA, 1028 bp, Homo sapiens
attccaaaacacatttattgtttgctcatagtttcagccttattcagaaagaatgcgactgacacatgatatagagaaacttgttccaaaaataacattaaaatccacgtttactacttgagaatcgaaaatattgaggtgcaataaagaataaaatgttttaaattatccaaatttaaaatttatgatagctttccccaggggcagtttattatatgctattaatgagccttgtttatgctggaaatgttccatctttggccttgcgccttagaaaccattcatgagcacatatttaaaccggagcacacatgttcttttgtagtatggcttgcacatctgccagctttcgacaaaattgtaggccctgttaataatagtccttttgtgtttggtgaaaaagatacgacactgtcagtggttttgcttttaagatttcttttaaactttcagtctttagaaaacctcaatagtggcacggtagaaccaactcattctaaatgcttaaaaatggaaagaaatctgggtcttcctactaaagaagaagaagaagatgatgaaaatgaagctaatgaaggggaagaagatgatgataagggtaagcactgaagtatgtttgaaatgactcacctgtgatacctaccactgactttaacttaggatccagttttggatggtttggaggtcagggactttgtggcatatagttaattattggatccttataagcttttgtctccttagtgcttttgtctccataaagcacaatcttactacttagaaaaatagagtaatagcattatgatgataaaaatatctttccctttgtttttttgtatttctccaaatcattatagctctcatttagaattattaaagctgagaactctaacaatgaacttttattgtttagtggttaattatcttgattctttgttttgccctttcttggccactcaggaatctttcaagctcactgtggacagggaaagtgacttgggtagagctaacataacttcattgtgctg

SEQ ID NO: 45094 - DNA, 1031 bp, Homo sapiens
ccacacagttcttttgaagagcagcagtttttcattttgataaagtccagtttgtcgattcgttcttttagggattttgcttttagtgttttgacccaaggtcacaaagatttgcttttatgttttctcctaaaagttttatagttttaagttttacatttagatttacgattcatttttagtaaatgttgtctattgtatgaggtattgattacagtttatgtatttttcacatattgttccagctccattttttaaaaagactatgcttttacactgaattgactttgtacctttgtcaaaaataaattgactacatatatgtgggtctattgctgcactctctattctgtgttctgtggatctatttgtctgtcttgattggtgtcttgattactgtagctttataataaacctggaaatcaggtagcgcaaggcctcttgctttgctcttttctttcaaagttgttctggctattctatgtcctttgtatttctgtgagcatgtcagcatcaccttttcaacccatatgcctgctgggattttgaatgagtttaccttgaatctagatatcgaaacaattagctgtcttgatagttattgtcaccgttttataccgaagaaactaggcatactaaagtaacttggctaacatcacttaccttgtaagaagtagaactgggctgtttgacatcagagcttattctttataccatttcctatgttaattagaatacaatattaatttcataaaggtaaaggcatatctgttttgttcctatttgattccttgtgaaagcacaatgcctagcgcacaatagacacttaaacttatctgttgaatggacaggtgaatgcttttaaagtctttccatatagaaaattaagtttcattacatttgacttgatctaggttttcatttcatagaatggagagcagactctgtaaatattttgccccagacctagctttattacaaacattgtcttaattaggattctgtctacccagaatagaaattaactcaag

SEQ ID NO: 45095 - DNA, 1031 bp, Homo sapiens
aattagccagcccttaggaagagactggaattgggtttggaaaatacaataggtctttctttttatctgtagtctttagtgagtcttcctcatttttctctctgaagagataagcattctctgcatatatatagcattcttttagattttcgtgacataaagtattatttaaactttcataaggtatcttgattttaagttgtaattccttgagatgattgttttctttattgttaatatgtttcccttcctgtttttttttttttcttttttcttttgtttgtttttacagaggtaaataccggattgtatacgtaactccagaatactgttcaggtaacatgggcctgctccagcaacttgaggctgatattggtaagtgataaagaaagatctctgtaaatacttactgagttaatatttaaagttaaacctatggatggacactggatttcacttctgttaaagtttatttcaaacattacttcctccaggaaatctctgactctctaacttgctgtttcacctatcttatcccatgatactctataattccttttgctatagaaattaggctctgttatcataattacctgtttatatatctgttttcttctgctaggctataaacttttcaagggaaaaatatcactttttaaaatttatgtttccccagtgcagtgcttggcatataggcacttaaacatattgttgaatgaatgttgaatcctaggttctgtgaaattttaatttacttgtttttcatgttctgtatctaaattaagtcagtgtagtggttttgtaccctctttgttcataagaatcacttttcaaactttaaaaaaaatgtaggtaaccaacacccaactctgaaaattctgatttaacaggcctgggttggcacctggcattggtggtttctcacaggtgattctgatatatagcccgggttggaaaccacagtacctttgattagttgccactagtgagtatgatttattacaaaaaccaaaaacttagataagtcacag

SEQ ID NO: 45096 - DNA, 1013 bp, Homo sapiens
ttcttttagtaaccctttaaaaatataaagagttacatttttcactggtgggccataacaaaacaggctgtgggccatatttgtccgaatgtcttctcagtgatctttcatccgtatgtccttttactctaggatgctgtgaaatcctggttaccccttcttgtatcacattgaaaacctaaagtttgaactattctatagaaattttattaaagcttttggtattagaatttccctttcttccctaattataaaaaatagcaaattttggccgggcatggtggctcacgcctgtagtcccagcactttgggaggccgaggtgggtggatcacctgaggtcaggagttcgagaccagcctggtcaacatggtgaaaccctgtctctactaaaaatacaacaattagctgggcgtggtggcaggtgcctgtaatcccagctacttgggaggctgaggcaggggaattgcttgaactcgggaggtggaggttgcagtgagccgagattgtgccattccactccagcctgggcaacaagagcgaaactctgtctcaaaaaaaaaaaaaaaaaaaaaaaaagtgaatttttacatgaatattctacatgattggcatatttacatgaatggtttaaaaacccacaataatagcactgttttattttttattttgaaaattgtagattcacaagaagttgtaaaaaaaaaaatacctatatagaggtcctatgtacctttcatccagtttcctgaacagtaacatcttgtgtgactatagtacaatatcaaaactaggaatatgacatttgtacagtatctagagtttattcctatttctctagttttgtaagtactcttttgtatggcatgtgtattgttctatacagtttaatctcatgtacatttgtgtaactaccactgcagtcaggatgccaaatgttcccttaccacaaagctccctggagctgttcttcccacccctggccctagccactggcaaccacaaatctggtctc

SEQ ID NO: 45097 - DNA, 1048 bp, Homo sapiens
tgcagtggcgggatcttggctcgttgcagcctctgcctcctgggttccagcgattctcctgcctcagcctcctgggtagctgggattacaggtgcatgccaccatgccctgctaatttttgtatttttagtagagacggggtttcaccttgttggccaggctggtctcgaacttctgagctcaggtaatccgcccgccttggcatcccaaagtgctgggattacaggcgtgagccactgtgctggccttaaaataagatttttatacactaaaagaaaacttacatttttcactccattaagtagttcactgtgaatttttgatattgaagcccatttggttgctgtcaaaaatagatttgaacagattattcagtatgactcttgtagtgaaattattgccttgtttcctctgcttaagttttcagtggcttttgccacagtccttaaaggttttataatttttttaatgtttaatttttaaatgtttgcttaatatttcttagtatgagtgtagataatgatgaacatttagatgactttttactattataatgttgcagtgaatatttgtttacatttatcttttggccaataagcaaatatttttgtaaattagaatcctaaaattgaaattggatcaaaagttatatgcacttgaaattgattaacttttcctaaatctaaaatagtatagtcttttttatattgtcagcataaatgaatgcacttatgtaaatgaatatttttaggcgttaagtaaaatattctgtggaaattgaacatttaagttgtttatacttctatggaaatcgtttacgcttttaataaagaagcacaagtttctacaaaatacattctaacagatgttttctataacattcagtctcaagattactagtaaatacttctttgaactgtaaaagcaatctttcaatattataagaaagctcttgctttagtaaacatttagaaactcagctttattatcataagcaagaataagaacagtgtaacaagttttatgcacactcctttgtaaaccctca

SEQ ID NO: 45098 - DNA, 1198 bp, Homo sapiens
attggagtttagttaaagagataatgtatataaatatataacatagtagcagcatataattctgtcttacacaagatttttctgaatagtataaacagttatgtagcctatctaggagtttgtgaatagagtttaaaattttgttttgaagctgcaaatttgattagaaattaaacagtgaagttattacttaaggaacttcgttttagctgtctgaacaacttactgtataaaaatctttaaacattctgtataaatatgtgataagatatgcaatgaccttaattttatagattagaaaataaaaacacactcattaatttacataactgacagattaagtgaaacttctcttctgatcacgttagcagaatgccaaatcttgtcgtggcactagaattagacggtagttttgataatacatgatttgactatagacatttgttgaaactattggtagttttaatcactcttgtaattttcaaactatctaacgggagaggattatccatcctgttttctagacaaactgtttcatctgaatgaaatatattcctagagataattatcactacttcatcttttggttttattttgcacatagaattatagttcacaatgactttctgaagctctaaagttgcagctgtgagcttctttggcctgtagggactgggaaaaagcacccccgtcctcccccaagcccccccaccaaaaaaagttaaagtgtttttaacaatagctgtgggctttttgtagtttcagaacttaggagttgcccaggctggaatgcagtggtgtgatcatagcttgatgcagccttgaactcctgggttcaagcaatcctcccacctcagcctccagagtagctgggaccacaggtgccaccccacccagctattttttttattttttaatttttttgtaggtatggggtctccccatgttgccctgcctgtctcaaactccagggctctcaggtgatacccaccacccttggcctcccaaagcaccgagagtcactgtgccaggctgagtttaaaatttcttgagttggagtttatggctattttttccactagttattaaacatgtatttttgtataaggcactgtattacattttgtggggggattcaaagctaaattagatgagacgcatcatctattatggaagatgttacttaagaagaaatgag

SEQ ID NO: 45099 - DNA, 1032 bp, Homo sapiens
gccaacaatgcttcctcagtaaatacccattttgtcttggtgggatttctataaattgcaaaatgcagctattatgaagctgtaaaagagaaacagaaacatgtaacacctgggactgttttattaggcccaccgtatgctcagaacatgaaatctccactgctagggttatttgattgaaattatcttttgtgttgatgtgagagtttagctctgagattcttccacatgtaaaatgtaatcccccaaagtatttggcaagcacattttattgccttgggtcagataattgaaacattaggcatcatatatatagcatgtaaaaagtaaaacagaaacatttatgtttctcaccaagcagtaaattagtactcaactaataaatttcttaaactccctaataacagaatatggaaacaaaaaataaatctttccaaaagaagagctcatggacacatttcctcatatatgtatacataatatagtagaacacatgataaataacctataaaaatgataccaatatcattcatcaagagacgaggctcttctttaaattattaatttcatctgttacaggttttattatgactgtagtatgctgttttcatctaccttttatgtgtagttaaaaaaatagttttctatctctttacctttatttcagcctttaaaaagattccattattttttcattaatcttgtttttcagtttttcccattttttcttttaaacatttcttaaggaaccatatttaagattttatagaatacttagatttctagttgggatgtatcatttaaaattagatatgtagagagagtgttatgatatatttccttacgatatattagtggttatagtacctaaatttgaatagtgattctgttcattcattcattcattcattcaatattcacttccaggagattggggacttatttaaagacagagtagttcacattatagttcctttttttagtccttcttattcgttaaagaaaagactaggaaatgtttgttattacaaa

SEQ ID NO: 45100 - DNA, 1021 bp, Homo sapiens
aagtcacgtcttacatggatggcagcaggcaaagagagagcttatgcaggaaaactcccccttataataaccatcatatcttgtgagacttactcactatcatgagaacagcatgggaaagacctgcctccatgattcaattacctactaccaggtccctctcagagcatgtgggaattcaagatgaaatttgggtggggacacagccaaaccatatcagttacttatactatttggtgttctctgagctttctgggtctgtttcagtttctgtcattatttttggaaagttttcagccattattacatctaatatttcttctgcttcattttttccttcttctactgatgttacaccttttgaaattgtcccacagttcttggacgtcctgttttgttgggttcatttccctctttcttttttttctctttgcagttcagtttgagaagtttctattgccttatcatcaagctcactgattttttccttggctatgttcagcctactgatgacctcatcaagggaatcctttacttctattactatgtttttgatttctaacacctccttttgagtctttcttagagtttccacctatcttcttacattacgcatttttatatgttgtctatctttttctgttagagcccttaacatactaatcatagttattttaaattccccatctgataattccaacatctgtgtcacatctgagtctgactctgatgattggtttgtcttttcggactgtttttcttgtcttttggtattcctcatagcattgtattgaaagctagacattgtattgtatactaggggctgagataatatgtttttagtgagaaaatttatgttaatatgggtttaatatttgttgtagctatagctgccacagatttcagaaccattcagtgtccttgtttttgcctctatccttgagggattcctaaattctcttcttcagagaaagtcagtgtcttgtagctcttttgtatgtaatcaattattattatactg

SEQ ID NO: 45101 - DNA, 1035 bp, Homo sapiens
tctcagaatgccctctgggctggaaatgtcttattaaatttcaaagattcaagtactgagacccaagggagatggtttgctcttttcttgtactggggtagggaagtgagccactttctctttattgggaaaccttgcctgatgggtagaagttgtaggtgggcatattttgctcaaaacagacttctccatataaaaagctctgctcagtaaaggagtgacctatcttggaaattcaagcatcctctgacattataatattaaagcagaggacaggtgtctgttagtcgaagatgacaaaaaaattgagtgaggttcccaacaatggtaagattatgtctggattcccccacaaagactgggttgaatctagtggggtccatgacttatgttagtgtccactcacgttgaccaatctccagaaggaaaatgctggatatatgggaaagttaaggatttaaagagaccatacatgatgaattttaaaaacaggagacatgggagaaggactacgtgtggactctggttttgtctttgccactagatggctgagtaaccttggaccagttatttaaatgcccaagcctagggttgctcattatgtaaaatgaagagactaagccagatgttttcaaacacccttttctactctcagaatctcaaactcagatccttgacaaatgaacagagggagggaaatgagctatagagccatgtcatgaatggaaattcagcattactagttagtgaagataggcctcaaccaaaaggtatttgatagatgtaaacattaatcaaagtgatggatttcttctaaaaaaaaagaggaatatggtgaccactctaaaactttgacttttttaatttggatttttccaaactaaaaaaaaaaaaaaaaaaaaattaaaagtagcatgccaagcagttctgtcttatcactctcttcctttgtgttcttgacagcaacctaataatttctggagagacatgagatataggtagataagtgaataactgttgcttaatgaaaatctt

SEQ ID NO: 45102 - DNA, 1051 bp, Homo sapiens
aaagttcatagccttaaatgcctacatcaaaaagtctgaaagagccccaatagacaatctaaagtcacacctcaagaaactagagaaacaagaacaaaccaaacccaaacctagcagaagaaaagaaataacaaagatcagagcagaactaaatgaaactgaggaaccaaaaaatacaagagataaatgaaagaaaaagccggttccttgaaaaggtatataaaattgataggccattagcaacattaaccaagaaaagaagagagatccagataagctcaattagaaacaaagcatgagaaattacagctgataccacagaaattcaaaagatcattcaaggccactgtgaacatctttatgcacataaactacaaaacctagaggagatgaataaattcctggaaatacataaccctcctagattaaaccaggaagaattagaaactctgaacacaccaataacaagcagcaagattgacatggtaaaaaattgccaataaaaaaaggccaggaccagatggagtcacagctgaattctatcaaacattcaaagaggaattgataccaattctattgacactattccacaagataaagagaaaatcctccctaaatcattcaatgtattttgcatttctctgtgtccttcatttccagaaatcatggtttcttatttaagctatgtcactgaagatttttctctcatatcttgtatcatttttttttatttcattaagttagacttaacatctttctggtgtcttcttgattagcttaataatggatctcctgaattatttttctggcaattcaggaatttcttcttggtttggatccattgctggtgagctagtgtgatcttctggtggtgttaaagaatcttgttttgtcatattaccagaattgtttttctggttccttctcacttgggtagactatatcagaggaaagatctgtggctcagtactgttcagattcttttgtccaatgggatgctcccttgatgtagggctctccctgttcccctaggggtgtggcttcctgagag

SEQ ID NO: 45103 - DNA, 1049 bp, Homo sapiens
ctcatttattccacaggtatttttattttagagcagtttgaaatttacaggaaaaaattgcagttgatagagttcccacatatcctacagccaattttctctattattggcatcttacattagtatggtgtattagttataattaataaattaatgctgataaattattaactaaagtttatacctaatgcctatttatttagtttttttttaaacaaaatatcctttttctattccaggatcccaactacaatacgacgttgcatttaatcataatatctccttaggttcctcttggctgtgacagtttctcagacttcccttgtttttgatgatcttgaaagttttgagaagtactgaacgggtattttgtagaattttcctcccttgggatttatctgattttttttttttatgttctaactagactgtggttgtgtgttttcagggggaatatcacagaagtgaagtgcaattctcatcatgtcatatcaagagcacacactaacaaacaacatgacttattgctgaatattgaacttgatcacctggctgaggtagtgtttgccagatttctctgtaaaggtactgtttttacctccattctatattgtactccttcaaaagaaatcgccaaccacagttcatacttaaggggtggggaggttatgatctatttatttgaggacagaacatctccataaattatttggattcttctgcatggaagatttgtctactctcaccaatttactaattcattcaactatttatatccgtatggactcatggatatttattttatactttgggttataatctaataccactttacttattttgttgctcaaattgctgtggctttggccactgggggctctttcagttgattctcatgtttgtttgatatgccctcatgcatgtggagttgttgtattttatttgagcactgccttatttttttggtactaaaggatgttccaggatcatcacagatatattctgccccagtcttagaatcagcccattttccaaggaaccctaactcc

SEQ ID NO: 45104 - DNA, 1052 bp, Homo sapiens
gtggaaagctatcatttcctaaattaaggaacttaggtcaaagttaaatgaaaaagacctaaaaacagaaccaaagacagcctctagatttcttaccctcaagtctcctgttagcatactgcctatacacacagacacaccctctgccacactgctctcttccttccagaagcttggttctactgtaagcaacagctccttcatgggctgagaaggggaaaccaggatctccccaaccaagggcctatacttttatttttcaactctattaactgaactatgcttggagagagccctgaatcctttaactttaatgccatcttaggcctggaagttagagtgagggaaatgagcttggcttctgggactgtgtcaagttgaattttctgtcatttaatttcagatcctagctcatcatcagtgaagtccagcctacttacttgtaactattaacctttctaaaagttttcatcgccttggtaaagctccagaaatggacaatgctagtgactgcacaatattgtgactgtacttaatgccactgaactgtacactttaaaatggaaaatttatatgtatttttaccacaataaacaaaaaaccctaaaaaaactttaatgaaaggtggaaaataatttaacttacaatgtgaaaatacaatgtgaaatgtacaataaatcatatttatggacagatgcgtgactgggagaaaaaagttttcatctctatctaaatactcctcattttcctatggtttgggtgcctctcagccctcgttattcaacttataatcggctctgttttccatttcccatgcttcaccccctcatacgcatacacacatattccttttctacctccctacatttattcactctcccttcttggaatcttggtctctgctctttaaagacctgacaatctgattcgattttattcatccattgattcattctcttccagtccattcattctttgaatatttgtatacctaatactaggtactgaacatactttgggagaatataatagatgtggttttccgttatcct

SEQ ID NO: 45105 - DNA, 1101 bp, Homo sapiens
aaaagactactgttgcctttctgaagactaaaaagaaaaaaaacttaaaaatttaaagaaataaacttctgagccatgtcaccaacttaaccacccccaggtacctgcaacggctcgcgcccgccggtgtctaacaggatccggacctagctcatattgctgccgcaaaacgcaaggctagcttccgccagtactgccgcaacaccttcttatttcacgacgtatggtcgtaaagcaataaagatccaggctcgggaaaatgacggagaggtggaactatagagaataaatttgcatatataataatccgctcgctaattgtgtttctgttttcctttgctaaggtagaaacaaaagaataatcacagaatctcagtgggactttgaaaatatccaggattttatacgtgaagaatggatgtatcgcattacggtagtcaccctatgtgtaaattagtggcacatacttggcactccttaatgtcaactataagatgatccttttgtagttcatgagcgtgatgattgggtgttcatacgcttgtgtgagatgtgccacccttgaaccttgttacgacgtgggcacattacccgtctgacctgaacttcaaggatcgatttaacacttgtatttgtgggcttgttacttatgataacaggtggcctagtttcatggctttgtgtttaccgttttcgggtgcccttttttctggctgtatgctacacgcacgggtgcttttccgttgtccaactgtgtaatgtgtttttgtgtttgttcttttgtgagtcggagtctcgcgttgtcgccaggctggagttgcagtgttgcgatctcggctcactgcaacccccacctccggttttcgagagattgtcctacctcagcctcccgagtagctgggactataggcgcgcgccaccacgcccagctaatttttgtataaatattggcaaggatggtctcgatctcttgacctcgtgatgcgcccgcctcggcctcccaaagggctgggattacaggcgtgagccaccgcgcctggccaatgcagagctttttaatggctttaattttttaggtttgggagatacctgcgcaggttt

SEQ ID NO: 45106 - DNA, 1377 bp, Homo sapiens
tgccgccctccagcattggctaccacggctccatcgtgggcgcctacgccggctacccgtctcagttcgtgcctggcctggatcctagcaagtccggcctcgtgggaggccagctgtctgggggcctgggcctgccgccgggcaagccccccagctccagcccgctcaccggggcctccccgccctccttcctgcagggattatgccgcgacccctattgcttgggaggttaccacggcgcctcgcacctcggcggctccagctgctccacctgcagcgcgcacgaccctgccgggcccagcctgaaggcggggggctacccgctggtgtaccccgggcacccgctgcagcccgccgcgctctcgtccagcgccgcccaggccgcgctccccggccacccgctctacacctacggcttcatgctgcagaacgaaccgctgccgcacagctgcaactgggtggcagccagtgggccgtgcgacaagcgcttcgccacctcggaggagctgctcagccacctacggacccacacggccctgccgggagccgagaaacttctggccgcctaccccggggcctcgggcctgggcagcgccgccgccgccgccgccgccgccgcctcctgccatctgcacctccccccgcccgccgcccccggcagccccgggtcgctgtccttgcggaatccacacactttgggcctaagccggtaccacccctatggcaagagccacttatccacagcggggggcctggccgtgccgtccctccccacagccggaccctactattcgccatacgcgctgtatggacagagactagcttcagcctcggcgctgggataccagtaactacagctcttcctccaccccagccccctcaccctcctccctctccctcctcctccctccccacctgccgtcgccgctgcaacctccactactgcttgaccctgccgggattccccacccagcccttccccaccggactgtgtatttatttactataatgttagcttacaagctgggaatataagtgcattaacggcccacatgagtcaatggtatgcaaaaagtctgtgttctcccaaataataatattaatcccacaaataacgacatgatccccgcccctgttcctttctgttattttttcttagatataagttttacattttttattccttttcctctttttttggttttgattggtttggtttgagggagagttggggtctttgggttcttctagacgttttgttttcccttcctggggagtttcttgcatgagtcttaacttaaaactacgtttccgccttctctttttccctcttcccccttcattccctcttgtttccttccatttgcggttctgttt

SEQ ID NO: 45107 - DNA, 1033 bp, Homo sapiens
aggcatacacaggtcagtccataacacaaactgttggggaaatctgaataaggactgggtattaggtgatattacagaattattgctaattttcttaggcttgggaatgataccatgagtgtgtaggagaatgattattcttaagacagtgctcaccaaagtaaaggagtaaagtatcctaactgcagcttactttgaaatgttcagaaaaaaaaaaggtcaataaataaggtaaaatgttatcagtgttgaattcaggtatctggatatggatgttagttatactactctttcggcttctctatgtttgaaatctttttataataaatatttgagggcaaagggagtgtgacaccaaagtaatagtgaagacagtttaagaaacattgatcataacattccacagtaaccttctaagttctgaaaacttcaccttgaccctccttagtcttttccgtgcaactgattaatcaaaaggcattgctgattccaaagatatgagttactctttcgtactggtccccaaaagtctcattcatgtctttgtagagatgttcctaggcagtgtgatttctcaggagagtatgttgttgccatgagccctgcagaacctcccacttggagatccaagctgccttccaacttcccgtgaactcttctactccttttctgccaagccccacatcttacgccatcaccctgggggactgcaccatattctaaggcttcccagtgacttcttgtccattctccctccaatagtggtggtgtgatgatctactttgacagaattgaagtggtgaacttcctggtcccgaacgcaggtacgtcttaacagtttattcccaccaccagctcactttccccagcatgccactcccgtgtctgttgtagcaccttggaaaaggagagctgccgtgtctgagggcattttgagtcttgccttttcttatgccaagccctctccttccctctcagtgtatgatatagtgaagaactatactgctgactatgacaaggccctcatcttcaa

SEQ ID NO: 45108 - DNA, 1034 bp, Homo sapiens
gggatataaataggaaccagtctatgtaatcaagaagttactttgtctcctgatctaaatgcttgcctccagtctagggctcagaaaaaaagcctggttatttgaactggttgtcaatcaaggtccccttcattttcactttcttggcttcccattcagccagctcttgcagtggcctcttgctcatgcctttgcgctccagctgtttttcaatcactttggcattctgtgcatacgagtcagcaacttccctagcctcaatctcctcttcctcttcatcaatggtagacacagtgacagaactgaacttgcccatgtctttggtccgtttggtcatcatcaccttcttaggaggctcttgtttctgagtatatatgttcgttttcccaaagccctggccaaacttgacgactgctccatccacaatgaaggtaacgggagcattcttcggctgggattggtagaagagcagcagtccacactttgcacatttctttctgtactgtagttcaatgccttcaggtctccgcagatacatagtctcttcgtcttctgtgttacaaaacttatgggcatgtttggcagcatcaatcacacgggaccggtcccggggcctcatgggcaatttctctaactgacagtccagcactaggaccacctggccgcacaaacagtagtacacatggaggggcttctcgccgtcgtcatattcctcccggtcccgagtgtcagagcagactactgaccgagacactactttcggcatggtttccaggagcaacctgaaaaactctacgcaaagaagagggtcgcgccgaaatgacgtcacgagcgcgccttgcgccttttccctgcggctaccttagtaatacaatttaaatggcatttatcaacatttccataacatataaacatcaatattactaaaacaacttgaaaagtatttctttcacatttttccggtaagctactagcccagggccacaggtttccaccttgacagatataatttggtctgaggaatgacgttatta

SEQ ID NO: 45109 - DNA, 1034 bp, Homo sapiens
ttttttttttaacagctgaagctaacccctgaatatctgcagctgatgaagtacaaggccattgcttccaacagcaagatttactttggcaaagacattcctaacatgttcatggactctgcgggcagtgtgagcaagcagtttgaggggctagctgacaagctaagctttggcttagaagatgaacccttggagacggccactaaggagaattgaaaaaaacttgatatgactgcaaatgatacttaagcagatctttattttttaagatgaatcagaatgttcctccctccccgactaccttctctgactgtcttccagttactgtggtgaaaaagaagaaatgaacttaaatccactccctttctagggaaaggagggtggggactgatgatggggggttttatttcaggtaagcagtttatatgacttccaataagatttgtaaatcatgggcttgacctttgacctctagacactaattttatcctttgaggctggcttaattagggatgctgtcattaaggagagggagaaatgtagagtgttacctccaactcatttgatttcccttacttgggaaaatgcagtccagtgttctcacctctgcctccaaggtaggagatgtctgtgggtgaggctcagcaactgagcaaatatgtgcctgtgagtttgccagtagagctgtgaagaaacagctgcagagaacatttgaccttcctggcattcttgtctgcatgtgtgtgagttattttagaggtgtgctttcttgagccctcataaggaagtactggtgctaggttttgcaagattttgtatacactttgctccttgccctagggctcagagtggtggtttctgactacatttctagagtcagagcttgatcaccacaactcaattatttcggcatcttttcacctatgctgtgatttgttttttttttttcttctcaaaaattctgttcattggttccactcagcatcaagaagacagggacaaacaactcaagtgtcttaacagctgctggagtg

SEQ ID NO: 45110 - DNA, 1036 bp, Homo sapiens
gactcctgggacttctggtcctgggcacactttttgcaggcaacaaaatgtgcctgggagtgatggattttaatgtgctccagagtcctttcagaaggtggtcatttcccttggccgggcgcggtggctcacacctgtaatcccagcactttgggaggccaaggcaggcggatcacctgaggttaggagttcgagaccaccctggccaacatgcgaaaccccatctctacgaaaaatagaaatattagccgggcatggtgtcaggcacctgtaatcccagctacttgggaggctgaggcaggagaattgcttgaactcgggaggcagaggttgcagtgagccaagatcatgccatcccactctagcttgggcaatagagcaaggctccgtctcaagaaaagaaggtcatttcccaagactagcatagggagtatccatttaaaatacattcatcttcctcccatttccgtgctattaatcacttgttagagcaacatgacatgcccagcatcccacttcccgaaaatgtctactccttctactctgagctcttgttgcctagacctcagaaaacaccaattcaccacagtagaaccgggagcagggatagctcagcttctctgaatagcacactttgctcaggtcttaacttgagggcctctccggtactaacatcctgcgatagcttgtcccatgagcacagaagagcctcagtagagtcaagtcctgctgcagctgccccaccccaagtttctatcatttcctctttaaacaaaaaatatgttatcctacacattagtgtcaatccaatggttgtctcttatctgtctaaatagcaaaatcatgaaaatcagctgttttatttgcataggacaactaacctgtctgtgtaactttgtttttattttaactcttactagaaaatctaatcttaaaacatttgaattctaaacatgtaaaatgtgacagcctgcaattttgtagacagtgaagtaatggctgctatttataaatggaacatctatcaaaataagta

SEQ ID NO: 45111 - DNA, 1057 bp, Homo sapiens
acaatacagtaaagtaagtatagtaaagtaaaattaagaattatagtaaagtaggccaggcgcggtggctgacacctataatcccagcaccatgggaggccgaggcaggcggatcacctgaggtcaggagttcaagaccagcctggccaacatggtgaaaccccaactctattaaaaatgcaaaaaaatagctgagcgtggtggtgcatgcctgtcaagtcccagctacacaggaggctgacgcaggagaatcgcatgaacccgggaggcagaggttgcagtgatccaagatcacgccactgcactccagactaggtaacagagcaagacttcatcccaaaaaaaaaaaaaaaaaaaaaaacaagaatcatagtaaaataaaattaagaaagacatggagatcttgagtaactgaacttatttcccttaaggtataaaaatttaaataacctgtatatattttgtaacagctttattagggaggtaagtgacttacaatacattgcacatatttaaagtatagaattcgacgagttttgatgtatgtttgcacctgtgaaaccatcacaacaaacagtgagcatatctatcacccctaaaagtttcctcctgtcccttggtaatccctctcttacctgtcccacttctcttcctcaagaaccacttacctgcttttgtcactgttaatgtacgtgagtttacattttttagagttttatccaaagggaatcatgaagtatgtactcttttttgtctgacttctttcattcagtgtagtgattcatcatgttcatacctgtatcaaaggttcaattctttttatcattcagtagtattccattgtataagtatattacaatttgtttatccattcacctgttgatgaatgttgggttgcttctgatttttgactgttgcaaataagttgctatgaatatttgtgtacgagcctttgtatggatatatttccctttttcttggaataaatatataggaatagaatggctgaatcacaagttaagtgttatgtttaactttttataactgcaataaaaca

SEQ ID NO: 45112 - DNA, 1101 bp, Homo sapiens
cacctgtaatcccagcacttgggaaggctgaggcaggtggatcacctgaggtcagaaattcgataccagcctagccaacatgatgaaacttcatctctaccatacatacaaaaattagccaggcatgatggtgtgcacccatagccccagctgctcgggatgctgaggcaggaggatccctcgaacccaggaggtgaatattgcagtgatccgagatcgcgccactgcactccagcctgggcgacagagttagactccatctcaaaaaaaaataaataaataaaaaattatggtgagcaccagtcaatgaatatctttatggggcttggattaacagtgtaacatagtgtgaatagaagcatgggctttgaaatcagacagaccttgggtttcagctacactactttccagtattgtaaccttggataagttacctaatctctctgtacttcagtttccttttttggcaatggtatcatgagaatgcttacttcagagggtgtggttaggactgaatatgataatccaggcaacattgttagcacagaaccctacacatgttgttagctattcgttaagaataaatgtatacagatcaggcatttgattgcaaccatcaaagcaccagtattcaccaaatcttagtatgcaggaacacagtagaggcatctgttttctagataacgtcctagagtcagactacctgggtttaaatcccaattatcaatagaaatctgaaatcaactataggtcaagtctttattgtatcatttcttgataattagctataatatgccctatttaaagactgaagtaaatgttactagtatctccgcctaataaatgggggcaagacaatatcaatagctcttataactgtataacaaataattgcttgctgcagatttctcttccagttgttaattagaaagttcagttaaactttgctaatatatagccaaaaatatttaacatgtactttatactaaattttttgcaactccattaaattaataaaactataaaaattcttgatttagaaaagtaattctcaggttcatctggcattttggcaatgcaaatcttcctggtatcccaaaa

SEQ ID NO: 45113 - DNA, 1058 bp, Homo sapiens
caggatgggatattttgcagagagaaaattgagccaggttgtgagtttgtctttcgttacgcatgatgggtggcaggttgggtttcttccagattttcatgaaagccagttcctggagtttggacggcttgctctcctggattgggcccacctgtgcagcctcacagtctctgaaggcgctgggcccttgtctgccctgaagccagcctcagaaggcttgagacgccacaaaacctcccaatagtccatcaagactttgatctcttggggagctcctcacagattctatcacagttcttaaagcaacctcttaatactcaaatggtaccccccaccttttgtttaacattgatggcatatgcagcactattctctatattctctcatttcaccatcacaacagctggtagacttgtgtaggctgataggcaatgtccctttgtggacggggcactggggcccagagaaggttccgtgttctccttgtctgaggtcagagtgagttgtggcaggacgagaaataaactcaggacttgactttctggcccagaacatggtcactactccacactggtatcttctatctctacctttaataattgataagtggcatattcttagatgtgcagctttcatttaaacgagccttattaccataaaataagtgtgtgtgtttctattccagtggaacagctgagaattgacgcatcttaatgcagaacaaactttgaaaccacaggcagtgggggtgagaaggaaggagagcattaaacccagccatgagtgggattggcctcccctctcgtcatcccatctccctcccaagctcattcctcatgattcaagctaatctcacaggctgcagggcccagagtgtgcaaccctgtgccttccccctgaagctggaccagcagtgaattctgttccccaaggctagacacacaggaatgaggtcagacaggacattcttaaaatccaggacatcttcatccttcagaaaagaagtggtcgtgtgcatcccaccaaagctttgaaggaggaagtactcgcttaccaat

SEQ ID NO: 45114 - DNA, 2018 bp, Homo sapiens
tcagtaggttaggtgtactaaatactttttttttttttttttttttgagttggagtgttgctctatcgcccaggctggagtgcagtggtgcaatctctgctcactacagcctctgcctcccaggttcaagccattctcctgcctcagcctcttgagtagctgggattataggcgtgtgccaccacacccagctaatttgtatttttagtagagatggggtttcaccatgttggccaggctggtctcaaactcctgacctcaagtgatctgcccgcctcagcctcccaaagtgctggaattacaggcgtgagccactgcacctggccctaaatgcatttttgacttaagatattttctatgtatggtggatttattgggacatacttcattttaagtcaaggaacatttgtattaaacagtattgctggtatttcttgtcccaatattaccgaacagggagtggatgtgactttttttcttttttttaaaaagcaaaaacaaaaaacttttaacagatagggcctcacctctgtggcccaggctggagtgtctatgggctgaagtacagtggcgcgatcaccactcactgtaactttgagctcctgggctcaagcaatcttcctgcctcagcttcccgagtagctgggaccacaggcacatgctaccacacctggctaatttttattttttgtagagatgaggtctatgttgcccaggctggtcttgaactcctggcctcaggcaatcctcctgcctcaacctcccaaagcattgggattacagatgtgagccactgcatctggcaactttttcttacactgaacaagccagtattggggccggggtctcagacactgtgactgatgctgtttatttacctgtttgcatccagcattgctgacaaggcaagagtaagtaactgctgctcactgacatttgggtatgcacagcaaagggctccatgtaatctgatggttatgcccatgaaagctcattaagagagctcagatactaggcccagaggatcagggcttcttaggtgtgcagggacacttggtgaaaatggttgtatcagttagctattgctatataacaagccatccccaaacagtaactaaacagcagcgatttgttattgttctccatcttttgggttcgttgggttctttgtagatcttgctgagcttactcatatggctgcatacagtgtacagctggactgtcctggggtggaagctccaagatggtcttacccatacatctggggcattgctggggacagctggaagcctgggagttccctctatcctcttggtctcccaacattctgatcactcagtagtctagcttgagttttatttacatggtagtttccaaggccacttaaggcctaggctcagaagtcccataacatcacttaccaagtattctgtcggtcaaagcaagtcacagggccagcccagattcagggagaggggaaatacatgcctgttgttgttgttgttgttgttgttgttgttttgagatggagtctctctctgttgcctgagtagctgggattacaagcatgcaccaccatgcccagctaatttttgtatttttagtagagacagggttttaccatgttgcccatgctggtcttgaactcctgagctcaagtgatccgcccgcctcggcctcccaaagtgctgggattacaggcgtgagccatcgcgcctggccttttttgtttgcttgtttgtttgacagaatctggctctgtcgcccaggccagagtgcagtggcacgatctcagctcactgcaacctccgcctcccaggttcaagtgattcttttgcctcagcctcccaagtagctgggattacaggcacctgccaccacgcccggctaatttttgtatttttagtagaggcgggggtctcaccatgttggccaggctggtctcgaacttctaacctcaggcgatctgcctgccttggcctcccaaatcactgggattacaggcatgatccaccaca

SEQ ID NO: 45115 - DNA, 1039 bp, Homo sapiens
cagctacacaaatggtttgaggtgtaggggtgctcctctcttcttcccttgccctgctgggaggcagggttctgggtttccctgctctgcatctctgggttggcaatcaaggtcagccttagctcacctccctcacccctcgggcactggagaactggggtgagatggatgtttctctgggccgggggtttagggtcaggctgcttggaagcaggaagatggaggacttgggatctgtgtcccttggtgatctcctcttacgcctgtctgtggacttcacacacttggctgtaatcacttgtttacgggtctttctcgactaaattacataaggtttggatctaggcactttcactacatctgacttttttaaatccctagcacctcgcatggtgctagtacaaagtagaggttcagtgagtaagtaaatgagaccagcacacctactttcaggaaaaaaggattgagcaaagaccggcaaatatgtgggtaaggattaacatttttgtccctggattgcagtagtctctatacttgaatacagttcatgggagttaaggtgtagtgtagggttttgggttttgttttttttttttttttgagacagagtctcactctcttgcccagggtggaatgcagtgatgcgatctcaactcactgcaacatctgcctcccaggttcaagcagttttcctgcctcagcctcccaagtagctgggattacaggcacatgccaccacgcccagctaatttttgtatttttagtaaagacagggttttgccatgttggccaggctggtctcgaactcctgacctcaggtgatccacccaccttggcctcccaaagcactgagattacaggcatgagccactgcgcccagcctgaatcacttttttgataaatgaggttttttttatttctgtattttctctcttcctctcccctcattgtcccaataaaattacatttcaaagttttaaaaatccagccaggtgcagtggcacacacctgtaatcccagctcctcaggaggctgaggc

SEQ ID NO: 45116 - DNA, 1046 bp, Homo sapiens
cctgagtgacagagcaagaccctgtttcaaaaaaaaaaaaatttaaactaaaattaaaagtaaacatttgttgtttttattatgatgattcttgagccaagtactatctataataatagcatttccacttttatatatatatattttttaaaaaaagcagagttaataattgctttgttttaaaaatgtgcttagttttcatttaggttttcccaaaccttccagaagctctctaaaatgcctcacagtaaggtcttgcacacagttggacttctagatttatctgcccattttttccctctctcctaaactaagacaagatttggagtaacagtttggctgctccagccctgccacacaactgtcaatgtggggttccctgaagccctagtctttctataattttggcagaacacatcttactgtattctttctgaaatgtctctatggccaggtgcagtggctcacacctgtaatcccagcactttgggaggctgaggcaggaggatcatttgaaaccaggggtttgagaccagcctgggtaacatagcgagaccctgtctccaaaaataaaatttgatttaatttaaagaaaaaagagaggccgggtacggtggctcatgcctgtaatccctgcactttgggaggccgagacgggtggatcacctgaggtcaggaattcaagaccagcctcgacatgtagaaaccccatctctactaaaaatacaaaattagccgggcttggtggtgcaggcctgtaatcccagctactcgggaggctgaggcaggagaattgcttgaatctgggaggcggaggttgcagtgagccgagattgcgccattgcactccatcctgggcaacaagagcgaaactccgtctcaaaaaaaaaaaaaagaaaagaaaagaaaaaagagaagtatctctgttatacttttacttgatttgtgtttggcaggggataagatgcaggttgaagtgaattttctgtcagattgtgaaggcgtcaaggcaccgtttgcaggcttccagtcttgccatttaagac

SEQ ID NO: 45117 - DNA, 1030 bp, Homo sapiens
caccaagtagctctgcagcaggtgtcttcagccaggctttaaggtttgtctttttttttttttagacagggtctcgctctgtctcccagactggagtccaatggtgcaaccactgctcaccacagcctcaatctctcaggctcaagcgatcctcccatctcagcctcccgcgtagctaggactccaagcgcatgccaccatgcctggttaattttttaaaaattttagtaggccaggtgcagtggctcatgcctgtaatcccagcactttgggaggccgaggcaggcggatcacctgaggtcaggaactcaagacctgcctggccaacatggcaaaaccctgtctccactgaaactacaaaaattagccaggcatctgtaatcccagctacttgggaggctgaggcaaggagaattgcttgaacccaggaggcagaggttacagtgagccgagatcgcaccactgcactccagcctgggcaacagaatgagactccatctcaaaaaaaaaaaaaaaattgtagataaggtcttgcaatgttgcccaggctggtctcaaactcctgggctcaagtgatcctcccacctcagcctcccaaagtgctgggattgcaggtgcgagccacctcacccagccttcggctgactttctgcatgctgctgtttactcctcacagacccctccccaactgaaatctctgcttttattaggtaaaattaggattcttatttttaagtaactgtggtagccatagaacaaagggcacagaggctttttctttcacttttaagtataattaatgatttaattttttttgagacagagtcttgcttgctctgttgcccaggctggagtgtagtggcatgatcttggctcactgcaacctccgcctcccaggttcaacaattctcctgcttcaacctcccaagtagctgggattacaggggtgtgccaccacgcccagctaatttttgtatttttagtagagacagggtttcaccgtgttgaccaggctggtcttgaactcctg

SEQ ID NO: 45118 - DNA, 1015 bp, Homo sapiens
ttgggcgcagtgattcatgcctgtaatcccagcattttgggaggctgaggtggaggtgatctcttgaggccaggggttcaagaccagcctgcccaacatggtgaaaccctgtctctactaaaaatacaaaaattagttgagcatggtggtgggcgcctgtagtcccagctactcgggaggctgaggcaggagaatctcttgaacccaggaggtaaaggtttcagtgagccaggattgcaccactgcaccccagcctgggcgacagagtgagactctgtttaagaaaaaagaaaaaggactgggtgcagtggctcacgcctgtaatcccagcaccttgggaggccaaggcaggcggatcacctgaggtcgggagttcgataccagcctgactaacatggagaaaccccgtctctactgaaaatacaaaattagctggacgtggtggcgcattcctgtaatcccagctactcgggaggctgaggcagaagaattgcttgaacccaggaaatggaggttgcagtgagctgagatcgtgccactgcattccagcctgggtaacagagtcaaaaaaaggagaaggaattgcattcacaaaagtgtgtctagaatgaatccagcatgtgtaagatactaggatatttttagtcagttgtgtgttgctgggttgggtagcacgtagtaggtttagatagcatgggatttaattgttggaaccaaaaaaaaaaagcatgaatggaatgtcaaaagaaaaaaaaagatggaatgtcttctgcctgtctggagcttcactaaaatcttatttaggatctccataatttatgaggttagtatttttattcctgttttacacatgaccatggctagtgagggccagaattagaattccaactcctgtattttcagccccaaaacctatcaggttttgttttgttttgttttagagacggggatcttgccatgttgcccaggctggtcttggattcccggcctcaagtgatcttcctgcctcggcctc

SEQ ID NO: 45119 - DNA, 1050 bp, Homo sapiens
atcgcttgaacccgggaggcggaggttgcagtgagaagagatcacaccattgcactccagcctgggcaacaagagtgaaactccgtctcaaaaaaaaaaaaagaataagagattgtagactcaataaacgtcatttttttcagtgagattattggaaaagatgtgtgaatttagccacttttatgggtatttttattgtggtaagcatgtatgtattatgtattttctcacgtttcttactaaaggcctactgaaaatgttttaataaacatgtgccatctggtattttttaagaagtgtgtaatagttcaaaatctagcaaaactcaactgcaaagatttttaatatctgttgtagagctcaaggggttaacactatttgtgtgcggatgcgtttttttcatgatgatggagctgatgctttattgtgcctttttttctttcttggttttcaaggctttgataaaattcaagagttatttgtattttgaggaaaaagactttgtggataaagcagagaagagcctgaagcagactccccatagtgaggtgagtcatggccataagaacattagaatcataaggccttgagcgttaggacccattccttcattataaaagtgaggaacacgaggcccaaaggggaatgaaggggcatctggtagccccactggccagcggcaagctcaccctctgcttattgtgttttgctctttatgtagtaccatgcttctgctgttagagacatgatcctgttctttcaggataactctgtagagaaaagtgtataaaaatagtggcctgcaccaccccatctgggaggtgtacccaacagctcattgagaacgggccatgatgacgatggcggttttgtggaatagaaaagggggaaaggtggggaaaagatagagaaatcagattgttgctgtgtctgtgtggaaagaggtagacatgggagacttcattttgttctgtactaagaaaaattcttctgccttgggatgctgttgatctatgaccttacccccaaccctgtgctctctgaaacatg

SEQ ID NO: 45120 - DNA, 1084 bp, Homo sapiens
ataactcaaaaattctgtgccttttgtctgacagggcactcccttttatcttcttaggactgtgtttttttgcaaatgattaaggagaggggtccaattttattgttagggaatcttttcatgtacctttctggtcaagtgaaagatgtgggctaacaaatttgatgttgatgcattcccattaaaacagctcttttcctctttttgctctcccactccaaggattcttcatacccctatagccaatcagatcaaagcatgaaccggcacaactttccttgcagtgtccatcagtacgaatcctcggggacagtgaacaatgatgattcagatcttttggattcccaagtccagtatagtgctgagcctcagctgtatggtaatgccaccagtgaccatcccaacaatcaagatcaaagtagcagtcttcctgaagaatgtgtaccttcagatgaaagtactcctccgagtattaaaaaaatcatacatgtgctggagaaggtccagtatcttgaacaagaagtagaagaatttgtaggaaaaaagacagacaaagcatactggcttctggaagaaatgctaaccaaggaacttttggaactggattcagttgaaactgggggccaggactctgtacggcaggccagaaaagaggctgtttgtaagattcaggccatactggaaaaattagaaaaaaaaggattatgaaaggatttagaacaaagtggaagcctgttactaacttgaccaaagaacacttgatttggttaattaccctctttttgaaatgcctgttgatgacaagaagcaatacattccagctttcctttgattttatacttgaaaaactggcaaaggaatggaagaatattttagtcatgagttgttttcagttttcagacgaatgaatgtaataggaaactatggagttaccaatattgccaagtagactcactccttaaaaaatttatggatatctacaagctgcttcttaccagcaggagggaaacacacttcacacaacaggcttatcagaaacctaccagatgaaactggatataatctgagacaaacaggatgtgtt

SEQ ID NO: 45121 - DNA, 1572 bp, Homo sapiens
cttgtcacatttttgtacattgtgactgctttcaacatatacttcatgtgtaattatagcttagactttagccttcttggacttctgttttgttttgttatttgcagtttacaaatatagtattattctctacttcttggtacattttgtagtaatatgtttaatataattattcaagagactatattgacagccagatagtatggcagttctgaaaaaatttatatcttttcaccacttgaatatactgcaatgtgtagtgagtaaattgtctccctttttctatagatcattaggttagagtttttttcttcttttttttttttttttttttttaccacttctgctgttcatggtagtagtggaaggtaaatttggaaatggcattgacataaaatgaaaatgtttacggacacttttcttttttgcttttttattgtatttggataaagatccacttaaaagttatctgttttttcctgttttttttttttttccccaaagtgtagttatgttttcactattgctgcttctatagagggcattgtgatagagagttacagatgaaacattaaatgccacagtgagtagaaataattactacaaaaagtaataaatatgattacttggtaatatcattctccatctaaaatactagtttcacctgtgagcagatttcagctcagtttatagttaaaaacaatgagggtaaaatgggattcatgctcagggaatgaatcagccatagttagagtgggaaattattattttcttcatttaaaggtagattttatgtttatttccctaaattgcataagataaaattgtctgtttaataaaaagacatttattaccattattaacagtcattttagagccaaatttaagaaaaggatattgaaagggtctttattggccttgtttgggtaactctatgctgttagatagaagagacttaggtaaataactttttatgtctgaggtgagtacacaatattggttcttggaaaaatagctgtttcttcataagatacccaagtgataattttttttcccctagactgtcaggcctatgagtaaatactaaatctattagctgtccccactcataaaccaaaccaaaccaatacaaacagatgaggagaggaaatgtagtaaaaatactggctgggtcttatgattgggatgagtgattttataagataatatggtgataattttattctaggattttatttttggcctaatataggaatgtttaaaaaaggcttttctatgaaaattagaaatttatacttgaaattaaaagtctagaagggggaggaccttaaagctaagctaccagtaagacaatgaataattcagaagagaacactattcttttactgactgagtgcccaagatgccaatttccatgaagtcttgatttatatatatgtacacatgttatgcacatacatgtttgttttctaacagttattttttaagcttttgagataattttagacttacagaagagttgtaaaagtagtagagttcttgtatactctgcacccaccttgcccttatgtt

SEQ ID NO: 45122 - DNA, 1027 bp, Homo sapiens
tgccaatctcttctggaaacaccctcacagacacatcacagacacacccagaagtaatgttttaccagttctctaggtattccttaatctagtcaagctgacacctaaaattaaccatcacaatatggacccctctgattaagtgttctagtcaaatcagaatcttgttggattctgaaaatctacgttttaatctatgtttctgaatctacatttcagatcatgttggatctgaaaatctacattttaagaacctacttaggcctgggtgtggtggctcatgcctgtaatcccagcactttgggaggccaaagtgggaggatcgcttgagcccaggagtttgagaccagcctgggcaacatagtaagaccctgtctctacaaataaaaaaattcgcaggatgtggtggtgcacacctgtgatctcagctacttggaaggctgaggtaggaggatcatctgagcctgggaggtcgaagctgcagtgagtggtgaaagtttgaaaatcactgtcagagcccaaagccctggtcttgttattgtatagtcagcgtcagagacaactgtgaagttttcttcactctggatgcctaggtgttaatctgggattgaggacttctgcctctaaaaacaatgattccagctttggatataagatccagttgtttatgacccctacattcttggttttgctctttaaacaacttactggccattagcgttatcttctgcactaggagcatggggtcagcaagctactacctgagatcaaattaaacccctgcctgcactttactgggacacagccacactcatcagtttacatctcctctctggttgctttagtgctgcaacaggagaagtgattagttgtgacagagccttatggcctacagaacctaaagaatttatctggccctttacagaaaaaaagttcgctgcctcttgcactagaacattgaaagggaaaaagtagagattgttttacattttacctgttaaggcttgtctggtaaaaggctgatata

SEQ ID NO: 45123 - DNA, 1028 bp, Homo sapiens
gcagtgagccgagattgtgccactgcaacccagcctgggcgacagagtaagacaaacaaaacaaaacaaacaacaacaacaacaaaaagatttaaaaataaatttgataaattggagtaggatattcttattgaaactcattaatacatagtattcttgttaataggttcagtttaataggaaagctactagagaactctaatgaaatgtgttttcttttaaggaaacttacatgcttgctgtaactttggatgaatggaaaaagaaactggaatctcccaacagagaaattattattttacacaatccaaaggtaaaacaaagcatttctcttgtcgggataaaaagttaattgcgctattagggagaactcaattggtttcttttgctaagcactctgtgtaggataacctttgtcaaattttatattgaattcacagttatgaaacttaaaaacttgtagccactactgttatttacccaactcagcttatacaaaataattttcttatggaaaattatgccactgtagaataagaaaatcactgacatattatgtgagcatgtcttccatgtagaaagggactattgacagatctgttagcctaatatattttcacggttctcatttcaagccatacgagttgtatatcaaaactccagttcagattttactgtgtggtttgaaagacatgattctacacttaaaactgcattgtatagagatgattgtattgcagaatatttttattgctctgatctgttctgtttaagcttatggtgcattaccagccagttgcagggtctgatgattggggttcaacacccacggagcagggtcgaccaagaactgtgaagagaggagttgagaacatctctgttgacattcattgtggtaatgttaatcgtttattttttcttacctttggatgtatttgtttactccttaaattgtgacctttttctgtggatttagattacctcaaggcttaaaaatcatctttaatcatatgggtttattccaagtt

SEQ ID NO: 45124 - DNA, 1133 bp, Homo sapiens
agggactgttctgctatttaatattggaaatcattggcttttttggtagcataaagctactggcttggaacagttaataaattttactgagtcagctcaacttgagtttggtggcagagggtagcactcagtaagaagattagggaaagaagatcatgaactagtgattatgcacattccggtaacttatgtgcttgtctttgtattttttctcacaaaagaaaaaaagttgcaaataattttttctctttttttggtcacagtggtgtttttcctggaaattctaagtttattagaacagaatctgaattagtcctgtgatcacaagttgtgtgctaatctacaaataacagatggttcaagcttccccagtttcaggctttgtgcagcgtgtgacattcatcttccatcttactacttaataggaatggtaacagtttactcacatatttttacttttatactttttattgatgacagttcttctctgtgagcacacaagtctaactggaactgttttatgagacgtctatggcttttagtgcaataaagaatttttaaagaatttggtccagcgtgatgatttttctaatgaatgtcaaagccaagcgagtgaggctcagaggaactgaatgtctccagctgctaaggctctactgtctgcaaagcttttggtggcgtgtaattaaaaaccatagacatcagagtgctactgtttgacaactcatagaagcaagctgagggggtcttttcagagaatgagccccgcttgtaggtctttgcttaccccgtctctctggagaaaactcagaggcataaaaggtgtccctgcctctctcctgcggcgatgtatgatttgtgtggtgctgtatgctttggcttctatccgcacacactgctgtctgctccatttcataccttgacaattgtcagtgtgattgcaaactggcttgtttgtgtttcttctctttccaggagtggctgtaaggtgaagaagcatgaaactcagtctctcgccctggatgcatgttctcgggtgagtctgtgcccatctccagaatgtctctgagaccaggggtcctccagtgggagtttgcatccccctggcgggtggttcaaaaggactttccaat

SEQ ID NO: 45125 - DNA, 1825 bp, Homo sapiens
aaactggcatccacgtcatgtggtcagaaatcagctggtgccgaggtgaaaggtgagccagaggaagacctggagtactttgaatgttccaatgttcctgtgtctaccataaatcatgcgttttcatcctcagaagcaggtatggaagcatatcttcatctttctaatgtacataagcatggaaatgcctgaaagcctaataaagcaggaggagccttacagagattaaagaattgggtcacttgaaggatagatttaggatgctgacctatgctttgcttctttacctggaaaagggacacaaagtgcttattgaagtactaggaacgtagagatacttgtgacaagttgtataggagatgctgatgtatgtgagactgcttgaatttctttataattttatgtgaatatggccatatcttaaagtatagtggtgtgttagttcatttgcgttgctgtaaaggaatacctgagaatggctaatttataggaaaaagaggtttatttggttcatggttctgcagactgtagaataagcatggcaccagtgcctgcttctggtgagggactcaggaagcttccaatcatggtggaaggcaagggggagcaagtgtgtcacatggcgagaggtgggaggaagagggggcggggaggatgccaggctatttttaacaaagatttcacagaaactaacagcaagaagtcgctcattaccacaaggagggcaccaagctattcatgagggatccgctcctatgacccagccacctcccattaggcctcacttccaactgttgatcaggtttcaacatgagatttagggggcaaatatttaaactatatcaaatggcctataaatatgtcatatgtttgacttttttgtgattgttatactcattgtttaacttagagaaataacaactgacatgtatggtgccttaccatgtacaggcattgttttaagtgctttgcatatactcattcatagcaaggtgttacccttttctcacttcttcagagaaacaaagtaagtcaaagaagttaagtgacttgattaaagtcacttggctagggtaggacagaaaagtggtatctttttcctcaccacaaggttcatggctgagacatctctaacaaaagatcaacaagagaaaagtgtacaaatatatttaatataagttttacatgacattagagcctccagaaatgaagacccaaaggaacagggaaaactgtacttttatagatagttgtgcagaagtataattggaggacagaagggtgtgatctgtggtaataaaccaggggaacttagcaagtcctgtttgttccaattcctcttggtgtctgtgtctttcaggataaggacattgtttttctctgtgtacagggaggacccctcttgtaatgaggtcttatgaactattttcaggggaaggtctgaggggttgctttatggcctgcttcaggaaagggggcaggagaggggccgagagacctccctgcttctgctgtgtcctcaaatgcgaaggcaccatattttggtgaagtgtgttctgaacctcatcattagtaaatggtagaactacatttgactctaagcagtctggttccatggtcttttcgccacaatgccaaagtatgaagagattattttcatgatactaggctactgtaaattttcctggtacagatgtggtaagttgagattgaccagtgcactgtaaaatctttcttaacatgccaatgaggaacctgggctaaccagggtggaagcctcttattgatggactcatcagatcattctagagctaagcccctcttt

SEQ ID NO: 45126 - DNA, 1081 bp, Homo sapiens
ggtttgtaactcctgagctcaagcaatgcacctgcctcagcctcccaaagtgctgggattgcaggcatgagccacagcgcctggtccataatactttttaaaaattaattatgcatgagagtttcaaattacataaccaccaaatagatgatagaaagcttgttaacaagaaacaaaattgattgacttgaaatcgaaatctttttatttttcctcacttttagaaaggagagttatgagccatgaaatgactaaagatgaaatcaaagtagagaagaaaaaaaggcataaataattcacacacagtgtggtcaacacttgaatgattaaaaaacattttaagtatatccctctaatttgttgctcttttattatttgtcttttaagcatttcctaggtgtaaggccctttgctgggcttgatggaaaggaagggacattcctgctcttagagagcggtagccatccataataaccaacttggatatgacgtcaaaagtgatgggggcaccaccattgagggcaggggaggacgtgatgcgactcacagagcacccagcaccggactgggtcagaaggacattgtcattcttcactagaagaaaggttaacccaagaggttgatctttaaagtctttgaataagtgaaatacttttggaattaggacacaaaataaaacttgtcactgaatcagaggtagagtgtctgaaagggtggattgactcaggaaagtctaaagtcagatcgcatctgttaggaagagcccagaagaatatctttaacttagtttgtaaaagattgactcatctaagcagaatgaatctatttccttgcagtattcaaataggtgcaaagagaaagggaaggcagttggttctataagtaaaatataagtttgactaaagataaaatcttaacaaaaacctttttagaaccttaagaaaccttatataatgtaaaaaaaaaaaaaaaaaaaagataacgagagccccaaagcagataaatggattacatacattgtcagtgtatgttaatgtgtttaattgtttgggacagcatttctccaactttcattgtctga

SEQ ID NO: 45127 - DNA, 1069 bp, Homo sapiens
aacaaagccaaattcctcaagctcttactggactcagttcagagtggtgggccattaaccccaacatggaatttttccatataaatctcaatgaattccctttcatttgaataggcaaacccaaatccatgcaagtgttttaaagcactgtcctgtcttaatcttacatgctgaaagtcttcatggtgatatgcactatattcagtatacgtatgttttcctacttctcttgtaaaactgttgcatgatccaacttcagcaatgaattgtgcctagtggagaacctctatagatcttaaaaaatgaattattctttagcagtgtattactcacatgggtgcaatctttagccccagggaggtcaataatgtcttttaaagccagaagtcacattttaccaatatgcatttatcataattggtgcttaggctgtatattcaagcctgttgtcttaacattttgtataaaaaagaacaacagaaattatctgtcatttgagaagtggcttgacaatcatttgagctttgaaagcagtcactgtggtgtaatatgaatgctgtcctagtggtcatagtaccaagggcacgtgtctccccttggtataactgatttcctttttagtcctctactgctaaataagttaattttgcattttgcagaaagaaacattgattgctaaatctttttgctgctgtgttttggtgttttcatgtttacttgttttatattgatctgttttaagtatgagaggcttatagtgccctccattgtaaatccatagtcatctttttaagcttattgtgtttaagaaagtagctatgtgttaaacagaggtgatggcagcccttccctagcacactggtggaagagaccccttaagaacctgaccccagtgaatgaagctgatgcacagggagcaccaaaggaccttcgttaagtgataattgtcctggcctctcagccatgaccgttatgaggaaatatcccccattcgaacttaacagatgcctcctctccaaagagaattaaaatcgtagcttgtacagatcaagagaatatactgggcaga

SEQ ID NO: 45128 - DNA, 1031 bp, Homo sapiens
aaacctaggatttggcagccttccagaatggtatggaatctgagggaagatttatgtttcgttttggaggatagctcaagttgaattttctttccagccagttaccctttcaacctacccatactttgtacaactcttacacaaatacttagatatttattagatagccctgaattcactctaattataaacagggagtgtaaactgcccccagatgttcctgggctgggtaaaagcagctggagtgaagcactcattttccataaaggtaacaaagggcagctcagtggttactcaagctcaaaagggtttttttaagagcaagcattggttaagtctgtgtatactgagttggaagtgatttcagcacattcttttttagtggagtgaaagttctgaagcccccttttaacttcctcttggtttttcattataattggtagccatctcatgaactgtctctgactgttgtctctttgtggtcatgtgattgtgagcttgctttctgacttgcatttctgactttatcctgttgttaggaagatagaaactaggttttgaaagattacatgattcaagcgagggattttaaagtaaagatgtatttattctgaagaatctaaaagataacagattatttgcttatgaaagaacaatatagtctgggaatcccagaatgtcaagccaaaggtctaagaagtcatctccttcaaatactttaataaagaagtatttcgaggagatatctgtccaaaaaggtttgactggcctccagattccagttatttttaaaaagcaacttaccactaaatccttgagtctccatagagtaacagtaaagaaactgatgtaacagactctcctctcaaaggatctcctctggaagagactatcagcggcagcattctccagggaagacccatcccctagtgccagagcttgcatcctggagactaaagattgcacttttttgtagttttttgtccaaatgcaatcccatttctgtgcctcttagcatgcagttagatttg

SEQ ID NO: 45129 - DNA, 1026 bp, Homo sapiens
ctctctgctggtatgattgcccatggctggatcaagaggcagcttgccttggaaactgacgagcatgtctaggtttctgttaactctcagggtagcctggccaagaaggagtcagcacattgcctggactttttgttttaaacctcctggagaatttttagagatgtaaaatgtggtgtttcttggagtagagggaagagtgagggaagctgatgcctttcctcgtgagaggaatcccagagtcgcagctttttcattgacatttgctcactggagttagagggatggaggtgcgcatgcagcagctgcctgcccagtgttaagcaactttgcagtagtaatgatgaccatgtactccttgttaggcacccacacatgcagtttaacaacaacaatatttacccaatgtctgggtgtccagcacttttcacacattatttcatttaatcctcacagcagcctttgaagtaggtaaagcaattatctccattttgcagattaggaaatagaccctgaagacttaagcaacttttctgcgtttgaatccaggtctgtctggctcaagactcatgctctttcccttcactccactgcatggatgggatgggtaactgaaatcagcacacccttttgaatggtcatcttcttgcaaaagttccctcaaaaatactcatattggctggatgccgtggctcatctctgtaatcccagggctttgggaggctgaggtgggggggatcacttgaggctaagagtttaagaccagcctggggaacatagcgagaccccatctctacaaaaaattgaaaaattagctagctgtagtagtgtgcgcctgtagtcccagctactcgggaggctatagcaggaggattttttgaactcaggagtttgaggttatagtgagctgtgatcgcaccactgcactccagcctgggcaccagagcgagaccctgcctctaaaaaaaaaaaattttttttaaatactcatactgattattgtcacctgcacatcctccttaccac

SEQ ID NO: 45130 - DNA, 1027 bp, Homo sapiens
accctgtctctacaaaaaaaatttaaaaaataaaatttagctgagcatggtggtgagtgtctgtagtcccagctacttgggaggctgagttgggaggatcgctggagcccaggagtttgaggctgaccaagccatgactgcacctccacactccagcctgagacagagtgagaccctatctcttaaaaaaaaaaaaaaaaaaaaagggccaggcgtggtggctcacgcctataatcccagcactttgggagaccgaggtgggtggatcacctgaggtcaggagttccagaccagcctggccaacatggcgaaaccccatctctactaaaaatataaaacattagccaggtgtggtggtgcgtgcctgtaattccagcaacttgggaggctgaggcaggagaatcgcttgaacctggggggcggaggttgtagtgagccaagatcgtgccattgcactccagcctgggtgacagagcaagactctgtctcaaataaataaataaagctggaagtagaaggggaggatgagattggtgggttctgagggctgggatggccaaacacagttctgctgtggtcaggattatgcagagatcaggggcagaacaaccaggagttatggaccagaggactgcaggaatgtggacgctgagggccaaagcaagaaaatgagtgactgacagattaacactcaggtgtaagcaggacagaagtctatgccgtggtccagattgaaggggcggggggggggggtcagaaacccaggaagcaagatgtctaggggcctggactattgtgttatggagccaccagcgtcctcttactgtgagttgacacacaactgaatttggatcctctgtgtccgaacttgggataagcgggtttacctttgctcaaatcatcatttttttaggtttttcgtaggctctgtggctttcacctcacatctcaaaatgtacatcccttattaaatataattggctattatatatatatataaaatatttgaaaggattttaatcatttt

SEQ ID NO: 45131 - DNA, 1080 bp, Homo sapiens
agccctgcttaagacatcatgattccatgcggatagactgaacagaattggaaatgggagttagtctgcatgactttcagagctcttaactgttaagaaattttgcttaaaatttgtgtttttgtgatggattaatggctataatttgaaagcgtggctacattgttgagtatgtatttgtcagagttaacccatcagatattaaaagtaccttttccctcttacagtccttgtccatttaataagtgtcttagtctgtgttgctataaaggagtacctgagactgggtaatttataaagaaaagaggtttatttgattcactgcaggctgtacaggaagcatggcacaggcatctgcttctggtgagggctttaggctgcttccattcatggcagaaggggaagcggagctggcgggtacagaggtcataaggcaagaggaagcaagagagatgggggagagaggctctttttaacaaccagctcttgagggaactaatagaacaagaactctttctcctaccctggcccctcagggatggcattactctgttcatgagggatccacttcaatgaccccaacacctgttactacaccccacctcccaacactggcacactgggggttaaatttcagcgtgagatttggagaagtcaaacatacaaactgtagcagtaagtatttagtagtatcatctgagaggatgttattcatgctgggtgagggggaggaatgggagatgagtgaagggtgctagactctaggatgcctttcccccatttccccaccaaaccagttcttttctttcttcttgtgtttataccttaagatttcttttgagaaaaaagggttagggtttatagctaaaaatgtttgaaatgattgctatgtatatttataatgtttggataaagactgatattcttttttaagaaaatacattttcctccctcatacttacctaatgcattgctattttcatgtattaatacaactttatatgagtacttttattatatgcatattgtaatatgggaatgtcaggtgatttttctgtgatttgaacattttgatttttc

SEQ ID NO: 45132 - DNA, 1117 bp, Homo sapiens
aaacaaaacaaaacacacacaaaatgttcttcttcattgctgtctccagatgtatttgttatatacagatagaaaatggttaaaaaaaaggttcaatttcaatcaagccctatcaaatatattaaattaattttttttcttgtttaggaggatcatgattagatccctaactgataaaatctgatatattctgatactaatgcttttagcatagagcaaaatcataaatccttttaaaatttttcttctgctaaattggttatataaattaatgttaaaaatagacatttcagtttagccaggtgtcaaagaaaaattagtcatatttatttggcttaagatggttaaacttttatatattttcatctacatatgattttttaactagtgattattggttaatctctcatttttaattcagcccagcatttagaaatggtttattggtgctgatctgtaaccaatctggctgtttctgtctcagttctattttctgtatgtcacttcgtttttctgtccataaatcttcttccactatgtggctgcacagagtctctctgaacctgttctggtttggaagccacacaattcttgaatcagtcattctttgctcaactaaattctgttaaattaaaaaaaaaaaaagtttattgattacatcattagcttaagaggtgaaagggtcaggaagttctttagattgtcttttattcttttatctatgcattttgattgcttaaaactctacctttgtgaaatgcttgaaaatatttttgcattaaaataaaaggaacattaagaagataattcgttttaaagttctactaatttggataaaatgaagtcttcagtgctctttcattattattcactttacccttttacctgtttttcttttattcctgtcactacaatgtaacctttaaatttcttaatttgaaatgttgataaatgtctaaatgcctcaattttttgttcagaggaaatatttggattcttcatagtaacagacacatttttattttatttttattttttttgagatggagttttgctctttctcccagactggagtgaaatggcgggatcttggctcactgcaacttccacccccacg

SEQ ID NO: 45133 - DNA, 1029 bp, Homo sapiens
ggaaagcttctaccccagagtttttgcatttgctattccttctttctatagtgttttcctcccagatacacagttttgattgaactgtcacatatttgaggtgcctgtcctgactgcccttttaaaatcacaagcatcccttcctctgcagagctcatcacacccacaccccgtcgccttttttccccatagcacttattaccttataatatgctatctaatttattatataagtaaatcactgaatcataatcataacctttacatgggcagggatttttgtctgctatgttcacagtttcatcccttgcaccaagaagaatgccttgtacataatagatattcagtaaatatttgttgagtgagtggttgattgatattgcacaaaaggactcctccccacaatattcttagtagcaagaaaaagaataaggaagacaagtctttctgttattgacaaaagccttgtgctaaatgttttctttccgtgagtcagaattttgtctttgcctattcttttgtctcaaaccattgatagtttatgttctttcttttttctttctctgccagtcttttaaaatccttccacgtcctacatctagatactttttttgttttttttggtcaaacagcagttaacagtaccaaaatgttctaggcagactgcattccaatccaagaggcaggagtcagtactatcaacttttctagagaccagttagcaaagaagagtttaacatgactactcagggcaaaaaatatgtttcttagagttccttggatatacaaaagaccaagctatagatagggctgcttcttcattaactagaatgcaacatagctttcactcctgctgctacttctggtaccattgctcaaactgatgaaaagagattcagggtaccaaattcccttgaaaaaatacaaatatatgtaagatataaattttattgtatttaagatgtacaacatgttttgatgtaaatataggtggtgaaatggttagtcaagcagattaacacatccatc

SEQ ID NO: 45134 - DNA, 1034 bp, Homo sapiens
ggacccttgctgcgaaggaagtacctgtaagcttaaatcatttgctgagtgtgcatatggtgactgttgtaaagactgtcgggtaaggaattcctcccttttggaaacaggaaaaaaaaaaaaaaaaaaaagaaaacctgtgtatatcaaaatttgttttttgagatttctgagtcagcactatttttattttatggtcatgggaaaaattttatgccacttgtgtataattttaaagcacactcttttacgttaagtggtctgttgatattgttttctaagtagaaacattttttttctgatttttagagtaacatatgcctgttagaaataattaaataacatgaaaccatagaaagtagagaatgaaagatcctctattattttatactcttcaggtaaccactgttgataatttgttaatataatcacgttttttctatacaaatgtgagtgtatgtgtgtatgtgtgtttttaagtgggtaagcacagatacatatatttttactacctgcttttttcaatatgacaccatggacttttttcccattcatgtagttctataatacatggttatttaagtaatattacttgtatagttgtaccataatttctttagtcaactaatgatggacattttgattacttccagttactgcttataagagaaatcactggtgcagaatattcatactaagtttttgatatacattttatatatctttcacacatatgccaatctatacttctaccaacagtattatcaaatacttgtttccttatgccaatattgggtactagcaggcactatactcctagttaattcaataggtgtaaagggttcttgtatttttatttagtttgcatttcttttggttacaaatgaggtcatgtttctttactttccatagttaggacttacatgaattacctgttgttagccattgttcatttttctgttgggttatttaatcttttgctattgttagaatgctttatagatgtaaatgctgtggtttcacatttgattaat

SEQ ID NO: 45135 - DNA, 2002 bp, Homo sapiens
ttctggtaggctgtgtggatgggtataggtaaaggttttttcagatcacagctgcataccatgtattaggggatgtgttaatttgctcaaacaatgaaatacatttggtatagcagcttcagttggagtcaccacttagctaagcttataataatccactatcattctccaagatctgtctgtcttctgcacagggcaaataggtgaattgaatggagatgtgatgagagtccctgcccctgcatctttcaagtccttgatgttgacacgaatctctgcaatccctccagagatgtggtattgcttttggcttactattttcctaggtagaggcagttctagtgggttccacctggcctttcttaccataataaccatcactccacaggtcagggaaccagtgtggcaattctgccagctgttgagtgtgtctgtttcaattatgcattctggaattgtgggaaaaaacccacaaggtgggttcagggacccactaggcctgctgtgagatggacctgaggtaaaacttcatctatcacctgaccttcataagcccctactctgacttcttgaccacagtgacattttgggtttgctcaattatttcagatatagggttctgtgttcctgaaaggtcgaatttttttctcagtgcacagtgtcttagtctgatcaattctgtctcagtctattttgtgctattataacaaaatgccacagaccgggtaattaatagtgaacagaaatttattggcttctggaggctgggaagtccaagataaaggtgctgccatctgatgagggtcgttttgctgagccatcacatgacggaaggtggatgggcaagagacgaagtggggccaaacgcacccttttataacaatattaatcttatcccagagggcagagccatcatggactaatcacctcttaaaggtcccacctcttaatgctgtcacaatggtaattaaatttcaacatgaattttagaggggacagacatttaaaccatatctggctgctctaacaagatatactgtagactgtgtggcttaaatggcagacacttatttctcagagttctggaggctgggagtctaagatcaaagtgccagtcaatttggttcttggtgagggatctctcttttcttcttataagatcgccaatcccatcataagggtcccatcctcatgatcccacctaactctgattacctcccaaatggcccatctccaaataccatcactttggggttagggcttcaacagatgaattatgggatacacaaacattgaaggggtacacaaacgttcagtatataaccattgccctggtaaaagccataggtcccttggaaatgtctgggataatgattaatagtataaatttttggcattgtatgggagggttcttccttaaagaaacttaccctgcctttagttgagagtttctgtttctgtaaactggctcaactcaaggaattgattaagaggctgtgactttctgtttttatgattcaaattagacttttgtttacttggcctagagttttcttatttggtacaggtcaagtaagactatgggaagctgcctatcttgcttctacttagacagaaacagtgtgatcaactagccaatgccgtaagtttttacatgggtcaggttattctgattgctgctttgactctgctctccattatggtaaccttggctctccattatgccaaccttggctctccattatgcccaccttgcctttggtggttgaatgttgacactttcctatcacctagaatctgatactttcattgcatttaagtttcccaactcagtggccatagctcctactataaggtctgccctttagataagagtgatcacagagcttttcaaggatgctaggcctccccttacaaatttatttcttacagtcttggtgaaaggtgtgttttctggattcttccagggtgggtaaatacatcttaagtgacaaatcgactc

SEQ ID NO: 45136 - DNA, 1047 bp, Homo sapiens
agtctaaacactctattaactatctcttttcccctcgcaggccacctccaccacaaccgaaagtatcatctcagggaaacttaattcctgcccgtcctgctcctgcacctcctttatatagttccctcacttgatttttttaaccttctttttgcaaatgtcttcagggaactgagctaatactttttttttttcttgatgttttcttgaaaagcctttctgttgcaactatgaatgaaaacaaaacaccacaaaacagacttcactaacacagaaaaacagaaactgagtgtgagagttgtgaaatacaaggaaatgcagtaaagccagggaatttacaataacatttccgtttccatcattgaataagtcttattcagtcatcggtgaggttaatgcactaatcatggattttttgaacatgttattgcagtgattctcaaattaactgtattggtgtaagagttttgtcattaagtgtttaagtgttattctgaattttctaccttagttatcattaatgtagttcctcattgaacatgtgataatctaatacctgtgaaaactgactaatcagctgccaataatatctaatatttttcatcatgcacgaattaataatcatcatactctagaatcttgtctgtcactcactacatgaataagcaaatattgtcttcaaaagaatgcacaagaaccacaattaagatgtcatattattttgaaagtacaaaatatactaaaagagtgtgtgtgtattcacgcagttactcgcttccatttttatgacctttcaactataggtaataactcttagagaaattaatttaatattagaatttctattatgaatcatgtgaaagcatgacattcgttcacaatagcactattttaaataaattataagctttaaggtacgaagtatttaatagatctaatcaaatatgttgattcatggctataataaagcaggagcaattataaaatcttcaatcaattgaacttttacaaaaccacttgagaatttcatgagcactttaaaatctg

SEQ ID NO: 45137 - DNA, 1040 bp, Homo sapiens
aacctgcgaggtggaggttgcagtgagccaatatcgcacctctgcactccagcctgggcaacagagcaagactctttctcaaaaaaaaaaaaaaaaaaaaaaggaaaaaaaaaaagaacaagttgggaaaagctgacatccgatggagtggcagtgactacctaccatgttttgttgaaaatgattctgaggctttgcctaaatttgatgtaaaagctatgatacctgctagatttttgaagtgacatacgcatttatgtatcagtcttttcctaaggtgggatagttgaggccaaatttggctttacatcagaataatctctggatatttataaacatatatatttctggatcaaaatcctggaactttaaaaataattataaacttgttaataatttttatttagtaatatgtgattacattcaaaatgaagtaaaagaggctaccctatatgttaccatctttcctgattgtcaattttactatatttttaaagaaaacgactatgtttaacagtttgatggtactcttctggacttttctctagacacttagatataaatatgtgtaaatgtagacatatacggtccttttgaagtaaattataaatgacaaaagcatattgtataaatttatgtatgtcatctatttttaatatattttggatattaatcattttattttttctatatcttgcacaagttttcttcaatgtgttattgatcttttcacttgtgatatcctgatttttgtactaagtttatcaacactttcttatggcttctgcattttgttttccgtattaaggcttcccttggtacaatgattaaaacaaatagtttcccatactttcttaaagttattttacaactttagacaacgtagcctttcagtctttctaatagttttgtaactttgtacatgaagtcttgtaatccacactgtggtgctagataggaaactatatttgtatttttccaaatggataaatactgatattacatcattcccccattcatttgaaatgccacatttagta

SEQ ID NO: 45138 - DNA, 1064 bp, Homo sapiens
tgatcccatttattcatgtttcgtttggttttgtgtgcttgtggggtattactcaagaaatctttgtccagtccaatgtcctggagactttctctaatgttttcttgtagtagtttcatagtttgaggtgttagatttaagtctttactacattttcatttgatttttgtatatggtgagagggaggggtctagtttcattgtcatgcatgtggatatccagttttctcagcatcatttattgaagagactgttctttcccaagtgtatgttctgggcacctttgtcaaaaatgagttcactgtagattaatgggtttgtttctggtttctctattctgttccactggtctatatttctgtaccatatcattttgattagtatacctctgtagtataatttgatatcaggtaatgtgattcctccagttttgttctttttgctcaggatagctttagctattctgggtcttttgtgattccatataaattttaggatttttttttctatttctgtgaggaatgtcactggtattttgatagagattgcattgaatttgtagatttctttgggtagtgtggctatttcaacaatattggttcttctaatccatgaacatggaatattttttcatttttggtgttctcaatttcttgcatcaatgttttatagttttcattgtagagatctttcacttatttgattaaactaattcctagacattttatttcatttatagttattgtaaatgggattactttcttgattttcagattgttcactgttaccatatagaaatgtttttcttcttttttgatataagtgcgtagagctataaacataccttttagtactgttttgctctatcccataggttttggtatgttgtatttccattatcatttgtttcaagaaatttttaaatttccttgttaatctcctcattgacccactgtgaattcaggagcatattgtttaatttccatgtatttgtaatagttttcaaaattcctcttgttattcgtttcttgttttattgcattgtggtcagagaagatgcttgat

SEQ ID NO: 45139 - DNA, 1117 bp, Homo sapiens
atgcaatttccagttatttctttggagaattttatgtcattgttccattaccttgaatgttggaaagatatgatacgtgctgcttgttcatcacaaaaatcagtaagcacaataaagtggatgccaaaccatcagacacataaatgttcccgctgtgtccctggatatggaataagcaggtataaaaaatattttaattatagttttgttataaatataacttatgagaaaaaaatttgataggaataatactgtatattactaatttttaactatccctaaggcaaaccttatgacccacagaattttctcatatacagtattcagtgcacagaaatcttatgattggctcaagtacagtaagttacttctcagtaaaactctcaagtctgagtccatatttgtagctctgcttttggctgtacgttcctaggatcggggctgcttatgcctttcgtttatccttggggtttgagagcgctgtatttgggagagagtttaaaaatacattaggagagagaaaccattaaaagtttcactgtcagatatattgtaggtgctaatactggatttcgtctcagatttaatttcttttatgggtctgttagtcattcaacaaatcccataagtatgtgttaatattttaattgtgtaaaactcatttgttactttacagcctgtaatagtgtgtctgcattttcaacctgttgcaataactttgctgaaatattaacacattaataaaacttttcttaaacaagttgtctctgtgtcatatttggtgggatttggtagtaaatgatggtaaagtggtaaatgataggacactaaatttgtcagataatactagaattgtagtagtgtaccgtacaatgtagcttagtgttttaaaataaacatcttacatttctatgtcacacctctcaatttcttacctgctttatcttacaacagcaggtatattataagtaaaaattaaggagtagtcgttgacaaagcctgctctcttccccggacagcatgagcttcaccactccctccaccttctccaccaactaccagtccctgggctctgtccagccgcccagctatggcacctggccggtcagcagcgcag

SEQ ID NO: 45140 - DNA, 1047 bp, Homo sapiens
catgaggtcaggagttcgagaccaaccgaccaacatggtgaaaccccatctttactaaaaatacaaaataattagccgggtgttggtggtgtgcacctgtaatcccagctactcaggaggccggggcaggagaatcgcttgaacctgggagcaggaggttgcagtgagccgaggtcgtgccattgcactccagcctgggtgacagtgagactttgtctcaaaaaaaaaaacaaaaaacaaaaaaaaaacaaactaggcataaactcatgaggtcaggagatcaagaccatcctggctactaaaccccatctctactaaacccatctctactaaaaatacaaaaaattagccaggcatggtggcgggcccatctactcaggaggctgaggcaggagaatggtgtgaacccgggaggtggagcttgcagtgagccaagatcgtgccattgcactctagcctgggcgacagagcgagactccatttccaaaaaaaacacactaggcgtaaacaagaatgaagacctggaaccgtagagaaaatactagaaacccctcgtatcacgttgtgcctgaggacaataataaagtagtttactaggcatcagacattcctcagcagtgctgtgggtcacgggcgtgaagcggagctcgaggcaggattgcttgtgttgctgcatgtcctgtctgctgttttagcccgtgtcagtagatggggccattgtactgtttgttctgcacacttggcggagcagcagaggctctcagcacgccttttccctttgtagtattttctgagctaaggaaagtcaggcagaagtagttcataagaaggcatcactgcctgtgatcggggctgcatttagccctgacctgataatggtaggagagttcatttagcctttctgctgcgaagattgtaaatagattaaagaaaacagctgtggccttctcccgtcatacatcattagactgtgtaaactaacattttagaacctctaatattggacttaaaaccaatttctgtcgtgcttaattgaaaatcacaact

SEQ ID NO: 45141 - DNA, 1017 bp, Homo sapiens
tataggagattctgcaggcaatgagaatatttaatttaccaagtttactatgcatgaagctctttttgtttttgtttttgagacagagtcttgctctgttgcccagcctggagcgcaatgtcacaatcttggctcattgcaacctccaccttccgggttcaagcaattctcctgcctcagcttcccgagtagctgggattacaggcacctgccaccacatctggctaatttttttttttttttttttttttttttttttttagtagagacagggtttcaccatgctggccaggctggtctcgaactcctgacctcaggtgatccgcccgcctcagcctcccaaagtgctgggattacaggcgtgagctaccatgcctggccacatcaagctgtttttaaagtagattaacttgtaaatctccacaacatacctatgcaaggaaaaatttgagattttggaatgggcaaaacattactggctatcctttcaatgtaatgcttgatccctgtgtgctgtgtgcccatgtctttaaattttacaactctgtagaggtacaagttgatttatagaaaacttataatgatgtgaatatttcttgtcttgctatgcagatgatgcctgcccatggcaatataagtgaattttgtcctgttgagaataagtcaagcccccatttgattggatgtttttgttttgttataatttggtgggacatagtctcgccctgttgcccaggctggagtgcagtggcaatctcggctcactgcaacctttgcctcccgggttctagtgattctcctgtctcagcctccccaatagctgggactacaggcatgtgccaccacacctggctaatttttgtatttttagtggagacgggggttcgccatgttagccaggctggtctcgaattcctggcctgaagtgatccatctgccttggctcccaaagtgctgggattacaggcatgagccatggcatctggtgagctttgataccagactcctttgctgaag

SEQ ID NO: 45142 - DNA, 1051 bp, Homo sapiens
ttggtacttagtatgtctataagcatatggtgttttttttttttacatttaagaaaaccaaggggaaattgacaacataaagttaataattttagagtgaacagttcagtagcgtttactatattcacattgttttctgtccaattcacaacattttcatcagtccaaaggaaaccccacactcattaagcattcactccccattcctccctccgccagccctggcaaccacagtctgcattctgcctctgaatttacctattctgcatatttcatgtgaatggaatcataccaaatatgcccttttgtgtctggcttctttcactcagcataacattttcaaggttcatcagcatcgtagcacgtgtcactacttctcttctgcttgtttgtgggtgaggggctgaattatattttactgtatgtctctaccataatttggtcatcctttcatccattgatggacaaggatgggctgtttctaccttctctggctattttgaatagtgctgctgtggacctgcgtgtacgtgcatttgtttgagtacctgtttttttaagaatataatcttagagcattgcttaaggatggacttggggttatctgtatctgggtccttgctactcagagagcgatctggagagcagctgcatgagcatcgccaagcagctggttagaaatgaccattgcagacccaccccagacctattgagttagactctgcacaggtgaatcagatgcatattaaaatttgaggagtagtgatctagtcagtctttggactggctgttttttaatgtatttattttaattaggaaatgtaattttcatatattttagtccaagaaaatctcgagcagcacacaggatccctgcggatggtataacttacacctgggcccttttaccaccatgaaaaacatctatcaggatagaattagtagaaaagctgataaacttaggacacagtgagtggtgtctggtgtctagtgtctagctttcatttacatttgtaagcaagtggttaattcatggacctatggaagttgt

SEQ ID NO: 45143 - DNA, 1061 bp, Homo sapiens
gttcccagtgttttgctataggtgacttaactcttggtcccagttgtcaaggaaggggctgctctggggagaggtggtttgagtttccttctagactatgtgcttcttggctacggtcttaggtgactgggactgaggctttcacagaatagagatggaggtgttcactgattgaaaacaggtctcattcttgctcttgtatcttgcttccttcccctcccagtgggctaccttgagaatggagcgaggagccaaggagaagaaccaccagctttacaagccctacaccaacggtaagatgggggtgtgatccttgtcctgagaggtccatttgaacagtgttccccagtgcttctggtgccacacacgctcttccctgcattagtgcaggatgtgtgctctgagtatgtctcacgtgctctcccccagcgtgctgcttgacagggacacattcttttgcaggaatcattgcaaaggatcccacttcactagaagaagagatcaaagagattcgtcgaagtggtagtagtaaggctctggacaacactccagagttcgagctctctgacattttctacttttgccggaaaggaatggagaccattatggatgatgaggtgacaaagagattctcagcagaagaactggagtcctggaacctgctgagcagaaccaattataacttccagtacatcagccttcggctcacggtcctgtgggggttaggagtgctgattcggtactgctttctgctgccgctcaggtgaggcagggcctgcgggagtggggctcgctgctgccaccccacgtggtgcacagcccacctgcctgctctgctgtgtattcccgttttagaaaggaggagggaatgactgtcgttagccaggccacgtgactctttggagggatacactggtgattctcctttagaggcccttggattctctgcatatcagacagaaatagttggatttcttaaagacagcttgcttctctagatgacagcaaacacagggacagggaacattgtgtgctttctgccactccttcctggacatggc

SEQ ID NO: 45144 - DNA, 1023 bp, Homo sapiens
ctgtgcttccttgaccttggggaacctggatcagggatgcctggactgaggcagttgattctgtgtacctttctggggtttgaaccagtcttccaggacacctggacagtgcccatctctgggtgggcatgacctgctactgatctgaaaacttcaagaaggaaggaggactttcccaggtcccagtgtatctggcaaaattgaaccattcttagaaaggtaaaggttgtgtttggtgtattcagcttgttacctaatagagcaggattgacatactttttctgtagtcagtaaatattttaggatttgcaggccatatggtgtctgttgcagctactgatgatctctgccattgtagtgtgaaaacagacagtctataaaccaatgagcatggctgtgttccaataaaactttatttacaaaaacaggtatcagctggatgtggcccgtgggctgcatttgaccagcccttatactagagtatgaggtagttttatcccaaacagtaggagactgacaggggtcaatgctggttcagagaaagttttccactctgtggggcatttaggtttaagagccaagggtcaactggggagagcatttgacttagatgggcattatctatgagaaaagaaagggtagaaattcacattgtaaacccaactgtagagtctcagggaatagattggctctcagatgatggccttttaaaaaatgctagtgtggattgtgcactcactgtgtgccagtcactgagctgctggggccctgtgtgatcgtctctttcgccctcacagtagccgcagcgctgtaaacagtgttcccattttgcagatgagaaactgagactcaaatcacttttttccaaagtcataacattagcactggagctagattttgaacccacatctcacagacttttagagcttgaaggtttaacttctgccccatgttcccatctctgaagtttaacaaagacagagtggctgcttttaaaatctatgcctttgctatggattttaa

SEQ ID NO: 45145 - DNA, 1068 bp, Homo sapiens
tcgctgcttttgtttttagagttgaaaacttacagagtcctgaggctttcagactgaaaaaggctttcttctgtcactgacaatcgccaccatgatccatagtcttttcttgatcaactcctctggagacattttcctggagaaacattggaaaagtgtggtcagccgttctgtttgtgattacttttttgaggcgcaagagagagctactgaggcagaaaatgtgcctccggttatccctacccctcaccactatctcttaagtgtttaccgccacaagatcttttttgtggccgtgatccagacggaggtcccccctctgtttgtcattgagtttcttcaccgagtggtggacacatttcaggttcgtgaatgtgggaaagttcatatatgtaaaccgtaaagtgtctttgtagtcctgtttccattgtgtaaagcctccattaagaaacttaaaaaaaaaaatcaaaactctggtattactcacttcctctcccatctgataagattctggtttctatttattgaattggctgcatgcaaaatgacaaatggaatacttttgaacctcttgcgtgggaaagtcatcctatttgcgatgactatatatagcctttctagctctgattctactttttgctcacaaattagagtttagattgtttttgcctggtggtcttgatcctaaccattgttatctgcattgctttgagttgcatcagaaagtgattgtataaagttttagaaaagaaaaagtagaaaaagctaaggaatgcttaatttaactctcccagtcaggggtaactcatgaacctgtactagttctcaggtttgaggtggttctttatagtgagagagtggtactgatgagctctgcttgcaaagatgagattgggaaatctcatgtgcctgtaagaatttaagtgagccattttatgaggcagttttcattttaagctttttcttcaggaatagatgttaagaacttagggggtgatgtccaagggaggtcagtgataccaggacacgacaccatttgcagcacaggagttcagacagcaccggccc

SEQ ID NO: 45146 - DNA, 1030 bp, Homo sapiens
atgggctgtaaatgaacattgaagccttgggaagtaggtaaaataacccaggagagtgtgtaaagtgaaagaaaatagaagttcagaactgaaaaagcatttaagggatgtgcaaagaaagagaacctgccgaagacactgaggaagaggagctgggaaaataggacaccaggagaggttaggagggagggatgtttgagaaggcagaagtgattgacagtgacacatgccacatagaggatgtatagaataagagactgggagtgaccactcactttagcagcagagctcattggtgaccttagggagaacagtttctgataggaaactttctgaaccattggctaaaataatgatgctctgtttaattctgatattagactgacaactcctttaggctaataactacttcattaatctttttatcaccgttacctcaccatagtgtctcatgcttgatgtgcagttgataagtgttcagaatgatggatagatggattgtataaatgaattggatggctaggcagaaggaaagaaagggagagagaggaaggggagggagagagaggaaggtgagggagagaggaagagaaggagggaggagataagtttgttgagaaggacagagaagtattcagtaatctgtgttctttttgtcttattcctgtctcaggctccacaattactgctgagatccagggggtgattgatgcctgtgtcaagctgactggcatgccagaccttacactttccttcatggtaaaatcctgggccagagattaagttcttgggatgagaaattaaatgctgctggaaagacagagtagtgggaatggaatagaacaagaagaaataattaggacagccacgaagcttgtctcaggcttgaattttctagaagtcactacatgatttctgtgtgtgtgtgtgtggtgtgttttaattaaaaacagcatttaaattgctttcctgaaagcactgcgggtgtttaatgcccacttcttgcttctcctctcctgatgactgtaga

SEQ ID NO: 45147 - DNA, 2031 bp, Homo sapiens
ctggtgtggtggtgcatgcctgtaacttcagctactcaggaggctgaggcaggagaatcgcttgaacccaggaggcagaggttgcagtgagccgagatagtgtcactgcattccagcctgggtgacagaatgagaccctgtctcaaaaaatatatatatatatatatatttaaaatatttgctaattatgatgtcttcccagtattgcttgcgatactgcacggcaaaaaataagcagatccacatgaaagtgagaattcatttagaatgatgatgaaaatccatatttcaaataattaacatttttttaaattttgtagagatggggtcttgctatgttgcccaggcttgtctcaaactctcatcctcaagcagtcttcccgtctttgcctcccaaaatgtttggattacaggcctgagccatgggacctggcctcagctgaggttttttttttattttttgtagtgatggtggtctcacaatgttgtccaggctcgtctagaactcttggcctcaagtgatcttcctgccttggcctctcaaagtgctgggattacagccatgagtcattgaacctggcctgtttttatttttaattgacacataataattgtacatatttatggggtacagtgtgatattttgatacataatgtgtaatgatcaaatcggggtaattggcgtgttcatcacttgaaacacgtatcctttttgttggaaacagtcaaaattctttcttctggctattttgaaatatacaatatttttttttttccggagacagagtctcgcactgttgcccaggctggagtgcagtggtgtgatcttggctcactgcaacctccgcctcttgagttcaagtgattctcctgcctcagcctcctgagtacctggaattacaggtgtgcaccaccatgccagctaatttttgtatttttagtagaaatggggtttcaccatgtaggccatgccggtctcaaactcctgacctcaggtgatctgcccacctcagccacccaaagtgcttggattacaagcgtgagccactacgtccggcctgaaatatacaataaagttttattcactgtagtcaccctgttgttctttagaatactgtaacttattccacctaaccgtaattttgtacccattaaccagtctctccctatttccctccacaactccccccacccccaccaccctttcctgcctctggtgaccactattctactttctacttctgcgagattagtttgttgttgttgttgttgttgttttgagacggagttttgctcttgtcgcccaggctggagtgcagtggcgcgatcttggctcactgcaacctctgcctcccaggttcaagtgattctcctgccccagcctcccgagttgctgagattacaggtgcctgccaccacacctggctaatttttgtatttttaatagagacggggtttcaccatgttggccaggctggtctcgaactcctgaacttaggtgatccccgccggcgcgcccccccccccccccgccatcccagcctcccaaagtgctgggattacaggtgggaactaccgagcctggacgagatcagtttttttttgtttgtttgttttgttttttgagatggattcttgctctgttgcccaagctggagtgcagtggcacaatcttggctcgctgcaactggtgtctcccaggttcaagcgattctccagcctcagcctcccaagtagctgggattatagccgtgcaccaccacgcctggctaatttttgtatttttagtagagacagggttttaccatgttggccagtctggtctcaaactcctgacttcaggcgatctgcctgcctcggcctcccaaagtactgggattacaggcatgagccactgtgcctggcatttttttttttttaatttttaatttctttggagatagggtctcaatctgtcatccaggctgagtgcagtggtgccatcatggctcactgtagccttgacctcctgggctcaaatgatccttctgc

SEQ ID NO: 45148 - DNA, 1077 bp, Homo sapiens
ggcaacatagtgagactccgtctctacaaaaataaaataaaaataaaaaaaattagctggacacaatgacacatgcttgtaatcccagctacttgaagctgaggtgggaggatcgcttgagcccaggagttttaggcagcagtgagctatgatcactccactgcactgcagcctgggcaacagagtgagaccctgtctctaaaaagaaaaaatagcaacaggttttacaattgttgagagaggtcagctcttgttcagagagcgcctcagaatctaggccaaagatcagggttctactagacaaagagaatgagaaggatacttagggcagaacctggatgcccatgcctactgccgcagactggactgagggggtctcccatagtcacagacgtaagcctgtggctgcaccatgggtgagccttggaaacagtgctcagggaaagaagcctgtcacaaaaggccacatgatatatgattccatttatatgaaatgtccaggacaggctaatccgtagagacagaaagaggtgggtggttgcctaggactagaggggctcggggagtagggagtggctgctgatgggtgtggagttttgttgtgggatggcagacatgttctaaagtgtgccgtggttttggtctcacaactcttgagtatgccagaaactattgaactgtgtaatttaattggatgaattgtatggtgcatgaattattctcaatagagctgttaaaaaaaagtaggcatgcaaggtcaccatctgatggaaagcttagccaaagtggtattgggctttgatgaaagcagcttctgagagtattttagaagtgttgacagtacctcctttctggcatggagtctgctgttccatttccacctttttttctgaagcttttggttcttggtgtcggtgttaaggattggtttattggtcagtgactcagtggtcttattagacagcttctggtgtatgtggaggtttccatttttccttttcttgctgtgaaggtccttgttcctgcagggatcctggccagtttggtaactgtgagactgaggtggcttgagtgcca

SEQ ID NO: 45149 - DNA, 1443 bp, Homo sapiens
aatggaatttggatcccagagatgctccaagactgttccttgtggtccctgcaggatgaatctcctccgaaacaacagctgcctctccaaaatgaagaattccatggcttccatgtctcagcagctcaaggccaagttggatttcttcaaaaccagcatccagattgacctggagaagtacagcgagcaaaccgagtttgggatcagtgagtgtgcactttgcaatgagtttaaagacaccatttttttttctttttctctttctaaggtttcttttgtcctattataattgagttgcttatttctgtttcagttttgtggtgtttttattttgttttgttttgtttttccttctcaattttttttcagcatcagataaactgctgctggcctggagggaaatggagcaggctgtggagctctgtgggcgggtaggagactcattttgggtttcggaacttaccaagggggtgagattttgtgctcccacttttcactttctcatcaaacactgggtcgatctctgtcaaaaatcaggtgttcctcaccatgctttgagcttaactggaccagctgaaaagaggccaagagagtagccagtgaagggagcccctctgtggccagatgcaagagctgcatgaatggacagagatggtccaggtttaaataagaagcaagggttaggttcccttggggaaaagccaagaccatttcctgttaggaagggcattggattgatgatcaacactccctcttgtcgaaggtttttgactaattttgttgggatgctaaatccataggaaataaaaggtctaggcagaaagtctcagggcagcgtaaatcagatgtcaccaaaaaaagttaattatgaaggcaaaggaaatacatgtgacttaatgaacctcacacaaactgaaggttgaagtcaggctccggggctttttcctggacttatcctctgttttcccctgtgtacttgggcaaggatcttcacctgtgtcttagtatcgatttttatgaatcagtactgatggagtatatgtgtgtttaatggtgaatattaaccatagaagggctgagtgctcctccccatcttgggactcataatctgtgaaataaaacagtctgggcctccctgcccgggtagcatcaggatagacagatgaagagaagagaaagtaatgtgtcttgggcatcttctgtatgccaggcaccatgccagaggctttaagtacttcatcttacttgactcctcagatggccctgttagaagcctattttatgcaaaaggaaactgtagctgggggtaagtaacttgccaaggggtcacacagctagaaagcggtggaccctagatgcaggcgcagccattcagaccccacagtccacattcctttgagccagtccattgagggtcctcagggaatgtggcgggtcccctgg

SEQ ID NO: 45150 - DNA, 1045 bp, Homo sapiens
atgaatacacttcaattcgtatggtaaattcttattttaagaactgaatttcagaggagaaaaatgttaaccctgaggattttgattgcatcttttaacagtttctttaaaaatttccattgttgtcttatacaggtctttggtttcataagagcctgagagagatttttctaaggtaaattttgcatatatttttaaaagaagtccagtttaacatagcatctttttcatcctgtaagaacttacttttctttgaaatgcaatcagaaagatgacctctgaatctcacgggaaaactgttttattctcagtattctggaaaggtctgttttttaaggagcagactgctgtctcatacctttgattgcattaaagcattaatgatacacaggaagagaaaactgtataccccttctcacaggattaaacagcagaagaactgtgggtgaataaatactaaatggttatttttattcctttgccctgtttttctttataagatatgtgtaacacaccaacgtactgtgacctaggaaaggctgctaaggatgtcttcaacaaaggatatggtaagtatgctattgtaactttccagtttggggtaaaggttagtgttgaatgcctactgtgtgtaaatactgtgttagtaaaataagggtaagtcagcattattccacttcacaagatttaaggggataactattaacaggctattagacctcattctttagaggcagaaccccttacaagcattaaaagcaattatatacatatacagatgcatatacatgtccatatttaatgttatctggaatgtagaataatatatataacatttatgtctctttgtctggccctgaggacaattaaattagggggtagaacttttcctccctccaaacagtggcattgtttttatgaaagtgacaacataacttttgacttctttggagtaatgtatattctgatcctaaataaatattttttaggttttaaaatttaacttaaatttatgtgctgtacatatttgattttttcttattaa

SEQ ID NO: 45151 - DNA, 1068 bp, Homo sapiens
agatggtaagaaaaaaaagcttattcgtatgcttgtttttatggctgcttttggtttctggtattgatttaggataaatttcaatcattgttccaaatttcttagattgtgtcttgatatttttctcatatgctatctacttaacagtaacatttttgtttgttttgttgcttactaagcatttaatgtagagctatatgcatgttatatgcatgttataaatgtgttttgcacttgtttgaccaaattatgaaattagacacaaactgaactgtgaatcgtgagcctggaactcaacttagaacaattctagcctttttttctgagatttgtacctgtggcattttagattcgtgacagaccttcaaactaagaattgatgctgacaagggagaaatgtagactacccctctaccttaattttgtgcataaggtttttctagcaccaaaattaagatttgcatttgttatacttgtcaagtttgtgaaaagtaaatgtaaaaaataaaacactagatagttggatctactaaaagaaaaatgattgtcacgttaaaataattatgtgaacagttaaacatgattaacatgttatcattttttttttactaaggccttcccctaaatgtgcagcatgatactctctttgaaaccattctgtgtggtttgataaacagaacataacttcccagttgtctcatctgcctgtagaactagagttaggggacagggcatttgttaaggagaggattcatgttgcaggcagtgaaaaagactggtcagggttggcagcatctcattactgttggcaggatttcagaaatgctccctaaaacaggaccaatcagaatgttttttcttgacagttcatagattgtcagtgacaggtgctgtctgctttccccagaaggaggtccatttctaattgcttattgtcatatgacttaaagggcactgaactagggcaaaggatgtattttattttattttatttttttgagacagagtctcattcatagtaactgtttgatagaaagcactcttaaaggtagacaggatagaaagggg

SEQ ID NO: 45152 - DNA, 1077 bp, Homo sapiens
acccagctacaatccacaccattgattccatctgttgtttctagaaagttcagatctaattgtaatacttgtttcaagtgattgtggtgttttcttcttcctaggagtcaaattgactttatcagctttaatcgatgggaagaacttcagtgcaggaggtcacaaggttggcttgggatttgaactggaagcttaatgtggtttgaggaaagcatcagatttgtccctggaagtgaagagaaatgaacccactatgttttggccttaaaattcttctgtgaaatttcaaaagtgtgaactttttattcttccaaagaattgtaatcctccccacactgaagtctaggggttgcgaatccctcctgagggagatgcttgaaggcatgcctggaagttgtcatgtttgtgccacgtttcagttcagttctgaagtgttattaaatgtgttcctcagcgacagtgtagcgtcatgttagaggagacgatctgacccaccagtttgtacatcacgtcctgcatgtcccacaccattttttcatgaccttgtaatatactggtctctgtgctatagtggaatctttggttttgcatcatagtaaaataaaataaacccatcacatttggaacataactgctcatgtgacttgctggtgatggttttcttaccttgatgtgatttgttttaagaagcactttcacaggcgagatttgtgtctaaagtatcagggctgccgtctgtccctttcacttcactgacccctgctcttctcttgctctcacagggcaggctgaggaaggaagcagtgaacatggttgtgctggggagtggcacatctgttgtgcttgtggtgtgacagggttgcttcaccccgggagttgtgtgcagctgctgagaaagtgtggatgtgagcgggtgaaaagacagttgagggacgagtgcatttggggaagcatggggaggagagacggtgggaggaggccagagctgggtggacacttctgggactcctcctgggcttcagaaacatgatttttgattactagtatagaaaaatgataaccaaggaatgaagtacc

SEQ ID NO: 45153 - DNA, 1042 bp, Homo sapiens
cacctcatcattatttcatagtaggcaaaaattgaatataacccaaggtctaacaatagaaaattatgaaacatgttgtaggacaaatgccattcagccatgaaaatacatatttataaatactctttaataatataaaagtgtgagattgtatatgccatatgataccagttttacatgaatatacataaatgtgtttataaaaatgtgtatgtaggtccacaatttcagatcccaatcctttaggccagattcattttggaattcagagtttttcagatttttggaaaggtaacatgatgcatacactacgtattgtgtaaataacccagtggggcctggggttacaccattattccattatattaacatttctgcagcaaaacataagattattcactctaggataaacaagaagaataaattcatggttctgtcattgcctttcaccctccttctgggaattcctttgtctttctcctatcttattttgtttgctgaattcggtgtatttctcttttttggtttactttcatgttttggtagagcccattttctagtggcatcttcagaaaaatacatgagagatacttattttaagccccacaaatctgaaaataatcttagttctctttacactgtggtttagttgaatatggaattccaggttggaagtcattcctctgtattttgaaatcattgctccatgccctgtggcttccagtgctgctgctgacatctctcatgtggactcccactccctgttggtaacttgttcactttctgggaccttttaggtcctttttatctccatgttcatgctgctgtgctttggtatgagaaggagtttttttgttgttcttttcttttgttttattgcgcttggcacttagcacacccttaaaatctgaatgcctactagctttagttttaggaaattttcatcttattattatttattttatctcatttatttatttatttattttattactttacttttctttactttatcctctttctgaactatttagctattgaa

SEQ ID NO: 45154 - DNA, 1113 bp, Homo sapiens
tgaaaataggtagtagtgatggttacacaacattgtgaatatactgaatgccattctgttgcacacttaaaaatgcttaaaatggtaaaataataatacttaataatattttaagaccactgtgacgtggtcctttacttgaaaatgatttttgctgttaaaattaatgctcaaagtagggtttcatatcgaaagttgtgtaactgtgttttccattagccttatatttatgtttgtatatttacagggttaatgcctcttggaagtcaggagtcttcagacagtctagctgcagagattgttacacctgaaatcaggtaaggagattgtggtgttcacacttacactgcacagtattcttggagaaaacgtacttctctacaatatgaagaagataatttccttattctttctcaccgacactttcaacatgaactcagtgttaaatttttatgttttcaacatgttaaaagctttcttccactggcctacggaaaattgatttgctcacttcaataagacaatctttcacacatataaagccaattgttatgtccaaagcttgagtatcctcagcagacattaagcaatgaatacatttggcctgtagacaatagttatgcttagctataagcatgcaaaattattagttattaagatttatctgctaaccagctgggcttggtggctcacgcctgcaatcccagcactttgtgaggctgaggcgggtggatcacaaggtcaggagatcgagaccatcctagctaacacggtgaaaccctgtctctacaaaaaatacaaaaaattagccatgtgtggtggcgggtgcctgtagtcccagctactcgggaggctgaggcgggagaatggtgtgaactcaggaggcgtagcttgcagtgagctgaagttgcgccactgcactccagcctgggggacagagtgagactctgtctcaaaaaaaaaaaaaaaaaggtttatctgctaaccacacggaaaggtctgggaaagataataatgctatagacaggaggaaatgactccccatcttaactattcttccctcaatcataccttatatttttaatcatagcattttaaaaattccatttattt

SEQ ID NO: 45155 - DNA, 1797 bp, Homo sapiens
actgctaccaatcatactcttttccttggaaaaaaatcactttctacatttaatttgaaaggaagtatgattgagtatgggtaaagtctgtctctatcatctgctgtattgtttattgtaaaatcagacaattaagcctgaatttttccaaaagaaaatttgtgcctaattatgggaactaaaatgcctctatgagattttaatctatagtgagtagtattaacattcctaattgtgctttatgatacactgtaacaaattctgcatgatgaaattttcttttgtgaagtatgttccactattttttcattgattcctttttttgttttaatgttgcagggaatgaccctgcataaaaaggcagctgaagatagactggcaagcacaggctcagggcagtcatttctggcgaggcagaggcaagcgaccagcagcagaagatcatacccaggccacgtgcagccggccacagcaaggtagagaagttgtgccgctcaatcacagacacctgcacccacaacatacttctgttacacacaagaacatttcaggaaactcagccagcttattttttgtttctcttctatgtcaatacttagtgtttctcattttgaggactttttctctctcctgtatctttgttttagtttctttggtttttattttgtagtcctttcagttatttttaatgtgccaaaaatttgtacatgttcaattaaaaatgttgtataatagtgtaatacttttctttgtatgaaaatgtcctcttcttcaaaggtataggctttgtaatgaattagattttctgccaataattgatatacaatttatattctttattgtgcctgtgtgttaccatgctaagaatgtctttgtttaaagggaattaatctttttatgatgtattaatctgtgttttcaattgttttccaagtacagttcaaataacttgcatatttactatacaaaatggttgacaagtgttctttttgcaaagacttgaatacattggcagaggtgctaatcacatcttccctaaggcacctggaagaattatttgaggaaaaaatgagttttcacattgttttataggaaattaaatttgtccaaagatttggagactatttttaaaacataaatacataaaatttcattatttcctgctatcttgtttgctggcagaagtgaatgtttggtgaggttattttgggataaattacaaaagaaaaaaaattagacactgcattaatttcttgttcttttggaatatcttagtaactgaggatcattttctaacaatgtggttgacataccttcagttgctttccacatctaaaagagttatctttcatatatgtacaagttattggtagtcttatttttgggctgtttgttgacttatgccccatttgttttacttgttctttaatataaacccttccattttttaacaattcctaacacttgatatcttaatatcagtcactaacattagtaacttcttgtatgttatattatggcagatctctttacgttttttctcacatctatctgctagtccaggaatttgttactaaatagattttcttggatatttggttgcctcaaagtgcttacatttgttaacagattgtaaaccacatttatttacattgatgaatgggctgttgaataatcattgtaaagcactttgtatatataaggtgctatataagtgtgaaatatcattcatttataaatgaaatgccttctaactttccatattgacttatgtatttggtcccaaattatatttaa

SEQ ID NO: 45156 - DNA, 1029 bp, Homo sapiens
agtgtcatttttgttttctttgtaccaataggtaatttgtcgtccagatgctctgctatatgtgaagtatcatttttctattgaacacaggtcatccttcagtttcatttttctcttcaccaattggatgctgcatacctggttttcagctcattcatgtgttagatcccctgtgtcctagatcgtatacctttctctttcttgatttactttctcattttatagagcacatcattgagtagaaagatggaaaataatttttgggatttatacaattaaaaatcattagtctcccttcaactttagtaataaaattgtagattggaaattattttccctcagaattttaaaactctttttctgtttctcttagcttcttttcaggttgagaagatttccattcctttgtttaaaacttttctttttctctttatgttctggggatttttctgggttcttctgataatttcttctctttcctctgttttctttttctggaatgccttttagttctatgttgtatctcctcaatttttcttattttcatttgtttatctttttattttcttttgagataatttcatcaattttattttctaactctcgtatggatttttaaagatttctgcattcatttttaatttgggggagctgtttttttgttctgtgaatatgcttttttttttttgagacagagtctcgctcagttgcccaggctggagtgcagtggctcgatctctgctcactgcaagctctgcctcctgggttcacgccattctcctgcctcagcctcccgagtagctgggactacggacgcctgccaccactcccagctaatttttttgtatttttttagtagagatggggtttcaccgtgttagccaggatggtcttgatctcctgacctcgtgatccgcccgcctcggcctcccaaagtgctgggattacaggcgtgagccaccttgcctggcctgaatattcttttttaaatagcatcgttcgtgtgtgtgtgtgtgtgtgtgtgtgttt

SEQ ID NO: 45157 - DNA, 1030 bp, Homo sapiens
ccagcctccacctgctaccctaagcagcctccttctgctgtcctttgtccaccctctgtccctgtcccaccagttgactaatacattttgctttcattttactgaatattcatgagcatctatttaatgcatgctactgtgagtcggacagagtcagacacaaacacctcccacctaacctaatctagaggaacccgcattttagtttgtaataaaaagtaatgattatggaaacagctaacattgggcatttgggataagcctggtgttcgatacctgctttaatccccacggtaacgctgcagcttacaggacccttgagtagaagaggcatcagaacacatttttggaaatgaaaggaagtgaaagctgactgtcatgacttcttgtttcattgtgtattttaggaaattgcagaggccgtcaacatggaaaagcagccccagaacagcaggagaggcctcgccccccgagaggtgccgccagctgttgggctgctgctgatcatggccctgatgaatactctgctctacctctgcctcgaccacttcttcatcgctcctcgacaatccactgtggaccccacacactgtccctatggtcacttcaggataggacagatgaaaaactgctcaccttggctgtcctgcgaggagctgagaacagaagtgagacagctgaagcgtgttggggaaggagctgtaaagagagtgagtccgggttcatttgcgattgctgtcatcctgttatttcgcttaacacagtgtcctccagctccatccatgctggcacggattacggaatttcatcctttgttactgccaaagtgtactccattgcatatgtgcaccacatttgctttggttgattctgtatcttggcaattgtgaatagtgctgcagtaggcataggtttcagcccttagggaagcagtgtggcatccagtgttaggagccctgctagctctacgtttttattgttgagctcaataatcttacatctggcactttatctttttttttttgagagt

SEQ ID NO: 45158 - DNA, 1016 bp, Homo sapiens
gctgcggccttgcagtttgatctcagactgctgtgctagcaatcagtgagactccgtgggcgtaggaccctccgagccacgtgcgggatataatctcctggtgtgccgttttttaagcccgtgggaaaagtgcagtattagggtgggagtgccctgattttccaggtgccgtctgtcacccctttctttgactaggaaagggaatgccctgaccccttgcgcttcctgagtgaggcactgcctcgccgtgcttcggctcgtgcacggtgcgctgcacccactgtcctgcacccactgtctggcactccctagtgaggtgaacctggtacctcagatggaaatgcagaaatcacctgtcttctgcgtcgctcacgctgggagctgtagaccagagctgttcctattcggccatcttgccccttcgatgctttgagatttttaaacccaagattacattaaaagaaccagttgtgcactctcccagtcatctcaaggacacagtacacctgtgtcaggggagctgctcaaagtctggaatgtagatttggggcaacaggtatattaagaagaaagattatagcagagctgggagtcaaatttttttttctcatcgttataatgaaatgacttattgaagggcctgttgtatagtacattaaaaatccatacagtatagcttggatcctgtcagaagagtggatttgattctttctcttaaattattttgtagctctcattttgtgtaacctttgggaggatcccttgtgatgtcttaatgtttgaggctatatttaatgcttaccttctggaaagatgttacatgaacagtctgtttaaagcatggaggaatagtgtccacttcttggcctcttgccagctctgcctcctcatcccttccatcccttctaatcctggacctctcgtcttctgtgcttgtaccccgcatgacgtcatccagccttctggcttcatctgtgcagagactgcttccctgaagttttctatacagctgccta

SEQ ID NO: 45159 - DNA, 1022 bp, Homo sapiens
gtgtggtggtccattggaactggcagtctacttgccactcctccctgccatgcagttatatggagtcttccctcctgagctagcactcccctgccctacattgaatctgcaggtccccctcgttctatgagaccagcttcccaaagccttccagcaccctctgcagcagctctcagtgtcctgcccagaggcaatcgcttcctgccctgaggttccacccactaatgtggcacttgccttgctgaatgctgtgtttgctcatcggtctctcttcataactagacggagagcaactctacgatggggtctgcaccttgttaatttctgtatcttctgcagaacacctgccacttaaaagatatttgttgttctttggtcactaaattaggtgagagttcaggcctgatgctctctatggctttgttgcaggtctttctgtctgagtggaaggagcacaaagttgcactctcacagctcaccagcctggagatgaaagatgatttcctccatggactgcagatgctgaaatctctccaaggcacacatgttgtcacgctgcttggctattgtgaggatgacaacactatgcttactgaatatcaccctctaggttccttgagtaacctggaagaaacactaaacctttcaaagtaccaaaatgtgaacacgtggcagcacaggctggagctggccatggactatgtcagcatcattaattacctgcaccacagccctgtgggcacacgggtcatgtgcgactccaacgacctgccgaagacactgtcccagtatctgctaacaagcaacttcagcattttggcaaatgacttggacgccttacccctggtgaaccacagctccgggatgctggtgaagtgcggccacagggagctgcatggggatttcgtggctccagagcaactgtggccctatggagaggacgtgcctttccacgatgatctcatgccctcatatgatgagaagattgacatttggaagatcccagacatctccagtttcct

SEQ ID NO: 45160 - DNA, 1006 bp, Homo sapiens
ggctaatttttgtatttttagtggaggtggggtttcaccatgttggccaggctggtcccgaactcctgacttcctcggcctcccaaagtgttgggattacaggcatgggccactatgcctggccagttgttagatttccatggatttgtagtttccaaagtttctcgttattgatttctacttttcttccattgtggtctgagaaggtacttgatatgatttagatttttaaaaatttattgagacttgttttgtggtctaacatatggtctatgctgcagaatggtccatgtgctgatgagaagaatgtatattctgcagctgttggaagaaagggtctgtaaatgtctgttaggtccatttggtctataatgcagattaagtctgatgtttctttctagatgatctgcccaatactgaaagtgaggcattaaaatcccctgcttttttttgtattaggatctgcctctctctttagctctaatagtgtttgtttatacatgtgagtactttggtattgggtgcatatatatttaaaattgttacatccttttgctgaattgatccctttttcattatgtaatgatcttctttgtccctttttatgttttctgacttagtctattatgaataagtatagctactcctgcacatttttggtttaaatttgcacggaatatttttttccatctgttcactttcagtctatatgtgtttttacatgtgaagtgagtttgttataggtaacatatagttgaatcttgtttttttaaaatccattcagccagtctatgtattttaattggagaatttaaattatttacattcagggtttttattgataggtgaggacttagtcctgtgcatttgttttctgattgtcttgtatatattttttcctatcttttttatttatttttattttttattttgagacagagtgttgctgtgtctcccaggctggagtgcagtggcaggatctcggctcactgcaacctctgcctcc

SEQ ID NO: 45161 - DNA, 1027 bp, Homo sapiens
atatatattatcccattctctcctgacctgtaagtttttttttttttttttaaacaggaaattctcttataagtgacttgatgctttccttttgctgtttttagaattctctctgtgtttgacttttgacaatttgattgtaatgtgccttgcagaagacctttttggtttgaatcttttttgggattactgaacatcctgtatctggatgtctgtatctcttgcaagacttaagaaatgtttgactgttattttgctaaataggttttctgtgcctcttcccttctctttcctgaaacaccgagaatttatttggtctgactgggttatttcaaaagacctgtcttcaagttcagaaaatcttagttttgctttatctagcgtacttttgaagctctcagttgcatttttaaattttattcattgaatttttcagttccaggatttgtttggttatttttctatatctatctctactgactgtcttattcagatcatgaattgttttcctactttgtattatctgtgttctcttgcaacttgctgagtttccctaagatcattattttgaattccttttctggcatttttatagatttccttttcttttgaatctgttactggagaattattgtgtctctttggaggtatcaaatttccttgctttttcatgtttcttgtgtccttacattgatatctattcagctagtggaagagttgcttcttccaattttatggattggctttcataaggaaagacttttttgtaggcatatctgtagttttggttgtgattaggatgttttggctttgattctggtgagcacaggagtgtaggctcaatgatttcttcagctgtaaccaatgtaactggtgtcatgtaaccatgtcactgtgagtcctcagtggcttaagttgccattgttagctgaggctgttgtgaggcttttctggggaaagggatgccagaggggccagtccctgggccttttggtggcatgggcaggctttagctgtggtggcgatg

SEQ ID NO: 45162 - DNA, 1052 bp, Homo sapiens
gttctttgacttttcttttcccagaaatgggattcccctcctgcttctgagccagtccaagacatgctggctgctttatttactgctccctttgtgcctcagaagttccctgttgaatagtgttctgtctttggtgctctacctgacatgtggttaactacttgcttttttggtcctttgttgtgcaggagttgagtgccaggctcacggttttttgattaccatagttttgtagtttttgaaattcagaagtgtgagacctccaactttttctttttcaagattattttggctgttgagtcaattatgattccatatgcattttagatggatttttctatttctggaattgtgccattaggagtctgatagatactgcattgaatctgtagagtgctttgggtagtattgacatcttcccactattaagtcttccagtacatgaacacatgcattttcctgatgactaatgatgttgtaccttttcatatgcttattggctatttgtagatcttcctgggagaaatgtctatgcagactttttgccaattttttaatttgtccatttaaaaatcagggttttttttgttgttgagttgtaggagttctttttgtattccttatactagtcccttatcagatatatgctttgcagatattttctcccaggtgggttgtcttcacttccttggtagtgtcttttaatacacaaagttttaaatttttatgaagtcaaatgtatctacatttttctttggttgctcatgcttttggtgttgcatctaagaatccactgccaaatccaaggtcatgaagatttactcctatgttttcttctaagaattttatagtttttgctattacataaggtctttgagccattaagatctttgacttaacttttgtatatgatgtaaagtcactgtcaaacatcattcttttgcatttggctgtccaggtatcccagcattatttgttgaaatgcctacacttctttatattcccttgactcctctaaccaaggcagttggacctttgctactaccactgcc

SEQ ID NO: 45163 - DNA, 1048 bp, Homo sapiens
caccaggagctatttctttctttcttttttttttttttgagacagagtctcgctctgtcgcccaggctggagtgcagtggtgcgaactcagctcactgcaagctccgcctcctgggttcacaccattctcctgactcagcctcccgagtagctgggactataggcacccaccatcacgcctggctaattttttttttttttgtattttttagtagagatggggtttcaccgtgttagccaggatggtctcaatcccctgacctcatgatccaccctccttagcctcccaaactgctgggattacaggtgtgagccaccgtgcctggcccaccaggagctatttcatagggctcttggggcctggtggttctttggtaagtgtggttctttgtattacctgggagatctcaaccatcacagttgtcattagaaatcagcacaactgaattggagagaaattttgtaatgcatatcagaagctattcaaaagcctgtttttggttaaagattttactcttgggcccggtgtggtggctcacgcctgtagtcctagcacttttgggaggtcgaggtgggcagatcacttgaccccaggaagttgagaccagcctaggtaacatggtgaaaccctgtgtctacaaaaaaagacaaaaaaaaattagctggatgtgctggcatgcccctgtagtcccagctacttgggaggctgaggtgggaggattgcttgaactcaggaggttgaggctgcagtgggccgagatcttgccactgcactccagcctgggagacagagcgagactctgtctcaaaaaaaaaaaaaaaaaaattttaactggatgttcccgatcctgaagaggctctgttggtctctgcattggttggatgtggcctggatcactgtaatgtctatgtgttgagcacttgtttctgtgccagccactttgtagatggtcaagtttagatttcccaacggtttcatgaggcacatactcttatgacccttaatttattggtgaggaaactgaggcaagttgggcttcagattcaa

SEQ ID NO: 45164 - DNA, 1032 bp, Homo sapiens
cagaggaagctttcccattacaaaatagagaccgagttcttaccttcctcattgtgttattaagtagttccccatttttttcttttgggtaaatttactcagaggataaattaacttctcttttatataatatcatataaatggcccagttggttgacatgaaccactctgctttgacttttagacaagagcagttcactttatttttcctaccaaattggcacacgtgattttagaatgtgcgtcatctttctgtcatcctcagcacatcatctagtgaactggtgagctgtgtgagtttctggattggggcatgctcccaatccaggattcactgctcccaatccaggagcagtgagtttctctgcccttcagactgaggcttgtcttaaaactgtctgcttacccctctccgatctgccatggaaattaggatattccaaactccaaaacaaagtgatagaaagcagcacttctcaaactttcaagacacgtgcaccccgcccctgggcctcgctaacctgtctgactcaagcaggttctgcatttctaacaagctgcctggctacaatcgcagctcagtaacgtggtaggggagaaagcttgaactttagagtaatacaaattgggttcatatcaattatttcattgaaaaaccgtggtcacaggcagttatctaattcttgagaggcttaatttattcatctgtaaagtggggaaaatacctagctcataagattgtcattattatagggaaactactaaattcagtacatgtcacatcttagcactcgatgaatataagttccttacacgatcctttgatgcactagatttgagtggtgttgactgaatcctcttgtagtagagacatctgtgcaaaaggagacctgtgtgtgtgcacatgcatgcatgtgtgtgtgtgcacatgcatgcatgcacgcacatatatctgcgcatacacaaagtaatgtgtgagagaccccagaaatcccagagtgtaagcttttgagaagcactactggaagcaac

SEQ ID NO: 45165 - DNA, 1068 bp, Homo sapiens
aagggaagagattccaccttgccccatgtggaactgaaactactctttgcacatgatgctgcccttccagcctgcgggcagaatgctcttcttgacaaagcaggagtcccttattccttgccccctcgctttccaacatacccagggaggttcagatgactgtgagccaaaaaacaaccagaaaaagtcgagagaataaagagcccctctctttttcacttaggcaacaagcatgaacaagaaaattaagtatttttgttttatttttagaaatcttaacttctccttttcaccctttttttttttttttaattttttgaggtggagtctcactctgccacgcaggctggagtgcagtggtgcgatctctgctcgctgcaacctctgcctctgggttttaagaaattctctgcctcagcctcccaaatagctgggattacaggcacgtgacaccatgcccagctaatttttagtagagatgaggtttcagcatcttggccaagctggtcttgaactcctgacctcgtgatccacctgcctctgcctctcaaagtgctgggattacaggcgtgagccaccatgcctggccacccttctttagatgtgtctattttaacattttacatgtgatggtgatgttatccatgttgaataaactagaaatcagagttgagttgtgagggaaaaagagaaattgcaaatgtatgccttgggcatatggatcatatttggatactgaattgaaccactgaactataaaaacatgttatgaaacagggaaactgcactggctatgtgacggtattaaggaattactgctaacatttaaaaatgtgataagggtattgtggttatgtttagaaataaaaatagtccatatccattagagatacatactaaattgtttttgcatgaaatgatatgatgtctaggattttctataaaacaatccgaggcaggaatgagggacagtgggtgagaggacatatgaagtaagattggccatgtgtcgacacttgttgaagctggatgatggaggtccattattcaggcaaaccctgtgttatt

SEQ ID NO: 45166 - DNA, 1075 bp, Homo sapiens
gccgtatagctgccatacatagacagtgatttctccaatgaatctgggcaaagtccattgaaaaccttctggaaaggattcaccattgtagatgccattaagaaatttgtgattcatgagaggaagtaaaattatcaacattaacaggagtttggaggaagttgattccagccctcatggatgactcgggggtttaaggcttcagtggaggaaataactgcagatgtggtggaaataaaactagaattagaagtgaagcctgaagatgtgactgaattgctgcaatctcatgacaatacttgatcagacaaggagttgcttcttatagatgagcaaaggaagtggtttctcaaggtggaatctactcctggtaaccatgttgtgaacattgctgagatgacaacaaaggatttagaatatcacataaatgtagttggtagagcagaggcagagtttgagacgattgactctaattttgaaagaaggtctaactgtgggtaaaatgctatcaaacagcatcacgtgctgcagagaaatcttgtgaaaggaaaagtctgtggcaaactgtattgtcttgatttcggaaattgccacagccacctcaacctacggcagccaccaccctgaccactcagcagccatcaacatggaggccagatcctccaccagcaaaaagattagaacttgctgaaggctcaaataatcattaactttttattagcaatacatttttaaattaaggtatgtaaactgtctttttgtgcataatggtattgcacacttaatagactatagtatagtgtaatatataacttttatatacactgggtcacagaaaatttgtgagagtcactgtattgtgatattggccttattgtggtggtctgggaccaagcctgcagtgtcttgagctatgcctgtactggtttctctgcttctgtgtaactgttcatgaccaaaaaataaaaggggaaaaaatcctatgcactggataatttgtttatgccagggtagggtatacttttcaaaagatttcttcccaggtagaaatctcattttaaagaaaaaccagtta

SEQ ID NO: 45167 - DNA, 1055 bp, Homo sapiens
tgctttgaatgagtatcagagtcgggagggcactagtcactgtcctcaagggccttgcaactgtcgttagcagaagaggacacaaacatctagacaatggccaaatggagccctcaggcaatatgtactttaataggcactagcaagaggtggaggtcacttctagatggtgtttcatatgaatgtggacttggtggatctccaaaaagggagccactgcttccagtaggattcattttagggtttgttgtcaggtctgttcttccggtcatacggttgggtagcagatagggcagggagggtcagtcagtggcgttcttggggtgatacagctgggtagtgggtagggcagggagagtggcttgtgttgggcctgcaaggtcctagcagacgtgcgggttgattgcaaattcctaataggaaagagccagggtcaggcacaggcctggctttatccccacacctgagtaagacgctttggttcttatcccagtctctcatctggccagcttcctgttttgagtttgagccatgtccctgactgaccctccctctattaagagggattggcctgtttttggaagctgggctgagcccatgtctcttgaccgtatatatttccatgtccaagagcttaaaaaagacttacttagatgcaatataggtatgtcttcccctttaggaaacaaataatgttgtcctgggatgagaggagaagtcctggctaacacttgacctaacttgtgtcttttgcagtgtcttgggacaaggtgcgcattcctggtgtgctgcagcgattgggagtgacatactttgtggttgctgtgttggagctcctctttgctaaacctgtgcctgaacattgtgcctcggtgagaaaccatgttttaattaagaaaaactttttttaaattaaaaaaaatgtattgtgtggtgatacggtctcactatgttgtccagactggtccctcactcctggcttcaagtgatcctcctgccttggccacccaaagcgccgggattacaggtgtgagccaccatgcctggccagaaac

SEQ ID NO: 45168 - DNA, 1213 bp, Homo sapiens
taaacctgacatcatctttccacccggcttacctccaccagatctccccagttctgtctccatcttctacctgcagctgctctgttctcatggtcactgctgcatcactgagtctggacccttgttatcattttcaaactggcctccttccctcgttccccacttcttaaagtcacctgtccattgccaccagattaagctttctccagccagatcacctctctctgagaaacctccattgacatggaaacaccattgtctggcacacatactcacatactcaccttcccgtcttgatccccacacatctttccagcctcccctcccactccactccctgctctctcctccacctccccatcctcttgtctcccctcccctctgaatccagcccagcggggcttctcctgcctccatcacatcacagaagtacctcctgcttctggttttaattagagccttccccgattacattttcctctgaattttttcctatctacatttgatctgtcatgtttaaaccccctacttctaagggaacttctctaatctcttatcctcatccccaaatagtgttttcttcctctgggttcttataatgttggtatcaatctcacagcatttagtgcttcctgcctggtgtgacagttacctgtgtgcatgtgcaatttctaatttcccacgctagactgtgagcttcctaaggcaagaatcatgccttgttggtttctgtattcctcatggtgccaaacacagtgccttctacattgcaggcgctgaataaacatttttaaagcaaaatgatgtggatttttaaaataaatatttaagtgctggtaagatgagcatgtatccggggtgcccatgaaatgttcttggggccgtgtggggacagtcgtcattcctcctcctgccacccttttctttcagtgagtcactgtggatggtcccagctgtgtcatcccaaagttcagcagggaaagctgagctgggcctctccaggtgagttttctagaagcatttctcaaactgtgggttacatcaacttgggtgtcttgagctgtaaggaaggaactccggagtcagctgggctacaggggagcttctctaagtcctgcgggaggccagacccagcctgagcttgctgttagctagcggaggcagctgctggtggcccaggtgctcgacaccaggcatcccctctcctcccacg

SEQ ID NO: 45169 - DNA, 1032 bp, Homo sapiens
ttcctgcccgtttttatacaactgcttatatatatttaaaaatttgtacattattttttttaaatttaatgtcattagttttacatgggtgtgttgtttgaaaaataggtaagaataatattttccattctgataaaatcaaaagcagattatgtattcttatgtgtaaataagatttccattggcgttgcatatattttttagtttccattcttaaaatgagtggaacctctgtgtaaagaaaatattttattattttaaataaaagcagaatacaacactgtctattttacagttataactggaagataatgtctaatcagaagactctaatagggtaggaaaacattaaaatagttatgtcacgttggtagctgggtaccccatacgtaattttgtatttagtaaatatttttggaatgtggatgaatagaccatgatgacttttttctatttatttttttaaattttctgtgcgtgtgttttttgtttttgtttttgttttttgttggtttgtttgagactggaacttatttctgttgccccagctggagtgcagtggtgcgatcacagctcactgcagcctgggtctcctgtgctcaagcaatcctcttgcctcagacccctgagtagctgggactacaggaacacgccaccaggcctggctaatttttgtatttcttttttagacagatggagttttgccatgttccccaggctggtctcaaactccggggctcaagtgatctgcctgcgttggcctcccaaagtgctggggttacaggcatgagccaccatgccttgcctgttataatgttaagagaataaataaggtgtaatttctgtaaatatttagacacacatgaataatttatttgaaagttacctgtccagtttgtatagctctagatatattctgtacttgttaaatgctatgaccaaagaaaagcagtatacaatatcgcttgtccaagtgctagtttatttatggaaaaaagcgaaacctactttgtgcctgagttttgtatgtac

SEQ ID NO: 45170 - DNA, 1028 bp, Homo sapiens
agttagagcaattaacacctatattactaataatatttccagtagtatggatgctttggttatggttaaatggttctgaaatctacacctgagatgcttcccttaaaggggctctttggccagttcaccaattacttggaagaggaagaggaagtctaggttgattatattgctttgagttagaatatctgagaaagtggtacttatattagtttgctagtgctgcgatgataaagtactacatactggatggcttcaataacagaactttattttctcacagtcctagaggctggaagatcgtctgggacaagtccaggtgctggcagggttgatttctcctgaggcctctctctgtggcttgcaaggtggctgtgtcttgacatggcctcttctctgtgtgtccctcccccttcttataaggatgtcagtcagattggattagggcccaccctaacggcagcattttaacattcacttatttaaagaccttatctctaagaacattacattctgaggacctgagactttcagtgtataaatttgggaggacacaatttagcctataatagtgctataaagagaagttcaaaaatgaagatggagattttattttttaagcaaaaaaataagtttgcttttagagtgttaaattgggaatgtacactagatagttgatgttgtcactttggatttggaagagaacacaaggttggttgcttgatttggaaagcatttgcttagaggtagtatattaaaattagagcaacataaggaaattgatttttctccacatttctgggacaagaggaaaaagtagtataagtaatcgtaaaaaattcttagaaagtatgaagaaaggagcccacaagagaaatttgaaggataagatttgtttctcatggacttatttcagttggtcagtctattttcctttttttaaatgccagaaaatttaaaacatcaattgtaatgaaaatgtttttcagattagaaatattttggaaggaatttacttaaaacaagtt

SEQ ID NO: 45171 - DNA, 1076 bp, Homo sapiens
gcatttggtggtgtcagtgttaggaattttagccattctagtaagtatgtcatgatatctcagtgttgtttaaatttgcatttctctggtaatatatgatgtggagcatcttttcttgtacttatttgccatctgtatctgtatcttctttggagagatatctgttaaggcttttggccaattattagtttctaaggtaaagcttagattattgattttgatcatttttcttttttaaagcagtcagatgtcatttagtgatcagaatacatcctgaagaaatgtgtcattattaggtgattttgtccttgtgcgaacatcatagagtgttcttactcaaacctaggtggtttagtctactacacacctacactatatggttaagcctatatctaggctgcaaacctttatagcattttactgtactggatactgtagacaattggaacacaaaggtagttatttatgtatctaagcatagaaaaggtacattataatatggcataaaagataaacagtggtatacatgtatagggcacttaccatgaatggagcttgtagaactgaaaggtgctctgggtgagtcagtgagtgagtgttgagtgaatgtgaaggcctaggacattaccatacactactatcaactttataaacatagtacacttagactacactaaacttatttttaaaaattttctttcttcaataataaattaatcttagcttactgtaacgtttttacttcttcttcatttttttcactttttgactctttagtaataccactttgtaatagctcttttgtaataacacttagcttaaaacataaacatattgttcagctgtacagaagtatttttttttgagagagagtctctgttgtccaggctggagtgcagtggcgtgatctcagcttatatattctgtcagcttttttctatttaaaaaatttttttaaactttttttttttttttttttttttattatactctaagttttagggtacatgtgcacattgtgcaggttagttacatatgtatacatgtgccatgctggtgcgctgcacccactaatg

SEQ ID NO: 45172 - DNA, 1026 bp, Homo sapiens
aattctttattgatgccaagtttttgttttttccttgtaaattgtggtaggtagaattctaaatgacctccagtagacccactaccagtatatattgcataatccatgggactgtgtgactagggtggcttatactcctgtgattatgtttaatatatggcacagttgacttcgagaagggaatttattgtcagtgggcttgacccatttgccagagccctttaaacctgtatttagaggtcagaagctgaggaggtaagagattcgaagcaggagaggggtttatgtgctgttgctggcttggagatggagaggactacctggcaaggaatgcagcagtatccaggagcccagagcaaaccccagttgatagccaacaaggaaacagggacctcagtcctatcactgcaggagctgaattctgctagtacaaagaatgagcttggaattggatttttctccagagctcccagaggagaactaagctccaccaccaccttgatttcatctttgtgacactctgagcaggggacccagttaaaacatggccagacttctgacttctggagctgggagctaataaatgagtgttgctttaagccactaagtttgcggtaatttgttacacagcaataggaaactaacaaagtttttgaacaacagttgaaagttacaggtagtatagaccattatataaactcacaaatttaagacagtgggaatatgggactagaaagaagttaaatggttggtaagaaattctaccacttagcccacattgccacccttcccatggccagcccactccactcctttcatagcacttagtggagtgtgtccataacccgcccaagtcttgctcagtgttgtagcagcagcattgtagcagatacttggttttcagcctgaatgtattcagtgaacgaacgtaggaaggaattgtgaaatgctagttggagaaaataagcagctggaggaaagaaggcaagctggagattataggaacagtgattcaaagccaaatta

SEQ ID NO: 45173 - DNA, 1034 bp, Homo sapiens
agcaacactgaatctaggtaaattaaacctttttgttgtaagagccagttacaggaactgagcaggaattgaagagcaaaaagattatttatttctggctagctttaaacatggatgagatcacgtgccaagtaatgtgagcagccttttgaagttgagagcagcctcaattgcttgcaaggaaacagggaccccagtgtggaaggaactgaatcacaccccaagcaggtgtgattggaagaggatcctgagctccagatgacaagggaccccagccaggaccttgcttttggccttgggaagccctgtatatagaacccggtcatgtcatgcccagccttctgtttacccagataaagtttgaacagagctgtgagctgataaatgggtcgtgttttaagttgctaagtttgtggtgatttgttgtgaagcattagaaaacccatacagggcaacattaaccagtctggaatatcccagtgccagtggcaggatcccatacatcaatgtctcttcagaacatttgatgttgtactaaggtcatagtaggttccaataaatagtaagttgaattttcaaaatcactatacttgtagtgtaggtcatctgaattttagagttttgtagcatatcaaggtacattgagtgatgaggaaaaacatcttgagattttccttaaaaaaaaaaattttttttaacctagtaaagaaattgagaaacatcatttttattgaagtgcatttgttctggattggggttggcaaactatagcttacaggccaaatctggcctatcacctgtctccataaataaagttttattggagtacaaccacactcactagttcatgtgttatctctggctgccgtcgcattacagtggcaaggttgggtatttgtgacagacactgcatggcccacaaaacctaaaatatttaccatatagtcctttatagaaaagcttgctgacccctgttctggatggtgatttgctttctagccacagccacattcatttaaccctaaatggcttcc

SEQ ID NO: 45174 - DNA, 1052 bp, Homo sapiens
caagagtggggtttccagcactacctttgacatttctagtttttcttagggactgagagtacctggcactttttcccatagttcatgttcttgcatgaatatcaaagagtaattattttcagagatgacttatgtctataatattgttttagctcattgtggccaataaaattcccaacagtatattaaagactatcttttcactattgaaataatgatgaaacaagcattatgaaacatgacacctttcaaattccttaatactaaagtccttgggaaatcacacttgttgaatgtcatggttatggaaaaatacataggacaaatttgttctttaaagagaattcattttgcctttctttgtaattgcagctatcaaagttaaatgttatctacatacatatagattttactctcttattcttctggcttccattattttctagacagagcctggtacattgtgtataagatactgtgtggatagtggtggttcctgagatttttctgttaacttgtgtgactgtgaacaactgcatataattcatttaatcttgtgtcagtttacctcatttgtcttctttcaccccaaagtaatctcatgaggattattttgctcaagtttgattatttcaaagaaggatcattatgtacacctaagatggcaagatggcaaggtggcacttgccaaaagtccagccggtgcctttggagctaaccttggatcttgaagggggccctgggactctgaaataattgctagtagatttgctttacagttgagtgttttgagctctcagtggctcagcttaattgtgaacaagtagccagatgtaaatctctaaagagcagaacctatattttattcatctttatagtcctcctagtgtccacattgagtcttgctgttatctggcccctaaacccaaggcaaactggaaggggctcgtggctttggcatcagccagaaaaggctgttagggcagtatccggcaccctaggagtggggccagcgagcagagcagcctacatgtagccagagggaaggaagc

SEQ ID NO: 45175 - DNA, 1087 bp, Homo sapiens
caaaggattataaatcatgctgctataaagacacatgcgcatgtacgtttactgtggcactattcacaatagcaaagacttggaaccaacccaaatgtccatcaataatatactggattaagaaaatgtggcacatacacaccatggaataccatgcagccataaaataggatgagttcatgtcctttgtagggatatgaatgaagctggaagccatcattctcagcaaactatcacagggacaaaaaaccaaacaccgcatgttctcactcttaggtgggaagtggaaaatgagaacacttggacacaggaagggaaacatcacacaccagggcctgtggtggggtgcgggggtggggaagcggggaagggataggattaggagatatacctaatgtaaacagtgagttaatgggttcagcacaccaacatggcacatgtgtacatatgtaacaaacctgcacatggtatacatgtaccctagaacttaaagtataataaaaataaaaataaaagacctgaaagaaactgtcaaccaagattgtatatctgaaaacaatatctttaagaataaaggagatgaagctgggcatggtggcttgcatctatagcctcaatgacttgggagactgagggaggaagattgctggaacccaggaacttgaggctacagtgtgctatgagcatgtgtgtgaacagccactgcattccctccagcccagacaacacatcaaactgctgtctcaaaaaaaaataataataataaataagaataaaggagaaattaacacatttccaaatattataaaaccctaagtagttcattactgatagacaaaaaatgctacagcaagtccttcaggctgaaaggaagaaatactaaacagcaatttgaagccaaaagaaaaaaataaagagtattggtcaaggtagttgcataggtaaatgtaaaagccaatgttactgtgcttttggtattgtttgttatttctctttttcctatataattttatgggcaagtgcatttaataatacttacaaatctatattaggatgcatataacgtataaagatatagtctgtgaca

SEQ ID NO: 45176 - DNA, 1081 bp, Homo sapiens
caaatagccaaggcagtcctgagcaaaaagaacaaagctggaggtgttatgctacctgacttcaatctatacaacagggctgcagtaacaaagacagtatagtactggtacaaaaacagacacatagaccaatggaacagaataaacaacccaaaaataaggccgcacacctacagtcatctgatccttgacagtgctgacaaaaacaagcaataggaaaaggactccattcaataaatggtgttgggatagctggctagccacatgcagaagattgagccttggaccctttgcttatataaaaataactcaagatggatcaaaaatgtaaaacttaaaactaaaaatgctgcaagacaacccaggcagtaccgctctggacataaaatttaggcaaagatttcattatgaagacaccagcagcaattgcaacaaaaggaaaaattgacatatgggatctaattaaatcaaagagcctctgcacggcaaaagaaactatcaacagagacaactatcgacagcctacagaaagggagaaaaattttgcagactacacatctgacaaaggtctaatatccagcatttataaggaacttaaacatatttacaaggaaaaaacaaaaagcctctttaaaaagtaagcaaatgacatgaacagacacttttcaaaagaagacattcatatggccaacaagcacatgaaaaaaagctgaacatcacttatcattagagaaatgcaaatcagaaccacaatgagataccatctcacaccaattagaatggctattattaaaaagtcaaaaaaataacagctgctggcaaggttgtggagaaaaaggaatgtttgtacactgttggtgggagtataaattccttcaaccattgtggaaaacagtattgccattcctgtggaaaacagcattgccattcctcaaagagctcaaatcagaactctcatttgactcagaaatcccattactgggtatatatacccaaaggaatataaatcattctaccataaagacgcaggcaagcatatgtttgttgcagcattgttgacaatagcaaaaaaatggaatca

SEQ ID NO: 45177 - DNA, 1062 bp, Homo sapiens
tgtacaatctgggatcaagtgttctcgctgctctcagggatcggcgcacagcctgtgtgctcccatgtggcctgacttggatttcagagtttatatgaggcacagctgagagtctggaaaaggcacagcatcttctccttcctgtccagatgagccaagtgagcaggaagggtctcagcatctattcctgaggccctatgagaggtttcttcattcctttataatgattaagccctacattgggaatgggtttgatttgtcattgtacaaacttcagaggctttaatggtaattttattaaccttgctggaccttatggaatgttgataaaagcaaccactctttgttatgaaagcaaaaagagacattgaaaagttagttcaagataattggcaaagccagctgccatgatgagattgttgaatagtgatggtggtaatggcagaaaaggtgaaggctctttcttgaaagacagcacaggaatcaccgctctaatgctatctttgtgatgttactgttgaatatatgtgaggtgctgctgtcttctgactgacttcttggtcactatcacagtgttatgactgctataaggtgtaatggtcttttctcgtcattacattctgtttaggttttgtattgtatgagagagatctggggaaagagatatataattggacatttgtatatataatgttaagtgaaaaactgagagttgtaatgcagctctaagttccaagattgatggttggccagatgcgttggctcatgcctgtaattccagcacattgggaggccgaggtgggcagatcacttgaggccaggagttcgagaccagcctggccaacatggagaaactccgtctctactaaaaaaagatagaaaaattagcaaggcagggtggcacatgcctgtaatcccagctactctggagtctgaggcaggagaatcgcctgaacctgggaggctccatcagggcactgcctgttttgcttaccactgtatttctggccacttcagtgtttgtgttcaatgtgtatttaatgactatggacagaatgaata

SEQ ID NO: 45178 - DNA, 1104 bp, Homo sapiens
aaagctggacagagaatgacgactttgacgagttgagagatgaaggcttcagatgatcaaacttctctgagctaaaggaagaagtttgaacccatcgcaaagcagctaaaaaccttgaaaaaagattagacgaatggctaactagaataaccagtgtagagaagtccttaaatgacctgattgagctgaaaaccacggcacaagaactatgtgacaaatgcacaagcttcagaagcctatttgatcaactgaaagaaaaggtatcagagactggagatcaaatgaatgaaatgaagcaacaaaagaagtttagagaaaaaagagcaaaaagaagcaaacaaagcctccaagaaatatgggactatgtgaaaagaccaaatctacgtctgattggtgtacctgaaagtgacggggagaatggaaccaacctggaaaacactctgcggatattatccaggagaacttccccaacctagtgaggcagaccaacattcaaattcaggaaatagagaacgccacaaagatactcctcgagaagagcaactccaagacacataattgtcacattcaccaaggttgaaatggaggaaaaaatgttaagagcacccagagagaaaggtcgggttacccacaaagggaagcccatcagactaacagcggatctctcggcagacactccgcaagccagaagagagtgggggccgatattcaacattcttaaagaaaagaattttcaacccagaatttcatatccagccaaactacgcttcataagtgaaggagaaataaaatcctttacagacaagcaaatgctgagagattttgtcaccaccaggcctgccctaaaagagctcctgaaggaagcactaaacgcggaaaggaacaactggtagcagccactgcaaaaacatgccaaattgtaaagaccatcaatgctaggaagaaactgcattaactaacgagcaaaataaccagctaacatcataatgacaggatcaaattcacatataacaatattaaccttaaatgtaaatgggctaaatgctccaattaaaagacacagactggcaaattggataaacagtgaagatccatcagtgtgct

SEQ ID NO: 45179 - DNA, 1024 bp, Homo sapiens
tattccccccttgcctcatttccctgactggaacctctagtacaatgtcgaatagaagtgtcagagcagacatctttgtccttttgtggatcttagggggaaagtgttcagggaaagcattcaccattaagtctgatgttagttgtagggcttttgtggatgctgtttgtcagtttgaggaagttgtcttgtatttctgaagttcttgagtgttttcatcatgaacatgtattaaatttagtaaaatgctttttctgtgtctatttagatgattatgtcactttttttctttagtgagatgattctgttacattaattgagtttcaagtggtaaagcaacctatgattcgtggtataaatctcatttagttgtggtatataatccgttttatgtgttgctggatttggtttgctcacattttgtgagagtttttgcatatatactcataagagatatgggtctggaattttcttgtgatgtcttttattttggtgtgagagtaatactattgacctcatagaatgaattccctactcttttttttttttttttttgagtttgtaaaagattgttatgaatttctctttaaacatttggtagaattcaccactgaaactatctgggcctatgtttgtttgtttgtttgtttgtttgtttgtttgtcagaagttttaagttactgacttaatttctttatttgtaatagatttattcagatttttaatttctacctgtcagttttgggagtttgtgcctttctagaagtttgtccattttacttccattttctcatttgttggcttacggttgctcagtttatttccttttagtgtgctatagaatccctttgctttctgtaagcttggtagtgcttcctctctttcgattctgattttcacaatttgagccttctctcattttttcttggtcaccctagctaatagtttgttgattttgttggtcttttcaaacaaccatcttttggtttcattggtttcctttattgttttctattctctattt

SEQ ID NO: 45180 - DNA, 1105 bp, Homo sapiens
catcaatacaaacataatgtcaagaattaactgtaactttcaatgttgaaacaaagaaaaagaccgatgtgtgttttcttataagactggaggacagatgatgcctctctctctctgtctctctttctctcccttgttttggcagtgataggccaaagggaagcacattgttggccagttgatctaaaagttcctttgcatcattctggtaatgagcaacaaaggcacttattggcaaacgttccatcttgaataactgaggtcagcagtttctttatcaaagcaacccaggttaaatatgctcttttatgatctaacacactgtaataatcaaatcaccatttttaaaagcaacccagaacattattgaaaaatagcttttttgttttaaaataaagcagtaatacaaaacaatgcttaagttatgagttacaatgaatgctttcagtgtttatgaccttcccagatagtctctaggaagattgtctgtattctgactataaaaataggaccaggatgaagtttttttgactgttactgctggtatatcctagatactctgtgctattttctgggcttttcctttgctgcctaagggagagaatatcacatctatcaggtcaagacttgtacatttgccacaccaacttagacctaacatgtttgcatttatgttcaaccagtccatagtgtatgatatactccattgtctttgctataaaagaaaggcataatgttaagaatatcttttatatctatattgagtaattgccgtgcccttacttagctggttcattttgatcccaaattcagtgtttcttcatttagctttttgatgacgtactgaataaacagtgtcgcaatatgtacctattttgctcatttaagaaaatatttgtaatcactaccacgagggtttttcattaccatctagaagcaaagacctctgttttccttcagttaactttcagtatcagaaattctaactgtttagcaaaagaaaccataaaaaccatttatgtggatcagtgagcctttactgctgtctgcccaggaggaactcaataaatgcctcttgactgatggaaaattgctttggtaatac

SEQ ID NO: 45181 - DNA, 1044 bp, Homo sapiens
tgttctatgtctaggaaccctgctaggttctcactgtgaagatcagggaacaacccattgtgcttgtatcgggggaagggaaaggtagccatttaacagtataccggagcattcagccctcaagagaaactgttttaccagagtctgaccaattggagttttattggagcccagttaacttggggggaaggaaaaacgccaacaccaactccagatttcctccagccttcctgtttctctggggagaaaaaagcttagaagcacctgtcaagatctcagcccagaggcacaggcttactaaagacctagacctcatcataggactatagaacacctcccataccctgacaccataccaccacatcagcaaggctcctgtgtagtaacagaggaataaaatggaaagaactgagcatctcagaccttatttaagaaggctgtagagaaactcaaagataacaggggagacaaaaacatggacaccagagaaaattttagcttcggaaaacactctagcaaacaataaagacggcccatcattaaagtcgccaggtcaaccagatgtagcctctgtaggtgttggccttggcgaccagcttgggatcagtatggttcgccagatggcccccactggcaccagtcttggttgggttcaccagatgttgcctgtgggctactgttttattttatttttctatttccatctttggacagagagctactattcttttaatggacgtgaaatggtgaaggcacacaagcatattgctgtcattgttttcttgctttcctaaattacttttaccagtggtatatctttttttaaaagctatctacttggagatggtgtgtcttgattgacatctcatggagaagtggatggggaaaatactggttctgtggaaagactctctccgttagtggcttgctcatccagctctgatctttctgttccaggactctccctgtttcaacaacagcaacaacatgataataacaaacctcacatatgttgttccactggataattgtaattttttaaaa

SEQ ID NO: 45182 - DNA, 1159 bp, Homo sapiens
attcctgaacctaggatgtgattatagcaaggctgcagaatatgttaatatgtaatagtcagttacttatatactagcaatgaacaattagagaataaaaacaatgccatttacatttgcatcaaaaaaatcaaacaggtataatctaaaaatatatatatatataagatctacatgaagaaatgtacaaaattctgatgaagaaatcaaagaagagctaaacaggtattccacgttcatagataagaagactcaatgttattaagatgtcagttcttcccaacttgatttgtagattcagtgtaattccaatcaaaatgcctataagttatttcatggttatcaacaaactgattctaaagtttctgttgaaatgcaaaatacctacaatagccgactcaatactgaaagagaacaaagagaagtgacattatccaacttcaagaattatggtaagtaatcaaggcagtgatacaggaaaaagaatagccaaataggtcaatggaacaaaatatagaacaagaaattgacataaatatagtcaactgatctttgacaaagaagcaaaggatatttaatggaaaaataatcttttcaagaaattgtgctggaacacctgaacatctacataaaaaagaatgaatctagacacagatcttacaccaaaaagtaactcaaaatagatcatagacctaaatgtaaaatgtgaaactataaaactagaatataagatagaagagaatctagatgactttaagtttggcagtgaccaaaggcactatctgtgagagaaaaagtttacaagatgaactttgttaaaatttttaaattctgctctgtgaaagacactgttaagacaatgaagacaagccatggacatatcttgtaaagaacttgtactcagaatatactaagaacttttaaaactcagtaagaaaacagacaacccaattaaaaaattaataaaagctctgaacagacaactcattaaggagatgtacagatggcagataatcacattaaaagatgcttgacatcatgtgtcatcaggaattgcaaattgaaacagcaatgagataccactagacatctattagaatggctaacagtcaaaacacacaacaccaaatgtagggaaggatatggaagaacagaacta

SEQ ID NO: 45183 - DNA, 1047 bp, Homo sapiens
attcttaccatatgatccagcaattgcactttttgatatttatccaaataattgttgaaagcatgcctatacaaacatgagcataaatgcttatagcagctttattcataattaccaaaaacttggaagtaaccgagatgtctccagtaggtgaatggataaacatactggtgcatattcatccacacaatagaatattactcagtgacaaaatgaaatgagctgtcaagccatgaaaaaacatagaggaaccttaaatgcatattgctaagtgaaagaaaccaatctaaaaaggctgcatgctgtataattctaactgacattctggaaaaggcaaaactatggaaatagtaaaaagatccatggggtttagagggagggagagatgaataggtggtggacagggtatgtttagagcagtgaaacttctgtatgatactgtaatggtggacacgtgtcattatgcatttgccaaaacccatagacctgtacaacacgaagagtgaacccaatgtaaactatgaactttactcaataaggtgtcaatattggctcaccagctgtaataaatgtatcacattaatgcaagatgttaatagggaaactgagataggtgagagggtatatgggaactctcagtatttctgcttcatttcttcataaacctaaagctactctaaaaattagtatattaattttttaaagaatgaaaaaacagggccagacatggtggctcacacctgtaatcccaacagtttgggaggctgaggcgggcggatcatttgaggtcaggagttcgagaccagcctggaaaacggtgaaaccccatctctactaaaaatacaaaaattagtcaggcgtggtgactcgcgcatataatctcagctactcaggaggctgagacaggagaattgcttgaacctgggaggcagaagttgcagtgagccgggatcgtgccactgtattccagcctgggcaatagagctagactccgtctcaaaataaaaataaagaaaaaataggagttcccagaggttgctgagaaga

SEQ ID NO: 45184 - DNA, 1097 bp, Homo sapiens
agatactgtggaagtatgcctccatgaagtggagagaaggagaagatggaaaaaagggggtgacctttgggtagtcaatgcggcaggcgtatctgaataaattagaaaaatattcctgaaccctaggaacctacgtcttgatgctgtcttagagaaggcgcctgtccaggccagttgctgcacctctgttctgaactgataacaagaagggcagttgcagggagattatgagcgtcatatggcaaagtctttcatgctaatctgtgtacctttttggttatgtcctaaactgtttgcaagtcagaaactgattatataatatttggtgtatgtatttcttatttttaaaaaacatgctaagctatgtcattgttactgtattaaagtgtgaataacctggagggcaaaaacaggtgttggctgaacccttcctacacagcctgaagaccacactatggttggctatctcttaaatacttaaataatgttgttggccaacattatgtataagtagactcatctcatttctaagttcatgaacctttggtatatcactaaagacaattaagaccttttgagatacgcacaagacttttgtgctctttaatttatttaaggaagacagttttctactttaatgcttctgtgtagaaatgggctttactgttattcacaatagcagcgacctggaatcagcctgggtgccctatagcagtggactagattaaaaaaaatgtggtacatacacaccatggaatactttgcagccataaaaaatgaaatcgatggcctttgcaggaacatggatgcagctggaggccattattctaagtgaattaacgcagaaacacaaccaaacaccacatttaatcacttgttagtagaagctaactactgggtacacatgtacataaagataggaataatggacactggaaaccccaaaagaggggagggagggagcagggcaaggttgaaaaactacttacttggtactatgttcactgttgaggtgacagcatcagtagaagcccaaacatcagcatcatgcaatgtgctcatttaacaaacctgcatgtgtatcccttaaatctaaa

SEQ ID NO: 45185 - DNA, 1032 bp, Homo sapiens
gagtctccaagcagaactgatttaacatttaatcccaaacctgttcagtaccttgctcatttgcttcttcctctgaactgtgtccccttaagccaggcttcaggacgcctccctcaaccacttgaagaagctgccagcagcctctctacactgtgtccagatttcacatacttttctcagcccgctgcagttgatctttagctgctacttctctgctgagattggctgctcagcagtcagtctctgatcaactgacttttaaatccattggctttttccagcttgcatcctttttgcctcctctgtacctttgccatttctgacttgctagtctagctgcagtgcccacccctgcccctcctgggatcctcccccatctccctctggcagctttctcaccctcttccctgggtcccttgtaccatctctcccactagctgcccttcttatgcccatcctatacgtaagggttactatgggtcgacatatagccttgtataacatgtacggtaactgacacattatatctcgtacactgatacaaagaagtggttttgaaataatactgagaagtggaatactgaattttgtttgtaaagcatgactacaaaccacaaaatatgttcaaagaaagaggtgagggaattacacaagtgttcggctgtctgccttgtgattttttcctccttttccaatctttccaagtttttataatgttcacttcttttataaccagaaaaagatttgtttctcttgtctcttttatgcttcctttatatgtatcttagagtgatcacatccacttataataatttcacctagttaacagctatagccctaggcgtgattttcttctcctcttgccatttggcattatataatgtagatttccccattccttggatggtatttgtgaccatcttattgatgtcataacatttcattggtttaaaaaggtatctaattttaaatagtttttgttgattttaatattacctgtgtaacagttggtcagtggtggaggttgtgaat

SEQ ID NO: 45186 - DNA, 1067 bp, Homo sapiens
gtcccatctagtcaggaagctaaagcaggaagatcacctgatcccaggagtttgaggctggcctgggcaacatagtgagaccctatctctaaaacaaaaacaaacaaaaatcacactgtggagatcaatttaaaaaaaaaatcagttgggcatatttgtgtagtatatttctgggttcttctgtttcattgatctatgtgtctatcccttcaataacaccatataatattggttattatagttataaaataagtctttaaattagggaaagtgatctcctttacttcattctttttcaaaattgttttagctatgttagttcctttgcctttccttgcaacttttaaaattagcatatatatatatatatatatatatatatatatatatatatatatatatatatatatatatacacgtatgtatctgcaaacaaaatcatgctggaattgatgggaatttctttaagcctatagatccatttggggagctccttgattttggcatctttatgattttgagtttttcaatccataaatatgtcttccatttgttaagatctttgatttattttatcagtgttttgtagcttcagcatataagtcattacatgttttgtgagattcacactgacatgggttattttggtctttttttttttttagttttacaattttaaatggtatgtttttcccattttggtgtccatgaattcattgacaatatgtagaaatacacctaatttttgtgtgtgttggtttcttcaaccttgcttaatagttctaggagttattttgtagattccttgccatttcctgtgtaagcaatcatgccacctttaaataaggacatttttatttattctttttaatctgtatgcctttccccacctatcttgtcttattgcactagctagaacttctggtactatgttgaatcaaagttgtgagggaggaaatttttgccttgttttccatcttaggtggcaagcatctactctttcatcattaattttaatgctagttgtgggatttctgttgataattctttattaagctgtggaagtt

SEQ ID NO: 45187 - DNA, 1068 bp, Homo sapiens
accctgaacacttgcactacactaaattaaatttttttcttcagtaataagttaaccttaatttactgtaactttctagctttataaactttaaatttttcattaacttttttactcttttatagcaacacttagcttacaacacaaatacattgtacagctataaaaaatattttttctttatatccttttttctatttttatttttatttttttacttttaaaactttttttgttgtaaactaaaacacaaacatacacaatagcctagatcttcacagggtcagggccatcaatatcaccatcttccacctccacatcttgtcccactggaatgtgttgagggacagtaacatgcatgaagctgtcatctccttggataacaatgccttcttctggataccttctgaagtacctgtctaaggatgttttacagataacttgttttttaacaagtagaatactctaaaataacaataaaaagtatagtacagtaaatacataagccagtaacattgtttattattatcaaatattagatactgtacataacaggatgtgctagacttttatgcaactggcaacacactacctttttttttatactttaagttttagggtacatgtgcacaacgtgcaggtttgttacatatgtatacatgttccatgttggtgtgctgcacccattaactcgtcatttagcattaggtatatctcctaatgctatccctacccctttcccccactccacaacaggccccagtgtgtgatcttccccttcctgtgtccatgggcaacacactacttttgtttacaccagcattaccacaaacatgtgaatacatcactaggcaacaggaatttttcgtctccatcatagttttatgagaccacggtcaaacatgctgtccattgttgacagaagcatcattatacagtgcatgctggtatttgacaacgttcattttctctattcttgtaatgtctaagaatttttaaagccctcctttatttatttaaaaaatcatattttgcttttccacaatatgtattatcccttggaataaa

SEQ ID NO: 45188 - DNA, 1066 bp, Homo sapiens
aaatgctaccgatgtgagttgcattgtgaatgctttggagttgtactttggaatacatgtggtgacatatctaatgagaatatccttgtggtagactgaaagaaggccaggcatgaacttcaaaaacaagaaaacaacatccagttattcagagttaatgaatatgcattctgtgtgatgcattttctgtagcacatctgagattgcacaatatcgaggctagacaatattatttccactttgcagatgaggaaacacagcctcaaggaggatctcactgctgacacaggtagacacaaagaaaaatgaatgggatatagaatcccagatggcatggttgtagagtgttagagtttaaaagaaaagggagaggctaggcgcggtggctcatgcctgtaatcccagcactttgggaggccgaggcgggcggatctcgaggtcaggggatcgagaccatcctggccaacatggtgaaaccccgtctctactaaaaatacgaaaattagttgggcatggtggtgcgtgcctgcagtcccagctactctggagactgaggcagaagaatcgcttaaacagggaggcggaggttgcagtgagccaagatcgtgccactgcactccagcctggggacagatgagacttccgtctcaaaaagaaaagggagaaaattgagttagaaccaagccgtgtttagattaaggctgacccagggtcaagttgtccagggcagcagaagtgcaagtgttttgccctggggagacttggttggactgtgtacaaagatgaactttggaactaacggccgtagtgctagccttgagtttgaggacagggctgctgagatgtctttgggtacaagaagatctgatcattaatattttctagattattttgcagtgataatgatcaggctctctagtttacatatcaaattaatatagaagtaaaactgtactttattcactactaattctttgctaatatatttagaaagaaaaacttagagaatatatctgccttcgagacacatttagcagtatgcattctaaggcagttttttatacat

SEQ ID NO: 45189 - DNA, 1081 bp, Homo sapiens
gtctccctactcttcccaccgtacccccaccccattcctgcagctgcaatctggagcagcactgtgatcacactagatcacactttcctgtgagtcagactgcagctctggaatgtgctttgctgagatgacggcacagagaagagccatgggagacagagcacacagcctggcagagtcttcaggggtggccagatgcaagcacacagtgccacgtgcctctgtgggcatgaagcagagaaaggatgagatcaagcctgacccaacttgacttcctcctctagctgagccaccgcaccttgctgcccctctcctccccttttgcctctgtcaaatgacctactctgccctctctcccagctgctgctagacccagagcacttggtgcagccagctggcgggtttggtaggctcacccttgttgtgctgatttcttggctccacagttctcaatggcttgagccagctcagctctttctccacagggaactggagcaaaaatcctgtagagcaattcttgggttggacacccccttcccacgagagaggattatacatgaacagatgcccttgtttcttcctcacttgctgctctggcactggtattataaatggtctgaattttcacatttatttgcacagatacaaaagacagtgacagatgcttgattatatagtgagactaacaaccaggtattaaacattgcactgatacttgtcattgccttcaaaataagctctacgtgttttctttacttcagttgtctcatttaaccataaataagtcctcagaggtcaggggctgtgactcatctggttttggtactggaccatgaatgcagtagacacccagcaagtatgggttgatgggaaacagcaatggctgattgagcagctgagaaggtggggtgaggttgtggctccccttctcttctcaggatgaaccagtccatggagttgtgctacaaatgttgttgtttgtctaaggagattgatgagaatgccagtgagctagaaattgccaggaatactctgctttgggacagaggtgatgtctagtctgttccaatcagatagagga

SEQ ID NO: 45190 - DNA, 1049 bp, Homo sapiens
ctgccttggctgcctcgtctgtagattgtagatttgggttatgtgatctcttcatcctctcatctctgttctcgcttctgtcttattgtgcgcgcctctctcttgatgacctgagcgtctttgaaggaaggggctctgccctttcttgcctgtgtgtgcacatatccatttggcccaggcctctcagtgccgtctggcacagagctgtgtgaatacagggcccccataaatgtttattagagaaatcaaaggtgtgctcagttctaagttgagtgcctagactacagtcagattttcaaactttaaaagttcaagtatgggaggccaaggcaggcagatcacctgaggtcaggagttcaataccagtctggccaacatggtgaaaccctgtctctacaaaaattagccaggcatgatggtgggtgcctgtagtcccagctactcaggaggctgaggcgggagaattgcttgaacccgggaggcggaggttgcagtgactggagatcgtgccattgcactccagcctaggcgacagagtgagatggagggaagtcattgcaagataagactggaaaggtagattgagatcatgttgcagagggcttgagaattatcttatgggcaaactgctgaggcatttgatatgatccaagtagtgtcttagtggcaggcaggaagcagagttcagagcttgaatgtccagggcgaggtgctcagccctgtcagccctgcagggaggcccagcagaggaatggatgcaagagaagggcttcttgagtgatgaaaaaatctggattcagcaatggttaggatttgaggagtaaggaaaacaaaaaggtctaaagatggctttgaagttttcaaccttgataacttggaaaataataggcctggggagagggcaggagaaggtttagacttgaagtcagagacccaccgcttggagcagctgtacagcctgtgacgttccctaagcttctggcctcctggccacaggaggcatagtcctccaagggctgattagaggtaagactcggcctgagtcaggc

SEQ ID NO: 45191 - DNA, 1035 bp, Homo sapiens
tctttccctcttttgtgacctccctattccctgaaacacaacaatattgaaattagagaagtcagtaagcctccagtggcctcgaagtgttcagatgaaaggaagagttgcacatctctcactgtaaataaaaaactggaagtgattaagcttagtggggaaggcatggcaaaagccaagacagatcaaaagctagacctttgcattaaacagccaagttggccaggcgcggtggctcatgcctgtaatcccagcactttgggaggccgaggctggaggatcacttgagcccaggagttcgagaccagcctgggcaacatagtgagcccacatctctaagaaaaaaataattagccaggtgtagtgtagtgcctgtagtccctgctacttgggaagctgaggtggaaggatcacttgagcctgggagttcaaggctgcagcgagccatgatcgtaccactgcactccagcctaagcaacagagcaagaccctatctcaaaaaaaaaaaaaaaagagattgtctaaaattgcagctatttggaaacatttactagtgacagaacagtaagataatcatgcctgtcgtgagagtactgttccttctgagggtattgattaccaaatctcaaccaggagccttggcaggagggtgaggggtcctggaattgacagacattcaccattgtcttcgtagactcaaatagtatgtccaacacaaatatattctacttttggaaagcacatagatgtgattttttaattaactaaagtatgtactttattcgcatttccttagtgtttacctagtgttacctaattatgctccaggatcccattcaggacaccacattatactcagttgccatgtctcctcaggctcctcttggctgtcacaacttttgagacttctcttttatgactttaacagttttgaggagtgttaggtattttgtagaatgtccttaactgtgcccaatgcggtggcttacgcctgcaatcccagcactttgggaggccaaggtggatggatcactt

SEQ ID NO: 45192 - DNA, 1038 bp, Homo sapiens
gaacccacagccaacatcatactgaatggggaaaagctgaaagcattccccttgataactggaacaagacaaggatgcccactgtcacccttctattcaacatagtactgggagtgctagccagaacaatcaggctacagaattaaagggcacccagattggaaaagaggaagtcaaactgttactgtctgccactgatatgattgtatacctagaaaaccctaaagactcctccaaaagacatctagatttgataaacaaattcagcagagtcttagagtacaaaatcaatgtacaaaaatcagtagcactgctatacaccaacaatgaccaagcggggaatcaaatcaagaacccagtctttcttaacaatagctgcaaaaattagaataaaatacttaggaatatacttaaccaaggaggtgaaagataaagagaaccggaaaacactgctggaaatgatcatagatgacagaaacaaatgtaagcacgtctcgtctcatctcatggattggaagaatgaccatcatgaaaatggtcgtgctgcccaaagcaacctacagatttaatgcaattcctatcaaaataccaacatcatttttcacagaattagaaaaaacagtcctaaaattcataggcaccaaaaaagagcctgaatagccaaagcaatagtaagcaaaaagaataaatctggaggtgtcatgtttcctgacttcaaattatactataaggctatagttaccaaaacagcgtggtgctgatataaaagtagatacacagaccactggaaaagaatagcccaagaaataaggccaaatacttacagttaataggtcttcaacaaagcatataaaaacatagattaggggaaggacaccctatttaatcattggtgatgggaaaactgaaaagccacatggagaggaatgaaactggatcctcatctctcaccttatacaaaataaactcaagatggatcaaagacttaaatctaagacctgaaaccataaaaattctagaagataacccaggaaaaac

SEQ ID NO: 45193 - DNA, 1025 bp, Homo sapiens
ttaagtttgaaaatagacaagatggaaaaatccctagaaaaatatattaccaaaatatcttaagaaaaaaattaaaaagttcaaatagtccagttatcattagagatgttgagctggtagttcagaatcttctcaggaaagaaaacactaaagctaaatgattttattacctaattatttctaactgtcaaaacacagattatgtgagtcttatacttagaatttttatctaaaattttcaaaagaaaaggtaatcaacttgttctgtgaagctgatataaatgatcttgataccaaatgtagtatgaaaaataaaattaaagaccaatatcattaatagacctagagacaaaatttctaaataagacatagcaaataggatcttggctttacatcaaaagtgaaaaactactttaatactcagaaagaatttgaaattgtcatttgccacattaacgtgttaaagggggaagcaattatttaaattaatacagataaagcatttgataagctccaacatccattcatgatttaaaaaaaaaaaaaattccttgacaaactaggactccctaactgggtgaaggacatctacaaaaaaccaaaaatgaaaaactaccaacaataaaagcaaacattagtgactataaaacattcaagactttttctttaaagctggaacaaaataaggatgcccagtcactggcttctccagcattgccctgaaggtcctaaaaggcagccataaaagaaaataagaagcaaaattggaattatgaaatgattgcatgaaagtacactaaacggattacaaatagtaattgatggattacaaaagttcaatatacaaggccattgtatttctacacaccagcaacacacaacaacaaacaaaacaccatttaaaatagaacacaaaaccatagacagtctaggcgtagatctaacaaaacatgtacaagagctatatggagaaacttacaaaattttattataaaaattgacctaagtaccccaccaagaaaaga

SEQ ID NO: 45194 - DNA, 1344 bp, Homo sapiens
tacatgcttggttaaaaaaaaaatgattccaagctctctgagggtgagtccatcatgggccaggtgcttccttgttatcttcccgttttctgttgtccacagcaccattgtggcttaaatctcctagagcaaattccactctatccacacccaaaagaaagtggttcaggcagttttaaattgtcctgtgaagatttgagagttagttggatgagacagtatcagatggaaaaaataagccctgaaataactaagagaataggcaagcaagctggtaatatcagctaatgttccggtgtgcaaagaagactttccatgtttactttcttccagtggactggagagtggaaatcttggttgcccttactttgaatggttggttttccaaatgacatttgtcatctaccaatcaagataaataacaccagctataatgaggccagaggaggtagatcatttgctacaccaaaatatccataaaatgtgtgtaaaaatatgtaaatttagcattgtttcaatggcagtgaggtgggaaccctgcttccttcatctattgtatatttctgagactcctcttgggcgtggtgccactcccactctcttcttggtccgcagctgatttctattgccccaggacttgccccatcctcacttctgagctcatgagtgatgctggggctgcctttttaggaattcaggaaatggaggcacccagttaaagttatctgcaccttactcatttccatgcacctttcttgtcgcacgatgggaaacctcagctctagtttgtttactaaggagaaacatctgtcctttgacatcacttccgactcttgaactgaatttgtaatttttttctgaagatggtctcaagttggttctcttcctttgtgatttgttttctacttagattttgacagcttccaaaatatgttaccaacaacaaaattcagacaagaaaattggttttttttcattctaagaagttaactttgctccgtataaatatctccatttgtttattcctaaccctttataatgtttagagtatttttttctctctcaaggatctggtaattactaaaacagcaaatttggaaatgtttttaaaattaaagttaatggctctgtctttgtaaatttttctttacaaatagattggaaatgttcaggtgcaattctgctttgcaccagagagcactttgtaacacaaaaagtcttcagtcagccaagctcacctgtcagcctgcagaaggcacttatcacagatggctggttgtttctagcgccccatgctgccacactctcatagaaaggtgtctgcttcagcacccacacctagca

SEQ ID NO: 45195 - DNA, 1049 bp, Homo sapiens
tatcattttatctcagcagcaatagtgtcactgttcctaattccaagtggagaagaccaaggctaggcctggttatctgctgtctctgatacacacaaccaaaccctggtggagcctggtgtgggtttcctgactcttactcagcccagtgtcccctggtgcttcctggctccacggtccctcagttacctggtgccctgggggtggggcagggacgcaacacacccccacccccaaccacatgctgactgagcttgtgcaggtacttcaccgcgttgtctcatgtccttgtctgtcaaatgggtgtaacattctctcaccatattggattgttctaggatgaatttaggagttttgaaataccctttttcctttgttttctcttcatctgttccccttttcatcatttgacagctgatcagtgcctctcatgaagaaatggagaatgattggcatgagtccctcagtggtgctccctgtgagcaccccagtgtccggctcaggagataggaggatagggctcccagcaaggacgaggcagggcacgtgctatgtcccatactttccaagcctgaggagacctaagactgacttcacgctcctctgcctaccttgagaggggtcagtgtgtgtagggatgcccctggcatctggcacattcctgctcttctgggtcatgggccaggcggtggctctctgtgcaggtgcctttcacccatagggagaatgctgtcctcagagcagccacgtggcagttgcagctaacactcctgcccacggccctctggctgagaccgaggttgaaagtaaagaaagcaggtgtcaaaatgcttgcaccaaagccagttggaggggagctctggggcagagaaagaccaagagtgaagcaggtcatccaccttgccctgtgaaggggtcctccctcagggaggtagagaagataatgttaatcccctcctatccaagaaacaggctcccaccagtgccaagtgcagctttcagtgagcatggcttccagtgggcatgtgtgcctaggaatcagtagtcct

SEQ ID NO: 45196 - DNA, 1032 bp, Homo sapiens
tctggccagtctgattacggccagcattgccagcagctgggaatttgccttctccaagcagctacagctggcccaggcactgggctaacaaggggtgagtgccctaggagccaggctggagggaccaggggttcctactcctgggaaagccaagggagccagagtctcaatgctcctcacacccagggaagccagggcccccacatctcccacactgaaggaaaccagggaagccaaggcccccacatctcccacagtcaacccgcactcaaggaacccaatgctccttacatttacaggagccagggctcccatgcccccccacacccaggggagccagcattctctgtttgtgttgtacagttctgttggttttgacagatgtataataccatgtactaccgttaccattagtgtatcatacagaatagtttcaccaccctaaaaatcctgtgctctggctcttcatccctccctccccactgactactggcagccactcttctttgtactgtctctgtagtttggccttgtccagaatgtcatatagttggaatcatgcagtatgcaaccttttcagattagcttatttccgttagcaatatgcatttaaggttcctccacatcttttcatggcttgatagcgcatttctttttagcactgaatagtattccattgcatggatgtaccacagttttctggtttgcttccaagttttggcaattattaatgaggctgcaatagacgtttgtgaaggtttttgtgtgggcataagttttcaactcgtgggtaaataccaagaagtatgattgctggatcatatgtttagttttcgaagtaactgctaagccgtcttccaaagttggctgtatcattttgcattcccaccagcaatgaataagagctcctcttgatccacatcctcaccagcatttggtgttactagtgttttggatttttgccattctaatagatgtgtagtagtatctcactgctgcttcaatttgcaattccttaatgacatatgacat

SEQ ID NO: 45197 - DNA, 1122 bp, Homo sapiens
ctttttgatattaaccctgcaactttgctgtaatcacttagtagttccagtggtcttttgttgtttctttgagattttctccatagaatactaggtcatctgtgaacagttttctttcttccttctcaatctgtgtatcttttattttattttcttgtcttactgcattagctaggactatcagtaccatgtagaatagcagtagtgggaacatccttgccctgttcttaatcttaagggttaaccatgtattttctcaccattgattatgatgttagccagaggggttttgttcttccatttgctggagatagtatcactttggaagaaaataatattagctctccttcccttcttttattacactcttcttttccatctacctacctttgcatctgcactttatattgttaagattggtaacattctgttgtataactataattaagctttgcacacattttctacagattgattctcaaagatgaaaatcattctatacaagttgagtatcccatatccgaaatgcttggaaccagaaatgttttggattttttattggttttttcatcctttttttttttcttgagatggggtcttgctgtattgtccaggctgctctcaaactcctggccatattttggttttaatatttttaagacagcatcatccaggctggagtgcattggtgtgatcatagctaactgcaaccttgaactcttgagctaaagcaatactcccacgtcagcctcccgagtaactaggactactgggatggcacacaccaccatgcccagttaatttttgttgttgttattgttgttgttgttgttgttgttgttgacacagagtttcactgtgttgcccaggctgctctcaaactcctgacctcaagtgatcccccggccttggccttccaaagtgctgtgattacaagtgtgagccattgtggctagccatgtgtctttatataaacaacatatagttggttcttgttttttgttcactccgatagtctctgtcatttaatttgtgtattgagaccattctcatttaaagtgattattcatataactgagataatatcaactgtatttataactgttttctattcattgaccc

SEQ ID NO: 45198 - DNA, 1030 bp, Homo sapiens
agtcattcaagtatgcattgcatgaatgcactttaataaaccaagcctactcattctcatacttctgttttatcctctaaagataaattttctcccaatgctggttttagtgaggaatgaaattttttgtgccaagagtggaaaggaagacctttctatttttctagaaactcagattttactttttcttcaaacatctaatttcaccgcttttcaacaaggacatctgcgatttggtggtgtatctagatgatatctacaatgcttcacatccaagaaaatcagaccatcccaatccccagcaagcactgaccaactgtgctcacccggcctcagccctgccatggtgtgcagagttggctgaggccccgtgtggcccgccctggctgtcttgtggacccccctcactcccttcctcaggaagccatgaccctctgggatgcccagaggtgtctttgacacacgtctcaggtgtcttttccatttgtcaattcaccatttatttcatcttttttttggggagtggggacagggtcttgccctgtcacccaggctggagtgcagtggcataatcatagctcaaacactcattactgtgttaaggagtctatatactactactgtgctacagaaaaagcacagacctaaatatgcaatatggggaatgtttgagggactgagggccggctcagctgtggcgatgtaactacctatgcatctggaaaaatatcccaacaaaaatacttcagttaggtggtaatatgcaggcaagttttaaaacgtacttcttattgttataatttttctttgtacaataagtggaaattataaaaatcttaggaacatgtatataaactcccaagtaaggcaaaaatcacgaggcccctcatgttgtcctctgcacgtggaggagcagaggagtcagagagggcagagccgcctctgaggtgggctttccttctcttgggcctaggcactgtggttggcgtggacgagagcactgctttctcatggcctgtgtgtgacatgt

SEQ ID NO: 45199 - DNA, 1066 bp, Homo sapiens
ttgattcttcctatgcatgaacatggaatgtttttccatttgtgtcctgtcttatttccttgagcagtggtttgtagttctccttgaagaggtccttcacatcccttgtaagttgtattcctagggattttattctctttgtagcaattgtgaatgggagttcactcatgatttggatctctgtttgtttattgttggtgtataggaatgcttgtgatttttgcatattgattttgtgtcctgagactttgctgaagttgcaaaattatcagctttaggagattttgcgctgagacaatgggattttacaaatatacaattatgtcatctggaaacagagacaatttgaattcctctcttcctatttaaataccctttatttctttctcttgcctgattgccctggccagaacttccaatactatgttcaataggagtggtgagagaaggcatccttgtcttatgcccgttttcaatgagaatgcttccagcttttgcccattcagtatgatattggctgtgggtttgtcataaattgttcttattattttgagatacgttccatcaatacctagtttagtgagagtttttagcatgaagtggtgttgaattacatcaaaggccttttctgcatctatctagataatcatgtggcttttgtgtcattggttctgtttatgtgatggattacatttattaatttgtgtatgttgaaatagccttgcatcccagggatgaagcagatttgatcgtggtggataagctttttgatgtgctgccggattcggtttgccagtattttattgaggattttcacatagatgttcatcagggatattggcctgaaattttctttttttgttgtgtctctgccatgttttggtatcaggatgatgctggcctcataaaatgagttaggaaagagtctctctttttctgttgtttgaattagtttcagaaggaatggtaccagcttctctttgtacctctggtagaattcagctgtcaatccatctggtcctgcactttttttggctggtaggctattaattactgcctcaatttc

SEQ ID NO: 45200 - DNA, 1056 bp, Homo sapiens
acatgtactgatacatgttacaacatggatgagcctcagaaacatttgccaaatgaaaaaagccagaccctaacaggcacatggtgtatgattctgtttgtataaacatccagaagaggcaaatctgtacagacaatctgcttctatagaagcagattttggctgccaggacctgacggtggggagtgcctgcttaatggggaggggtttcctttggctgtattgaaaattagaactagatagaaatattgtatgcccaacactgtgaaagtactaaatgccactggattatacactttaaaattatttatttatttatttatttatttatttatttatttttttgagacagagtcttgctctgacgcccaagctggagtgcaatggcacaatctcggctcattgcaacctctgcttcccaggttcaagctattctcctgcctcagccttctgagtagctgggattacaggcacccaccaccacacttggctaatatatatatatttttttcagtagagacgggatttcaccatgttagccaggctggtcttgaactcctgacctcaagtgatccgcccacttgggctcccaaagtgctggaattacaggcatgagccactgcgcccagccactaaaatgatttaaatggagagtgatatgttgtgaattttatctcaataaaaggataaatataaataaatacgtaggagactttataattcaccaattaaggtaacgacagggaaaaaagtctttaggcaatacacaatctacttttaaaaagatatttggggcctggcgcggtggcttatgcctgtaatctcagcactttaggaagccgaggcgggcggatcacctgaggtcaagatcatcctggccaacatgatgaaactccgtctctactaaaaatacaaaattagccgggtgtggtggtgtacgcctgtgatcccagctacttgaggggctgaggcaggagaatcgcttgaccctgggaggcagaggttgcagtgagcctagatcttcccattgcactccagcctgggcaacaagagtgg

SEQ ID NO: 45201 - DNA, 1050 bp, Homo sapiens
agcagcagaagatatagtggcaagtgagcagtctctaggccaaaaacttgtgatctggggaacagatgtaaatgtggcagcatgcaaagaaaactttcaggtgagctacatgtattaaaattcttactttgggctctgaaaatgttgggagaccgtgtttataatctatatctaagtagccataatgactagaagggccacctgtggtggctcacacctataatcccagtactttgggaggccaaggtgggaggatcacttgaggccaggagtttgatagcagcctgaccaatatagtgagactccatctccaaattaaattttagaaaagaaaaaggaagaaaaatattatttatttctgtctcctgatagtgacatactcataactttgtgtgtttttagtagttgcctgttcccaaatgctatatgcctaatacagttttctctccacttaaagagatttcttcagcgttttattgaccctctggctaaagaagaagaaaatgttggcatagatattactgaacctctatacatgcaacgacttggggaggtaatcaaatactctttaaattcaagttacgtgttttaaaatagttaaattagcaaaatataacttgttcatttttattttctagattaatgttattggtgagccatttttaaatgtgaactgtgaacacatcaaatcatttgacaaaaatttgtacagacaactcatctcttacccacaggtaagaatttagctttgaccttgatgaattttagtaacagtctagaaagaatgtttccagataacagaaattcttcagtaatgaagatagtatgcgcaaacactttaagaaactgagtatcatctcctttggcccggtgtggtggctcacacctataatcccagcactttaggacgccgaggcaaatggatcacttgaggtcggaagtttgagaccagcctgggcaacaaagtgaaaccccatctgtactaaaaaatacaaaaattagccagacatggtggtgcatgcctgtagtcccagctactcgggagtctga

SEQ ID NO: 45202 - DNA, 1465 bp, Homo sapiens
gagggtcatttaagagacggtggagctcaccctttccagggccagcccgacgtggtgcctcgctctgaagtgcacctgttgcctacgctggttgctgagccactcggaggaagatatgggaaggtaaaagtgcatctcctggttgtgccctcaggcatctatcgagctgtgcctattcgagtcaatccaagagtgagtaatgtgaagtctgtctacaaaacccacattgatgtcattcattatcggaaaacggatgcaaaacgtctgcatggccttgatgaagaagcagaacagaaacttttttcagagaaacgtgtggaattgcttaaggaactttccaggaaaccagacatttatgagaggcttgcttcagccttggctccaagcatttatgaacatgaagatataaagaaggtaacagtggattttaaactaggggttgggatttacaattctttgggatcaaatagtataaacatccactccgccactcgagccatccgccataaaggacagagttgtggcctgttagagcaagtgctggcaacctgacttgccattggttgagaagaatcatagcattgtctatcctcatctctggtctaaacttaggtttctaaacagaagaggccacacagtgtcagaatagggacttgcatggccaccattctggtgtaatgataggtgctgatgaactggtcagtgataacttaaagcatatcaagcactttcacgagcctttttataccttcctgtgatttcttaattgtagttctttataagagagaaaagtacctctaaagtttaaactacatctcagttaactgtgcagaaaatgaatgtttagacatgtctctgattatttagggaattttgcttcagctctttggcgggacaaggaaggattttagtcacactggaaggggcaaatttcgggctgagatcaacatcttgctgtgtggcgaccctggtaccagcaagtcccagctgctgcagtacgtgtacaacctcgtccccaggggccagtacacgtctgggaagggctccagtgcagttggcctcactgcgtacgtaatgaaagaccctgagacaaggcagctggtcctgcagacaggtgctcttgtcctgagtgacaacggcatctgctgtatcgatgagttcgacaagatgaatgaaagtacaagatcggtattgcatgaagtcatggaacagcagactctgtccattgcaaaggtgagtcgccttctccaccgtgaacatggacgtgtttaaaatatgtggacccttgaaagacagggtctgtggaactgtgctgtgctaccttggttctaacttggggagattgataagtgctttccacatcatatttcagctaaatctcaacatgtcttctacagggtgtcacgttttgtctttattgctgtactagccttgaatttgtcctaaagctcttgcaaggtgcctg

SEQ ID NO: 45203 - DNA, 1034 bp, Homo sapiens
gctgggattacaggcgtgagccaccgcgcctagcaatatactattttttataactgtttattacttcctcccatattgcaaaattgatctttccaaatgttgcaaaagggggaaatagttcatttatgtaggtagtacacacactttatatgtttaagtacttacaagcatagtgaatttaagatcaaagacctggtttcaaatagaggcaacactacacagtaatttggaaactgaaaaagtcatccagtttctgtaagcttccttttgcttgtaaaaaacagaatgagctgtcttttaggttcacttttcagcatcctggtacatgagctgaagtgcatgatggcacatttaggttattcaagcattgtgatattaagaaggttcctggtgctttgatgagctttgcatcctaactgagctcctaaaaattctaagatgaaagttacagacattatgtaatttttttgtgtgtcatagtcttgggggttgttaatgaagaaataagactgtgtcatctgtatgtgaaattgatacaacttacctttgcagcattctcccagcaatccttatgagccccattgtgccccatgtgagcacttttcccagacaggcctgattctccctatgagtgctcacagccttctcctctccccacatgccacattccttccctctgccacgccatgcccgtctctgttcttcagagctacgttagatgccaccctctccaagaattcttcccaagcatctcccagttggaatatgttcacccaccactgcacgctgcacgttgatgtcttcacctgcgatttctgtggtctgtctgtgtagtctctaccacttgatgagctccggggcccaggaccatatctgagttccgtttacttaatggaagcctaagtgttcaaaattcacccacaaaactaaagttgtcaccaaggaggtttgcttttgcttttgtttttctacctacaataggcttatgtagacatgaggaagattggcagtagccggggaatggtttctgcata

SEQ ID NO: 45204 - DNA, 1520 bp, Homo sapiens
agaagaattagctgaagcattgaaaaagcttattttatctaagggcaaaacaccagctctaaaataccagcaactttttgaagatattcggggacaatctgacatagtaagtgtttatatgtattttttgtttgatagagctttctctttttccttaatattgcttttgggtttttttcctttatttattaaataataaatatagagaagaatgaagaaaaggaagatgaaccataagccatcatcaagaaataatcacaattaaaatttttggctgggtgcagtagctcacgcctgtaatctcatttgggacgctgaggtgggcagatcacttgcagccaggagtttgaaaccagcctgaccaatatggtgaaaccctgtctctattaaaaatacaaaaattagctggatgtggtgataagcacctgaaatcctagctactcaggaggcttaggcaggagaattgcttgaacctgggaggcggaggttgcagtaagctgagatcccaccattgctctccagcctgggcaccagagcggaactccatctcaaaaaaaaaaaaaaagaaaaaattgttatgcccctttcatagttgttataagtttgctttaggtatgaaatatttgggtgtccttttgtaaataagtaaggtagttgtttagtgaaaagaactatgcagtctttcagtgctggtccactttccatcgctgtgttgtgactgagagggcagagttgatagttacaacgtggactatacagatgccaagtctaccacatggaccatctggctactccactcctgatttagagcataaggcatgtgtacagccaccaaaaagagaaagattctgggtggtactttaacattataattattgtgtttctaacaggtaaaggagggacttgacgtgtacaatatttattttctttctcttccccacaggcaattactaaagatatgtttgaagaagcactgcgtgccctggcagatgatgatttcctgacagtgactgggaagaccgtgcgcttgctctgaagccttgtgagcaaggaaggctccctgcatgtcctgcttgctgcacgccacatgggtgtggtctgcatctcagttggccgccatcagtgtaaatagagcttaaagtcatggtttggctgcataaaaattttctaacttgggttcaatatttgtagtgaagtatctgttttcatttttttcacgttataaataaaaatactatgctggccgggcgcggtggctcacacctgtaatcccagcactttgggaggccaatgtgggtggatcatgaggtcaggagttcaagaccagcctagccaagatggtgaaaccccgtctctagtaaagataacaaaaaattagctgggcttgatggcatgcgcctgtaatcccagctactcgggaggttgaggcaggagaatcgcttaaacccaggcggcagaggttgcagtgagccaagatcgcgccactgcactccagcctcagcaatagagtgagactgtct

SEQ ID NO: 45205 - DNA, 1031 bp, Homo sapiens
tagacattagaccatttcagaaatgttaaaaacgttaagctttagtttacatttaaaaatgttaacccgtgtgatctgcctttttcttttcttttctttttttttttttttttgagtcagaggctcaccctgttgcccagttggaatgcagtggtgtgatctcggctcactgcaacctccacctcccaggttcaagtgattctcctgcctcagcctcccaagtagctgggattacaggcgcgtgccaccaggcccggctaatttttgtatttttagtagagacggggttttgtcatgttggccagactggtctcgaactcctgacctcaggtgatccgcccacttcggcctcccagagtgctggaattacaggtgtgagccaccgcgctcggcctgatctgccttttcctagtcttcgttgaaacaagagtatagagcagtgtgatttaatagtttatgccatcattgcataataaaatgaattttcaaatctatatgtactgaaatggaaggctttgaatatatgttgtaattgttgctttagagtaatacctcaggatacattctgcatacattttaattaagtggtgtcttttacatctttattacatataggtgtcataggttttaagatctttagcagttctagtgttggggtagtatacatacttgggtcagctagctagtaaggcaaggattgttttaaaagtggaattttagtgttatgactttactgtgcttgctgaaatctaatctgtgctcgttaacggggccatatctttataacagttgtgcttaggacctcttatagatttttgaaaatttagtaataaaataatgcattttaatttaatacttttcattttccttttgtgggttgcattattaaacacaattttttcataacactatacatgagtgtatgttaatattttgaaaagaccaaaggttagatgatattaatggcaaatactttttgttaatcacttttagttgttttggaagttgaatataaattataaagattactg

SEQ ID NO: 45206 - DNA, 1094 bp, Homo sapiens
cctcccgagtagctgcgaacacaggcacgcattgccacacctggctaatttttaaattatttgtagagacagggtctccgtatgttatccagtgtagtctgaactcctggactcaagtgaccctcctgccctggcctgaggttaggattacaggtttgagccactgtgcctggccagacggagacttctaagcagaaacatttttggccatcccatctggtcttcttattttgcagatgagaaaactgaggctcaaacaagtaaaaggctatacataggtggttactagtacaggcaagactagaatccaggtcttttacccttagtctgatgcgctctccattatgaagaactctgaatttggaatatttctcagaacatgaatcttaattactccctttcacacttcccttcttagcacaatccttgtttcagactcttagatccttcttatggatgaaaggggaacgtagccctcaccagctaggttctccttttccaagagacagagttacccatgcaattcaagagtatttcacaggacagaggttaagaagctactctcgggaatagaaatttgatactgtttagtactcatgattcaaaattttattagattccagcattaataataacaattagtttagatagaaaagtatgtgcaggccgggtggggtggctcacacctgtaatcccagcactttgggaggccgaggtgggcggattacctgaggtcgggaggttgagaccagctggaccaacatggagaaaccatgtctctactaaaaatacaaaattatccgggcgtggtggcacatgcctgtaattccagctactcggaaggctgaggcaggagaatctcttgaacccgggaggcagaggttgtggtgagccgagagcacgccattgcattccagcctgggtaagaagagtgagactccatctcagaaaaaaaaagaaaaaaagcgtgtgcaatagttttaaaaaaatacaatagttttagttttacagaaaagttgtgaagatagtacagaaagtttccatgcacctcacattcagttttccctgtcaatttcctttttttttctttcggg

SEQ ID NO: 45207 - DNA, 1016 bp, Homo sapiens
gtctctaccaaaaatacaaaaaactagccgggcgtggtgacaggcacctgtagtcctggctactggggagactgaagcagtagaatggcatgaacccgggaggcggagcttgcagtgagctgagattgtgccactgcactccagcccgagtgacagagcgagactccatctccaaaaaaaaaaaaaaaaaaaaataaggcttgtcaagagtagcttgaggctgggtgcagtggcttccacctgtagtcccagcactttgggaggtcgaggtgggtggattactagagcctaggagttcaagaccagcctgggcaatacaagaaaatcccatctctacaaaaaatgcaaaaattagctgggtgtggtgatgtgcacctgcagtcccagctacttgggaggctgaggtagagtatgggttgagcctgggaggttgaggctgcagtgagctgtgatcgtgtcactgcactcctgcctgggcgacagagcaagacactgtgtcaaaaaaaaaattaatttgaacaatgcttgctaatgttttgaagtacattatctgtacattgtggaatggttaaatctagctaattaccaaatacattatctcacatagttatcatttttgtggtgagaatacttaatagctactgagtatttttcaagaatacagtatgttgttaactaatcaccatgctatacagtagtgctcttaaacttgttcctcctgactgtaattacgtatcctttgtctaacatcttcccaatccccacccccgtaaccccaaccatcctaacctctggtaaccaccatctcctgtctacttctgtgagatcaattttgactccatatatgagtgagataatatgtatttgtctttctgtgcctgtgttatttcagttaacataatgttctccaggttcatccatgttgttggaaatgagagaatttccttcttttttatgattggaacagtgtcccactgtatacgtataccacatgttctttatccatttgtctgtgt

SEQ ID NO: 45208 - DNA, 1046 bp, Homo sapiens
gtaccagctactcgggaggctgaggcaggagaatcgtgtgaacctgggagtcgggagattgcagtgagccttgattgcgccactgccctccagcctgggcaacagagcgagactgtctcaaaaaaacggcagggcatggtggctcatgcctgtaatcccagcactttgggaggctgaggctggcggatcatgaggttaggagtttgagaacagcctgaccaacatggtgaaaccccgtctctactaaaaatacaaaaattagccaggcgtggtggcacatgcctgtaatcccagctactcaggaggctgaggcaggagaatcacgtgaacctgggaggtggaggctgcagtgagccgagattgcgccactgcacttcagcctgggtgacagagctagactccgtttcaaaaaaaaaaattagccaggcatggtgccatatgcctataattccacttgggaggctgaggcaggataattgcttgaactcaggaggtggaggttacagtgagccaagatcctgcgactgtactccaacctgggcaacagagtgagtgagactctgtctaaaaagaaaaacaaaaataattttatctgatataagtgaagcaattcttgggctttctctctctctgtctctctttttttttttttttgagacaaggtctccctatctaggctagagtgcagtggcgtgaacatggctcactgcagccttgaactattgagatcagtgattttcctacctcagcctcctgtgtagctgaccacagatgcatgccactatgccttgctaattttttatattttttgtagagatggggtctcaacatgttgctcaggatgctttcaaactcctgggctcaaacaattttccctccttggcctttcagaatgctgggattatagggtcttgttctctcttgatttccatttgcatggcatatctttttccattccttcaccttcagtctacatgtgtccgtacaggtgaggtgagtcttttattggcagcatatagttgggtcttgttttttttaaccattca

SEQ ID NO: 45209 - DNA, 1384 bp, Homo sapiens
ttaaaagtcaattgtagtttgtctttggatccatactgatgtatacatgagagttttttttagaattatgatcaaaatatatgtgctgctattaggtctcccccaccccccctttttttttaacttatacacaattaatataattcatgtagtttaaaatgactttatataatattttaaattatgtgacatagtttgcctgaatgtataccaattggcttcttaagtttttgcactgccaaataaacatttttgttcagattgcttttccaacccccctcccttcatttatttattgctgtgtaacaaattacatcaaaactttgtggcttcaaacgatgattgatttttttcttataatatgggagttgactgggtggttcttctgctggtttcacttagagtcactcatgtggttgcatcagctggtgaagggataggcttgttgcccgggacgccttgctccccctccctgcagcctctccaggtggccagttaggacttcctcacatcccggtggtgtcagggtgttcagaattcttacatgatggttggcttccaaaagaacgaaagcagaagttagcattcctcttacaaggtgagtgccagaactggccttagcattgctgcttccctatttattctttttttttttttttttttttttttggaggtggagtctcactctgtcgccgaggctgtagtgcagtggcacaatctcagctcactgctacttctgcctcccgggttcaagcaattctcatgtctcagcctccagagtagctgggactacaggtgtgcaccaccatgcccagctaatttttttttggtatttttagtagagacggggtttcaccatattggacaggctggtcacaaactcctaacctcaggtgatatacccaccttggcctcccaaagtgctgggattacaggcatgagccaccgcgccctgccactgctcccctcttctactgataaaacaggtaggaaggtttgcgcagcttcaaggggaggaggggtgtgcctgggcctggagggtggaggatggctcacagcactctgcaggcattctgcgccctgtttttttgtcctgaggggaaatttcacaaagtagcatttaagtcaaatcacaatacatatttaaaaattattgtttttttttttttgtgtgtgtgtgtgtgtgtgtgtgtgtgtatatgtatgtatgctttttttttttttttttttttgagactgggcccgggttcaagtgattctcctgcctcagcctcgcaggagctggaattacaggtacatgccactatgccagagctactcaggaggctgaggcaggagaatcacttaaactcatgaggcggaggttgcagtgagctgagatcat

SEQ ID NO: 45210 - DNA, 1026 bp, Homo sapiens
tgggtgggggcgacagagtcttttgctcttttgcccaggctggagtgcagtggcaacctctgctcactgcaacctccacctcccggcttcaagcagttctgcctcagcctcccaagtagctaggatcacaggagcgcaccaccaccccctgctaatttttgtatttttagtagagatggggtttcccctgttggctaggctggcctcaaactccgatctcaagtgatccacccgcctcggcctcccaaagtgttgggattacaggcatgagccaccacgtctggctataattcacttcttgtgtgtgacttcctactaatttgtaatcatgaaagttgggcacatacccagtatgctcactatttctctgcagggcctgatacagtggctgctacaacactgatactctgcatttgttgaatgagtaatttaaattttaaattatcatctagaatcatttagagatttatttagactttgataaatttagataacccacacacagtttattcctagagttcttgatacattgttacagtaagtttggtcctggcaacagcaataacacttactgtaataacttaattcttcatacgaggttgcttcacttttattattaagcagaaaatacccaaagtaaaattgagctatttgggactcctttcagaatactgtgtaggctgaagcattgttgtatcagaagtgctctgttatttgaatgcataaggtattcaacaaacaaatgcttattaaattaaatggtattcagcatacagctactgtcaccgtgctaggagttcacatttttcatatgcgtggcagttagcactggtgcatgtttccttcagcctcagaaatggaggtgtctgcgtgttgcccagatctaccttgaaaactctagttgcttcctaacacctaggttgtatagtgggacttgattatgttttataaagccaagtctggtctgtgaggactgaaaggatttcctcatcttaactctaatttggcctgcaatgtctggggaaa

SEQ ID NO: 45211 - DNA, 1060 bp, Homo sapiens
cctcagggatctagaactagaaataccatttgacccagccatcccattattgggtatatacccaaaggactataaatcatgcaactctttatgcttcagattgcagttatgtaatgtaaaaagcatgagtattggaatgaaagagaactaggctcaaactttgactttgatcattagttttgtgagcctctgaatttgaatgtgtatagcagtgataagaatacttgctttaacgtaatacatgtacagcagagggttcaagagagtatcagtaagtggtacctcttgccaatattctcctaatatttatcattattttaagcccctgaccatgtataatttgattttaaacatttatattttgatatatttctatttggtacagtttctaaaattttcaccatttgaacaatgttcttttaaaaaaacttaatataaaagacctgtaccatgacttaatatccaggaaaaatattactaataagtttatgaattcatatttggcctaatctttgtcacttgtagacccccaaaaaatgacctcctgaaactgaagaatttagataaaatttagttgcagaaagaattgcattcagaatagtcactctcagtaaaatccacatttaactacttcgtgttatatcaagtagggcttataataagatattggcaataagaaaacaatattaaaaaatattaagaaaaggctaacagtattttctggaaagaatagctggttgacctttgcagaggaaagtctatgtggagactgtaattttaacattatctccatgaatgatttaaatataattaattttcatattagatttcctgttgccaagttgctcttttattttgactatggcatttgcttcttgaaaaaaaaatactatattaatatatagaaatagttagattctactctaaagctgagatgaaaatagtaaacctggaggcggagtagcaggactctcctgacctgggccaggaggacagcactgatgtgtgtgtccccaaggccttggacttatctcagtctcacctgtcatctcactcttat

SEQ ID NO: 45212 - DNA, 1028 bp, Homo sapiens
ctctgctactgtagcagaaagctgtgcggggagagggaaggaggtggatatgggacttatcgtagccatcgagacaagagatggggccgccagcctaggagaagtagcggggatgcagtgcaggcctggcgtgagtcctggagatgcagtgagcttgctaatgagtgatgcatgaggaatcaaggtgacttcttgatgtaggtggatggtggcaacatgtgtggccatggagaagacaggaggtgaaacagaggggctggaggaggagatgcaagattccatgttagaccctagagatgtccaggagagctccaactgtggtgccaggcagctggttggatctgtgtgtatggcacccagggaatggcctgggctagaggcagaaatgtggattcgttaggctctgatgatgtgcagcctgctgtactgtggtacgctaaatgatcatgaagttatggtgggaagccttgaaaataatcagtaggatcttactactttagaatctgcgcttccttttctcaattatccataaacagtctatgaagaatttctgtttatgacaggggtcagcaaacaaggcacagggccacctccagccctctgcctgcttttgtatgccctgaacactaataatagtttttctttttattccttttttttttttttgagacagggtcttgttctgttgcccaggctggagtgcagtggcgggatctcggctcactgcaacctctgcctcccaggttcaagcagttctcttgccttagcctcttgagtagctgggactacaggcacccggaaccatgcctggctaatttccttgtatttttagtagaaatagggtttcaccatgttggtcagagttgtttcaaactcctgacctcaaatgatctgcccgcctcggcctcccaaagtgctgggtttacaggcatgagccaccacgcccagccaagaatggtttttacattttttaattgttgggagaaaaagtgagaagaataaggccagacatgatggctcatgcctgt

SEQ ID NO: 45213 - DNA, 1028 bp, Homo sapiens
ataatttaggggcaatggtaggaagcatcagtagaaatgttattcattaaagacagttcaaataaaaatgaatgttacttttaaggaacttatcttttactaagcatactttataatatccatatagtaaccacaatacatttgtcatacccaacaaaattaacagtaagcaattcacatcatctaatgtgtaaccatagtacattctttcttattagcctctttactaatcttcctcatcatccatcttctttttcatacgccaacttgaagaaattggacctgctgccccgtcgattgtcccacattgaattcatttgctgctttctcaagttgctaacttgttcctgtattccctaaatttctgcaaactagaggttagactcaaaggctcaaataaattcctgttgcatcacatcagagggacacaatgtctgcaaaattggctcgcttttagttatggaaaggacattatttctaaaagcttggtaggtcagtccaaattatacagagcggctgataggtccaaggcatgtggggcacacactgcaaaggcaacaggtgctactcttactacagctgccttctgcttgctgaaagagcttgagtgtccactccgggccatactttgggagctctgttcctcagcagggctggaatgcctccttgatggctgtggggctggatcccacccgctcgccttgcaccaccaggagctgctgctctgcctccccctggctataattccctgcctgacttgaggagtggtggtgatgatgatgatgatgatgaggttgtgtttcccttctgcactgttaatttggagaatgttccaggtgaggaaaatgcatcaccttcagaggataccagatgttacccagaccactgtcctggtattgagggtactcagagtgtacctagaagtaggtgtggccattagggagcacagaaggagtgttaccctttttcttttgggaggctgtgttccttccaccacatcagaaccaaagaagaaactggcctcctcc

SEQ ID NO: 45214 - DNA, 1022 bp, Homo sapiens
ctgccttggatgcagcactgctgaagacagaggtggtattggtcaatgggagttcagaccagtttttcttctacagggatctcccggagttcagaccagtctttcttctacagggatctccccactcctgcctgacctcttcagctttggtcccagtcatacagctctggggttctcctccccagtccaacagttttgcacaggatctttcaagaagattcaagcttggccaccttccatgtctcccatggaaaaactcacccatgcatgcagctgggtcgcttccctttttcctagacctggctgttccaaccaggccctcccattgagtctcaggcagtccggagggaagctgcagtctctgtacttctcatgctttgccaggttctccccaggagtcttctgaatcatctgaggacaaggacagggctggtgcccgagtttctttcttttttaaaaatgtgtttagaattggagtctcgctatgttgtcgaggctggtcttgaactcctggcctcaatcaagcctctcaggcaggtgtggttataggcatgaaccaccccacctgacatatttactgacatattttaccatattttatcgaattctagattcactattgtttcttgtattccatacttccccttggggtctacttttcttggtaaaatatgctttaataattttctttgcaagagtctgtgagagatcagcaaatattcatccgaggacagggtctcactctgttgcccaagctaactgcggtggtatgaccacagctcactgcagtctccacctcctgggctcaagggatcctcccacctcaacctcctaaggagctgggactacaggcatgtaccacaaagtccggctaattttttatttttcgtagagacaaggtttcactgtgttgcccagggtggtcttgaactcctgacctccagtgatctgcctgcctcagcctcccaaagtgctgggattacaggcatgagccactgagcccagcctaagacccatttttg

SEQ ID NO: 45215 - DNA, 1022 bp, Homo sapiens
gggcggatcacttgaggtcaggagttcgagaccaacctagccaacatagtgaaaccctacctctactaaaaatacaaaaaattagccaggcgtggtggtgcgtgcctgtagtcccagctactcaggaggctgaggcaggagaattgcttgaacactccagcttggcgacagagcaagactgaatcaaaaaaaaaaaaaaaaaagacatacatgtggccaacaagcatatgaaaacatgctcaagatcattaatgattagagaaatgcaaatcaaaaccacaacaaaataccatctcacagcaggcagaatggctatcatcaaaaagtcaaaaaaggtcgttaagggttgggccatcaggaacttgcgcgtccatctcagggagacctggccttcagagatgacagcattcagccccaggaggagcctgcaattcatcctcggtcttcccaacttgtgccgcccagggagatacaggacagtaaggaactaaacagaacctgctgtctgaatgggggaacctgcatgctggggtccttctgtgcctgccccctctccttctatggacggaactgtgagcatgatgtgtgcaaagagaactgtgggtctgtgccccatgacacctggctgcccaagaagtgttccatttgtaaatgctggcacggccagctccgctgctttcctcagccatttatctacctggctgtgatggccttgtgatgtatggcatctcatagcttccaggactccagaactaccagcatctacactgccacttctatgccagctggcatctgcttttctatacaaagttactattaatcgacactgacctatttacagaagtataattttagatatcatgcaaatttcatgaccagtaaaggctgctgctacaatgtcctaacagaaagatgaccatttgttagttgccttaaaataatgaatacatttccaaaatagtctctaacatttccttatagtaccaactacttcctacctctttgccctgccctcccccaaa

SEQ ID NO: 45216 - DNA, 1046 bp, Homo sapiens
agatggggtcttgctatgttacccaggctggtcttaaactcttggcctcaagtgatcctcccatctcagcctcctagagtgcagggattgcaggcatgagccaccacgcccagtccatttattccttcttattgctgaatagaattccaatgtatggatgtaccaaaatttgctcaaccatgcaacaattgaagggcatttggattatttgtggcattttgctgttacaaataaagcaacagtgcaggtgcagtggctcacacctgtaatcccagcactttgggaagctgaggtaagaagattgcctgaagccagaggttgagactagcctgggtaacatagcaaggcagaaaataaaaaaataaaatgaaatttcaaaagtaaacaaagctgctgtgaacatttgtgtataaaagacataagatttctctgggattaaatgcccaagcattaaatataaaggaacatgggtagttgtgttagaacaactagagattttatcgtacatgacatgaagactaaactgagtaggtaaagcctgctaaagacagcttacaccagtaatctaaaccatgactgggttctttgatgtttctaagggttgagatttcaggtcctacttatctgtttcataagttgtgaaatttaagtagatacctacacattatgaaatcagcaagaaagggacacgaggaatgtctcaaaattgaattgaattcaaattagttcagaagtacatgttgactcttgtagtttctaaagattatcagtttttctcccttaggtgtttcaaggcaattatagttaatataatcaatagttcatataatcatttaaggctaagatcataaagtttagcatgtaaaaaggtttttaaattcctggcaggatgtattactatgcacatgtaattttattgaggaatccttgggtagattttgatagtatacacttgtagaaatctatttcttttcttgcctgagacttaactacttaactactcttctatttagagcacccaattctacttaaaagagaaggataaa

SEQ ID NO: 45217 - DNA, 1024 bp, Homo sapiens
cactatcccacttccataaacaccaattctcatgatgctggttatttttacctggggtagtaccaccttcacaagggcatttggaagatgctggttgttagaatgacatttggaattctggcatttagtactcagttacttaatgttaggtcatgtacaggatggtcttgcacaacaaagaattattccacccacaatgtcattataccccctgttgacaaataatcaccttactttgctattggtaacacttgtttggggatggggagatctgaccttactgaatcatgatgacactttttactatttacaatgatcagatgaacatattaggacatagccctatccttgaggaccatttgagtgtgtaatggagtcttattctttgttagccatcacctcttgtttttatacttaactgtgaaaaaagtctcatctttctatgttgttgcttctaatttgctgaagactgaaaccaaataaccaaactgataaaaattatttaaggaaaaaatcactctctgaatgaatgagatccttttccgtggaatggagctagtgacccttgtttcagtttctcagatgccatgtgacttcaatgtggctgacagctagagcctaatctagtccttgatagaaaggaaatgtttagatttctataattcaccacataaagcagtgtcttggctaacagaagtaataacttttatgtctatagcagtatttctacatatgtcctgtcactgctgtgaattaagttagtaaaacaccactcactaactcattcattcattctttattttttagacagagtcttgctctgttgcccaggctggagtgcaatggcgcattctcagctcactgcaacctccgcctcccaggttcaagcgattcttctgcctgagcctcccgagtagctgggattagaggcacctgccaccgtgcccagctaatttttgtatttttttttagtagagatggggtttcaccatgttggtcaggctgatcttgaactcctgacctc

SEQ ID NO: 45218 - DNA, 1065 bp, Homo sapiens
tacttctcatatgattcagagctgctttctagactgccagataaggttgagcctaacaattccataatttctgtttttctcatatatgaatattatgctctacatcgtctcatcagagacgatgtgatccttatattaaatgtagacagcctcatttgagtacttgaataacgagaggaaattcactgtttatcatgcaatttatgctgattaactttttctagttacattaacactttcacaaagagaaagttaactttttaatttgtgtttttggtttatttcaaaaactttccagaattggagttggtgattcatgtttttttgcctctagagggagtaatgacactagggaataatgaaaccaagaaagactgatgagatttcaagtgtattaattttttttgctatcaaattttgatcagattacagtgggaaatcaacttttttttaatgaagaaaatgtatccgtatgtaggacctttttaatgagaggagacagtactaaaaattgagagaaatcacagttgcaaagaaaattaacttttttttgttaaggaacttttagaatgttacaacaacctgaatttgcaaatggtttgggatcccaagtgtgtcactgtctgctgtttgaaactcaggctgcatttttctcatatgaaggacagttaatttcccatccagggagattgtactcttagataatatttatatcatcctaaacagcatggattcaatacaaatacaacttatctcaaatatttccatgtaagaggtgatgctaattgtttcctgtatctagtgaaatgttttcctaggtcccttattacctcaatcttctattccttttttctatttggagatgattccaagacatgcatttcttgctaagaactgagtaatttagaaaaatatctttttgtgagaggctctttggaggtaaggtatataccttactcttgaaattgctgttgaaacccaaggactaatttttatttatttatttatttatttatttattttatttatttatttatggagatagggtttctctctgtcacgcag

SEQ ID NO: 45219 - DNA, 1064 bp, Homo sapiens
tcactttcacaagtgttctcaaatttcttaagcattttatttcataccagaaagttacattcaccactctaatccataggacaaaggatgaatgcgtaatcagttcactgtgattaaacatttgactgttgatattaatatattacacaaaggcaatacatgaatttgagaattattttttcctgacaattactggctgtgtgatatttggcaagttacttctctgagctttacttcctcatctgcaacctaggaattaacaataccaattacaaatcattgtgtgagaagaaaatacaacaacatagagcaagtattgtggttggcacgtaatgagaaaaagcaagcatgtggtaactggaggatcatgagctctggggtcaaaaaggcattggtggctcacgcctgtaaacccagcactttagaaggccaaggtggcaggacagcttgagcccaggagcttgagaccagcctgagcaacatagcaagaccctgcctctacaaaaattagccatgcatggtggcacatgcatgtagtcctagctacttaggcacctgagcaggaggactgcttgagccaaggagttgaaggttgcagcaaaccagtcatcatgccactgcactccagcctgtacaacagggcaagatcctgtgtctctttcttttttttttttttttttttttttgagacagggtctcactctgtcacccaggctggagtgcagtggcatgatcacagctcactgcagcctcgccctcccaggctcaagtagttctcccacctcagcctcctgggtagctggactgcaggtgcacgccaatatgcctagctaattttttgtatttttagtagagacagggtttcaccatgttgccaaggctgggatcctgtcacttaaaaaaaaaaaaaaaatgctggcgtggtggctcacgcctctaatcccagcactttgggaggccgaggcaggtggatcacgaggtcaggagttcgagaccagcctgaccaatgtgctgaaaccctgtctctactaaaatacaaaaatgagcgaggcatggtggcacac

SEQ ID NO: 45220 - DNA, 1543 bp, Homo sapiens
atcatgagttaattttcttttatcacttggtaattgtctgaactaagtggctaactgctcaggacatagcagatgcaccatcaagctgggcacttcaagctgtcttctagaaatgaatttctgtgctttttagcactgctttttgcttgggggtgggaaagggtggtctccagtaactgctaagatgacacctatactggctgctgtccgagcagccctagtgactgtcttgggggcaatcagttgcttaatggttaatacagaagtacctgagtaatactttgcaaaaggactttccccgacctgtgctgggagtgtctccctgtaaactttgccaacctcctggttgttttatcagtgagagcatcatttaagtgaaaatataaattaaggagacagggctcataggacgcacattaaaacacctgatcattttgagcacctgctgtgtgcaaggcactgttctaggccaacagtatagatatacattgcctcccatcttttaaggctgataatgaagagaagaacatggaagaggaagttgttgggttttttttttccagtcagaaatactgaaagatttcttacagctgtctggtttcctgatacttaaattgtgaaactttaagttcactccattatcatttctaaaatttattttgaataagttccctttcgggggagatacccatgtgtagagaatggtatggaaatctgccaatggagggattagaaattttgtcagtttaaagacttggaccttttgagatttttgttgttgttgttttgtttgttcttcttttctgagatgaaggctcactctgtcgcccagcctggagtgcagtggtgcaatctcagctcacggcaatctccgcctcctgggttcaagcaatcctccctgcctcagccttctgagtagttgggattacttacaagcatgtgccaccacacccagctaatttttgtatttcctgtagaaatggggtttcatcatgttggccaggctggtcttgaactcctgaccccaagtgatctgcccgtctcgtcctcacaaaatgctgggattacaggtgtgagccactgcgcctggcctttctggggtatatttggcttaagttagttggaagggctctctttattttttattctgcctcccactgaagagacagagttcgctcttgtcacccaggctggagtgctttggcgtgatcccagttcactgcacctccatctcctggattcaagtgattctcctgcctcagcctccctagtagctgtgattacaggcgcccgccaccatgcctggctaatttttgtatttttagtagagatgggtttcaccatgttggccagggtggtcttgaactcctgaccttaggtgagcccgcctcggcctcccaaaatgctgggattacaggtgtgagccaccgtgcctggccctgtcttgtaatttagaagagcaagtttaaatacttgggatgatgtattaaaaagcctcatccatgctgacaagagcagggcctgtagtagcctttgttgttta

SEQ ID NO: 45221 - DNA, 1048 bp, Homo sapiens
acctaatttagtaagagaggcattccccccaagctcctcacgtttatttatttatttatttagagacagagcctcgctctgttaaccaggttggagtgcagtggcgtgatctcggctccccgcaacctctgccttccgggttcaagcaattctccctacctcagcctcctgagttgctgggactacaggtgcccgccatcacccccagctaatttttgtatttttagtagagacggggttttgccatgttggccaggttaatctcaaactcctgaccttaggtgatccgcctgccttggcctcccaaagtgctggaattacaggcatgagccactgcacccggcctaaacttcatttaaatgatgaggaaataactgcaatggaatgagctggttggagaacgatgttactcacccgaacgctggctttatgcagtttcaacatccacaggtatcttctgattgatcgcattacagtcttgacctaatttctcctgataaggagctgaaaatcaagcaacagtacattagaactttgattcatgtgacgcctatcatgccatataaatgaaaattcagagtttagattaagaacagtaaagctttctctgttgtaccttaaaaggtacttccctcctcctcataataataagctacatgcttctggaagttttaccaagacttgagatcaggagggagcattctgacgctgagcacacctctgactttgcacatggtggtttcgaggggttgacagcagaagatctccagagtctagtaacagttctgtcttactgttcaaatttgccttttctacctcaatttctcctccattttaacagaaaacctactactactacttcatatgtatctaaaatatttcaaaatctttagtaatgggatataagcactcttagccatcagaataacttttaaggtcaggtgcagttgctcacacctgtaatgctagcactttgggaggccgaggcaggaagatcacttgagcgcagaagtttgagaccatcctaggcaacatagtgagacctcat

SEQ ID NO: 45222 - DNA, 1033 bp, Homo sapiens
taaaaattacaaggttaaaatacaatgaaatactcaaggaattgcgtgaaccatctcttttgtacagactgagatgactctcctggtgaccctgaactcgtaggggcagcaggtggaaatgtacattcactacttggtggaaagaagtctgaattggggaagtatttatacatatgtgaaattccattgtactagggtgtcctgtattttatctggtaaccctgggggcagtcctatgagctgcggggcacctgccctggagactgaggcagggagtcaaagcgacatgagattggggataggttttgcatgtccgtggaaagggcttgctgatgaatttgatttgaagattgagaaacagaggaatcaagggcgacttcttggttttaaacttcagcacctggtgccctttactgagatggagaagatgggaggggagtgggtttcaagtgtgttgtgatatggacaggtcttattgatggggtgtggtgggcgtccaaatggagatgtggaagtttgattctgagtgagctcaatatcgtcgtggtgtgttctaccacgtcccttctagccctttccgcgctttctcccatctagtgtttccctgctcaaatggaaggagagaggaacaacttagagcacagtgtgactggggcaagctaccttagagataatcatttaaacaccagctagactgctgcaagaaaagaaatgatggtaaaaataaatgtactccaaaggaatttgactaaagaatatttcaccgtgtaacacatttctgtgtgccccttttgcaatgtatcattaaggatgcattgctaggcataatgaaacaaaatgtttttcgtaatgaagtggttattttgcaatgaaagccagtcaaggaaagaaatcaggcttgaatactcctagtcacaacctttataaaatctaacgttatggttagactataccatgcctgcgcttaagtagtttttgaaattttaacccaaataagaaattcttggctgggcatggtggcttatgcctgtaa

SEQ ID NO: 45223 - DNA, 1048 bp, Homo sapiens
tttcataattaaatctatattttgtattatcaatatttaaccactagaagaattgatgatgctacttattaaaaatgacaagtgatgtaatagagttagtgggatgtctgcctgttgaaaccattttactaggtaagtatttttattacaaaggggttggatataaactggcctcatatccaaaaacctttttgcaaaaatcaaaactggatatatcctgtgttcgcttccttttccctgggcccctctgttaaaatcttttagcaaaaagattttaccaaataattcacattgaaatataaatagttttaaagtttgctatgttgctttctttccaaaggtattcagattttagtaggggacaaaagtgtcccctaagtcaagtgagtataagaattacctatattgtttgctacaaatgcaaatatccacagcctccttgtaaagtctcattcaggggctgcctactgcagggcccaagaatctatatttttaacaaatactctggtcattcttgggactagcaaatctagaaaacaccaacttgaataaaacgattaaagttgtgcttgctgaatttcaactacattaaaggtaccagtgctggaggagatttttgaggggttgaggagaaataattacacataaattattttattaatgaaatgattcagcaaagtgtaaacgcccgtaatgggcttggcagtgtcctggggctgaaggtactgagtagaataggacgtgagacaagtgctctacttgaaataagcacagacgtggaagaagggatgtgtagttttgtctggggattcggcacagtttttatggaggatgtggtctgtgaaatggctgatttgaaacatgaaggaggctgcttatgggatgggttattctgggaagcaagcaagtgcgagggcaccagaaggtatgaagggccttggagtactgggctttcttatggctgcgagagaggatgagttggaatgagatgagcagcttatgaaaccaggaagacaggttattgtggaggagtgacttgctaagctct

SEQ ID NO: 45224 - DNA, 1034 bp, Homo sapiens
ggatacactaacagcattttgtccaacttgtggagtggagggagtagggaaggggaggatagtgctaatgaactgtgacaggggctagcaagaaagaaagaaaaagagttccctaagtaagctcctactgggtgtcctccactcacatggagacagggccctgccttttaggcacttactcttccagtgtctattgcataatatgttcaggaaggatcccagattcaaagatttatagaattagagttaaaagggatagatatcttgtttgaccctgaaaaaattaaggaatatgcttgagatattcaatggcagaggctggaatagattttcccaaatctcctgatgtgaagttctgtgtttgtcaaacatgactgtgtaaaaagattaatttaaacttaatgacatgttgtattcatagaagttctttgggtttctgtggaaacctcctcttgctagcttaagcagaaatgggggatttattggaaggaagctgagatattgcaccaaactgcacaaaattgaatgaagagctgactaagcaaggctgcactgagaaggaaccagggtggtctgggctgtggtagcggcagcagcagcttgcagatctcccagcgctgatgctggctcgactcagacaggtctccactctctgctgtctgtctctggctcagacaggacactttgtgtggctgtttccttccacaaggcctcagtgggagcaagccagcctcccacaggcctctgagacagaccaccccattcctccctctcctgttaacctgcctttatttccttaattgcacttatcaccatgcagaagcctatgtgtttgttcccctgtggagatgtaaaaacactgatgcccaggcctaactcccagagactctgattgaactggtctgggctatggagccgggacatttgcatttttcttacaagctctaatgtgcagccaggattaagaatcattgccttctgcatcaacaggacaaatacaaaatgtgcagcaaaatatatgtttaagtgaatca

SEQ ID NO: 45225 - DNA, 1021 bp, Homo sapiens
gcctataaaaataatctctttgtttggcattgttaataaatagatgaaacatgcatttcaaaatacccattgtatggcaaagtggtaagagcccaggctgtagacttagcttatgacttagacttgagagcgcactcctgtgtgagtgagtcttagcctcacccctcccagctatgctgtgcgcgagtcttttaacctttctgagcctcagttttctcctctgtaaagtcatctggccgtatggtttcttcaaggattaaatgagatgctcaatatattataaatgtgtaatagaagaatactaaggtggaaatcattgtaaagtgtagctcatatcacttggaacatgtaaccactctcagtttttgtcaggagtatattgtattttctacatttctggtactttcatacagcataaggaattgcaagacctgttctgagtttgggttgctcatccccatgtcacatggaggacctctgttgaggtttctggtgggagagtgtctgaatgggggaccccaaacactttgtgagcagagatcagctgtgcctgagcagtgaggccatgctaattctccacgtggctttaattttttcatttacagtgcatacattcgatgttaaattatccatgacaatggtggaaagaaattaagcataaataaatggccatctatcgatcttcctgtcttggatgtcaccaccccacccacatccacctgctttttgtttccgtccttccttttcccaagagaagagagagagagagagagagagagaacgctggagcgagcagcgagggcaggggaactgcaggaacgcagtgggggggggacaggggattccctgtgccctggttgtggcacagctcagtcagggctcggtccgtgctgggagggagctggatcgagcggcccggtgcgctgtgggttggccgcacccatgcagggctcctgccccggagctcgcggcgtgcgcagggtcctcgtgctgctattaacgtatttgcccatttgtaaag

SEQ ID NO: 45226 - DNA, 1018 bp, Homo sapiens
gactttgcaaactggctgccatcccgcccatttcaactcacagagcatttcctttaggaagctttccctgaccacctccttttcctcttgcctgagttacatgtcctttcttagatcctgtgggtcctctgtcatcgagtctttacacatctttgccacaagaatacgagcagagttagagctggattttgtctgggtgatggaaaattaatgctcaataaatatttgttgagtgaatcaatggacaggcaaacctatttgggaacagtattcactttgagtttattaatctatatatgataaagaataaaagtatattttttctactcttttttattggagacattttgatggcttgaagcagttctggaatggtaaaacaatgtcattacttttatgtttcaacaggaaatatgggatgtataaaatcaaaagggaaagacagcttgagtgacgatggagtagatttgaagactcaaccagtacgtaatactgaaagaactatttatgtgagagatccaacgtccaataaacagcaaaggccagtaagtagatagtctcaggggagaattcccacagcaagatcaaagcatggctacataatttaaacaccagtctgtaatatgtgcatgcaaaaaaattccattgattacttggtcctcaaataatttttgatatgctttgtaactttatcctttgaagaatgtataaatattttagggataactaggccactcattgtgcaattaaaagggcctttggtcacattcttttgtgtgaagaaagccatctttcatattactggtgcaaagaccccactatatatatatacacacacatatatatgtgtgtgtgtatatatgtgtatatatgtatatatatgtgtatatatatatgtgtatatatatgtgtatatatatgtgtatatatatgtgtatatatatatgtgtatatatgtgtatatatatgtgtgtatatatatatatgtgtgtgtgtgtatatatatatatatacacac

SEQ ID NO: 45227 - DNA, 1121 bp, Homo sapiens
ttattcagaaaagtcaaggagaatagtgtgcaaacccacacaccgctttttcctcttgttcaaaataaaggggattaaaaatcaagttagaaagcagaagtagtaaacacgcttgaagtctttcaattccctcctgtataccattttttgccccttctgtggtcacagatgccctccactcatgagccagttagcctggccttattccatggccataaccaacactctcagccctggccagatatgacaaaatgcacgctatggattgattaaaaggggaatttgatgagaaggtgaggtagggttgatgcaaattcaacaacattctagaaaaagccattttaaggaaaaatctagagcaatagtatatgtgtggcatacatgtgtttcggtcttataaaaagcatattaaaatgtttgtaagttaagggctttttgaaatttgaaaaatcagcttgctgcttttaaaatgatgtaattagtttctagtcttctagttatttcctctaaatcacataaaatagatcatatatccaaattatgcaaatctgaatgactaaaaaatcaacataaaacttcctgacataaacatttgaaggatagtatgcagccatgggtttttctggtactacaatgtagtaattttccctgtctcactgaaatggagattttatgggctttcatcagaaatttaaatttcagtacaaactgttttggtcccattctgtgaagccactttaatcaaagagagacagaaaagttacatgacttgtggtataggcctctgacagcatctatcttacaagaggcccagaggcctcacacagcctcatgtggcactgtgaagaaaagaatttgattttaaaggtaattgaggtggtcttctgtgccaccaaatccttcccaataactcacccccccactgaaataacaggggatgccatctgtccctgtgatggagtcagggtcagcccaagaaaacctggatgggatgggacttgctctcagcctccagggacagagccctgaccatgcaattttatacaattggggaagcctcagatgggcagtcccaggctgggacggcaactccacgaaatcaccagggtcccacctcttcc

SEQ ID NO: 45228 - DNA, 1043 bp, Homo sapiens
ctcagtatacaaatgttaacacagctggtggttagctctttctcagaatttgagaaatgttgccatgattttgtaaatggagcctagattatgctaatgatggagaaatcactgagccaagaaccagaaaacctgcttctgcatggggaaaatcactttgtgggcaccagtgtcctcgtctgtgagatgggaggcacaggttgggtttcccacagcctcagctctaatattgcatgactaaggacatctccttttatttagactatctatgtgaatcgtcaccaaaagttgcaactaatgattctgaggctatgcagatgacattgatataagattttagcattgctctaaataagggaacacaaatatatcactttaatgcagtacttacatgttgggcacttaaatgctctatttatcttttttgaataatgagtgttatgttttcagcttaaactttgaccatgaaaacttagaaaatggacaaatgaaactagttactgtcagaattgcaaaagtggatcatatgcagtttccttctgaaaaagccaaaggaataggaaactgtcatttaaaaatagtataaaacaggaactcttttttttttttggtaaggtgggggtggggctgttttgcatatttaagcaagaggaatcatgactggctgttaaaatagcaaataaggcagaatttatttttgctttaaatttgattgggaagctttgggttagtgtatggcagaggtggtggtgcttttggcctgcaggcaagatctgtctcttatcttaatgttattttgaccaggggtggcaatttctggtgagtgctaccgtaagtcacaaaatgctattctctttgggtactcatcatggaagcttgcagggctagaattcaactgaagtggtttaggagtgggcagagtttatcaccagctggtcacagttgaaaagtggagatgaaagcagtttgaaattagccaggcttggtggtgcgtgcctgtaatcccagctactccgaaggctgaggtaggagaatcacttgaa

SEQ ID NO: 45229 - DNA, 1099 bp, Homo sapiens
aatgtgcacaatgcccaggatttggaaatatttggggtgaaaaatcattttttgaaaaaagaactggctgggcacggcagctcacacgtgtaatcctagcactttgggaggctgaggcaggtggatcacctgaggtcaggagttcgagaccagcctggccaacatggcaaaaccccatctctactaaaaatataaaaattaggctgggtgcagtggctcacacctgtaatcccagcactttgggaggcccactttgtgggcggatcacaaggtcaggagatcaagaccatcctggctaatatggtgaaaccccatctctactaaaaataaaaacaattagccaggcgtggtggcaggcgcctgtagtcccagctactcgggaggctggggcaggagaatggcatgaacctgggaggcggagcttgcagtgagctgagatcgcgccactgcaatccagcctgggtgacagagcgagactccatcttaaaaaaataaaaaaaaaaagaataaaataaaataaaaataaaaagtagccaggtgtggtggtgcacgcctgtaatccggaggctgaggaaggagaatcgcttgaacccaggaggtagaggttgcagtgagccaagattgcaccactgcagtctagcctgagcgacaggaaggagactccatctcaaaaattaaattaaattaaattaaattaaattaaattaaattaaattaaaaaataaaaagagaaccagtagaaaaatggtgagaatcataaaaatatgtttctctctatatggaagaacacaccagaatccatcgactagtctgttccctgattggcttgtccctggaaggactggggatgtgagatatcttcaggagatcgggatcagtaaattttttagtcacgagagttgtatgttacgagagcctctagcattagggttataaacataatcaagcaatcctatttacttcacatgagaagacttgattcatagcacagaaatcggtaaacattgccaaaatatgccattttccacacggttataaaactgcatatgggagagaatccacgatgaatggaattatctgaaagtactttctttacgca

SEQ ID NO: 45230 - DNA, 1023 bp, Homo sapiens
gtgacattttatttatgtatgtatgtatttatttatttatttgagatggagtctccctctgtcgcccaggctagaatgcagtggcgtgatcttggctcactgcaacttccacctcctgggttcaagcgattctcctgcctcagcctcccaaatagctgggattacaggcacccgccaccacacccagctaatttttgtatttttagtagagacgaggtttcaccacgttggccaggctggtctcgaactcttgaccttgtgatccacctgcctcggcctcccaaagtgctgggattacaggtgtgagccactgagcccggccttatttttatttttctagagataggatctcactgtgtctggagtggactgaagtgcactggtgcaatcgtagctcactacagcctcaaactcctgggctcaagtgaccctcctgcctcggcctcctaaggcagggacttcagatgtgagctgggacttctgcgggagccatcatgacattgattctagtattcaaataagaactctgaagaaactcaactagggaattagattttggggttggcagctattatgagttgaattttgttccccaaaaatgacgttctgaagtcctaactgccagtaccttatgtgaccttacctgcaaatagggttaatatagatgtaactggttaagatgaggtcacactggagtaggctggcccctaatccagtatgactggtgtccttatgaaaagaaccatgggaagagtcagacgcacatagaaggaagactatgtgaagagcctgggagaagacggccatcgccaagccaagaagagaggctggaacagaccttccctcaagccctcagagaaaccaaccctgccgacaccttgatctcaggctccctgtccccagaactgtgagaggaggaatttctgctgtgcgggccacccactttttggcccccagggcccggggcaagggctccatgaggagtggctgctcgacactgcgtttacatgtgggttttattat

SEQ ID NO: 45231 - DNA, 1056 bp, Homo sapiens
tccttatgcccactgccttttagaatcgtttgttttattcatggtagttttatgaagacatactattattgaatgaaatttaatgtgtacttgaaaacattgcttttgtcccttctcttcatctggtcttgggtcaagaacattgttttaatggctgccgacaatgaactgtctgtctgagtctaaaaccaagctcaggtttctaagccacatgaccttgattgttaaatgtagttatatttgaataaaaaatgaatcatttccaaaattcttttgatttgtattgactgctataaaaatgatggattaaaataggaccagaaaagaatgaatgcctacctgtgtaagaagtatttttgtatttttaagcacacttgttaaagggcttggaattttaatgtcactcctttgaaggtacataccaatatcaacattcatcttgtaactagttgtcctgatgccactcttgttgagtctttattttcagtacctttgccttattgctgagcacttcaggtaaagacttggacacctgccttcccaccaggccctcgtgcccgctgggcctctgggttgaggttgatgtagttcaagaactgcagttggctgccgggcgcggtggcttacgcctgtaatcccagcactttgggaggccgaggcaggcggatcacgaggtcagaagatcaagaccatcctggctaacatggtgaaaccctgtctctactaaaaatacaaaaaaaaattagctgggcgtggtggtgggtgcctgtagtccaagctacttgggaggctgaggcaggagaatggcgtgaacctgggaggcggagcttgcagtgagccatgatggcgccactgtactccagcctggacgacagagcgagactccatcatagaaagaaaaaaaaagaactgcagttggcttaccagtggcactctgtagggagctatagttctggagattgcggaagaaactttttttttgagatgagtgtcgctctgttgcctaggctggagtgcagcggtattatcttggcttactggaacctctgcctgcca

SEQ ID NO: 45232 - DNA, 1050 bp, Homo sapiens
tactgtagtgtcttcaaaaaatgtaatgcacatctcccttatttctttgcatttggtttgactatgtgaatacacatttccccttttatgggagatgtttgaaccaatgaatatgaatactatttttctgggcttagatatgttttggggggcttgaataaagcacctcatctgtgctacttgtgaattactttctagagcagcatgagttcacacctagataacatgtgttctcagaggcactgcatatactcatacaagtgaataatgtgcaatcctaggggtgccacttacatagactaccgtggtcatgatgacccctgagattgttcagtgtgcagcctgtgcaactgtctgtgcagcccttcaaaagctgcctgacagccttatttagataactttcaggaacatacagaaaacaaatatatctctggtaatagttcatgctttataggcttacctcagtgcatcgaagctacctttcagttaaaaatgtatgaatgaaaaaataaaaatatgttatgtaggaaatgtctgtatattaaaatatccatataaaagcagcagctaccaggtaaataaagaagctgttagggtggcagctgaacaatcaaactaagtacctgcactcatttctaatttagatggaccttagtagccagactatggatgttacacttaacaaaatcatcagctttgtaactttgcaaattagacactgacacaatagaatcagaaaataaaaaccaaatggaaatatttcagctgtcatttagcttgaaacaagcaaaactcactcacacatcagacttcagggcatcatggatgctctttaatgaagagcattgtggttaaaaatcaggcaacacttggaaatttttatgagacaggggcagaatactttatggatgaagtgaaacagagccctcaaactgtttttatcaattaaggatattcaatattacatgagttatgtagcatttatactacttagttttaggaaataatgagttaactggctaaaataaaaagctctctttttaaggagct

SEQ ID NO: 45233 - DNA, 1074 bp, Homo sapiens
tggttttgatataactttctatttgggggattttagaagttagtgcataaaatagtgctccctttgcatggatggatgaaattttgtggtgttcaaactgttgtattagagatgtgaatgcctaatcataacagattaaaaactgtcaactatctttcatatttaagcaagttacaatggatacaaatatttcttgaaaagctagtcttttttttttttaaatgtagttgcttacactccttaggtgcacagcaaatgccagaactgccctaattaggtcagatgtttctcattagcttgtaacagtcttggatgtatggatggatggatgcacagcagatggattgacggaggatagacactttaattgacccctcgccactgtcacactacacatatataactccctggctacactgaatcttaaagaccacacataccactaatattgtactgattgaaattgctcgtttcaattcctaacagactgtctgtgtctttcttaatagcctgtgaatatctgcagaacaagggctgaatcagatgcagaatatttgtatattttatttcagaatatttatattttagtaagttaatgctcactcttaagtaaagcaatgggaaaaacatcctctaatatttactttttcttgtaataatctactgatggcatatttttattagcattccttggaattattcagtaagcatttacaaaggatcctgtatacagtagataattagtattttgatgaataaaagatgaacacttttcctaatatacctcatagaaatgtaaataaattatattgttgatattcctgtcattgatgtgacattaataaaatatcatggaagggctggtttcaattttaccattgctgagaaaaatggcaaatgcatggtggtctttaaaatagtcattgtcattaaggatttgtatattctgcttgttcccagatgtcatggtcttgtgaggaggatagaatattcttcagcaacctcttatacttttctttttttttttaacatgttcacatctgtgagtttaggtgatagtgctgtgagatactt

SEQ ID NO: 45234 - DNA, 1920 bp, Homo sapiens
atgaataaataagccttgccctcccaactcttctgtacagggagctgcgagcacatgggctagggttgaaatcctagaggagattgtagatggctttgcagcatcagcgctattctatggactgattcacttcctgaagaggaatgaagtgatttacccacccaggaagcctttgtgaaaataaaaattttcatcaacaacacagaatggaaagctattgtcagttcttaactgcctatagtagagtgacgtcttaatgggcatgtagagacaaaccatctaggggaaaataactgcatctcctctagaaggcaaagcagccccactgacagcagaagaaggaggaactcagtctaaactgtgaagaaccagttcagattctccctcccatgttggcttcttatcctttaatcaccatttattcatcatttacattctatgtcctcagagttccttatgactgtgagcacatagtcatgtacattctttagtctatgaggacattaaaggcacttgtgaaaatctgatttaagttacagtaaaatttttctgtctctctctaatagactataagcaagttgggggtaagaattatgttttaactctgaatctgtagaatcgagcacagaatatagcaaactacagaggataaagaaatgtttgtggggctgggcacagtggctcatacctgtaatcccagtgctttgggaggctgaggtgggaggatcatttgagcccaggaagtcgagatcagcgtgggcaacacatctcctcattggtagatgtgagacccccatctccatttttgtttttttttgttttttttttttttaaatgagcatggttgcacacacctgtggtcccagctacttgggagcctgaggcgaaaggatcacttgagcctaggagtttgtggcttcagtgagctatgatcatgccactgtgctccagcctgagtgacacagagcaagaccctgattcttaaaaaaaaaaaaaaaaattaaggagatgtttgtggaatttaatagactgaagttttttgtacatatgaaggaaagtcactgtacgttgctcatctatctttttgctcactgcctctcacaagctctgacagcaacatcttcagatataagacacaacagcacagggcttagcagggctggaagcgctatttcactgaaagaggggagacacagtctattgctggagaaagaaaggcaaaaatgaagtcagaaacaaaagaggagaagaaacagaagaaactgggttatttatgtttagttgtagttgaacattatggtgcagaatggtaagaacttgggtgaaactttaaactagtcaaagtaaggaataatcaaggcgtaattagctttattcaaaggctgcttgaatttggtctcctcaactgcgtttaaaatagggttttgtttctagaattcagattacatagtttatttattcattttttaaattttgctcaaattgattgttccctgtggactcacagattcaatattcagagattcaattatttgtgattgtctccacgttcactacttgtgttaattccgctatttcggggaagtggcacctttaaaagcccacactccagggccaatgaagaatacagaatgcaggccactcccaccatccacgcctcccctgggcttcgtgttctgtatgttaattctctcatcatttgctgttccattaaaaattacgtatccagtgtctagtttgcctgggggtgaaatggggattaagaacctttcccaccttgagacactgacattcttgtaaagggataaacactctatatttgaaaaatcatcctaagaagaacagtaactagtagtgctggagttggaagtgaagaaaatgtgaggagatccaagaaaatgatgaattttaggcagaact

SEQ ID NO: 45235 - DNA, 1034 bp, Homo sapiens
aagtaaattggtcttacaaaactaatttgtaactttcaaaaatgttatctgttgggtgaatccaagaggcttccccagaagtaaaactctctaggacctcaactcaatacctgatacctggttcccacttgactggcttataagaggggcccagtaaatgttgctaaaatgtaattaaaagaaaaaaatttattttgatagtagttttaagtaacacacagactatcaaaatgtatttattttacacctgttgtagtatgctaggattataaatattctacaattaattttaaaggacaatcacaattttagtttctccattgaactttattttgcttcattcatatatatattcagtgagtcttccctcttacccaagtctctccataaatgtcttcattattttactgacttgatgaattcccagttccaaatgacgcttcaagtcatatatctagtttaaaactcctgcagtaaaataacatttctagacagaattctgaattcaacgaaatgtgtttctttctctataatacattgtctgtgttatcttcattcttggaagagatttgagtagaaggattgtatatgcttctttttatgggatgctatgaatatgaatacttatttaacaaaccaaattatatttctctcattccccaaactttagaaagttctatgatttcagttgatggcacacactagaatttgtgtagaagttacaaggaaatggagccgcacttgagagttgcaccttcatcttgggttcagcagtgtccttagagtgaaaagagggtggaggagttctaactgcattccaagaccaagtgatattctgtccaaaaactatcaaggacagacttctctgcttttaatactagctttttgatcagagggctcatggggtgcaacatgtacaccaacttgctgccttgtaaacttgatcctttgtaaatctgtgacatttttccttgttacaagagttttatattctcatgtatataaatactgcctttgacaggataagagactag

SEQ ID NO: 45236 - DNA, 1001 bp, Homo sapiens
ggagatattttaactctttattcagcaccttatcttttgcttctctgcatacccatatttcatgctttgatttttctgcaactctagtctttaaagatttacctgtcaacttaagaaacacattgattggataagatgtttcctggcagtgtaatatggaatcatgtggttgaaagggacactatagttccacctgttcttctccaagaattgcaacaaagcattttcaacctcatctgcagccaattttaaggaaatctaataaagaggtttgcagagcacctgagagcagctaagatcccaagacaaagtagaaaattacctattgaaactacaaataaaaatgaaatttaaatatatcgttttatatatgggccatttgcttgctcaatctctttgtacctgggagtggagggaaaggctgggagtaaaatgggactggattaaaatatagtgattgtagatttttatgacatatgaaataaattgtaaatattaaaaagttgacctgtagtaacatgcttgcagccatctatgttattaagacagtacttaacgagttttgaaacaagtactcctggcaatattactactattcttaacctatatgtgatagacattttcaaaaagtcatcatatctgattgccttctatgctgttctttaaatgtttgaaatcgtgtttttatatatgaatacaaccaatcagaatacaggtacattgcttcaagtactatttcaaaaagtttctccaatgacatgactcagcgatttcttaaaggatagaaaaacactttgttaatggagaaaaccagaagtccaccttctcttggaaataaatgttgaattttaactgagtaactttgcatcagccacatcgtattactgacatgtattaggtggtagatttctgtagtagcagttctttaaaggaaaaaaaaaaaaaaaggatttcttttccattgccttcttttttttttttttaacaaaatgagatattcc

SEQ ID NO: 45237 - DNA, 1149 bp, Homo sapiens
gtacttttagtgaaatatttttgcaacattaaagttttttgttgttgttgttgtccttttcattttaaaagaaggcccaccgggattctccatcagcaaacagccaacccactgcattatacatagcaagttttagtgacagttctagtctcttgggcatgagaaatacagtcttgtttgctcgtttaagtcaacaagctgtgggatttattgtgtgttttgtagtatgcatgcagaatgttttgatttttaaaagtctaaaataattgaaactgtcttgtgtcattcaaccctgtaataagtacctatagtttaaaacctcaaaattggttggttttgaaagatgtttgtataatgcataataataagcgcctctggattatttttaatgcatcagatcctgtgctatggtctgtgtaagagaaaggaaccctgattacagttttggagagtgttcctggtgcccccagcatgcccatggtggataccacatcattatgctgtgctctgaggggcctcattctgacagcatgcttggttacataccgtaatgaaaagccttgtttggggaacatttgtgcttttaaatattggtttcatcatgtccagggaatgaagctgatttaaacatagctcacagtaaatctgagagtggaaagtttgattttacccactagtctttctaattttttactaatgtaacgtcccaatccattgtgtagcagagaagctagttgaatttgttcttccaggggaagagggcccttcttatacatgagtttatatgaagtttttcatgtaatgtattttatccttcatgttcatcagctttacagagaaaaacttaaagagttcttactccaaaacattttgtctgagcctggggtgaagattactataaggaatgattgagcaacaagatgccagtgatggtcaaggaaaaagtcaaaaatgttgattttgaagatcctttactaattcacaaattctggttgtttttattttcatctatgaacaagggcaatttcaagaataggaagaaggaggaacatagagcctcagccagcattgacgtgggtgacaccttcagaacggttgtaggagcacaaagagtcagcctggtgtcacttgctggcaggccttcacttc

SEQ ID NO: 45238 - DNA, 1054 bp, Homo sapiens
cagggcttactttttggtcttcaagaaaaggcacagtagctgtttttattagcggcacagaaaaatgattttgtttcctatgatactgatcctgcacaagtttttttctttttttcttttggttactggctaggggtatatggaaattctggggaggaaggcttgttgatgttcctgtggcttatacacctgcccaaagctgtgctccactgacacaactgaagaaggacagacaggaaaacgaggccaggaatcctggacaggccaaagtgcctgggatacccacgggggatccaaagggccaccaggcatccccagtgacatcggaaacacgaaaggctgtagggtggccagagccatcagcctcccaaaattgtccacccttagactaaacaacatcctgctgccttcccatcattaacctgcccttttatgcaactgattttttatgggagaaaacagtttattgcgggttattcagtttacttattcagaagctgtagagtggctcagcgacagggacaaatgaaaattcggaacatcatactctccatgtttactgtgatgattcttctcttccatcactgtctataaacaacactgtgaggacagaattctctgaaaagctaagatatgggacaccacaaaggcctgaagcttccatccaaaagaagtaatctgagttggacctagtggggattaagcatgctattgatttagtattcattttttatatttggactgtttaaaattacttatccaagaaatcctccaaggcgcatgattatattatcatactcatttgttggggagggtgggggattgtagttattagtgtaatttgccccagaccagaaagtactactaaatgctatgattagaaaaaggagaaggaaatctgtatttatatggaaaagaatttacttaggatgttattctgcattttaaattgtacagaagagaaaggaaagaaaccgattaagatgcttaaaatttaaatttcttctttggagaatcaatgactaaaatgtctcagaaggtatgtattaggatc

SEQ ID NO: 45239 - DNA, 1034 bp, Homo sapiens
agtagcttaaactacagacatttatttcccacagttctggaggctgggaagtccaagaccaagatgccaacagatttcgtgtctagtgaagccccacttctgggctcacagatggacatcttttcactgcgtcctgaagtcgtggaagggaagaactcttttctcttcagccccttacaagggcaccattcccattcatgggggggggctctgccctcatgatttaatcacctcccaaagatcttgccttttttttttcattttaccagtttaaaatgaaaattctacatatgattactttatgtctgcatcttttcaattgtttcttccttgtgtttgccctttctcttgcctgcttgatgagatttggctttctgtccaaggatctttctttggtctctgttcactttcagcctagaagtaacagctggagtgaatgcccatgtggacagttgtgccattagccttttcccactgcacctgctcagtgtagatgacacatttcttcctgtaaaccttgactgttttgccagtttgctgacatttatagtgtcctcacacagcctgaacttcatcatcctttcagatgagcatggatcaaacactgtacttctgtgtcagctctttggaaagagaggaagacgtaatcttcctgcgaatgtggaaaggtgccttgaaatgccattttgtggttcttgcttcagtcaaaagtcacaaagggattaaacttcgttttggccactaccagttcagtgatagccacaaaagggaagacattcttcctcttaatactatcacattgaggattaggtttcaacatacaaatttggggggcacattcagaccacagcgatagagaaataaatctccgactggaaatgattcattaataaagaagtgtttgctgggcacagatttttaatgtcacttcataggttttcatttctgtaattgctttagattcatgtcttagctgaaacttcataaagcaaggaaagaagataaatggcaaagcagagtataagtgacttctt

SEQ ID NO: 45240 - DNA, 1055 bp, Homo sapiens
tgctctaactccagtgctttctttcctacttaaaatttaaagactaattaggcattaactatccttttctttttcattaccagaagcactctttaaagaggaagtaacaaaacagcagcccaaatgtggccaacagtgtttttaatattgaatttttaaatcgggagagtttgtgcagagctctggatttgctgttgcgtcaacaatgagccacattccccatggcagcccgtagcggggggctcctttccgaaggccacacactctcccattatctgcctggcctcagaggctttgaggcacaaattgcccggattacaggaactttggctttagcatttttttcaaataaactgtgtatgaggttcattctctatatctaaccacctccaggattgcaaatgttcttgaggtctccccaaggttatagttcagctgagggtcctgttcacctgactgcacctgttcacctgactgcacctgtgaggagctggcagatgggaagttagaaaggttcaggccactttggttttaaaaacttggaattctctgagattgctatttctgtgcctaaaaagctcagacttttgctcattcagagacaagtaactttggcctgtttcctctgtgctggaggcatttgggttctaatgggatgctggctagcacagaaatgggcttcccccctttcctgttgctactcaaaggcaacaaacagcatcacctgggatctggtgagaaatgcgtaatctgggtctcacccgaaatctaccaaatcagactgtgctttaaggagatccttgaggggtctgcaggcccattaaagtttgagaagcaccactagagtgagtagtgggagataacattgctcttccttgtccttgggtcctttgtcccccagctggctctatgtgccacctgttctccctgcacaaaccaggactcccccacagatgatgtgctcccccaccccgacccctgccaccatcacccccaggccagattgcttttgagttcacatttgagttcatatctgctctgattcagcgaaccat

SEQ ID NO: 45241 - DNA, 1071 bp, Homo sapiens
ctgtggggagagaccagataggcttagtggggtggcttcccatcagttatgtcctgtcccttcataggctccccacacatgtgtgctgtggttctccctctttaccttctccatctcacctctcttccctgagttgctgtgatgaaccaagcatctctaggcccaagggatacagcaatgagcccccacagaatagatgctcacagccataaggagcccggcttcttgacagagagtagatccaatagctaaataggtcagacttataaaatgttagatgatggcatgcacttagggaaagaaaaataaaacagggaggagagagagcgagtggcctgctcaaggaatcatttgagaaagactaaaggaagtgagggaggtgctctgcagataccttggagaagcaatctgggctagagacagatcaaataaactgcagggaggccagcaggactggtaagggatgggctggtcaggtaggacctgttggctatttagcaataagtgtcaatggggggaaaaaaaagaatgtgctataatcaaatttagaggaaacttcaggttaaatggatgtaagcatgttctgcgggattttcatcggagcctttaatctccgagaaacaattttagtgaaaagtgtttcctaggtatttgagtcaggaggcacttttgcaggaactcaagaactcaattctctgaagatcccagaagtaagctgaggggctagggaggggatagcagcagaggcagactctggggcccaccctcttcactgactgtgtcccaaatacatcctacctgagcttacaacacaaaaatatccaggaaagagaaaagtcaaataagctgctgtgtcagatgacagaaacgttatacacatattatgctttcctgagatacattatttgtttagctaatccaactattaattactaccaattgctaccattcagtagtcttatttttgtttaattagtaacatttatgtaacaaaagtaaataatatggaatcgtatatgacttcaaataagcacatagttttcatatcttaaggtgattaacatgtctatc

SEQ ID NO: 45242 - DNA, 1041 bp, Homo sapiens
aggtttgatgcattctcagaagtcccctgaaccacaggcaagagactcccttggacttggtgcaacccaagactcccacacactttcatccacagcagcttctgttgtgctcctactggaagcacaggctgtggaaaaagagcaagagacaaatggtctgagagaaaaccatcaacaaaataaatggtggttccccctgggctgtgggtatctgggaggttctcatggaggataagcagatcatgccggcttatcagcatgcttcccttggcaagagtttttactcagacatatgatgaggttaaatccacaaaatccacacagagctcttcaaaggaaggactgtgaacaggtgctggtctacaaattgactgttaccagttcataaagagataagtatggagataatgagtaaacatttagaaacttttatggctatttgacatgactacaacattcaagcacaggattagtggatttgtcttgctgaacatggtagagatgaaaaatactggtctgcaacagcttggaaatgaaaacaatgacaaacaaaacagcaaactgatccttcaaccacagctagttgcaatagcagtactgtaagacagcatgaggtagaattggattttgatggtttattctcagcatgctttgagtgccagccattttcctgcagctggggaaggagggctgagtatcattcctaaggagttcacagttcacctgggaagacagacaggccaaccaattcatgtaacccagtcagatagaggctaggatagagcttactctaggtgctccccacaacatccaaagcaaggctgctcttccttgtccatttgggatgcctggtgataatgatgatagcatccatttatcaagcatttacatcatatcagactctgaattaaccaatttacatgcactatctgtttaatccctcataagatctctctggctaagtaccttattgtcactttcaatttatatgtgtataaattagggctccgagaggataaaagaacttgtccaagatcatag

SEQ ID NO: 45243 - DNA, 1025 bp, Homo sapiens
gtcttattgccttgagaagtggtttgtagttctccttgaagaggtccttcacattcctcgtaagttggattcctgggtattttattctctttgaagcagttgtgaatgggaattcactcgtgatttggctctctgtttatctgttactggtgtataagaatgcttgtgatttttgcacattgattttgtatcctgagactttgctgaagttgcttatcagcttaaggagattttgggctgagacgatggggttttctaaatatagaccaagcaaaaaagagagaagactcaaattataaaaattgtaaatgaaagatggaatatcactaccgaccttacagaaaccaaaaggatagcctaagggaatactataaacaattgtatgccaacgaattagataccctacataaaaacagaaatacctagaaagatacaaactaaacatttggtagagttcaccagtgaagctatctagtctttggctttttttgtaggaagttttaaatgatcagttcaatctctacttgttataagtctatttatattttttatgatttaaataaacttctgtaaagaggaattaacatcaattcttcacaaactcttcctaaaaatagaaaaggaggaaactttttccatcttatttatcctgatagcaaaaggagacaaatacagcaccagaaaagaaaactgcaggccaatatccctaatgaacataaacacaaaaatcctcaaaaaacagcaaaaagaaaaaaaaaacctaacaaactgaacaactttgtataaaaataataatacaacatgaccaattgagatttacccaggaagataagtaaagttgagtcacttaatcagtataacacatcatattgtcagaataaagaacgatacccacacaatcaacccaatagataagaaaaacacatttaacaaaatccaacatccttcatgagaaaaatattcagctagaattgcagggaacttcttcaacttgataaggggcatcagtgaaaaacgcacagcta

SEQ ID NO: 45244 - DNA, 1087 bp, Homo sapiens
atctgtgtctgcccaggaagctgtttttataataactagagcctcgggtaatttggctctgatgattagccagattgagaaacattgctctggaagactgcttaggatatattaaattgtgtttctagacctcatgtatgagccatctggaatgcttactatctgggtccaatggacactttattttttcattttttagttttttttttttttagagatggaatcttgctcaggctggtcttgaactcctgggctgaagcagtcctcctgtctcagcctctgaaagtgctaggattacaggcatgagccatacggttcctggcctgataattttattttttacatttttcattcattttatgaatagtttgcagaagtgaaattaaagacataatgaaacacaactttactagaaattttaataactgcttcaacaaattatcactccaaattttcctggttttgaagatatcagtagttgaaataggcaacatcttcgaattcaactaattgcttatcaactgtcatataattttttaaaaaaatcaatgattctgccgtcctaaatttttattatcccaagatgtttttaatacagcggttcccgacatttttggcaccagggactggtttcatggaagacagtttttccacggacgggataggtggatggcttcaggatgaaactatatcacgaggagcgtttaacctagatcccttgcatgcacaattcacaatagggttcctgctcctgtgagaatctaatgctgccactgatctgacaggagctggagctcaggtggtaatgctggctcacctgccactcacctgctgtgggtggcctggttcccaatgggccaccgactggtactggtccatggcccgggggttgggaactcctgttttaatagcttagattaaaagaagcaaataaacattatttcaccttaaacagtcacatgtcatttttaagggaggccagttgtagttggtggtttgagaaggggtgaggttaataactcagaaaatgatgagtattgccattctaggtgatattatttggaaaactttgccagtgtttcctact

SEQ ID NO: 45245 - DNA, 1055 bp, Homo sapiens
tttgtattgatggtagtactgtaacattccactgctggtaagccatgggccttttttgcttatttttctaaaattgattcttctttttctgctgccaagttttctgctttgggggattttatttaatccctaaggtgtagccagactgaatttgtatggaattctccatcacattagcttttggcattgtggtctgtatagcagattctcatgagtaatcctccacactttttatagttcctacaccatatcaaaagcttattatctgttaattcttcaacagatacatgagattactgttttacagatggagaaactgagttgtgtcatttggggcaaattatcttagtagatggttgatctggtttggctctgtgtcccactcgaatctcatctcaaattttaatttctgtagtccccacgtgttgagggagggatcccatggaaggtgattggatcatggggtcagtttcccccatgctgatctggtgatagtgagtgctcatgagatctgatggttttataagtgtttgacagttcctcattcatactctgtttttctcctgccgccacgtaatatgtgcctgcttccccttctgccatgattataagttttctgaggcctccccagccatgcagaactgtgagtcaattaagcctctttataaattacccagtctcgggtagtatctttatagcagtgtgaaaacgaacgaatacagtggtagaacaaagatctaggggtgtctgactccacgggccattctcttgattacagggtggtctggctccattcccctttgctctttctttccccatatcttctgagtttttacttttcatagccataatgtagctttaggtttctcccagttctcactttaaaatattctcattttcaggtatagctgagagtcactgtgtttttagccaaatctaagggagaaaatgaatattgatagcagcatgctgtagccagctccttaaaggaaggatggtgcctggtacagagttagagttagtgcttcagtaaataatgaatgtgtgctaggtag

SEQ ID NO: 45246 - DNA, 1046 bp, Homo sapiens
tgtcatgggcttttgggtttagacgggcacatgtcttggcacaggaaacaatgtggtagattttccaagcatgtataggtcacctattccttgcaggccagtagagagattactgaagagaagatacctgccactaacttactagtgcacatgaacaattaatttaaattctgaaattttctgtttctaaaacaggtatagtacctgcctagtgcaccctatagggttattcaccaagactcagggttttgttttgtttttttcccctagctttacagctgtctttaaaatttaagtgtcagtcatgtgtttccttcatttatttacagttgatatatcagtgtcagtggtgtattcatgcttgctctgctgccccagcattattaaaattgatggatgacccttttgcatttgtccttctttagaaatagctactatgtagtcctcgctggttattttagcttagacaccactcttgaaaattttccgagagcctggtatttgtaattagcatatctcgattaatgtggtgtctgtactgtttacttgtgacctcagtaaagttcatacctcttcagttttagttttctcatctggaaaaaccaatagcaatgcctggattatctatacctcacaggatttttgtgagcttaaagtaaataatatgtgaaggtaaggtgccttgtaagctgcaaagtgctttattaatagtaataccttagagataatgtttcctatctgttgagcatcctaaaatttagtggggttggtcttgcctatagaaaaaagctgttcactgtgctgatcatgtgttaaccacaaaatggctctccttgattctattgtcctccatgactcaataaaagaaagttcttttccatctcagatgtcttcatagtccacttgagattgagaagaatatcaaggaggtactgtttttcactagtcttcagggaagagaagggaaggccagtagtcatcttctaccttgatttttttttttttttttttttaacacggattttcgctcttgttgcccaggctat

SEQ ID NO: 45247 - DNA, 1049 bp, Homo sapiens
agcacagccggctatttttgtattttttgtagagacaaggtttcactttgttgcctaggctggtctcaaattcccgggctcaagcaatctgtccatcttggcctccccaagtgctgggattacatacatgagccactgcactcagccagctacatgaattttcaaccggtttaagaactgtatccataaaggactgccatgtaggcaagcgggaaggagcatgctgctatgtgcagtcctggatttttgacttctgatattagcaacaacttggacacagtccaatttggttgaaagagctaatatgtaatttggattttaactgacagaatccaaaatgaccttggtaggcagaatgattggccaaattttagcaaaattgtattacataaaaatgaagttaaaacccagtatttgcttgtaaaataaccgtacaaatactaaatggaggtcagctggttcaatatccacacatgtctaaaaacttagttttacattacttgattcatatgagtcagataagtaataaagcgaacaaaagaataaatgtgatgctagattagtgaaagtatagtgtatggataaggcaggttctaccctgtcagacctcaactgcaattcagttctgaaactcttgttttaaaggaatatctacaaacaggagcccgtgctcaggagaccagtaatgctgatatgaaggctataacattcatgacattttaggaatggttgagtatctgaaccattttaacctaaaaaagaagacttaaaggagaatataataatgactttcagatacttaggtgactgacatatgaaagagggactcataccaggaccgtgagtagaagacatacagttggactcttcataaaatggaaagagcttgttcactggtaagttaatttgtgctggagtaggaatttgattgacacatatgaaggcttggaagatggagtttatgcaaaggatagagatttgcagttgattttttttcttcctaaagaaatataagatactattgtgggccaggcatggtggcttacatc

SEQ ID NO: 45248 - DNA, 1033 bp, Homo sapiens
acaatgtcctaaatattcttctgtaactataaatttgcattctatttggtatgtggtcatgtatatcattttctttttttaaattttattttagatatgggggtacatgtgcatgtttgttacatgagtatattgtgtactggtggacattgggcttctagcatacccgttaacccaaatagtgaacgtggttctcaataggtaacttttcatcccttacccccttcccaaactccacttttttggagttcccagtatctgttatttccatctttatgtctgtctgtacccattgtttagctcctactttataagcaagaacacgcagtatttgattttttgagttagttcactgaggataatggccttcagctccatccctgctgctgcaaaagacacgatttcattcttttttatggctgctatgtctttctttaatccctatatagcttgtggcctcacaccattaattaaataagccattcattcttgtcctaatacctttgtaatatgttagacccctgtatgtaagcaagcaagcctgtttgagggtgccaaaatatgttttgttcatctttctttttttctttttttttttttttgagacagagtctcattcagttgccaggctggagtgcagtggtgcagtctcttctcactgcaacctccacctcttgggttcaagtaattcttgcgcctcagcctcccgagtagctggaattagaggcacgtaccaccagacccaactaatttttgtaattttagtagagacagggttttaccatgttgaccaggatggtctcgatctcctgaccttgtgatccacctgccttggcctctcacatctttttttctatttcatgaggcaatatcatactgtggtagttattgcaactttgtagtgtacttcataccaattggtgttctttctttcctaagttttcttgatcatccttgtgcatttgttcttccagatggaactttgccaagttgcaagatttttagtgaggcttttaaatttgaaaatagtttt

SEQ ID NO: 45249 - DNA, 1026 bp, Homo sapiens
agatatactactttcagagttgtcttcacaactgtttgcccttctaaaattatctcctatttttctactcctattttgatgattgaatgagtgctttccaaagatgataaatacaagttaaaagccaaagtagtaaacttgtaagtgtgaagtctgtgttccctttgtcctgtaatcctatttcttataatttgcctaaaattatagtaagttgaaaaatgtatgcagaaagttcatttcagcattcactatttagtgaaaataggagaacaacctaaatctgtagcaataaagtaccaaattagcaaattatctgtacacaaaagaatattatgcagacatcaaaaataatgccatagttttatgtttattgatttgccaggatgtttgtgatacagaataatgtctgtgatgtattattaaataaaaagcaaattgcagagcagcatttatatgttcccatttgtgcaggattgtatacttatttctgcatgtgtattcatggagcactgtctgggaagtatgttaaaacattgattatagctagtggcagatttggagatttctttccttgctaattattcatgcttggaaccaatactatgatattgaaatatatctatcccttttagtgttttttataccatattaatgtaatttttaagaaattttaatatttaacatttgtgtttaataattatggctcttggatctctttttttaatttttatgttactgagcctgcaaaacatgaagaccacagttggtttctaatattgactctgccacatttcagtatcttagtattttaattatgtccttagcttatgtcttattagcacctcttccttagcttatgtattttctaagtataggaactgcatttgttaaagttgatctgtatattacctagcatagcatgtcttggaagtaaacattctgtttttaatccttgaaagtgagatatattcccactaattttgtaacaaatcatttcctactctatttaggtgtagagttcggtgc

SEQ ID NO: 45250 - DNA, 1033 bp, Homo sapiens
tatgatggaaatagttattctgtcattcaaggtatgaaataataagaggagaatacttggaaaataaagagaatttttatccttttattttaccaattttttccttgtggctgaaacatgatgagtgacagcttactggtggcttaaatttggtcaccgaccactaggagctgatagttcaaatgtgagaagaaataaacaaagcatagtatgtaaacgagatgtttctgatgatcgtaggtgggtgacctttaaaatcaggagtataacgaacaagaaagaacagagagaaataaatgagatgattatttttagatgaattgaactgtggatagacatcaaaacagggaataagcaatttttgaattagacgcattaagcagtagggagccagtgaagggcagtgacctagtcagagcaacagatgacacaaatttttcttactatggcattttattaataaattggttatataagaaataggaagcagagatttaaaaaatgaaagttttttaatagtgtaagggttgtaatgcaaaccctaaacaaaaaggggccataaattaaaagaaagatacttaagtaacctaagcaacttaagtgggattcagagggagtgaactaagacaacaatatgatgtaatgcctggaaaactgaggtatttttaaaactttgcactaagtatatcgtcaagtactatggcttttgagttttttgatttgacctatagtaagaaatgtattttacatcatgacctagtaaataaattgtgtatacacctacacatataacaaaatattcgtaaattatacctttatacgtaagttccatgaaacagtagatggaacttatgtatataggtgatagactctgatattttatattgtttcttttttttttcccttcccaagatggagtctcactctgtcgcccaggctggagtgcagtggcgcgatctctgctcactgcaacctccgcctcccaggttcaagcaattctcccgcctcagtctcctgagtagctgggattaca

SEQ ID NO: 45251 - DNA, 1090 bp, Homo sapiens
actgtcaatatattaccacatcaccacttctgcttaaagtattctattattgctgtgtaacattttacaaagcatgagaattctgtttcatctattgatgaaatttgtattatttcagttatttccattgatgaacctgaactattggaacttttctgaacacagtgtattcttttatgctctatgtgtttgtgtttggaggtagtatgtatatacatattataaatagatgattacgtagttgatcctttctaaggtaaatgtattactatactgttattttataaaaagaggtaatgaagctaagaaaagtagtagtttatccaaagtaatacttagttcccgatttctagataagaacagcttataagagcaactacagaaagtagttctaaaaaacaaatgagttaagaatcactgccgtaaggataacagaggtcagggtcctgggcaacagctagcatgtgccttcaatgtagtaagcagtcagtaaatatttattaagaatgatacttggagctcttctgattaacccttgaacctaaaaattgactacagtaattctacagcattggtattttcaccgaagaattctttcttaggtaaaatattatacagtcatgtgttgcttgacaaaggagatacattctgagaaatatgtcaccaggtgatttcatcgtcacgtgaccatcatagagtgtacttacataagcctagatggcatagcctactactgcacctactacacacttcccttagtagaccttggtgccagaggaatgacacagtgatgatttcccttggttttctttttgccacatacccgagactgggtgctagagaaacaggcaacctagaaaggtcaacaggcacagaaaaagaaagtcttctagccagagaaccaggaaataggcaggtcagaacagtgttcgcaagccagaacactcttagaaagtaaccattctactgtagccaaacatcacagaaaaaattgtggctctgcttccacaatccccaggcagtaatgaagtagcaccctaccaccaccatttcccttgttggagtggagtgagaggaagccaactaaaca

SEQ ID NO: 45252 - DNA, 1069 bp, Homo sapiens
tcaaaaaagaaagaaaaacacccaatgagctgtcactacatacctgtcagaatgtcagaaaggctaagatgaaaaatactgagaacaccaaatgctgaagagaatgtggagaaaccagatcactcttacgttgcatgtgggaatgtaaaataacacagccactctggaaaaatggcagtttctttaaacactaaacatgcagctaccatacatcctagctgttgcacccctggacatttatcccagataaatgaagagttaggttgactcaaaaacctatacacagatgttcatagtagttttattcagaatggccaaaaactggaaacaggctagagacattgggttgaaggacactttagtggctgcatggttacagtgtggtccatctataccatggaatactactcaacaataagaagggggaaactacagatactatacagcaatctggataaatctggagagaactatgcttagtgaatcaagccattctcaaaaggttgatcctgtattatcccatctgtgtaactttcttgaaatgataaaaatttttgtaacaatgtactaataatgtagttttgtatgaagtcactactggggggaaactacataaatgttacacgggattcttctgtattatttcttacacctgcatgtgaatctgtaattatcttaaaacaaaaagtttaatcaaaaaataactgtgtacatccaacttaaactgattgagtcctttaacaccatgatgacagttttaaaaatgagaattcatcaggaagaagcctcctaaccacaataaaatactaatgttagaatatggaatatggctatagaagcttgttggtattttatgaattcttgaagaatacagattttcaaattactagatttttgctctgtatgttgcgtttctgcacagggcaaacttttatacaaatagttccctccatatatgtttagcatatgcctagcaaataataattaatgttgagatttttattatgcatagactttattttctttctttttttttttgagatggagtgtcgctctcacccagttggga

SEQ ID NO: 45253 - DNA, 1048 bp, Homo sapiens
ctggctattagtaataagaatctcacagatttattttatccagtgtattcattttctattgctgctgttataaattataagtgtgacttaaaacaacacaaatgtattctattacagtcctagaggtcagaattctcactaaaatcaaggtggtggcagggctgtattactttctggagattctagggtataatccattttcttgcctttcccagcttttgaaggtggtccacactctgtggcttgcagcttcttcctccatctttaaactatagaatggccacttgagttctttttacatcacatgaagtcactctgaccagtctcttcaccctccctccttccccacccagataatctaggataatctcatctcagtgttggctgataagcaagcataattctttctacaaccttatttatttatccagctaacagtcttactagagtttctacaactttacttctcccttgccaagtaaaatatttacaatttcctgaacacggacatctttgggagccattaatgcatgtttaaagctcacaatgaagctgggtgtggtggctcatgcatgtaatcccagcactttgagaggcggaggtgggaggattgcttgagcctaggagtttgagaacagcctgggcaacacagggagaccccatctctgcaaacaaaaaattagcccgtgtggtggtgtgcacttgtggtcccagctactcaggaggctgagatgggaggattgcttgagcctgggaggttgaggctgcagtgagccgtgatcacagcattgcactccagccttggtgacagaacaagacaccatctcaataatttaaaaacatgtttatatattttttaaatatatataattttttaaaagctcacagtgaaagagttataatccatgggttggcaaaatgtgaaagtctgacatcaaatgtttggatgttggcaaggttgtaaagcaaaagaaatgctcatatatactactggaaggagagcaaatgggtgcaaccactttggaaaacagcctgcaatcccttctct

SEQ ID NO: 45254 - DNA, 1052 bp, Homo sapiens
gcgggtcacgaacgctcagcctgcggggccgcgcggcgcgcgcccgcctcaggaccgccccacctcctgcgcgtgcccagggggcggggcgctgctgatcagccaatcagcgccagactccagggaccgcccctgaagtcttcttagggggcggctctggagggggaacttcgtcgggggggagcggcggctggctgtgggtgtggaaaagcgggcgcgccagaggggctgggaaggtgggagcagaggggctgggaaggtgggagcggaggcgctggccccgactcctaagctgtgcggaagtgaaaggggcgggagcggcggggaagggcgctggccgcgcgtgagaaccggcgcgggcgagccgggggcggggaggcgccgggagcaggtggtgcagcccgaggtgtgcgggaggggctggcatgtcctggagatgggaaaagcggggatggatgtgctgagctaataagcgtactgccagagctgtcaaggtttatttatgcaggacagagaacttagagaagttattcactgactggtggacacacgttctaagattttcctccgttcggtttaagagaaaagtgcttacatgtttctgatgcctggtgatatttattaaaattgaaagttggtcacttgatattttatcatagggttgggagaaagaggaacaaaaggcatttataaagcaaaagccatttctgcaatgcactctattaaaaatttgagaacgaatgtgtttcaacaatcggatgcattgaattaatttgtaggagggtagagtgaggcttgtattggctgggagattcactgccaggtggtcatgcataagcccctaccccaagctctcattttccctacctgcagaattagaccaatgaataccccacctgtctcaccgcatgttttgagattccgcgtgtgtgagggagggagggctggagcgcaggccggtgccgtctgggccgccctctctcccgggcgtgctctggaccgtctcgtcccctccgggcgcgtcatcctgctttcggaacccccgtgtcctg

SEQ ID NO: 45255 - DNA, 1028 bp, Homo sapiens
tgtttgttgggtacctgctacctgaaagatgcaatgctatgaattgtcaatatagtgatgacatgagaagacatggtaaactcacacaaaaactagagctactgtaaggtcataggtgtgatgcagtcggtgccaggaggagtgagagcttaggacttggggattccgtcagttgggtggggtattaccccttaggaagtggctttagcattaccatctgaatgatggtagaagaaggggtgagggcacttcaggcagtgcccctcacctgcagggaggctgtgtgtttgaggcattcaactgcaagatgagactcgaggcaggcagtatccaacttggtcagggctttcaggatatcaaatttgggatttttgaaaaaagcagtaggaaccactgatgagtgttaagcagcctttgacacgagcagagtagtgttttgaagaagattgaattggtgggtgcagagaggacaataggttgtagacaatatcctgcctgcttttgttgtggtctgtgggatggggaaatcacaatgatttggactagattggtggtggccatggggatggagagaaatggacagatttgagagatatttaacagtttcaacgaataggacttggggatagatgcgctctcaagagggagatctcagggcatataggtttctagcatgttccctgcttggctggttggctactgatcctattcacagaggcaagaatcagatctgctgaagatttgagaaggaagctcatgagttcttgtagcatatgactgaggtagctgataatggaccatgatgacattgttttatcctttgcattgctagtggcattccagaactttaaaaaaagtaatctgctagctttaaccaaaagatattggacgtggggagttcatcaaggaatgtgaatgggttcagtgaaatgggagaggggagggaagccttacttgctgaatacatagcactttgcttgttacttgcctgatacatagcactttgtaggagtttgctcattccaggt

SEQ ID NO: 45256 - DNA, 1047 bp, Homo sapiens
ttttcaccttcacaaaatgttagaagcttaccatcttagagtaattataactgctgatgattgttctggagtaggtgtatgttacttaacaggttgtggagcttgccagttgatgctatgttgagagtgtgctgacctcacaagaactaagatttcatatatatctcagtccaaactagaagataaagacaatattaagccccaaggcatcagcaccacggaagattactacatttggcctaacacaatgagacgatgccatgatgttaggtgactgaatagttggtagcaactattacgttgctcattttaggcagcaacctaaaagtcctgcctggttgggtgccggctggtgcccatttagccagtcacatggtctgtcaacatgcagctttctaatgccaggtctgctgttggcagccattggaggcagtataacctaacagttaagagtgggtcctgcagttagaacctggttctaatttagactcctcactgtaccatagtattttgggaaagcgacttaagttctgaagagggcccagtgccggacacacacactgtaagtgcaatgaggacgatgatggcagtgagacgtcaggggtacagctttggcaggttgtcactgcctcagagcacggtgcttctcacaagtggcacgctgctcacagagcacaggctgctcatttgaattctgtctcaggttttgagctgagtgaggttgtgataacgttatgtttgagttggaaagtgaatacaagatacatgctgacttatacttgatgcaattcagaatctgttatgtgaaagtaacaggtagcaacaatctgaccaactcagcagactgtaggtacaatttttaaaaaaagattcacaactgatacatcttcgtgagcagcagcaacagtttagtcactgtttccaagagagagctgtgtgtaaaatgttcacaggttatgtagtactgagtgtgcagtaaatggtcatcatggtagaagagatcccggctcagatcaccagtcttttcagtcacatggattcattcat

SEQ ID NO: 45257 - DNA, 1040 bp, Homo sapiens
gagggttcctggaggaattagcttttgtgcaggatttaaagaatctactataaccagagagagcggtgataaaggtcgaagggtggtgcgtaaagcagccaagttttgtatttaggaaccaggaagaatttggtctaggagaaatagagaagacatgaagatgcccaaggagggctttttgaatgaatctgggattatttttacactgggaatggtgacagctgagctgtgctttaagtatgaggtattcgaaatcacacctggctttctccccaaccattctgcaagtcacccaggaatacaatcgccatttcatctctgactttctctcctgttgcaatcctctgtatccagaatgttggcaaagtctgtagattttatctcccctcattgcctctcacatcctgcctgcatttcagtgtctactgccttctcttctggactcctgcagagacttctcagtctctctggtgcctgcatcttatcggctcacacttctggacaaccagctttgcatttaacccttgaaaacagattgcttcccttcacctgggatgcaggcctcccctactgcctgcctacatttctaactgtaggatctgctcttctttaaatatagtccacaacaggcctacctggattattcgtgatccctaaacactcagtcgtttccctcttccatgcctcttgcttttgcttcgccctatttcaagtacgattttgtccactcaaactcagctttgcctgtcgaaattctgcttgttttcaggttctgtttcaaatactacctcttctgtaaagccatttctgactcttttcaaccgaatgcaacttccttaccttatattgtcctttcattctagttatatgggggcacatgtccctatgtacataggctgtgcagccagtaaacacacaagtgaggtgcagaggtaaataaggcagcatcttacgatgccctagtggctcgcctgtctctgtggagacgttgctggcccttcctttcctggggtgactcattgctctgtttctcctctctc

SEQ ID NO: 45258 - DNA, 1052 bp, Homo sapiens
gtataaccgtagtttttcagttgtttttttctcccctaggtaaaactggtggtctttgaaaaaagcctgcacctcagttatacctcagttatgcaatctgcttctcctctacctcgaatggaatggttactgacatttaaccactatctagaaggaatgtaggaatgatggcatagagaacacatctctgtatagacgggctactcagagccatttgggggaagcaagtactctgctggttaaatgcaaaaaacctaatatagttgacaatatgccagaaattatgtaaatgaatgttgtttccttcaacatagtgaccttggagacaggacaccacattcagtgataacgcgaatggttagaacgtttttagaatgccaccttatttggagttgcttcaagttatgactttaagtttactccatagattgtgtttggatgtactgttttaaagttgtaaggcctcaaatgcttgttaagttttcccaattatatctaaatatagttgactagtctgcgaagaccctgttgcatagtggagaaattgtggacacattttttagcaatttaggatatttatcacacaggacccagcaccatgcagagcaagcataattctcagagtcagacctgggtcctcacctccgctctgccactgactggctgggtggccttgaacaaagcatttgccttttcactatttctctgtgaggttaagtagttggcttaggtctcaagtcttttagccctcatgttcaatgattcagagattctagaggcatgacagcaggattcccttcattatctggggaggtagttcgtcgggggtttgctccacagccttcctgtccctttcagccagcctgtttctggcctaggaagacagcagacttcgtgtggttgtgattttttaaaggcagtgtttaattcttattacagcacaagagttcagaacttgggtaacagcatttgagtattgtagatcatcagctcctacagagataccctgtatgtttgaggttaaactgggagcaaggaaagttgggtgacta

SEQ ID NO: 45259 - DNA, 1020 bp, Homo sapiens
atgggcagctatatggcacgtggggatttttccatgcagcagcatggtcagccacagcagaggatgagccagttttcccaaggccaagagggcctcaatcagggaaatccttttattgccacctcaggacctggccacttgtcccacgtgccccagcagagtcccagcatggcaccttccttgcgtcactcggtgcagcagttccatcaccacccctctactgctctccatggagaatccgttgcccacagtcccagattctccccgaatcctccccaacaaggggctgttaggccgcaaacccttaactttagttctcggagccagacagtcccctctcctactataaacaactcagggcagtattctcgatatccttacagtaacctaaatcagggattagttaacaatacagggatgaatcaaaatttaggccttacaaataatactccaatgaatcagtccgtaccaagataccccaatgctgtaggattcccatcaaacagtggtcaaggactaatgcaccagcagcccatccaccccagtggctcacttaaccaaatgaacacacaaactatgcatccttcacagcctcagggaacttatgcctctccacctcccatgtcacccatgaaagcaatgagtaatccagcaggcactcctcctccacaagtcaggccgggaagtgctgggataccaatggaagttggcagttatccaaatatgccccatcctcagccatctcaccagccccctggtgccatgggaatcggacagaggaatatgggccccagaaacatgcagcagtctcgtccatttataggcatgtcctcggcaccaagggaattgactgggcacatgaggccaaatggttgtcctggtgttggccttggagacccacaagcaatccaggaacgactgatacctggccaacaacatcctggtcaacagccatcttttcagcagttgccaacctgtcctccactgcagcctcacccgggcttgcaccaccagtcttca

SEQ ID NO: 45260 - DNA, 1031 bp, Homo sapiens
ttccagagagctctgtccagtggaattttctgggatgatagaagtcttctttttggtgtccagtatggtagcctgtaggcccttgtggttaggaagcacttgaaatggggctagtatgacagaggaactgaattttaaattttaattttaaccaacttaaacagccatatttggctactgactactattggacagtgcaattctagaatcataattggtagagaagtagtcttcaaacttttttgtctcctaagagaattttaaaaaaaattctctttttcagtttgaatacatgcattaaaatgtgtttgtcttcatgacaattatctcactaaacaggcatttgtcacctggatgaaatgaaggactgccctcttgatatttattaactctctgctttgctgccaagtgactcttcctaaagaggttggtgtcccagaggtttttatactccagggcaacacactgtaataatatttgggatgagtgaaagccattttggtaaagagaagtgattgtaaaaaggaaggtggaaagggggacttttagaaaatagataccaaagatgacagtgttagttctgatagaatgtattttgagccactctgatttgatacttagataccagaactattctagttaataaaatgaggcatgattagtataagaaagaacacttaaccttcctgctactaaggcaggtgggggcattcatccagattatttaatatgtgagacaaatatgttcaggtaactgcttgtctgtttataattgttttatttaaagtaatagttctcaaatgttttagttttgaaatcctgatgctcttaaatattgagaaccccaaagagcttttgtttattctggttttatctgttgttatttaccatatcagaaatgaaaactaggaaatttaaaaaatacatttattcatttaaaaataataataacccccttattggttcattgaattatgccaatcttctgatttttgtatacatttttttttgaggtggtcttactctgtcac

SEQ ID NO: 45261 - DNA, 1052 bp, Homo sapiens
ttaacctctttgaatgccttcatttccccatctgtaaaatggtgataacttcactggttgtctggaacagtgctgggcacagaggtgctcagtgatatcacagcagtggcctctttacaaaggcttaatgaaggaagtcctgctgtgctgtctttatgtgaaaggataaatatctcactaggaaaggggaatcctaggtagaaaaacaatttcagatgagagttgcagaagattttaaagtatacattagttatttattgttatgtgacactttacaggttgactatctctcattcaaaatgcttggattgagaagtgctttggatttcagatttgtttcagattttggaatatttgcattatgcttatttgttgatcatccctaatttgaatatctgaaattgaaaatgctccattgagcatatcctttgagtggtatttcagtactcattaagtttcagatttcggagcatttagatttcagatttttagattagggatactcactctgtaccacaaactttatggcttaaaacaatatctatttcctctctcagtttccgtagatcagagtttgggcatggtttagctgggtcctctactcgagcctcacaaggctgtagtcagacgtcattaggactgtgttctcatcttgactggggagtcttgactggggaggaatccatgttcagattcattcaggttgtccacagaattcatttcctatgctatatgacttgggtggggggcttcagtaattgctggctgttgcctggggccaccttcagctcctgaagtctgcctgaagttctgcaccatgttgggttccctggcaacgtagagttcccaccctcaagaagggtccccaccctctttaaaagtgtcccccagtcagacctagccagaataattgccctttaagtaactccaaaccaattgatttggaaatcttgattacacgtgaaatccttttaccttcgctgtattctgttggcttgagggtcgcaggtccctccatagtcagaagatagagataatggggccatcttgga

SEQ ID NO: 45262 - DNA, 1026 bp, Homo sapiens
tcgtgttacccaggctggtctcgaactcctggcctcaagcggtccacctgccttggcttcccaaagtgctgggtttacaggcctgagccaatgtacccagctggtgactaattttgaagaacttaaaacatttattaataattcttcattgaacttgaacatttattgtccatcagtaaaacagaattcttccctcttcctttcctgctaacaggtctcctctttctttttcaactagaagagtagggtaaagaatttgtggctggggcttaggagttgagggtggcgaggcacctgcttggagtgaagcatgtgggtgccaggccagacgcctgagaaccaagggtgcctgaggctgctgggtgcaggattgcagacatctgggcagcgcactgagcactagtggggccttcgccaaaagggtactggatatcttggtgtgaagttgttgacctctgggtttattatctgccattcagagtttgatttgtccccttcctcattagtttattctgttgtccgcgttttattacattctagtttagctgttaaattttagtcttagaactttctttaaaatttttattttgtggggttgattttactctatgatgtaccagattttatgctgctttaattggctttttagaacttcatactttatcttttttagtttgcctttttgtcttttaattttctttttcattgtctaaaaaacttaaccaaatagtagacagggcttaaaggaaatgctctgctcttaagttgagaggctagacactctcctctgccagtattgagcccttggcctctaccatctagctgtgtattttagtgtggcagctcagatcattttagagttgtattttgtcacaaacaccctgcatcacattctgtgtggcatcccatgccacaaaaacatctcttttacttcttatccattaggttcatttctttattcagaagtcttttcaggatataaagtgtaagaatatgctttaatacctttcagtctttaaaagatta

SEQ ID NO: 45263 - DNA, 1014 bp, Homo sapiens
tgaaatattttacatgacatatgctttattctaaaagcctatagatatcttggcttcttccttttgtagtagctgagggtaaaaacatgctgtttaatgcattctgtcagcacattttcctgagaacttacaaacttcaataaataaaatttttgaaggtttttgaaatacagcttttgtttttcacaatttattggaatttgaggctccctagaaatattttttaaaaaatcattactgaggttggattattttcagtgttggataacaaatagtaattggtgttagaaaatttgcaactgatggccgggcacagtgactcaatgcctgaaatctcagcactttgggaggccgaggcaggtggatcacctgaggtcaggagttcaagaccagcatgaccaacatggtgaaagcccgtctctactaaaaatacaaaattagctgggcatggtggtgcatccctgtaatcccagccacttgagaggctgaggcaggagaatcgcttggacccgggaggcggaggttgcagtgagccaagatcacgccgttgcattctagcctgggcaacaagagtgaaactgtgtctcaaaaaataaaaaaaaaactggagctgatttggaaatagaaatggaaggtagcgctaaatgtacataaagtcaggtaaaggttctagaggtaatggcaaatgtaaaacatttttttcttgaagtttatgtcttttgtcttatataatattcaaattctaataacatttgtcagcaacatactatgaaacatgcactttattagggttgctttactgtatttttatatttcagagaactgtctttcaaaaaaagggctaattgtgattatctcaaaaaacacgtagcaccaaaataaagcttatatttaattaagaacacagtacctactaaaattatgtacaacaggaaattgctatgtatttttattacattctaaaagattataagttgaacaaaaatgtaactggatggtataaaagaggatacc

SEQ ID NO: 45264 - DNA, 1050 bp, Homo sapiens
gtcaaaagaatacttaagtatgtaaaactatccacaaaaggcacaaagagaagatcatgatatcgtttttcatgacaattaaaaaaaagtgttctgtaccttaaaaattcgatagcaaaactacttcttaatctgattttttattatggcttgatatactggcaggcattttgcacaaatgtactatgtgtggtattagtttttgcatgcagtttatttttaattaggtcatatatttgctaaaagtcattaatatggagttttgccaggaaaacttaattgggagttgcatttaactgtaaatagccaatatgtatggatttatcagttgtcattgatacttttgggatattaatgtgggaaatataagagacatgcagaaacacattaaaagtgaacactaagcgatccactttgaattctagtaataagaaacctgactcagaagcaagtgctttgaagaaaaaggtcaacaagggaaaaacagaaggttctgaaaattcagacttagacaaaacacccccaccatctcctcctcctgaagaagatgaggacccaggtgttcaggtaatacaattattgtgattcccgagccttggttatttggcatgggtaactttagccatgtatgaagtacacaagacctcccctatcttgttatagagatgctcttgagatgtctttattgtagtctggaacattatctccatagcgatgtagggagggggagcgggcgtggaacaagaaattatactcctgacaagagtggcttggttttgctatctttgactctataattaataaggcaaagattcttcatttatttctgtaaatgtatattttgctgtttatgttattaacattgttaatatactggctcatataaagcttcattcacatttttaaatttctctaaagtttggttgattgtcacttttttgaattttgcagaattaaaaatcaagatataatttgtagtagcctgtctaaagtttctgacatctggcactcaaagttgagatatagtcatgtaatctaattcatgtaata

SEQ ID NO: 45265 - DNA, 1050 bp, Homo sapiens
ttctattgtatttgttagcactgtgatcttttcacatcatatataggattagcattatcaccttttccttaagattaatttaaaaaaattcatccttccactctgcgccattataaagaacatttttctttttttttttttaagacgcagtcttgctctgtcgtccagactgcagtgcagtggcgaaatctcggctcactgcaagctccacctcgtgggttcgcgccattctcctgcctcagcctcccaagtagctgggactacaggcacccgccaccacgcccggctaattttttttgtatttttagtagagacggtgtttcaccatgttagccaggatggtctcgatctcctgaccttgtgatccgcccgcctcggcctcccaaagtgctgggattacaggcgtgagccactgcgctcggccacatttttctttttaatcattaatttcaaggccactgtcttgggtttttgttttagaagagacggtccagcagacaggtgaagagaaagcgctacactgaagacctggagttcaagatttctgatgaggaggcagatgatgcagatgctgctgggagggattccccctccaacacctcccagtcagaacagcaggttagtaccagatctgtgggatttatggatgcattttaaagatggactagaaatttcattgctgcaatctgagaagtgcagtggaagcattggactttcagcaggggaacatccacctaatgttggataatgtgctatgggaaattcgttgtttagcaatatcttttaaaaagccctgttcactgcaatttatttttatataagactgtgatatgtaatttgacacaattttggagaattaatgttctatgctgaggaagagtcagagttggaatataaggaggctgaatatacctctgagaattcagtgctgtggcttctgggactttaataaaccactcaagcttgtctcctgctgttaggcactgtgagaacccctttatgaaattactgccttgtagtacccagcagggtgtactttattctctgtgc

SEQ ID NO: 45266 - DNA, 1045 bp, Homo sapiens
agaggactgtccatggatctgtctacctgacacagaaatcgtgttctaatacctctgttttcatgcctgattcctatactttgcatagggtagatgagtaggagtagaacaatgggtgtctagtgagaggctctggttttaagaaagtgtttttgttacaatttggttagtggctttccttgtgttacctcaggaacacaaagtgctgctgacgggaaccccactccagaacactgtggaagaactcttcagcttgcttcatttcttggaaccaagtcgcttcccttcagaaaccacatttatgcaagaatttggtgatctaaaaacagaagagcaggtatttatcagctccactttgtatttcagttataaaattgaagattagcccatgaaatggcaaagtattaagttattttaaagtgtgattatattacagtttttcccacctagtacacagaaccttagataccctttccttggactttccaggtcatcatcataaaggttttcttctttatttgtttgtctttttgctcttgtgaagggctgttgagatttatagagaggttacatacctgttgatgtaattttcagagatagctgtgctgtgcaggttggtagttttgctaggtatgtgtaattttggggatgatgtcagacgccactgacgttggtaggcctgtttgcctgctgcagttttgagtctctgttctttgtgaagcatctgtactcagccacaccgcttacttcttcaagcctacgtattttcactttagaaacttagggcataaccactgcacagtatttctgtgagaagtaaatgaagcattgtgtataaaaagtgcttgggccaggcgcggtggcttacgcctgtaatcccagcactttgagaggctgaggcaggcggatcacgaggtcaggagtttgagaccagcctggccaatatggtgaaaacccatctctactaaaaaaaatacaaaaattagccgggcgtggtggaacacgcctgtagccccagctactctggacgctgaggcaggagaat

SEQ ID NO: 45267 - DNA, 1062 bp, Homo sapiens
tttattgtaacagtagttagaattcccaactggtagagaaaaactatatttgtgtttgaatttgtgtgacacccctttgcacagtcaaatgaatgcttctgcagtaactttacagggctttgaagccatttggttaacataatctaagttgttcagatgcttctggttcagaggtcacctgaagttaaggtgcttgtgtataccttaaggaattatgccagatctagagttacatgttgattattaataattaagaacaaagtgtcaaaattatgtaatcttttctcactttacaagctttgcataaaatttatgactgtcgtaagcttttaatatttctcttataaaaaattgtcaaaggcagtaatctcacttgttaaattcttccttgcaactcatatgaaacatgaatggtcatttgaactttgtgaaagtgttgtatttttcctgctggactataagtttctgaaagggaggatccatgtccaatttatctctgaatcactgtgatgcccaaagtggtactttgaatggcagggtgctcagtaaatatctgaattggtcaataagagttctctagcagattgtgggactacaggcaactcctgttaaaaaaaaaactgcagctagagtaacctttctacagatctgatgacgtcctgtcttggatgatttcttccaatgaattaccattagtttcagagtaaacacaaacatatgctgacatggcatccagagctcttctgggaccttgtcttctgttggttctttcccatgggtagtccaagcttctgttaggacagacggcttcatctccttcagtgcgccacgctccatctcatctgtgtctttgcacaagctcttcccactgcctagaggaccccccacttgcacctccgctgggaggtgacctacctcccttctgctctccgtgggtgtccgacgcaggcatcagcttgtgctctgcaactgagtctggcctgcacttcccatcacactcatcatgttgtttacaatttttgagtcgcctccctctttcagtttgcagctccttgaggatgg

SEQ ID NO: 45268 - DNA, 1034 bp, Homo sapiens
gaatgccgtgggctccagcgaagaaaaggctgctgacaaggctgagggaggaccctttaaagatggagagacccttgaaggcagcgatgccgaggagagcctggataagactgcagagtcctccctcttagaagacgaaatagcacagggtgaagagctagactcacttgatgggggggatgaaatagaaaacaatgaaaatgatgaataaccagtaccagttccagttcaagtgtttaaaacttttgacaagtggtagtcctactgtttacactcacagttaatgttcatacctagttttataagctgttctgtaacatagtgtagcaaaaaaaaaagttcaagtcatgttatacaggtgtgtcaaaaggtatcttggtcattaagtattgtgcagtgcattatttattatccctaggagagatgaaatttgagaggtgatcatgtctttttaaggaaacttacataatgctctgctttttttttttctcttggtaccattggtattataataaagagcaatttgtaactgagtggcactaatggaagaaagtgctgctcaaaggaagtatgaagttatatatttaattttttaattttaatttttaatttttttgctgtgaaggtcaagctgaaatttaccatacatatcatacttgctcatttgtttccctttttgactgtatgggggttcccacactcgtgcatacacacacatccatacactctgacaatctccacgctagtgtgaacgcctctgtcccgaggcgcagcaataataaggcagctgttgaatgtgaagggtccctttggaaaattaacctactgggagggttcttgccagacagaactacagttccattgtctcgtggtcttgtaatgcactggtaaaaacaaaataaatagatgaataaataaagagtgagagaagagagaatcaggtaccttttttaaattaaaggactttgttactttagccacaaagctaaaacagcattacctcagctctaaactagccttgaagtttacagaca

SEQ ID NO: 45269 - DNA, 1091 bp, Homo sapiens
ccttttattagtattagttgatttttcaaatagattatttaatgagattaaccataacatggattcattcatctagtgtacctatatagtaagtgagtagtgagtagcagttgcagatttatggcacaggagagttcttcttcagaaagtataggcaccagaaactaggttatgaaatatagaataaagatttgaaggtgaccattatttgtatatattatggttaggttttttgtgtgtgtgtattgaaggaacttaatcttttaatgtcactgctatatcttcatagcttaagctaattataaaaggcttaattagctagaaatttgggtatttggaggagggattagttacctgaaattgcctgcaattttgggtcaaatgtagtgttttctttttttaagacattgcagattgaattcattgataactattgaaaattttaacataccttggtaatgtcggtgatagaattaaggagtttataaacatacttgctttataaacacagttacttctgtattgtagacatggacagttttatcaaatcaagtaattggtaactggtggctttgagtatttgtgtacaagcgtaattccaatttaaacattgaagaacaatgctattaggtatctgtatgccatttctgcatccatttctgtctgttactaaaaataagccactgatagaaataaatgaaaaaatacattttcagtattcaccagtttttttagagagaacattgtggaatgaaactgtttgttttgctttaaaaaagcaaaaaatgctcaagaactttgggtcttaaaattagttctgtagttcttatttatttatttatttttgagacggagtctcgctctgtcgcccaggctggagtgcagtggtgcgatctcagctcactgcaagctctgcctcccgggttcacgccattctcctgcctcagcccggagtagctgggactacaggcgcccgccaccatgcccgggtaatttttttgtatttttagtagagacagggtttcaccatgttagccaggatggtctcgatctcctgacctcatgatccgcccgcctcggcctcccaaagt

SEQ ID NO: 45270 - DNA, 1106 bp, Homo sapiens
tgggatgcaggattatttttaggattatggagagtggtggttgtgttcaacctcatctacctcttggttacttccccttaaccaccccttcctatctactgagcaacattcctagcatacatgggaggagaagaaataaatgggaaagaaaaaaactttacgatctcagcaaaattacttttccacgtaaagattatgaaagtagatcatttgttgtgaaatgtagtgcaagttttaaaataagcgtgattttactatattctggctcacatagtaatctcagttaacgcttatggcagtatggcagtattttccaactttgctgagaaatcttaatattaggaggtgtaataaatattccttcaaaaagatgtccatgtttagatagatttgagaaattttggaggctaaacagttgaactgttttttttgctacttgatttcatagtttataaattataattgaaaatgaagttcttaagatgaagatatagtataaaaaatcctgacttgttcaaactcttattttttttttttttttgaaacggagtctcgctctgttgcctaggctggagtgcagtggcataatcttggctcactgcaacctctgtcgcccaggttcaagaaattttcctgcctcagcctcccaagtagctgggattacagacacatgctaccacgcctggctaatttttatatttttaggagaggtgaggtttcaccatattggcaaggctggtcttgaactcctgacgtcaagtgatccacctgcctcggcctcccaaagtgctgggattacaggcatggaacaccgcactcagccattcaaactcttttttaaggaattttagtggactgtaaaagacagttttggaattgctacctgagtaatcttcttgcatgttttgcttgataacagatattttacaattctttattatttgtcacaaggacatagaagggtttctactggaggaaaaatttttgtcaggaggatttctggtattccatagaggcaccttagtgtcttcctagggaaaaccagcggagggtgcctgaatcccaccagtgtagcaactagcactgtggtttgcgttttatctgtt

SEQ ID NO: 45271 - DNA, 1048 bp, Homo sapiens
atagatttgttttaactcatgatatttggaatcaacatatttgtatcctgtttgaagagaagttgtaaagtttgattccagtaaggcctgttctacctctcctttgtggtactaaatagattttcagcagtcatctttctttaatattaaaaataattatctctaacaagatacatatttacattttaaagaggattaatactgtagaatgttgaaaactgggtttattgaaaattatctggaatcttaaaggtaagtcgtatgagaatttaagtactctcaattatctagctagaaaattaaataaaatgtttggaccttttaaatagtgctattataacagattagtgaaaactggatttattgatgaaagatctcaagaagatactggcaaatttagagttacacaactatttaattaggtcctcatacactgtacacagtgtgttttaaaaattaaattcatttatctgattttaaaattataaataaaaaatattttgatggaaaagtgtttaacaagtcttttgctaatgatttaaattgctttgtatacttagatctagttcatatcaaacccaagggtactttaaaacaagttgttggcctttctacttatgtggcagcatatttcttctattttgtagtgttcagtttctgaaggaataatgttcatagtaattttgaaagtaaatgtcagtccttcatttcttttttttttttttattgatcattcttgggtgtttctcgcagagggggatttggcagggtcacaggacaatagtgcagggaaggtcagcagataaacaagtgaacaaaggtctctggttttcctaggcagaggaccctgcggccttccgcagtgtttgtgtccctgggtgcttgagattagggagtggtgatgactcttaaggagcatgctgccttcaagcatctgtttaacaaagcacatcttgcaccgctcttaatccattcaaccctgagtggatacagcacatgtttcagagagcacagggttgggggtaaggtcacagatcaacaggatccc

SEQ ID NO: 45272 - DNA, 1029 bp, Homo sapiens
gaatcttctcaagactgtgagcatttctccattttttccttaatgaaagtacaaaatctaatggttgaactggattccatcatatagataagctgtaattcctctattattcggcagagttgtctagtttatttaatccttgtgtgtaagtgattgcatacatcaattgattaaagtacagctggctgtaaatggtaattttgtgtccacaaagtttatatattagccttttgtagaaattatgatatttttaaattgtgacagagggcctggctcttcaaacaaaaataatactcattatacccccactctcatccctgaaaaaagccatataggttagtttgtaagaaatattttaagatgtgactactcatcagcaaatttttctgttgataaaactggatttgaaattttaattttgtttatctagaataggtacatcttttattttcatttacttaaaacttcttgattttaatctttcagatttctttttttgctcttttaagaggacatttcgctactgattgtgatattttgttttgcagagtaacagctatccaccaatgtcaatccatacatgcctagttactatgctccatccattggatttccatattctcttggggaagcagcgtggtccacagctggagaccagcctatgccatatctgacaacctatggacaaatgagtaatggagaacatcactatataccagatggtgtatttagtcaacctggggcattaggaaatacccctccatttcttggtcaacatggatttaacttttttcctggtaatgctgatttctctacatgggggacaagtggatctcagggacaatcaacacaaagttctgcttatagtagcagttatggctatccacctagttctcttgggagagctattactgatggacaggctggatttggcaatgatactttgagtaaggtgcctggcattagcagtattgagcaaggcatgactggactgaaaattggtggtgacctgacagctgcagtgacaaa

SEQ ID NO: 45273 - DNA, 1048 bp, Homo sapiens
ttgtgatgccctgcattgggaaagtatagcttatattccccttgaatctgcctgccctgtgaccatttaaccaacagaatggaatggaattgacatttgcctcagtggctcaaagctttaagatgtctggcagcttttagttttgcagttttggaaaacctgagtggccatataaaaaatctagcttcctgttggagagaccacatgacattacatggaggccaatatcgatctatcctgttgtccaaggaaaggccctgaatgacttcagtctcatcccctcctgactacaaccaagtgagaaaccagcagaatctccctgctaagctcaaactatacaagtatgagagataataaaatgattgttttcttaagtgcctacagttttgttgtggtttgttacatcgcagtagaaaccaaaaccgaaattgtttcttggaagtggagtgtggcttaatggtaaactattacatgagagtttgactttgggataggtagaagctggaagggcctcgaggacaattttagggaagcctgttaggacaggaaggaacttgtcattaggagaaaaggtgactcatgttacttatgacagaaagcttggtagaaagttggaaacatggaaaatagaaaatataactaatacacttatggtcctagctctttgcatatatccactatactcccctgaacagcttgttaagaatgggaacaatattcctattagtgaagtgaggaaatcccaactaaaggaagttaaatgtctgtccagtatcatatctggtaagttgcggagagatacttttaacacaatttggctaaaggaatttttcaggtgaaagaaaaagtaccaatggatttcttttggctgcgcatgaaaaaatagagatgaactaaagaagaaacagtttagtttttgagcagaacttgaaggaaatatttctaagcaggaagctgttagagacttggttggtgtgtctgtatgacaagaaagtgaggaaagttatgttgttggatgtgaaaggcagcaactaggccttctcatata

SEQ ID NO: 45274 - DNA, 1094 bp, Homo sapiens
ctttgggcattaacaacagcagcattttattatggaaatcttcaaactgtggagaaattgaacgaaggatataaggaattcactgtactcattacccagtttcagtaattatcaatacgtgggcagtcttgctcccctaatccgggttattttgcgtttttgagacagggtctctgtcacccaggctggagtgcagtggcgggatctctacccactgcagcctccacctcctgggccccagcgatcctcacgcctcagcctccccactagctgggactacaggcaggcgccatcacgcccggctttcccccccccccccctttgtagagatggggtctccttatgttgctcaggctatctttgaactccttggcttaagcgatcctccctccttggcctcccaaagtgttgggattacaggcgggagtcatcgcacccggctatcctgggttattttgaagcaaatcccagacattatataatttcaattattttacatatttctatgcctctgtcatgatgaataatcatacatataataatttgctttctagaggggtcaagtaaaataagggacatattaaagtgtagacagtgctcatttagtttgtactaccagaatttaggtaactgctacagtgcagtttcattatcttgtgctcaggttttcaaaatcagagttaccagataatctagacagtagtgctcttgcttttgaatagtaataattgtattgataatttctatttgtcgagttcttagtatgtatgaaggactgtgaagttgtttccacctactcatttaatttttgcaataaccctatgaagtaggtattattatccccatgttagagttaggagaaagaaatttggagaggtcacaatttacctgaagtcacactgctgaaaggatgggggtgggggtagaattcagaatgctactcttggcctttgtcattgcaaagttcttgctcttttaactgtaacaatgtcctaggagttgtggaataaatggaactgctgtggaaaattatttctgttaagccacaaatcagtaatggaaaaaaaaaagcctgaaaatttacacaaatacaa

SEQ ID NO: 45275 - DNA, 1019 bp, Homo sapiens
ttagaatgggcatatttaatttattgaattaattttaaccatttccctattgatggtcatttagattacctttggattttctctttcacagtaatgtttcagtgaatacccttgccagctttcaaaaactaaacatctttctccttggagaaaggtataatttactgagttcttccattaaagcaatttttttgtgtgttgtgttgtgtttgagacagtttcactctgttacccagagtggagtacagtggcgcactgatagctcattgtaacctcaaattcctgggctcaagcgatccttctgcctcagcctcctgagtagctaggactacaggtgcataccactgtgcctagctaatttttaaattttttgtagagatggggtcttgttatgttgcccagggtggtcttgaactactggctcaaatagttctcctgcctcagcctcccaaaatgctgagattccaggtgtgagccaccgtgcctggcctggcaattttttatacacataatatgcaggggacagtaactattacacaacttatcaacatcaactttatagtgatttttcatcacttccttgggcctaagggcaacatttttagtcattgttgactgccaagtactttatttgcttctactgatgtccagcccaggatcacttaagatatttgaatagtgttttcaaaagattattttaaaatttatgcctcagtacttaattcatctgcatgtggctgcttaaaatattctgtgtcaatcactgtggggttatatttcagagattctcacatgaaaatgtcagcctttagttcaaatatgaatatgatctctgtctctaacttcttttaaatcataaagataacatctaaaaatgtccttcagaagtttaattttatatctaaattgcattagcttgaaagaatttgcgccaagtttgattagcctgtgttcatggacctcttatcttactagtttttgtttttgttgagagatgtggtagtataggtcatgagatt

SEQ ID NO: 45276 - DNA, 1035 bp, Homo sapiens
tgtctttactaaaaatacaaaattagctgggcatggtggtgcgcacctgtaatcctggctacttgggaagctgaggcatgagaatcacttaaacccaggaggcagaagttgcagcgagctgagatcacgccattgcactgggtgacagagcaagactctgtcttaaaaaaaaaaatatatatatatatataccatatatatatatatggtagtgggttgatgtagggttgacaactaaacattgtgacaaggacatttaaaaaaaaattatagccaggcatggtggtgcatgcctgcaatcccagctactcaggaggctgaggcaggagaatcgcttgaacccaggaggcagaggttgcagtgagccgagatcacatcatttttctccagcccgggcaacaagagtgaaactctgtctcaaaaaaacaaaacaaaacaaaaacaaacaacattcatctactgtccctgtatcataaaaggaaagtagcgtttacaccataagcataggaaggacatagtctcaaaataaaggacattaactttattctttaatttttattttttatttttgttagagccagggtcttgctctgttgtccaggcttgtgtataatggtgcactcatagctcactgtaatctcaaactcctgagttcaagagatctttatgcctcagcctcctgagtcagtaggactacaggcatgtaccaccatgcctggctaatttttttttttttttttttgagatggagtctttctctgttgcccaggctggagtgcaatggcgcgatcttggctcactgcaacccccgcctaccagattcaagcgattctcacgcctcagcctcccaagtagctggaattacaggcacccaccatcatgcctggctaatttttgtatttttgtagagacgaggtttcaccatgttggccaggctggtctcaaactcctgacctcaggtgatccgcctgcctcagcctcccaaagttctgggattacaactataagccaccatgcccggctgcctggctaatt

SEQ ID NO: 45277 - DNA, 1192 bp, Homo sapiens
tcaccatgttggccaggctggtcttgaactcctgacctcaagtgatccgcctgcctcagattattcgttttctaccaactttatatttcaggaaactaaattaccagttttttttccctggattctaggacaatagagtatgtttttttacctttcaaggttgttctgtaaactaaaaagatgagggagggtcagtagaaatcattttgggaatagggcacatctaatttaaaactgtgtcagattttgagtttcccttacctgtgagatgaggggacaggaccccagaggtgtattatatttaacttagggttctttgatatgggtgaggagctaaaaaggcctttgcatttatgtaaattgtgctacaaaagtggcttcccttgacagtaacaaggaaaaaagagagctagataattcagtgtagtgttattctaagtaagaacctgtgtgccttagggaattttggacccaatataaacaaaatataaccaaaacaaatgaatgaaaccagtagaaatctcactagcagaaattggtatccagaaaatggttttaagaaacatcagttaactgttaaacgtttaaggtaatggaaaaaaaaaaaaaggaaaggaagaaatatcaggcctgcataatatataatcccaacactttgggaggcttgaggccaggagttcatgaccagcctgggcaacattgtgagaccctgtctcttaaaaaaaagagaaaagaaaaaaattagccaggcatgggtggcacgcacctatagtcctagctactcaggaagctgaggcaggaggatcacttgagcctaggagttggcagtgtgggtaacagagcgagatcctgtctcaaaaagagaaacatcaccctttggctgtttatcttctgtttttggtacatccatgcttgatgtctctggttttttttttttttttttttttttttttttttgagatggagtcttgcattgtcatccaagctggagtgcagtggcgtgatctcggctcactgcaactgccgcctcccaggttcaagtgattcttgtacctcagcctcccaagtagctgggattacaggtgcctgccaccatactcagctaattcttgtatttttagtagagacagggttgcaccctgttggcccaggctggtctttaactcctgacctcaggtgatccacccacctt

SEQ ID NO: 45278 - DNA, 1029 bp, Homo sapiens
actctcaataatcattaccaaacttatttaataatcacaataaataaaagtttatgattagctgacaaatgttcaatgataaaaaagatcaccttgactatatcatctgcttttcatgaaatgcctctcattttctggcaaacttggccagatttgtgttcccacagcacctcatgacctgccacaataccactcatcagagcatggtattatttaggtttacgttaggacagtgctgactaaactgtaatgatcctgtgctctaacagtgaaaatttttgagcatacaccacttatattaagtatatgtacttatggattattatactgaactaacatttatatgttatacaacaaagataaaaactgaaaattttaaaaatgagataaaaataattttagattcaaattctattgttttctttctctgctagaacgaatcaatcatctctttctactccctgtgttaagttcatctcagtcagagaaatcactgtctgagggcttgaatctcctggaaaactgtaagctacctggaagcagagatgcatattatttatttttgtatcgcatataattagtacacggagaaggtcaatgaataggagaagatgaagaaaattatttcctctttaggatatacaaaagcattgaaaaaataaagcattctaaagcgctgcttactaatcaagatgaacagaatgcataggatataaagcatactgcatataaagcaatctcccctccttgacatatacatgaatgggcatgggtgtctatgtcttatgaacatgtaatttattaggcagtatgcaaaggggttacattcttattggcagaagaatagacatcctgggagaatacaataatccaaaattagactgatttaaaaaattaatgtatgactgcacatgacatcaaaacattctcaggtatattaaagagttaaccattaaaaataggaacatgacaataagcaactgaattctcaaaaattctgtgaagagaaagtaactttaaaaacaaatc

SEQ ID NO: 45279 - DNA, 1023 bp, Homo sapiens
atatagtagaaatagcagaaagaaggtacctgagatactggtggcttgctgagggtaaagaggaggtggcactatcatggaggagagcagtttagtgacataaaatgtcctgaatcagtattgtatttttatttttcctaatgatgctacctctgaaaacagattctatttttttgtgacagagtcttgctgatgcccagcctggagtgcagtggtgcgatctcggctcactgcagcctctgcctcccaggttcaatcgattctcttactcaggctcctgagcagctgggattataggcgcctaccaccatgcctgacttttttttttttttggtacttttatagagatggggtttcaccatgttggccaggctggtctcgaattcctaatctcaggtgatccgcctgccttggcctcccaaagtgctggaatcacaggcataagccaccatgccctgcctagtgaagacagattcttgacacattatgtccatcctgagaaattactgaaagaaatgaacctcccacacacagaaggcaaaaggacaaggcggtcctcgcagggctcctcaatccccaggccatggaccggtactggtccatggcctgttaggaacctgagaggaaccaggtgcacagcaggaggtgagctgccagccagtgagcattattgcctgagctctgccttggaagcagtagcttctcataggagcacaaaccctattgtaaactgtgcatgtgagggatccaggttgcgcacttcttttttttttttttttttttttttttgagatggagtttcgctcttgttgcccaggctgcagagtaatggcgcaatcacggctcaccgaaacctccacctcccgggtttaagtgattcttctgcctcagcctcccaagtagctggtattacaggcatgcgccaccacaaccagctaattttgtatttttagtagagacagggtttctccatgttggtcaggctggtctcgaactcccaacctcaggtgatccacctgcctc

SEQ ID NO: 45280 - DNA, 1045 bp, Homo sapiens
ccgaggcaggagaatggcgtgaacccgggaggcggagcttgcagtgagccgagatcacgccactgcactccagcctgggcgacagagcaagactccgtctcaaaaaaaaaaaaaaaacccaaaatgttaggctcaaatcttttgctaggccttagagtctcctcttagtgatgaagggatgtttaatgttaaggaggcaacagctttattcttttttcacttgggtaggaaactgcctcttcatacagaacaatattcatatgttaattgaaagctagtattatttttgtacattcatcctctttcacttattacggaaattcttgctttctggaagtttagtatcaccttaggtaagtggactacctcaaaatttctgaaacatttggcaccaactagaaacattagtgaagtccatgagatcatttgagtcttctgtagctgcccaggaaaccgcctgattaggttgtgtgtgtgtgtgtgtgtgtgtgtgtgtgtgtgtgtgtatgtatgtatgtagaacttgatgctttgaaatgaaccatctgcaaaatagaggcccataaagggtattagttttgatgtgcacctaattgctacaattttcttgaaaataaatatttgaaagagaaatcctccataatggaccttaattacaagagaagtgatttttcctatcttgggatatttttctttctttttttttttttttttttgagacagagtttcactcttgttgcccaggctggagtgcaatggcgtcatcttggctcaccccaacctccgcctcccaggttcaaaccattctcttgcctcagcctgccgagtagctgggattacaggcatgagccaccacgcccagctaattttgtatttttagtagagacggggtttctccatgttggtcaggcaggtcttgaactcctgacctcaggtgatccgcccgcctcggcctcccaaagtgctgggattacaggcgcaagctaccgtgcccggccggagggggtatttttcaataaagtttttctcagagaattcatgcaag

SEQ ID NO: 45281 - DNA, 1045 bp, Homo sapiens; identical to SEQ ID NO: 45280

SEQ ID NO: 45282 - DNA, 1034 bp, Homo sapiens
tccaagtgtacaaatgtctcttattctgatttacacatggagagaatgaactttgacttaatacactttgtcaatggtttgtttcccttgactttagggcattacacaagggaaaagaaaggtagggttgtctgcaatacgtcctccttcagttttttctttctttttttttttttttacgatctagaaggttgcaatcatttgcatttatgagattcaaaccaattaggaaaacgggttcatttgtgattttgagatgtttgaatggcaccattttgtattcttgcttttagcagatgacagcatacacattataattttccgttaatatagtcattacttttgattcctgctttgcatttgtgtttattgctttcttatgcattctttttgaatattctgcagttaagtctgttttcagcatgcaattttttatttctcaaattacactaatcacagtaagattaatagagtagtagaatatccaagatatttgaactacatgttgtgagaatttggattactctgtttttccaccaaaatctatagattgcattgtccatttatattggaaaacaaagagaaacagtttatggttttacaaaactggttttaaaaggaatctcacagattcaccattcaactaacatattttaaacacttattatgaagatatatcaggtatgcatcctgtcttcaagaggcttagaatttagttgtagagatagcattcatacgattcagaaagtggtaactacaagaaggatataatgatcaagatagtcctcatagtgggaatttctattttgtgaggcaatctagatttgggtgatctggagagagaatcgaagcgagaaagcttttcagatggaaagcatagagtaaaggaggacctagagggtagactttagctttgtatgaatgaggcatattaggtttaccagcctgactgggtcagagtatcattctttttgagagtagtaagaaataatgatgtatataggataggatcaaattagaaggcagtggatttt

SEQ ID NO: 45283 - DNA, 1042 bp, Homo sapiens
atgaagtgaatagaagaggacaagcagtccaagttatagtgagattttgaggctccagtattgggccattagtagaaaatgaagaggggcagttggttttgagatgctcgtttgcgattgaaatgttaaatttgtaagacttatggaagatattaatggaaatattatttagattgttagaaaaatggggttgggataagaacattctgttatttaggaaaatttttgactaatggtagaggcatgggcatgattactgtatcttgtgtttgacgcatagtaggtacccattaattacaaaagaaattgaagaaggactgattcatgtgatttttttccttctgtatttcttgcatattagtaattatatgatacaattaagatggagtttttaaggacttaactttctaattgcatacgatgcttaagagttaagattgtatttttctcataccactatctaggaggtgaagatcgagaacttattcagagaaggaaagagaaatacagactagaactgttggaacaaatggctgagcaacagaggaacaagagacggtaatgaaaggtttgcatttaaaagagatattttgagtttaaagtgcatttgtgtaaaatgacatggttaaataaggggttgtcgttctaatatgatgtttgatttgtaaatcacttatattttcatctctacatgctaaatcaacaaggaaaataaatactaagagagttttttttttttttttttggtcataagtagcaagtgagagtatttatatattctgtaatagcccttttacttccctcattgatttcttcagtttttgatttaaggtagcatttaatgttatagatatgcccattggattatcccatatatagtaacaaatataaaagtattttttgccatatgaaatggtatgcacacacacatacatgcaaaaaaaattgtatcctataaatttaacatttccatcccaaatgagcatctcaaaaccaactgtccctcttcattttctattaatagcccaataatggagcctca

SEQ ID NO: 45284 - DNA, 1078 bp, Homo sapiens
aaatacttcgaaagagtggctttatacaacttgttatatacagttgtctgttggtaaccatgggacattggttccatgatctcctgtgaatacccaaatccatggatgctcaagttcctgatataaaattggtaaagtgttcgcatataacctacacacatcttcctgtatactttaagtcatctctagattacttgtaatacctaatacagtgaaaatgctatgtaaatagttgtaatcttgtattaattagggaacaatgacaagaaaaaaagacttttcacatgttcagtgcagatgcaagcatccatttttttttgttttttaatgtttttgaattgtggttgattgaatccacagatgtggaacccgcagttacaaagggctgttgtatatattaggatggtctttgtttagcgtttagttaagcagaataaaagtagatcaaagatacacacttcatgttctttaggtgttatgtattgtaggaatagatgagtgatagaatcggaagattggatgttgagttagaattctcgtgtgttgcaaaaattttctcccattctgtaggttgcctgttcactctgatggtagtttcttttgccatgcagaagctctttagtttaattagatcccatttgtcaattttggcttttgttgccattgcttttggtgttttagacatgaagtccttgcccatgcctatgtcctgaatggtattgcctaggttttcttctagggtttttatggttttagatctaacatttaagtctttaatccatcttgaattaatttttgtttaaggtgtaaggaaggtatccagtttcagctttctgcatatggctagccagttttcccagcaccatttattaaatagggaatcctttccccatttcttatttttgtcaggtttgtcaaagatcagatagttgtagatgtgcggcattaccagaatctacaatgaactcaaacaaatttagaagaaaaaaacaaccccatcaaaaagtaggcaaaggatatgaacagacacttctcaaacgaagacatttatgcaaccaacagacacatgaaaaaatgc

SEQ ID NO: 45285 - DNA, 1026 bp, Homo sapiens
acacgtaccctaaaatttaaagtatagtaataaaagaattcttatgtattatgcctttgcttgttaaatattggtttttttgaagatatatttgaggcccactttaatttattttaatttaattaattaattttttcgagacagagtttcactctgtcacccaggctggagtgcaatggcaccatcttggctcactgcaacctctgcctccaggttcaagcaattctcctgcctcagcctcccaagtaactgggatttataggcatgcaccaccacacccggctaatttttgtatttttattagagacggggtttcaccatgttggtcaggctggtctcaaactcctgacctcaggtgtcccacccacctcagcctcccaaagtgctgggattacaggtgtgagccactgtgcccagcctactttaattttaatagctctttttttcttcccaaaagatttgttcctttcctatcttcacctcatgaataattttctcacagttttgaaagagtgaaactcttattactttctttatcaatgaaatgattttagatgatgcctagctaacatttcttattttaataggtaagtgtttacttgaaaatatattagaaaaacactagttttccatttatgaatagtgctataatattttcttttaaactacaggtattaaagtgaaggcattagtccaggcatttaatggaaagtgctgtaataataaacaaacccaaattcttagaagcttaaggcctctcttgttaggcatccacttttgtcccactctgatgctgctgtttgggtggttctcctccaagaagtgactcagggatccattgtttcattccttcattttagagtccttttcttcttgtccagggacaaattgaggattttgttggggcctggcctggatgtggaggaagatcatttttgccttcattccattgttcagacctagttataggttctaacctaactgcttgggaggctgggaagtttaactttctttatgctcagaaga

SEQ ID NO: 45286 - DNA, 1030 bp, Homo sapiens
tttctttcttttttttttgtttttgttttgagacagagtctctctgtgtcgcccaggttggagtgcagtggcacaatctcggctcactgcaacctccgcctcccgggttcaagtgattctcctgcctcagccttccaagtatctgggactgactacaggcacacaccaccacacctggctaatttttgtatttttagtagagacggggtttcaccatactggccaggctggtctcgaactcctgaggtgatctgcccacctcagcctccgaaagtgctgggattacaggcatgagccaccgtgcccagcccccttttctaattttttaatgtcgatgcttagactatgatttgagaccttacttattttctgtgcatttaagtgtgctacacatttccctctgagtactgttttagctgtacatcacaaatttttatgtgttgttttaattttcattcagttttctgattttcattgtgacttttctttgacccccattagttatttggaagtggacttaaaaattttccaagtatcaggggattttcctgagagctttcttttattcaattctagtttgtattctgttttgtaagagaatatacttttcttttttttttttttttttgagacaaggtctcactctgtcacccaggctgtaatgcaatggcacggtcatgcctcactgcagtctcaacctccctggctaaagtgatcttcccgcctcagctcccccaagtagcaaggactacagacacatgctaccatgcccagctaattacaaaattttttttagagacagggtctcacttttttgcccagctggtctcaaactcctggcctcaaatgatcctcccacctcagcctcccgaagtgttgagattacaggcatgagccactgcgcccagctggagagaatatacttttaatgacttcagtgtttttaagtttgtgagatttgttttatgagccatcagttagaattttactctataagtaagtgtatatattttaaattaggttaattttg

SEQ ID NO: 45287 - DNA, 1033 bp, Homo sapiens
ctaatatattcatctattaggcagagaatgcatctttctagatatttgtaagttattagaaaatcaatagattttttccaaatgatttgatattattacagattgtaaataaataaaaattagatttaagataatcacagtttacaattatttgccccatttatgtacataagtaaatggcatttaacatagtagaactgcccagactattcgcaaaggaagacacttgaacatccagtgtttatgaagcaaacagacttactcccatactgggggtaccctgggctgagtcctagggatggagcctgagatgaatgtgagatacttgctcatgagggactcacagtttcttctttccctacctccctccccttcacactcacacttagataccagtgtcagattaatcttatggcctggttaatcctcctttgatatgacttttcacctgctattcttctttactcaaaatctggtggtagcttttctttgcctacagaaattatctcaactcttgaacctaacatttaaggttttataatctaattccaaactcttaaatagatgccctcaaacatatcttctttttaatcctaattattcttgactcttaaataaggcagtgacgtaatggatatagcctttaaggatgattgatattaggctgggtgtggtggctcacacctctaatgccagcactttgggaggccaaggtgggcagatctcttgagcacaggagtttgagactagcctgggcaacatgatgaaaccccatttctacaaaaaattagccaggcattgtagtgtgtgcctgtcaccccagctactcgggaggctgaggtgggaggattgcttgagcccaggaggcaaaggttgcagtgagccaagatatgccactttattcttgcctgggtgacagagtgaaaaaaggatgattgatgtgacatcactgtttaagatacaataatagaggattaaaaagagtggaagcagggatattttactagtgtgggtgacagtggaaatgggtgga

SEQ ID NO: 45288 - DNA, 1034 bp, Homo sapiens
agttgcactcccccaagaatatcgcttctgaaattcctatattataaaaaatgtacttgtgggtcctaatgacgttcacaattatgatccatgtatgtgtgtatatataaaatgttaaaatatctttcataaaattgtctctctgagcagtttcactttattattagtcaggttgtgttttaatgtttagtcttttgttcttattcctgtcttgtgttttacttatcaatgggaatttgcagaggagaaaaaaaatgtaattatggaattatcagaaatgagaaaacagcttcgtagtgaagagaggcgtctacaagagcgattgctacacatggacagtgatgatgaaattcctatcaggcaagtttagaattgcagtttttgtgttcgcttgagttcttttatcttacttcacctatccagtaattttgtagtttgggaacaggactaattcatcttacttaaaatctccttactttccttttctttgtcttttacaaaatcagctgtagaaatttagttctcaaggggattcatgtaggaatggaaatttccgggttggaataattacagacagtagttgcattttagaactgttttttatattttccattaataacgtagctttctgaaatactttttttcaacaaaatcacgtacgggctaccgaacatttctgatcatttttgccaggagtcataaatttcatgaagcagtgttcttcaaacttcagtttgcactgttttagtaggttgtaaaatcaacatagtgggtaactaccacattttctttctttctctttttaaaaataaactttctattttggggtaattttgattataaaaaagttgcaggctgggtgcagttgctcacgcctgtaatcccagcacttttgggaggccaaggtgggcggatcacgaggtcaggagatcgagaccatcctgtctaacacagtgaaaccccgtctctactaaaaatacaaaaaattaactgggtgtggtggcacgcccctgtggtcccagctactcaggagg

SEQ ID NO: 45289 - DNA, 1035 bp, Homo sapiens
gtattccttatgttggtaagtttgtgaaaagacacttattaaagaatattaatttcatattctttagttttgtggctattttactgtcctttgactttagtgatgtttcactatttctatcatttccttgattttgaaattaggttactcatgttacttacagtgaagttttacaaaatcccatttgaaaacaacatttaacttagttatataacatattttttataccagattcagaaacacgagttgatctgaaatttatgtacctggatcctccaagagatcatcacaccttagagattcagcagcaagccctgctaagagagcagcagaagaggctgaacagaataaaaatgcaggaaggtgccaaaggtaagaaataatcattgctgtgtcaaatagtatcagcacgctgtttttccgtaggctttctgcatctcttctattgatttcattcccaggcatcctcctttcactggcagccccatgctcacagggtccgtttggtctgtagtaccagaaaagaacaagtatgagagagagctctgagtggctccactagggtggtgtattcatgcatgagaggggcccagtcattcactgtagccaggaggactgaatactttgaccaggccaggtgacgtctgcatcaggaactaggaaccaaaggaaggagtgtcaggcagacatatcagtgccctgtcatgatgtgtcgggcatttgcctactgtgccatgtcaggcatttgtctactgtggtgtgagtgtgtttaagttttgatgtggcgtaaaatctgtaaagcatcagactggactatgaatatgttttcgtataatcaactaactgaaagatacttagtggttactaggagtgcaggtactggcctatatccaggggatatggtgatgagtgacatatgctgctgctcttgaggaggttatattttgttggagaagtgtgatgctaaagaagtacaactgtgatgaatatcgcacagaagaaatctaggatgctgttgggttggggtgggtgggc

SEQ ID NO: 45290 - DNA, 1167 bp, Homo sapiens
tctgtaataattagtgatgttggacatctttacatgtgcttattgactaattgtacatcatttttgaagaaatacctatttaagacctttgctaatttttaaaatcagagtttttttgttattgagttgtgggagttctttattatctattctggatattaccccttatcagatacatgatttgcaaatgttttctgcatagtgggttgccttttcactgtgttgattgtgtcctttgatacataggagcttttaattttgatacagtccaatttatcttttcttttgttgcctgtgcttttggtgtcacatctaagacatcgttgccaaatccaataccatgaagctttcctcatatgcttgcttctaagagttttatctataggtttagctcttaatgtttagatgcctaaccacagagtgtcaaaatacatgtcagaaagcaaaagaatggcaaggagaaatagatgaatccactgttacagttggagatttttaacacctctctatcagaaatggacagagacagaaaatcagtaaggacgtagttgagttcagcaacaccatcaaccaactggatataatggatgtcgaaagacaacttcattaacaacagcagaacccatattcttctcagggtcacatggaacattcaccaggacagattacaatctgggcaagaaaacaaaccttaacagatgtaaaagaagataaatcacacaatatctgtccccagaccacaatggaaataaactagaaatcaataacagaaagatagctggaaaaatctccaaatactttggagattaaatgccacatttctaaataacgcataggtcagagaaaaaatatgaaaatacattttaaaatactttgatctaaatgaaaatgaaaatacaacttctcaatttgtaggaggtagcagaaataatgcttgtctttctttctactttcctaatgtatgcattcagttaaatgtaaaatgccaaactctaaaactcacagaagataccaacagaaaatctagacgaccttggatatggtgatgacttttagataaaaaaccaaagccacaatttatgaaagaaataattgataagccagactatgtaaaaaattgggaattttttttttttttttttttttttttttagacaaagtcttgct

SEQ ID NO: 45291 - DNA, 1022 bp, Homo sapiens
aataaataaaagtaaaatacagatagaagttgcgtacaatcaatcagattcaattaaagaatgaagcaagagctacctcttcattgactggacacggccttgttagattaggtgttttaagaatggaagtaatctcatgccaactagtgttttcccaaaataacttaataatttccttatagcagtgttgtaggttgaagagtattccccaaaccttgctttaaaaaaaataaaaagaaaaaagaaagaaattttatgtgtagccattaggcttctcctgaggtaacagttacaaaataagactacctacattcctcctgttgactttgttttatggagaggtgcctttgatatgcttagaatccctctggttgctagtgccatggagtcagcttactcagttgatcattttttgttttacaaaattggcctttgtgggcccactctcctccctctaaaatagggtggggtggggtgagtctaaccaaaacaaacaaacagtagagttcaggatatgagactgtggggaaatgctgagttgtaatgagttggactacaagagacctgcgcttatgtctcctgcctgccacctgtgttacctgagccacgtgtcccttgcctcctgtagatgatgagagttcactggttgaccctgatgacatcatgaaacacataggggatgacggatcaaactctgtagcaactgagccctggctccgccctggcacttcagaaacgctgaaacgtttcatggcagagcagctgaaccaggagcagcagcagattcctggaaaaccaggcactttcacttggcagggcctgtcgactgcacatggttaaaataaacctgtactggacccagtagtgccttttaaggtgaaaggaatggtaaatctgtacctttaatatgtcctacttttggcccctacctgaaagttactttttttccatcatctgtatataaaattatttttatcatgatgtatattatgtacataaataaaaggccatgattattgatt

SEQ ID NO: 45292 - DNA, 1044 bp, Homo sapiens
ctaaaatctttcctatttctgagccctctctctcctcaattcccacactttggcctttaaggaaagagcatcttcccccactgccatccccaagacagcccatgagcattgcctttcttctctaagctaaggtatgggtctatctgcatcttctctgtagttgcccccaggcacacaccgctgtttgaacaaagctctgtgtcttcagctggctactctttccatggtgggctgtgcttcctcaggcctctgcctttgttcttcctggggccttccttttgtacctggtggattcctactgggctttcaaggctcagttagccccttcttcccaggtgctccttgctttgtatccactctaccctgcatttccttcttccatagtacccaaagtagttgatgtgtgcatttgtttactttggtcctcattctgttagacctccttgaggacagggacataccaccttgtgtgcctgtgctttccataattgtgtgcagtgcttgtgacattgtaggtcctcaataaatgcttgctgagtgcatgcatgaatcaatgagttgacccatcttctatcctcccactccatttttaaggatagtgcctcaatcatcctgaacattttgatttcctgttttcttccatttggtcaaaatagatagtagaattttcagttttgctcaggcacatatgaatttatgcagtcaaaaatttcaaattaaacatgtggtacctgcctttaaaacagaaacatgatttaaatcaggtattgaggtattaaagactttgcatgcactattgtttcatatattttaaatttttgtttgagatcatggataggttacactatctagattaattatttttaggtcacagataaaatggtagagagtgacataatttgcttgaatttatgttcttgttttgcttgggaaatgaaattttgtgctttattaaaatattttcaaacatttcttctaaataaatgattacatgaacctgacatccagtatttaacatccaaagtctggacaatagtaagttac

SEQ ID NO: 45293 - DNA, 1031 bp, Homo sapiens
gcaggacttgagggaagtggggtgtgtgaagactgaagaggtcgctggatctggcagttagaatgtcattggggttttagcttcagtagagcgtgtgagcaaaagccagactgtcagaaccagttgagacacgagtggaagctgaggatgtgaaggatgatggataaactattcaaggagtttggtggtaactgcgaggagagaaggggatgattttgtctagggatgggtaaggcagatgagcctagccaagggtagagagacaataaaaagggaactaaagcagtgaaaacagaaagtggcagaaggcaaatggcatctttgggggaagcatagcaagcacccccatggcactgggagataagacaaggcaaaattttctgaaattttctgagccatcttgctgtgtaacatacccatagtaaaacatagtaaaactaagaatgggcaagctgtcacttgtgtattttacaaattctgctgcttctccagtgtacagctagtggaactgcctgggatggtctttgtggccccttgtgaacacataccagaggctctccctcccacactgggacagtgaggtgaactgcatggcacagaatctgatgaactggtttaaaatcctcgcactgaaacttacaaactctctctttgggcaaacaacacagcctctgtatgtctcagtttcatatttggaaaacacatttgataatacctcacagggctggcctgaaattcaaatcagcttctgtaggtaaagtcctgataggtaggaagtgtttcttccttttcttttctttttaattaattaattaattaattaatttattgatctcactctatcgcccaggctggagtgcagtggcgcgatcttggctcactgcaaccttccctcttccgggttcaagcgattctcctgcctcagcctcctgagtagctgggactacaggcacatgccacaatgcccagctaactttttctaatttagtagagacggggtttcaccgtgttgtccaggctggtctcaaact

SEQ ID NO: 45294 - DNA, 1001 bp, Homo sapiens
tattcacaaaactcaaggaaacacttaacttgtgtttaccagcttattgtaaaggatattacaaaggatacagataaacagccagatgaatggatggatagggcgaggtatgagggaaggggtatggagtttccatgcccttatcaggcacactgccctccaggaacctccatgtgttcagctctccagaagcttccagaacccagtcttttggggtttatatggaggcttcattacataggcatgattgattacatcactggccattggtgatcaacccaaccttcagctctcacacctccttgcaatttgggaggtgggactgaaagttccaatcctctaatcatgccttaatctttctggtgactagactccatcctgaagctacctggaggtcccagccaccagtcatctcattagcatacaaaagacattcttatcactccagagattccaggggttttaggagctgtatgtcaggaaatggggatgaaaaccaaatatatattttacaaaattgcatggcccaaggcagatttccatatctgcatttaatccatcaggaacaagacaatttgcaacaatttgcaaagaacgatctgcaggctttgactgtataggaaaagaagtgtagactagaccagaaaagacacaattcccagggggtcctgtagctccctggggtcacatggctatgattttctctttactgagggtaggcaaggtgtcctctttttttgttttccaagaactaaggcataataggtggttaatagatgttttgaggaatggagtaatgaatacatgaatccatcttctctcagctgttcagtttgtgaggaattttcaaatccttaattaagaatagatacatctatatagaagcaagctagaagtgtaaaacaagccttcaatatctattatttagagttgattgtatgtacttatgtgtttaggctaactcagtactaaagcatttttagtttttacgttggagttca

SEQ ID NO: 45295 - DNA, 1030 bp, Homo sapiens
aaggagatttatttggctcatagttctgcaggctgcacaagaagcatggtgctagcatctgcatccggtgagggcctcaggcctcttccactcattgtggaaggtgaagaggagtcagcatgtgcagagatcacatggcaagcaaggaagcaaaggagagatggggcaatgcaggctcttttttaacaacgaactctagcagaaactaatataactcactcattactgcaaggatggcaccaagacattcatgagagatttgctcccatgacccaaacacctccctttagacctgtcctccaacactgaggatcaaatgtcaacaagaggtttgcggggacaaacatccaaactatagaaatacgtaaaaatttcccacaattattttaaagttcttgtctggtaacttcaagatctacatcatctattgatcttctatttttttcatgattattaggcaaatatttctatttctttgcatgtcaagtaattctatagcagacattgtgtatagaagaactgtagagacttcagatagctgatcaacttaactcataatcaaggattgaactaggcttgaaatggggcagtcttagtaaggttttttgccacacttttctttccttaagtatgacccacagcctgctgtgtccgttttcgtatccctgaaaggaaggagattcagtcctgctctttagtcctgatttttggtctcaaaatctggcagattcattaaggagagacctactatgagcctgaggcaggcccactccctctagtttgactttgtttcttaagcaccaccagattatgggaaattttactttaactttcagaaaactttgcctagttccccagcctcccatgcgcgttccatgcatttagaactctctacgtttccaatctgtcacatagccctacatggctgccaaaagctgaaatgccttctatttcccttagtagcattcttttggatgggccaagccccatgttcagtgtgaacccagaattagcaaatgtccccaggaaa

SEQ ID NO: 45296 - DNA, 1045 bp, Homo sapiens
tgcttgatcccaggagttggaggtagcagtgggccaagatcatgccactgcactccagcctgggcaacagagcaagactccatctcaaaaaaaaaaagaaaggatcagaagtcaggcagtgttgtcctttcactctgcctacatcctatcctaagtgaatttacctctctcatctcttcccctagcctctcactacgtattttcaagtgatttaataaaaccatgtgatttgaacattttaatttggtctgtgagtgattctgttccatgactgctgggagagtttgcatggttaatatatttgggagtagtgttgcacaaaggtaatttcccatgtgacagtaaaattaagaaaaaatatattaatcactatataaaaaggcaaagtctcaattatgttccataaaaaatctaatcattcaatttacaagttaaacaaattaccatagaaaattaatagtaaatgcttgagcaaaaataaatcaagcaaacatcaatcaaagaaagcatgtttgtaatgtggattgataaacttaagtactagcaaattaactttaagagttcagcaattcttaaatagaaagcccataaataaatccacccacatacagtaaagtgatttttgacaaagatgttaagagcacacaatggaaaaaggatcgtctcttcaataaatggtcttgagaaaactggatatcaatatgcagaagaatgaaattggacccctatgacatacgatatgcaaaaataactcagaatggataaggcttaaagataagacctgaattgtaaaattgctcgaagaaaacataaggaaaaatctgatattttcccttgacattagtctgagcaatgatttttttggatatgacctcaaaaacaaagacaacaaaaacaaaaataaacaagtgagcgcatgtcaaactgatcttctgtagagcaaagggaacaatcaacagagtgaaaagacaacctacgaaataggataatatatttgcaaaccatacatataaaaaaggggttaatatcctaaacatctaagaaa

SEQ ID NO: 45297 - DNA, 1030 bp, Homo sapiens
attcagaataatgacactgaattgttcaggttcgaggtggcagcggaggctagaactgacctgcttggaatctgctctctctcgatgtccctcctgacatgcgccctgcttccgttcctcttaacaaggtgaatggccttcattccaaggcaacacagtcaggttttgacactccatggggaacaaagggaaaatcagcatgactagccccattctcttcactcttaatcccagagatagtgaatgcccccctcctaccacatctttgtgccaggtcacctaaaggttgtttggtggagtcaatgtgggtgcatgaggtaagtcaacagagaaaagagatccaaaggttggggttagaatattggccgccaccactttctagttgtgtcttctcaaataggtcacttactttctcctgagtctcaggttttctatctctaaaatagagaaaattaacctcacccttgtgaggattaagtgatattatacatgtaatgtactaaagtgagactgagattttctctagtgtgcgaatattgggtgttattattattccaagccatcttacctgctgttttcattcctatgaagccaattagaattaaaatgggctgaggccgggcacggtggctgatgcctataatcccaacactttgggagcccgaggcgggcagatcatctgaggtcaggagtttcagaccagcctggccgacatagtcatagtgaaaccccatctctactaaaaatacaaaattagccaggcgtggtggtgggcacctgtaattccagctacttgggaggctgagaccggggaatcacttgaacccaggaggcagaggttgcagtgagtcaagattttaccattgcactccagcctgggcaaaaagggcgaaactccatctcaaaataaataaataaatataaaaagaataaaaatgggctggaatcccagagacttggcatcacttcttgactatgtgaacacaacaaccagcggggactaattaagacaacatggacatatgtgttt

SEQ ID NO: 45298 - DNA, 1035 bp, Homo sapiens
agctgggactataggcgtgtgccaccatgcccagctaatttttgtatttttagtagagacggggtttcaccatgttgtccaggctggtcttgaactcctgtcctcaggcaattcacctgcctcagcctcccaaagtgctgaaattacaggcttgagctactgtgcccggccgttttttttttttttttttttctgtatttttagtagagagagggttttgccacactggccaggctggtcttgaacccctgacctcagacaatccagcctccttggcctcccaaagtgctgggattacaggcgtgagccaccacacccggcctcaagaataaaattagccatattttcctgtctgatagaagatggagcacctcttacgcttccacttggctgtggattgtgaattcactagccgattattttgcttctctaggcattaagcagtcaactcttcatttttaaatgctagaggcagagatcatccaggtagatggataagccttaaaccatttggatttaagacagatatacatacagacagacactcaaatgctactgattcccaaactttgcaaagttacgaaaagttatttattttggcaacactttccccagcaataattctatatagcatatagttatatgttaatggagttgtctgtcagtttctgagcccaggctgtagtgcagtagcatgatggcatgatctcagctcactgcagccccgacctcctgggctcaagtgatcttcccacctcagcctccctccaagtagctgggaccacaggcatgtgccagcatgcttagatgtatataccacaggcatgtgccagcatgcttagctatatatatatatatatatatatatatatatatatatatatatatatatatatatatatatgttttttttttttttggagagacagggtttcaccatgttgcccaggctgttcttgaactcctgggctcaagcaatccacctgccttggcctcctaaagtactgggattgtaggtgtgatccaccacaccca

SEQ ID NO: 45299 - DNA, 1050 bp, Homo sapiens
attccctttgaaaactggcacaagaaagggatgccctctctcaccactcctattcaacatagtgttggaagttctggccagggcaattaggcaggagaaggaaataaagggtattcaattaggaaaagaggaagtcaaattgtccctatttgcagatgacatgattgtatatctagaaaccccatcgtctcagccccaaatctccttaagctgataggcaacttcagcaaagtctcaggatacaaaataaatatgcaaaaatcacaagcattcttatacaccaataacagacaaacagagagctaaatcttgagtgaactcccattcacgattgcttcaaagagaataaaatacctaggaatccaacttacaagggacgtgaaggacctcttcaaggagaactacaaaccactgctcaatgaaataaaagaggatacaaagaaatggaagaacattccatgctcatggtttagtcttgggatggtgtatgtgtcaaggaatttatccatttcttctagattttctagtttgtttgcgtggaagtgtttatagtattctctgatggtagtttgtatttctgtgggattggtggtgatatcccctttgtcattttttattgtgtctattttattcttctctcttttcttctttattagtcttgctagcaatctatcaatttcgttgatcttttcaaaaaaccagctcctggattcattgatttttttgaaggtgtctttgtgtctctatctccttcagttctgctctgatcttagttatttcttgccttctgctagcttttgaatttgtttgctcttgcttctctagttcttttacttgtgatgttagggtgtcaatttcagatctctcctgctttctcttgtgggcatttagtgctataaatttccctctacacactgttttaaatgtgtgccagagattctggtatgttgtgtctttgttcttgttggtttcaaagaacatctttatttctgccttcatttcggtatgtacccagcagtcattcaggagcacgttgttcactttccatgt

SEQ ID NO: 45300 - DNA, 1106 bp, Homo sapiens
aagctgttttattcaacctgcaaagaacttggaaaaatttgacattaaaatctaggccaggctgggtgcagtggcttatgcctacaatcctagcaatttgggaggctgaggcaggaggattacgtgaggccaggagtttgacagcagcctgggcaatatagtgaggccccatctctacaagaaatagaaacattagctggacatgacggcatgtgcctgtagttgcagctgcctggagggataatgtgggaggattgtttgagcctgggaggttgaggctgcagtgagcaataattgtactactgcactgcagcctgggtgacagacagagaccctgtctcaaaaaaaaaaaaaaaaaaaaaaaaatctaggccagcattcttgaacagtaacaagtccgaagagcaagaggcagttatggagaatgtccgatttacaacaatcctcaccactctccgttggctcccaacacatactgtcactttccttatttcttgacttggctggggccttttctgggtgcaacattccctggctctgatgggcatttgacctgggatccatgttaaatgatcaatcaacatttttaaaatgaagacattttttagattagaataaataattggaagaaaagtcttttcaaaagaggggagaacacggcttttttggaacaagagtgagttggggtataatttttttcccagttattatatcccaagccagagtcattcattttcatgatttaaaatgtctccaaatagttctctacatttttccaaggccaaaatagttgctgtgtttattcaaaccactccatgcccatctaaaatatgtttgataaacgtatagtaagctagattgatcttggtgaaggaaggcagaactgctacttacaggtgccacaggatatgcgttcagagtttatatacagctaattacagatatatccaatttaaggtgctcctaacaatttgaaaacattctatgataattgatttataacaaaacactggacgctaatgaaataactcagatttcatcaccttatttccactagaatcttcatcttgtctgcccactgcatccatgattgctgtttggctgct

SEQ ID NO: 45301 - DNA, 1049 bp, Homo sapiens
acacattataaattttttttttagatttattaggttgaaaattgaacaggaaaggtaacttttatcattgtgaaatttctgattaatacaaaaaacttttgtgctaggtcccataacaaatgaaagaccaaggagcagaaacatgggggcaggtaccctttaaaaaaaaatctatggaaggatctggcaagatggccgaatataaacagctccggtctgcaactcccagtgagaccaacacagaaggcaggtgatttctgcatttccaactgagtggcacctggaaccccagcgagacaaaaactgttcacactcctggaaagggggctgaagccagggatccaagtggtctcgctcagcgggtcccactcccagggagtccagcaagctaagaaccactggcttgaaattcttgctgccagcacagcagtctgaagtcaacctgggacaattgagcttggtgtgggcaggggtgtccaccattactgaggcttgagcaggtgggtttcccctcacagtgctaaggactgggtagaactcaacacagctgtagccagactgcctcaccagattcctcttcactgggcagggcatctctgaaagaaaggcagcagcccagtcaggggtttatagataaaactcccatttccctgggaccgggcaaccgggggaagggatggctgtgggtgcagtttcagtggacttaaacgttcctgcctgccagctctgaagagagcagcagatcctgacaaggaggtttttccagcacagcacttgagctctgctaagggacagactgcctcctcaagtgggtccctaacccccacgcctcctgactgggagagacctcccaacagggttgacagacaccttatacaggaaagcttcagctgacatcagccctgtgcccctctaggacgaagcttccaaaggaacgaacaggcagcaatctttgctgttctacagcctccgctggtgatacccaggcaaatagggtctggaatggacctgcaacaaactgcagcagacttgcagaagaaaggcctgac

SEQ ID NO: 45302 - DNA, 1051 bp, Homo sapiens
ctcatcagcactgtattagactttttctatcctggtgttcataaaaatcctctgagaggcttatttaaaaagtagattcctaggtctactcccaaatattctgggttagtaggtctaagatgggccttatgaaccttcattttaataaacgaaccacagtaattatgattcaagcagccagagattccagtttaaaaactactactgtgtcatcaacaactgagtatttctaggttcactgtttttattttcaacttatttttaccctaaccatttgaaaagtaattgagatatactggtagacagtattcttggggaattaaagaaccccttgttgcaaatatttgttgtcagttggatgctcagtggaacccataaaactacatatctagctattcttgggggaaaaaaaccttacaggatctaactattgttttttgagatctgaactaaatttccatgtagatgtgactttttttccgtttaaaattaatgtttttctcaagctaaaatgaaaaatatggaaacatatttgtaagaggaactcacttaaaatgttactaatattcaaaaaccatactagagacacatacagatagttgttttccatgtgctttcattaaaacaatcctcttattatgttttgaaatcttgtaactctgcttttaaactaataacaaatatggcaaacctaccccttagggtatataagtacaatgtaagtttaaatatcacccaaatgaagagtaaataagagttaaagtatccaacgtgtttgtagctgtgctaatagagcttctaaggaagctctactcttgcatgaaccattaatgaaatagcctctcactggatccagtttgtcttaatctcagtatctgatttcttatgttctcctatttggtccatctgactttcaaactttctgtgcaaaataatttcccatcaggccagctgccttcctgaaaagccccactcagctcacttatatctaaggcaaggtttgctaagctattaagacgtcataaactcttgtgctggtttgacactgagt

SEQ ID NO: 45303 - DNA, 1052 bp, Homo sapiens
atccaaaaacaaaataagaatggaggtgtcttcctgagattgttctcctcatttccctgctgcctttttttttctttttagctcctctctgaaagaacattggaatcaaaaaggagctaataccattgagcaaaagggcaaagttacttcttttaaaagaaaagctcatttttcaccatggtaaccagcatatcatatgacatacgtgccacatggcccgtgaaaagtgaatcctttcataaatgtatttctatcagagcataatgagctttcatatgagtatagcaaggactagaataaggtgacaccttaggttgatttgggtcaaatcattcctgtgatgtcttgtaacaatttatttgcagtttgcaagaggtaacactagcatttcattttttaaaatgcttaatgaaagtgaaccataggctatgaacacaagatgaatgcattctattgagtcttagaaatggcacgttcccttttcctgtgtcacaaacaagcaaaaaatctgggattcattcgatttctcaggatgtgtatttgtagctccttacgtactccagttaaaacaaaaacaaaagttaaaaacacagctaagcatagtattaccatagccactgctttcttttaattatagtagctaaaacctttggttctgatttaaatttgacatttaacaaaggactaatgaagtaaaggaagaggaaatcctttgataagtatgcgtcacaccttgggagaggtaaaaatgaaaatatttcactcaacttttaaaaatcctttacccttttcacttggagacaccttttgttcagtcagctcttttttgttaactcctttgaaaatctcttgtaactgtagtacctcctaagtgtactttcccaatgctaagacactttatattcagttgatctagtttcttaggcattcggaggtttaataggtcccttaaggcgctgcgtagcttcaaatccgatgactcaaataagcacagatttctatagtcagacactgatctgcttctttcagggcatccaataggatattaattg

SEQ ID NO: 45304 - DNA, 1024 bp, Homo sapiens
tattagcattttgccttgtcatttagagaaaggggagaatcatgaaccatctgagtttagaaaaggaggcaaaattggaggcacaggcctttcatccagcagtaatattagaagttctggttacaaatgttatttgtttctttttggtggtaatatacacatgaaaaatgaatctttaaccccctttatgtgaagtttaaatcttgcattaactgctggatggtgggactcattacaacttgattgatgactgaacttccactgtgaagtgtttaaggggcaaatattcaggcaagatgagttgtcactatgttactggaaatacacctattatcctgtcaaggtaagtctaaactcttgaaataggtactaatgtggtttcttgacctgagtggcttgaaatgccagttcagtacagaacactctatcacaaaaacaatccattgacaatatcacccaagcagtatttcaacaagcctaagtgatgttggcagccaactaatgaggacatgaagtcatgaactgaagctccacaggcctgcacaaatttacacatgcattttaacttgctttgatcttcagaattgcaactcaagtttggtcagcaatcaagtagttgaaggcttatgcttctctagacacgttctatttctgttcactgtgtgcctgggttgcaatgggggagggcagtgagggggaagaaatcctggaaaagctttgttatcattcctgaaatgaaaagtattctatttagcttagaagtttgattcttgatactaataactgatattaggcagctccagccatttttaaaatctattgagagaacaaacctgagcatttaattctcagaacatcagaatcagtcactgagtggtctgttgtgattgtaccagcctaaatttggggaggtggcctcaagtttgtcttcattcctttttttcagggttgcatgataaaatcagtaagtagaattttgctgcagatgctactgaatcattgctagaattttgctgccctgcta

SEQ ID NO: 45305 - DNA, 1022 bp, Homo sapiens
tgcaataaaaataacactcataataatagcaaccaaaaaaatagatagcactttctataggcaaggcactgtcctaaatacttaaaaaatttagtaacgtattaatcctcacaactgactctatgatgtaaggtttattattagtctcattttaaaatgtggttacggaattcagacatcattaaattaaaaactgaatcattctaaaggaaaatgaaggcaaataactattataatgagtaaattcagaagacaagtggtttacgtaacatacaggattttggtaattaaaaacatataaaagcaagacaggcagcttatctcactgaaggggtaacagaaagacctcaggtgaaatccaatgagatcagatttgtcagaaaaaatgattttgtctccaatcagtaatgacctttcagcctgccctagggttgagggaacaccttcaaaacattgactttatcactgacctgatgaaaataatgggctcagtccatgaatcaagacatgtatgttgagattgctctaaatttatgaatcttggattgtagggagtagggagcactgaagaaaaggaaaaagaaaatctatgtgctatccattttgaaactgagacccatcttttaatcctcagaatgttattagtattttcttatagatttctgacaattatgcatatggatgatgttaaaatatcatttttaaagttgatcagtattacaagatagatacctgtattaattttgccaatacctttcacaaaaagtcttttgtaataaaaattatctaaacaagtctcttaaatgtagatagggtcaccgtattttcagatgctcccctgggaacagagttgactcactgctttcaagcttgcaactcttgggtatttgtgaccccagcacactaaagttcggtatccgaatctgccaacatctcccttgttattttaatcacctatgatgtttgtatcttgcaatatggacttccaatgatctgtattttctatgatgagaaagactccc

SEQ ID NO: 45306 - DNA, 1691 bp, Homo sapiens
tcagatcctcattgtctcccaccttgacagtttcaatgcctatatgattgcccatttcctctccctactcaaggcagttctgtgcagtgtgatcagattaatattccagaagtaagagtgtctgtagaaataagtacaaattatttggcttgccattcaaggacataaacaatataaatccaacctggctttaaggtatatctcccaggaattaatcatttgcctttgctccaggaaaattggatcaccccttggccctaaccacgtccagcctcagctacctctgtaccttcatcaccctcattagtttttaaagttctgcaagtttttaaatattacctctcccaaaacagctgagatgtgttacctctcacatgaagacttaattttccaactccaaatggatatgacctctctctcctttaaattcatctgttattatggatgcctctcccatagtgctcatattctgccttctattattttgtacctacataataaagttacggaatttcagagctgcaagaaaccttacagagtattcttatttgacagatgttttatgcatcctacagaattctaaacagggatggaggttgagtttttatctagcctgttgccttcactacagatactatcactcaccttcccaattttgtaccataatgtcttgcacaaaggcaatgcacattccatatttgttggataaattggatgcaaatacctcaacatggaaaaatgattgtagatgtacaaatactcttcttattaataatattgttgcaagttactaatactgttgtaagttaataatgttgagcattattacagcctgcaaaaccttgattctttgattggttcattcatccagcatttattgaacaactactctgtattaggcactgtgttgggttattgccttggagtacttacagattagcaacctgcttattatgagacttgtgattgaaccaaagagaaaaagagccttaccactgaaattatgataagaaaaattccatcacagccttaatatatgaaggagaatacagcagactgccagccataatgcctccatcttccatcctttcctgtatctagtttctctttcaatgtgactctgtagtttcttacttcaaaaggtgtagtgtatctgatttccccttgattctgagcttagccacatggattgccttggtcaatataatcttagcagttgtgctacaggcagaggcttgaaaatgcacttgcccgcctctgtttcctctcttacttcattgccatgatcacaagaacatactgacaatagcctgctggagaataagatagtgctgagttccccaaatcttttgagttgtaactgtcctgggttgtaacttttgagttgtaacatgtcctagacatgtgagttcagctaagtccaggacagatcagtcttggcagactcatgggctaaataaatggatattgcatcccactgtggttgaatcgttgtttgttatgcagcattttgtggcaatagataactgatacagtgagaggacaatcctcaatccttccctagcaaggaagtgacaattcattcaaatgtagtggtttcttgtttgtttaaatatctaaaggtggctagatccaatattcattgaatacacaaagatattctgaaaagtatattttgttacaaaattatt

SEQ ID NO: 45307 - DNA, 1107 bp, Homo sapiens
tgaggccattggaagcttttgatccagaatgggacatgatgaaagcagcatcgtatggacgtggattggtgaatcctatatgggctgctgtggcatggaacagctggtaaagcagagctgaggctgtcccatagtccaggtgggaggcagtgaggtattgaagggtaaggagaatgggtttgggagctacctcctgactctgagacctcatctataaagtgaggatgtgacctagttcacaaggtcatactgatgactaatgagataaaatacaataatgtttagcagagtgccatgccaggccctcagaaatgcacgagatagagtagcatagcgaggctctgaacctactgcctgggtttacattctggcttcactactatgggctgctgggttctgctgcacaatccttaacttctctgagctgcaccttcttccctggaagatggggagaattacagagcctgcctcaaaagctggttgtaaagattagatatattaagtgtccgatatgtgctcacaattgtatgccctctaccctcctgtgatagcctcagactgggagccaaagaaataaaggagcaaacatgcaacaattgagaagaacagatgggaatgacaactggttttatattaaagacaatgtgaaaaataagtcaaagacgaccctcaaaatggttacactggcagagaagggaaatcaggatattgaatgagtttggcttgggggacaaggctgtacaatgtgagtgatgttaaacttgaagaaacagtgtaacaaaaaattaaaaattttaagaatagaaaaaagacagctttagaatagaaaaaagacagtaggaatataaaaggcaacaaaaaaagacagctttttttctcttggaagctgataaattaaaaatttttaattttttactttttaaacttttttactaagaactaagacaaacgaacacattaacccaggcctacacagcaccaggatcatcaatgtcactgttttccatcttcacatcttgtccttactggaaggtcttcaggggcaataacatgcatagagctgtcacctcctaagataacaatgccttcttctggaacacctctgaa

SEQ ID NO: 45308 - DNA, 1080 bp, Homo sapiens
caattcatcatcgagtgttcggtaatgacctctcagaaattgtttcttgtcactgggtgataaataattttctaagactaatgtgggattgttcaccctatggtagaattacatatccttggtgatttgggttagaaacagagtcctgggcacaaaactcagagattaaacccacgtcatttttatccagatcaatacttagaattaaatgtatgacctaaatagccatcttaaaattattttattctccaggacaatggtcttcttccaagctggatggcatgaaataatgaggataggctgtctccacattcctgtagaattccctggagaaatctgattcacaggagagctcacctcatagcatcagttacctagggagctctgtgggaagtcacttgagaatgctactgagaataataaaaagcatcctctctcactgacaggaagttgataatgtcttcataaatatttggaatgaattaatatgattcaatttactctttaatgtggatggtctctgatagcaacatattggaatatctgtttctaaaaacaaagcaatttttagaaactcagttaatcaatacagtgtttttcatggtattttctcatgacttggtgagcattttttggaacagtgtgtttttctttcagctctgttgtcatcacccaatggaaattttagacagcctttgtgacaatagcagaaaattttccttgctaaaatgtaattttattttgtgggtatattatatttagcctattttcaagctggacctgtcatccttctcccccagtgagtggtgagaaagctgtctaaggagattccagcaagtatgctttcttggggtggacatgtggttttctcagtggggaggggtcacaacgatggaactcataaagggtaaaactgcagcaatgaaaatacaaaaataagccatagtctaagtagtgtgccgttaaccctaaggccacaaactcaattgtttcaaatagttaaagaattagttggttctttcaaactaaaattttgtttctgtaattttgttttgaccttatgcaagtgatggttctaca

SEQ ID NO: 45309 - DNA, 1048 bp, Homo sapiens
ttcattgcagcttccactcacatctcacatctcccatccttggcagagtgggccagagccaatgcacgggatcctgcagtcagcctatgactttacccatgacgtctgacgataaattcttctttcagacttggctctgtatttttaaaaaatgatagctacactttaacagcatttataaatgttgccattggggttggggtggaatctataccagctctgtcccatatgttcccaggactagaaacatggtatgggctatgtctcactcagccatgagcacctttcaggcagatgacgactcttagtcatattttatttttaatgaagtgcagtctacatccataaataaaagaaagaggacatgggctccaggtgaaaccatggatatgtcacttactagtattagaatgatggcctcagcctgttcatatataaaatgaggaccttgaattgcagctaaacattctgaaagatattttctagctgtagtatactatgactttaagaaacattaagacaattccttatgaaatgttagacactaaagttgcctgtccataatcgagttataaatgtggcaatattctaggcagttatggcccagagagaaaacacatgactacttgtgtgtgtcatctctaactgtgacctgtaccttccctagtatacgttgagtgtgttgcaaaagactgcgtgtgtttatctagagaataaatattcaggtggaatgccaatttccctttaaaagcacattctttgtttcaaaagactgtattggatggcagtttaaaagggatcgcagctagttaaatttagggtgttgaacaaattccaatccaagaataatccttggcgctgagcccatggcatttttatttgattctaaattggataaattgtaactcatttaaattacttgctttctgtattttttcttctgagacaggcaaccaaccaatggtattttttctgtctttcacaagacagtgaaattatgacatattgtatatatactatcacatttcctgtaagtttcacatattat

SEQ ID NO: 45310 - DNA, 1033 bp, Homo sapiens
atggggtttcaccatgttgcccaggctggccctgaactcctgggcttaagtgatcctcctgccttggccttctaaagaattgaaattacaggtgtgagccactgcacccagccaccatttacgtttaataaattgcaaaaagcctctttacccatgatagccaaatgagtaattatggtgaacaactcagattctgttttacagaaagaaattatttgatggagacttttatggggtgtggtactctccacacattcctataaattccataatccagctagtgtgtagaataccagaaaagaaaatttaatggaatagttttataaccctggctgaatgagatgcagaaagttaagacatggcataaattggataggctaattattctaacctcttgccatttatatgtgtgcatgtatgtgattgtcaaataagacagacttctgtatgagtatcaatcttaaaaatttcttcttttatagtcaatttgattgggaatccaaatttgtggctgtgtctaattcggtattccatagagctcctcttatcatcctctaatatatgtctacaatgaataactctccactgtgattggcatggcataaaccaaggcatccagacacaggcactaaagcatatcccataaaaagagttgatgatcaccaaacttcattatcttcctagaagctaaagctaatgcagcaaagtctataaagattatgatcaaactggctctttctatggaatgaactagaatctctccaaaggtgaactgcagaaaactccacctctccttatttctgcttccacgtcactgccttaaatctcaagtacgtgtgaaacttctgtgtgctgagcctgaggcctgggaacaactgggtgacaataaagtctagttaggagagacgagttgtagcatctgagacaatcggtgacagaacaatacatgataaagtgactgcactgtactatttagcactgtattacattttcacattcattttgcattattctataatttgaggttcaaaat

SEQ ID NO: 45311 - DNA, 1035 bp, Homo sapiens
tgtgccactgcactccagcctgggtgacagagtgagaccctgtctcaaaacaaacaacaataaaatttttctaataacattttattttctgtcttggcctccaaatttttaagttgacagtgttatagtggagcatcttgattgatttgagatagtttttatttgaaaatatctagaatttttattttttttttttttcatgcagccttttctcttaaaattgcctagagagcattttgtctatcaaatatatttacaaggaaagaccaccttcgtaacgctgataaaccaagcagatagctaatgtagctgctggcagtgtcataattattggtgaaaataacaacacagtgcccttcattggcctgtgaacagatacattagctatgactatcaaagaattacaaggcttaatttaatgctatttgtttaaaatggcttaatgcatttcttcctatccttctacctccacgcacgttttttaaggcagcggcaaaagtagtagaaagcaaaaggacaagaacaataacttctcaagataaacctagtggtaatgatgttgaaatggaaactgaagctaatttggatacaagaaaaaggtttgtaatttaatcaatttgtatattttttgttttatgaatgttctgtctttatgtaaaattgatatgtctttttattaaaaataattattgagtagcatgttatcttgctgatgattaacatttaggtatttgaagtactgtagagttatttcatgacttgtgcaaattatatatgctaagcaaaagtagagaataagaaaatattacagtttaaataatgtggatagtttaccattcttggggtatgcttaggaacaagggtgaggttggactcctgtgccccttagttgtgtttagattctacatgttctcattatgtgattcatgtttcactgtactaagagtctagtattttaagatattattcatatatcttctctaagcataagctcactgcttcatctggtgctcaactgaagaaatagtgatttgc

SEQ ID NO: 45312 - DNA, 1057 bp, Homo sapiens
tcttgtcttttcttttttttgcctgcttcttctgagacatcaaaaaacatcttgatttctgcggagtagatgagatggagaaagatgagacaggcaacagaaatcttaagaggccacaggttaagatggggtactaagcagggagagcaccaaaggaagtaggccaaagtattaatagaagatcctagaacagattaaggcaaatcatttacctgttttccattgccttactatctttctggagccaattacaaactttcctgttttattttaggtctcacaagaatcttttcttatctaagttgcaacatggaacccagcaacaagaccttaataagaaagaaagaagagtaggaactcctcaaagtgagtactgttataacagttttagaaggggagaattgatgtgtcctcaaacaatccagccattgactttaccactatagcaaaaaaacacacacttcagaaaactgaagcacaaagtcttgacttcatagagttaattgagatagtgtttaatttagaaagttagctattttgactgtctagcttagggttcttttgctatggtggtacactgcttttctaccttcactgtgttcagcaacttcaagtatagtcatatgccacatcatgacatttcagtcaaagacagactgcattgcatataggatggtggtcctgtaataatgtaatggagcacatatggaaacttgataatgtggcacttgatattggcattgcatatcaagtaggggaaatgattgataattagcaatggtactgggaaccgtgggttttctatatgaatatatatatatatatgtatgtttgtgtaagtgtactcttaataatgttcacataaggacaaaatcacccaacgccccatttctcagaacatatcccccttgtaaagcaatccgtgactgtagttacttttcagaaacattaagtacagttgattcttgttattcacagtagttacgtttaataaagtctgagagcgttgacttagcaaattacaagtttctttttggtatgtagtcatttaacaaat

SEQ ID NO: 45313 - DNA, 1778 bp, Homo sapiens
aattatcatttttcagtaattacagttctgtttcttttcagttacatatatttgtcttaccaaactgactatgaataagaaagaaggagtgaggaaaggattatgcttcttagtactcctaaaacattatcgtaagaaaatttcaacgatcctatgcaataaatatttttcctttttttttaaacagataatggaaagacaggttcagggatgtgaaatgatttatttaaagacatataaaagaatcaagactcaaaacactccccctctgatttcaaaggctgatctttgcactataccatactgcttccagatttgaaggaaaaagttaaacatgtactttttcttagaatagcttagaaaaggaatttcattataatcattaaaaatataattgctcttttttctttaatgtaaatcaatatttatgacattatttttctacttttaggtacaaaaaagaaaaaagaaagcagaagagccactgaaagcagaatacctgtttcaaagagtcagccggtaactcctgaaaaacatcgagctagaaaaagacaggtatttggttttttaaaattcgaataacgcttatggacattaaagttataacttgaataattgtgattatttctgttcaacctccccaaaattttgagtgtaaaatatttgccctttgccatcttttattttgccgtcttagataggtgactaatcagcctattcaaaatgaaatacttcacccatatttaaaaagtcttaagttgggtgttggtactgacatctgtttggaattattgtgatactatcataaaatctgtttattagatgtaaggtgggacttaactccacattataagctttgatgtttaaattttcctaacagggatccagtgtaaaaagagttttctttacttaaaaacaaagaaaagataccatttgatcacaaaattttattaaggtgggtcaatttagggcttgattcatttgcttcccctttcagtgactatagtcttgtgccatctgtccagtgtctgaaaccattattttatgtattttttgattgtctagttgttcacagcagatggataaatctggtctttgtttttgtggtgtgtgtgtgtgtgtgtgtgtgtgtgtgtgtgtgtgtgtgtgtgtttcccccttttttttgtagagatggtgtctcacaatgttgcccaggctggtcttgaattacttggctcgagtgatcctcccaccttgggctccaaaagtgctgggactgtaggcatgagctactgcacccagtcaggcccttgttttcttttgtggctggaaccgttttcttactcgaaggtgcctttttttttttttttttgacaagctaattgcaaatagttcatactgaggtgctgcagatagtgtcaagttgcacgctactcggaatatcttctgtgactcaaagttatgttacccttcatttctcccccagtgaacatagcaagcaacttctacttttcatttgcttcctacacatattacttgcctttgtgattcccttttttagccttgccatctctggcctttagtaggttgaggggagctcctgctgttgctgaccagagatttagggggtgtacctcagggtattttcattagaaaaacagatggcacacacttcctgagatctgtagacagagttgctttttcatacacctaagttgcactgattatttataccctttctacctacattatggttcaggttgtaaatttctcttaacttttttcagagtttggga

SEQ ID NO: 45314 - DNA, 1022 bp, Homo sapiens
agacgatagcttattctgtatgatgttttcaaaactctttcagtcacaggtaaaattaagcaaagactgaaaacattcagatcaagcaaaacaatcaaggcataatcaaccatgaaataacactatatcaagctaaagttactctttttcaatagaagaaaaaaataaaatacttaatgctaaacactgttagttttcagttaatctatactgacaacattactactttcctctaggttaggggtgagcaaaatttttctataaagagcaagatttataatatatttattactaatgtattttatgtatatttcacatacatagtttctgttacatattttaaatatattttttaaatgacttaaattttaatatggttcttagctccggggctgtagaaaaccagccttgggctgggttttggcagtggcttgctgtcccctgctatagatgatacatgggaaaatactgcttaaacatactgcacccaggaccccaaataggattcagaaaacattggtcatttcttgaaagaaaggggcttttgtattgtatcaaacgtcatctgtgcaccttattaaaaatactacagctcagataagaacaagaaaacaatgctgtatatgtgtatgaaatttgtctaaaccacaaactactttttaaagctgaataacgtatatggcaagtttttgaaagaacagaaatgcttaacttggagaccatggagttgataggctctttaaagagagtttatgtggcccccaaatttgtatatgaaattttagatactatacttttctgtggagtacgtctgtaagatttatatgaccccaaagattaataacccactgttgaagtgcttttaatcagtcaccccacacatgaaaaatttattaatgcatctcttggtttttgtcagttaatgacaagcagtgtagtgaggttttgtaggagtgaaggccgagtcaggcagtaatagatggtcataggaggctgtcagcctttgtctagcgattgaatag

SEQ ID NO: 45315 - DNA, 1063 bp, Homo sapiens
agaccaaacatgagaaaaacagactttttattcagagcttgcggtagcaaaggaatcagccacgatctcttgtgtttagcagactcagaggcagataggtttatagtggggggaaaggggcaaggttcaggaatgctctgcttggagggtgttggcatgaggaagctggaggctgatcagctcactgcaggtgtcttacaggattgctttggggaacctatttggctttctctgattggtcccatgttggaagagggagcaaaatgttgggatgatggcagtaactgagtaagtcttgaccattctgaatggatcactggggagattgtggtttggcttccaggagtggttgctgcagagggtctgggtgagagttctattgtcacagaagctcgtccattgtccgtgtgtatgcctagtcccagagttgtttccagtttctggctgctagacttttacatttcacaatgaagtgtgattttagaaataatatgaactcttgcctgccagaacaagggccagtgaattttaaaggaaggaagcacaatctagaactcgacagcaagggtcaaccatgaaaagttaggtatgaatattgttaattcctagagcaagaattttttcaaaaatatagatagatagccaatagaatactaaattactctatttggaatactaataaacccagaaacaaaaagtagtgaaacaaaaacaaaatcacagggacaaacagaagaaataaaatggtacacctaaatccaaccacatcaataattatatcaaatgttaacggtctaagccagaaggtgcgtggcaaacttcttctgtaaagagccagatagtacatattttaggctttgcgggccatacagtctgtatactctgcctcaaattagccataggcaatatataaatgagtgggtatggctgtgttccaataaaactatatttacaacaacaaacaggctggatttagccacaggttatagtttcctgacctttgctgtggaattctagagtgtgtttccttcctttaaaattcattggaccttgttctggcaag

SEQ ID NO: 45316 - DNA, 1033 bp, Homo sapiens
gcccggccacacctcacatacacacattgcactcacacatgtgcttctcctccccagttccttcagcatgtttatgccagtttttgttgaatcagtagtaagtgttcatattatgttaactctgtaattgttctttacacctgagctgtgtagtttctatgtacatgtcacttattcatctccaaattctccaaccaaattgaaaatctcagaacataatgaaagatgtaggccctccttcggattgcattgttttttggagccatccctgcccctgctcccaggtagtctggctgctctgcaggcctgctgcaagctgtcaggcttacattgcccttcgtctgcactctggggatcctcatttctctcccaggttgtgttccttattacctggaccctcttgcttggtttacactcctgtttagatagagcacctcctcctgtaccttcacagaaaaagcacagagaatggaaaactcatatcttgcatgtctgaaaaaatccttattctgccttacatttgaataataattttataggatatagaattttagtttggaaaacattttccttccgaattttaaaggcattgctctgttgtcttctagtttcaaatgttgctttacataaatattctgatgcaattctaattactgattatttgcacatgacctacttttttctctctggaatattttagattcttgggtatctgataatctggaatttcatggtaagatgccttgttgtgaacctttttttattttttatttttattttttgagataagttcttgctctgtcacctaggctggagtgcagtgatgtaatcacagcttgctgcagtcttgacctcttgggctcaagtgatccttctgcctcagcctcccaagtagctgagaccgcaagcacgcaccaccacacacagctgattttttaaacttttggtccattccaagatggccgaataagaacagctctggtctgcagctcccagcgtgattgacgcagaagacgggtgatttccgcatttc

SEQ ID NO: 45317 - DNA, 1557 bp, Homo sapiens
aaatatatggaaatatatgtgtagagtgtgcatacctgtatacatgttttaaagtgagaaacttttaaaagattataaaatagactgcaaggttcaaaacatagatccccttaaatgacacttccgtcaccaataatcggactgagttacagtaattttactttagcaaacagacatgtattctgtgtctcacgggccacctgctgaatgagaggactccagttgaaaggtcaagaacataaaaccacaagagctttttgagtgggtcttcaacttagttaaaataaaaataaaggacctgtgttccttgagaactggcccctaaattttctttctctacttcagagtgtggcaatgatgtgtttggggactttggccaaaattgaaggtttaggaaacattgaacatgacttgagaatatttagaatgtttacaaatgcatttggaaatatttatatcaccatctatataaaaataaaactgtgaacagctggacaagaacactggtctactcgccgaacttttttccaagttccttgacaccgaggattaccaattgcttgccaatggagagtctgatttctgaaacgatatttcgaaagtgttagttacactaaaagcataccgaagaaaggtctaatttacagaattaaaactcggagttaaaaaaaactgatcacagcctgagcaatatagtgaaaccccgtctctactatatatatatatatatagtttttttttttttctaattagccagacatggtggcacacgcctatggtcttgggaggctgggtccacaggtgcatgccaccacgtctggctaatttttataaagaaaaattatttgtagggatggagtttaactgtgttgccaagctgatctcaaactcctgggtgcaagggatcctcctgcctcggcctcctggctcacgctgggattagaaacatgacccactgcacccggttccccaattttttttttaatgatcacaaacagagtttcccttgtttagtttctgtcaaagcaagttttaattcattgctactttaggacaccctcatgttgacagagtaacttggggttactgtatttgcttttcccgttctatctgagcacaagtgctgcataaaggaaaatggctgactgttctatgtgtatttaaactgggaggtctgaactaaatgatctcttttactgctttccaactctgatttcataatgaaaaaacaatgagagagctgaaaagaacaaagccagattattaaaattattatttttaaagtcactgctacctcagccagggtttaaatactatatgggtacaaattaaattataaattcatttaaaaccaaaacatggatgaggtattcagaaaaatattatgtaaatattttctatttgatataaattccttacccactttattgttcttatggtgtgctcaatggaggccatgaggcactagtgactaataaacataaattctagttattaaatatgaaaacattctacaggaataataattgactggaaaggcccatattttacctttta

SEQ ID NO: 45318 - DNA, 1064 bp, Homo sapiens
ggttttagtaacttgaatatatctaacccatgacaatctgagaaaatttaatagcctcacctgagagttagatgaattttaagtaggaaacccctttacatttaagttttgtcttgagttgagaaatattaatagcaaattcatctaaaatttctgctttagttctttcagaaactaaaattaagcctctttcaattatggtaagtagtctatttgcatgtgtctaatccagatgtctgcctatatggataaatgtgcagatgacatgctatgtttgtttgcttgcttgtttttctatgctcagtaataagtagaagacatgattatggtgcagttacagccactggacctgggaaagaaagtcctaaatacccaggatgtttttggacccccaaactgtactatgctgaagttccactagggggtgtactggcagggtggatttgtatcttatttcctgcacatagaaccagtattttcctgagagaaagggtcttttgtaactaatctttggagtatgacaaaatctaatagtccttaagaaatagagaactatttcctgcctcagctgaatgggttaagttcaatattttgagcctgtaactccagagatcagattaaaatatgttaatctttcttatcagaagttggtatagtagttagctattcaaagaactaacacttctagattctatcaactgacctagaagctcctttaggctgagaccccatatagacataattggaaaataactcagaagatgggggtttctgattttttctaaagcatacagctggtccccataataggtagccttcagaaggttccctgtattgtgaattatcattctgttaagataccattgttcagagcctaggctgacagagcatggccttgggattcatttgccttgacatacctggctggccagttccagtcacctgcatccctgggtttatacaggcctatgccatccccacactggagtggatgcgaggggacgcaaaccttttcatgtggtctgaaggaatgctaacattttttacttgaagagcttccccag

SEQ ID NO: 45319 - DNA, 1053 bp, Homo sapiens
cttcaacatccttccatgcatagggcaatcctatggcttaaaattacccagccccaaatgtaatggtgctgagattgagaaacgctgttctagagcactggttcccaaactcagctacaaatgggaaccacctgagggacgttgcctcctgatgcctgattctcccattggagattctggtataattggtctgagaggtgacctgaacaccaggaggaaaagcttcccaggtgattctaatgtaccaaaccactgatttataggaaagttgccatctgcaatctttaaaatcctttaagaggttcacaaatacttatttttgttttttaacaatgcctatcccaatgtaggtacctcatagaccctcatatgtgttgagtgaattctaagttctaacagtgcatgtttaaaaacagaataagttttcaggtgtaatctcttgaatatatttacccttcatttatgtaaagattttaactttttaaagatttcacagtaagcaaactagaaagcagggaagaatttgaactatttacacttaggaattacaggggttgatgatggggacattgagagctgtgctgttggaacaggggctaagaagtctgccactgcagatggccggagcagtggctaagctcgcatgcatgtgtttatgcgtcatggaagtagttactggtcactagagcagaaccgaagcctctgccctttggaagatctgtctttattacaatttctgagaagcagtttgagtttggggcaaagcaaagagatcaatgacagcctgttgtttggcaagctatttggctgcaattttgtgggttattttcattattccataaagagttattaaatagggggaggggcctgaggctgaaggagatcatcaaacactcgtttgatcatctagggcccggcaggggaaagatgagggaaaacagcatttcagaaacactgttcagcattcattgtttaacacattgagcctccatggactcaagtaaaacggaagaaggatgattgtttcaaataatttgtaatttttttaataga

SEQ ID NO: 45320 - DNA, 1041 bp, Homo sapiens
tctgcctcccagtttcaagtgattctgctgtctcagcctcccaagtagctgggactacaggcatgcgccaccacgcccagctaatttttgtatttttagtagagacggggtttcaccatgttggtcaggatggtctccatctcttgacattgtgatccacctgcctcggcctcccaaagtgctgggattacaggcatgagccactgcacccagccttgaatttttaattttatctctgatatacttcattaagtgtctggagacctaattatcctaaaagatcatacattttctacctatgaattttgctgcatacagaaagtgccctttcctcaggaagttgctgtgtttcatttctttggatggactcttatctagaatacatagcagctctgcaaaggaacagtttttaaaaatgggaacttctacattgaaaagtccccatttttgtgccaactatgattagtgagaggaagaaatcttattctatggcatatgtatggaagggtgtaaagattcttttgaaaggtttattcacattgtagaacagcaaatgacatttttacagtatttttttgtaaagcaaactattttgtgccttgaatttggtatatgtgtattagtgaaacattgtaaaggtgaacttctacctctgtatctaaatgtataccatccacttgtaaatgactataaactattatgtgattgcttttttttttagaatgtcttgtttaaatagtggccaatgtttaaggctgttaaaataagccaacttttactaattggggagttttataaatgactgattaaatttaaagaattaacttacatgcaattgtgtgattattagttatcagcagtgttgtaaggaaaattattgtgtttttttttatgatcattatcccactttaggtaaagaaaaatattggaatggaatagtgttgggaaacagacattaacaacctagggtgcctgcactcaaatagccgatgttactgtccctagattagagacttgattaagggcttgtttgtaccaaaa

SEQ ID NO: 45321 - DNA, 1031 bp, Homo sapiens
ttacgggagttctaaaaagagaacaaagaatggggcaggaaattgtgtgtgtgtgtgtgtgcatatatatatatatatttaaataatgccatattttcccaaatttgatgaaaaaacatttacttactcgtccaagaaaatcactgaactcagtgaaagataaataccaagaaagcctcacgtaggcatatcattgtcagaccgctgaaaacaaaaaaatcttgaaagcagttagaaggggaaaaaaaagatatacacaagagaatgatgataagaatgtgtgctgacttaccagaaatagtggaatgcagacaacaatgaaaatgtctttaaagtgctgatggggtgggaaggggtggtgagggaatcctgccaattcaaaattttatatccagagaaaataccccttaaaaacttgggttttaaagacactttatttcatataaattgaagccaagagaagttggatccagcaggcccctgcaaaaccaaaaactgctaaaggccattttcagactgatggagaatgatacaaaatggaaaccaaatccacagagaggggaaagaaaagtagtgccaggaatggcaaataatgggtacatataaagactttcattgcctcataatttccttaaaaggttactgtttagaacaagaataatagcattattatgtaaaatgtaaatttctgggctctataatatatgtggaagtaaatatatgaaaaacacaaaggttggaggaagtggatgaatggaattacactattgtaaagctattaggttagtgatatgtaaagaatgaagtgtgaggacagatgtgccaaatgaaaagtatcaagtgggaagtgtgaagaaggaagtagtgtcaagggtgaagtagtgcaattttgacactaaataaactctgataagaacacgttgttagctctggaggaacactaaaatttaaaaaatccctaagaaacaaatagaaataaaataccaatgaaagaagcaacaaaacaaataaacagaagggacaaatggaaa

SEQ ID NO: 45322 - DNA, 1044 bp, Homo sapiens
gagcagcaggacctagactgaacccctggtgtttcagtaacagtatccccagttctgtataagtgcatgcttatcactaaagataatggagagagatgtaagagagaattgtcaagagaatatgacatatgacctaagttccacctgtctcttgaatcagttaaatgaagtcaccatgggacattctgatgccaattctggtgccaactcatccaccaagacgtgaagtctgctgaaaattacagcattcacggggagaagaaaaatagcaagaggaaatcttaaattgattgaatttatctgcatttccaaccagaaactattgggaattggcgatgttacattttttaccattagcagtaatggaggcttcataactaaattagagtcagttactgagaaaacataagagtctatcaacatgaaatattagacaagacataattaaaaatagttatttacagttcagtattagagttttcatgtagaaatttcttcccagcattacttgggatatttaaaatgggctttttctttgaatattgagaaaactcaatggagaaatgaggaaaatgggagaaaagtatagtagttctttgtatgagttaaagcttaacaacatcatagttactggttccaaggagtccactgacatcaagtcaaaagtaagagcaggagatgtggagacaaatcttaaggtggacaagtctgggaacctgaacagaagcatgtgaaaagaagcagctcagtggtcaggatctgctcagttgttctggcttattttggctgttgccatgttgaagtgtgttcttatggccctgtattggtaatgaggacttgtgtttgcaattaaataaatgttaatatgtttttacacatagcatatgatatggtttggctgtgtcccacccaaatctcatctcaaattgtaatccccatgtgtcaagggagggacctgtaatccccaggtgttgagggagggaggtgattggatcatgggggaggtttccctcttgctgttctcatgatagtgagttcttatga

SEQ ID NO: 45323 - DNA, 1026 bp, Homo sapiens
ctttttcttcagttggttagtctagaatataaaaaagtttattgtagtcagcaaatatttttagaccttgagaggtgctagtgggttatgagaccaatgggagaaagtactccaacttgtagctcaatattagcacataaatgttaatgagtacaaatcattccaagcatgtcaagaataagaaatatttggaaatattttgaaaatgcatcctgttgtgctgattccagggtgaaaacactttaagctgttaataaaaagcaggcaacatactctcttcatctgacccatgccatggcatagattgctcatgggagactaattttggggttgcctgtttgctcccaattattgctttctggaaattggacttaagactcagaggtagactcccaatggctttgtctttaatacatggctctgtccacacagccaattgagttaaaagaatatattcgacccaagctggaccaatgctgtatcctaggagttatagaattggaaaagagtgatcagaaaactgaggatatctggggctgagttttgcaaatggtagagctcttggaggaaggccaatataaacttttgatgcagaaatccttgaaacttttccttcctaaaccatcccttccttttttttttttttttttctgagacggagtctcactctgttgcccaagctagagtgcagtggtgtgatctcggctcactgcaacctccacctccctggttcaagtgattcccctgcctcagcctcccgagtagctgggattacaggtgtgcgccaccacagctggctaatttttgtatttttagtagagatgggtttcatcatgttggccagactggtcttgaactcctgacctcaggcaatctccctgcctcagcctcccaaagtgctgggattataggcgtgagccactgcgcccggccaccatctcttcctttaattccaagagatactcacaatcctttcaataattgtctttttcccggccctttaccccccataagccagagataatc

SEQ ID NO: 45324 - DNA, 1033 bp, Homo sapiens
gtagaaataaaaaatgatacattcccattaaaatactactttagctggatccagaaaatggatatgttgtgttttatcattattcagtttgaaatatttcctttggtttttttttcatggtttatttatatgtgtcttgttcaatttccacatattcggtttaaatatatattttattattgacttcccatttaattccactgttgttagataacgtgttctgtaagattttaatctttgggcatttattaagatgtattacatttattacctaagatatagtccatctttgtgagcatctgataagcactcaaaaataatgtgtatattttggagatgtagttttaatgttctataaatgttagataaagatcatttatagtattgttgaagtggtttatatatctactgattttttttctaggtgatctatcaattactgaaggagatgtattaaaatattcaattctgaatgtgatcttttttgtcccttgaggtctgttaatttttgttttatggatttgaatgactgtatattagatgtattaaatgcatattagacacatacacatttctctggtagtattttgaagtctacttttttatattgatgtaaccacttcagtttccttggcttagcatttgcctggaatattctttccatctttttatgttttacttatgtgattttatctgtaaagtatatatcttgtagttgtactttttagatatttgatttggcaatctcttttaattgcagcttttagtttatttacattaatataattactgatatgtttggatttatgtccaccgtttcctattgtttatttgaataatgtattttttttcctttttatgttctctttttctttggggataatcaaattattttagcattctatttaattattaaatttattttaattataactatttaaaaatatctatctatcaaatttgcattacttttttactgttttctttagagattaccaatgcctctttgctgattggagttaatattttactg

SEQ ID NO: 45325 - DNA, 1050 bp, Homo sapiens
catttgttgataaaggagaaatttattttgactaagcatcaatgagaagggaatgttccatttgtaactttctactgattagtttctggctctgaaccttccaaatcttgattctcctccatttcaacacaattctggtgtcagttgctctattacaatacaacttctgaccctgcaacttcatgtcatgtcgccaattttactaaaacatatgtctatgtgaacacattgccagggccacttccagggcctcagctagtagactcctttatgggagggcccctgaagcttaagcttccttagcttaatggaaaatctaatactgaacagcaggaacagaaactggcctgcagggagtaaaggagggcctagtggataggcaatgaagttcctgcgggggcctgaggagttaatccaggaagaaatgagctatggaatggtggttatgaagagtggtagggtcctaagaaaaggttctatttgtggagttgacctgttatgtttggggacatgaatatacagagaaagagagagagaatgagagagaggaggagaaggaagataaacaggtggaggagaaagaggagaagagaagacaaaaaggaagagaattagaatagcagtgttaaaatgttcagtcacagaccctgggctttttgctttctcttcccactttcttggagttgttctacattcctgaaggctttgtccttgtattgggagagggtattctctatcctcttgggctttccctacagaacatcttctgccagcacttggatgtcagtctgcatctgaggccactgccaatgctttgtcccactttggcctttgggcgttgcacccttaccctcttcatttttctgctcttagccataaatctgtcccacatttctcttggaaaaacctctgagacagcaaggaaaggattagaggataggcacagaagcatgctgagttaaaaatggggtacataataagcttaagcagattatcctaatatagatactttcccgggaaagcagaacattaatgctctgctctctaaag

SEQ ID NO: 45326 - DNA, 1068 bp, Homo sapiens
ttttctgactcaatgatctgtctaatactgtcaatggggtgttgaattctctcattattattgtgtgggagtctaagtctctttgaagatctctaagaacttccttcatgaatttgggtgcttctgtgttgggtgcatatatatttaagatggttaggtcttcttgctgaattgaacccttcaccacttgtaatacccttctttgtcttttttgatatttgttgatttaaagtctgttttgtctgaaattaggattgcaacccctttattatttttctgttttcctcttggttggcagatttttctccatccctttattttgagcctatgtgtgtcattgcatgtgaaatgggtctcttgaagacaacatacgattgggtatttcttctttatccagcttgccactctgtgccttttaatcaggatatttatgccatttacattcaaggttagtattgatatgtgtggatttgatcctgttattgtgtcattagctgattattatgtcatcttgtttgtgtggttgctttatagtgtcaatggtctgtgtattcatgtgtttttgcagtggccaataatggtctttcctattcatatttagcacttctttcaggcgctcttgtaaggcaggtctggtggtaacaaattccttcagaatttgctcatctgaaaaagattttagttctcctttgcttatgaagcttagtctggcaggatatgaaagctgtggttggaatttctttgctttaagaatgttgaatataggcccccaatcttttctggcttgtagggtttctgctgagaggtctactgttagcctgataggcttccctttgtatacgacctgtcctttctctcttgctgcctttaacattttttctttcattttgagcttggagagtctgatgattatatgtcttcatgatggccttcttgtgaagtattttgtgagggttctctgaattttctgaacttgaatatttgccattctagctatgttggggaagttctcatggataatatcctgaaatatgtctttcaaattgcatccattctcctcatctcttt

SEQ ID NO: 45327 - DNA, 1081 bp, Homo sapiens
gtcccagtggggactctgtgtgggggctccaacctcacatttctcttccatgttgctccagcagaggttctccatgagggttctgtccctgcagcagacttctgcctggacatccaggcatttctgtacatcttctgaaatctaggtggaggttcccaaacctcaatttttgacttctgtgcacctgcaggccgagcaccacctataagctgccaaggcttggggcttgcaccctctgaaacagtggcctgagctatatactttggctgctgttagccatgcctaggacatagggtgccatgtcccaaggctgcacagagcagcaggggccctgggcctggcccaagaaaccattttttaaatgatggttaacagacctgtactttaactatatttaatatgttcaaaaaatttaaaaaatacaaaataattgggaaatttagcaaaacactgaaaagcactaaaagagctaatgaaaattccaaaatgaaaaatattcagtgactaaaattaagacttcatgggatgggcataacaacacattagagagagttgaagagggaattagactgtcagaagatagatcggaagaaaatagttaggctgaagtagagacagaaaaaagggtggaaaatttaaaaaacagcattagaggtaaaagggctattgagaaaagtttttacatatatagaatgggagttgtagaaattaaagtgtgagaaaaaatgggacagatacaatagttgaagaggtagtgagtgaggattttccaagacttatcaaagacacccagctacagacttaagaagtgctagaaagctatatcagaatagttaaacaaacaaactacacttaggcactgcatactcaaatgtttaaaagtataaaataaagaaaatcttaaaagtattcatagaaaaagacagaaggacttcaaaggagcaataatagactgagagttggcttcaacaactctcaacaaacaaaatggaaaccagaggacaatggcataccttcaaagcactgaaagaaaataactgtgaaaatagaattctacatccagcaaaaatattcttcaaac

SEQ ID NO: 45328 - DNA, 1040 bp, Homo sapiens
gctacagccactccaagtcagcaatggctgcctctggctgacctttaggcaacttttacaatcctggctgccacctctttgatttttttgtgcaacttagttgtcagtttagcagtttatgaagtactaatattaaatcactcttttttttccagtaaaagtaaaacaaaatataaggatttaagaattctatttacctatgtgtatccccattattctgtaaacttcatgaagtcaggaagtgaactatcttgttcactgtcatattcctggcacttctcacatattaagggctcaataaatactgatgtcttttgcagatttttaactacctgacatgaaattaccagtaaatacttgggcatgcattgaaaatatctgactatatgaaatgtttctcaggtctagggtaaatatacttttaaaaatctctctaaaatggctagctagtaaaagcatttttatttctacatttgtgtttaaaatttgagagtgacttttctagtaatgagaaaaatgttcacttgtaggcatggtttcatgtaggacagagttgtgtttttacaattattcagtgacgactcattgattttgttttacaaggtggattttgcttgcaacttcatttgattttaataaaattcctatgaaataggtgagatgggtattatcatcccctttagtttatgtaatggaaggttcagtgactaacttagaccatttcccaccaaagaggattgaaaaaaatcctgtcactggggctaaggacacagaccttctaactctaaatcccatatacttccccaaactccatgctttctttccagatagaaactatggccttggtaaattactcattataccttgctgctttttaagtgtattaaagatcacggtcctgcccctgttccactggaggactgtagaggttactcaatagagaaggtcaagttgctggtagcttcatggaaccttccccctttgctgtgaggtctcctcctttaatacaaaatttggtggcctctgttatatgcctcagt

SEQ ID NO: 45329 - DNA, 1059 bp, Homo sapiens
tttccaagtcactgagaagtaggtttttaaaggaattttgaaaaacaaaagactgattatttcctgcaaagaaaagtctgtgtgtgtgtgtgtgtgtgcatgtgttttttatgtggcagagaaagatattaaggaggagattgtataattaaaatagcagatatgggactacttggaggacgggcaatcataaatacaagtttagggcctggattaccttttcacaaaatagagaaaataaatattatttttcattttttaatttcgagatgtatcctgtatgtactaggcactttattatggataaggcttggtcaggaaataaaacaagtccaggattttcaacaacaaagactggaaagaaataatctgtaagcatagaacacttattcccaactccagtatcttgatatttcaggatgttggcagattttgcaaggggttttaagatattttaaaataaattcctaaaattgttcatgggtgagtcactaaatactagttacataggatcagaaccccaaacataagtttttgtgagaaaaagtaatgtatggtcaagtaaggcccaggtcggaagtcagaaaatgaagattagatttcagatttgccactaacaaactgactaactgaccacctacccacctacctacatacttaggtaaccttggttaagttattcagtttctctgagcttcaatgcctcatctttaatatgggagtgacactacttgccctgccttctttcaaggggtgttttagagaccataataaaacagaaatgtgaaaatgctttgtggatgtcaaagtgctttacaaaaatgaggtaagagacagagtttgttatcaccgtgtaatctagggaatatgcagtagtttctatttgcagaagttactacatttttttttttattttttacttttaggttcaggggtacatatgcaggtttgttatataggtaaattgcatcttatgggggattccatctgatcttcaacaaaatcaaaaaaacattttgagagttattgcaggttgggctccacaagaggcagattctg

SEQ ID NO: 45330 - DNA, 1044 bp, Homo sapiens
tatccacatgttgtataaagttccaaaagtgattctctggaaactgtagttgggttaagtgctctgagaatggaacttgtgtttcacagagctggaatttgaacccctgtccccaggcatgagattgttacatctttatatcactctgccagttagacaactaagtaataacaaattgtcctatgaggttagtaagacaggccatataataaacagaagcaattttttaaaagcttcatttaacttgagaagtaaagcgatactccaaacaaggatttctgaacaaaagtactagagcaatgaataacatcatagagacaagaagggatgacaattgctagatgagaactgtcaccaattccagaaaaaattaagactttagaccaactttttagtcagtatgaaacaaaatttaatatggatagtaattgtcagaagagcaactttattcaaaactttaaaaatatgtggtttttctgtgatttgaaaatctgttactttgttgcattaccacattgtggtaaatgtcttactgttaaacctgtatgacatgaggtactgccttgttaaaacaaagaagtaaagaaacctagaaaactgaaaataattgttttatggtctttgtctactaattctaacatttgtgttggttctggattggtttagatcgatttatttttctcattatgggtcatattttctttttcctttgcatgcctgataatctttggctttactccagacactgggaatgttatacttttgagtgttggatatttgttgtattcttacaaatatcttgagctttgttctgagatgtagttaagctgcttaaaaaaattttgaaccttttgactcttgcttttaagatttgttaacaagggccagagcaacatttagacttgggctaattgttatctactagggagacaagaatcttctgaatactctaggcaatgttccatgctatatgaatttttttttcccatctggctagagggaacaggtactattcccagccctgtatcaacatctctaggggtc

SEQ ID NO: 45331 - DNA, 1055 bp, Homo sapiens
tcattaaaatcctggcctttgccaaaagacttagagcacagccattgtgttcttggagtgaactgtaattttgcttaggtcacagacattttagtggccaacaatattaagatgggtactttttaatggtgttaagtataaatgaaatgcaaagggtgagtacgataattacaaaattgtgtttatcgtgaagatagtctgtataagaaattgctaggacatttacattcattaattattgaaaatgaaacagccttcctattattctgtcagataaagaactctatattccaaatgccaatttcttagagattttattttctttattgggtcctaaaagctcttcatatttatcctgggtgcatttgcggccatgtacatatagccaaaaatatgtgatgagttgtataattatctggtgaatccaagcctagcaggacaacctgttaaagagataaaagcaaaactactttcaagtcatcattgcttggttattttgaactgaaatgtccagtagatcttccatttgctttggttaagaaaaaaaagaagctcatttttttcttcttatatgagttattttctctataatgaactacaaaaattgcattcatatatttgctttttgaatattacctgtattattaatgtgactgattagagaaaaatagaatagattgtggtccattttttttttagtattatgcttaagtacaaaagttgagaaaacatttcatggggttttttttggtaagcaaaagacaagctgatgtaatacatttgtgtttgaataattccgcatcaatatacatgaacctgtttatcctcatcccttccaaacagattgtaatagaaaaataagatacttgtaggttatatccaactatttaaagtatgcttttaagtcaaatgtacattaataatatttagagggtgaacacaggcatgttttgggtatgctcaatggtgggatatattgtctcagcccaggggaggaagatgggggccttgtgcagatgcctgggcccagaaggcattgagtgctgctggtgagg

SEQ ID NO: 45332 - DNA, 1051 bp, Homo sapiens
gacaggagctcagtccagaggccagagaggaggggtatgaatgtggagaaaagggtgggcttatctgaggccatctttggagcctggctgtcactataggtacaagtgagggagcagggctgtggcagtaagggcaagaattcccaattctgtggtagagcatcctcatgaattagaaggtcaggaaaggaactcatatgacaaaagataatgagacaaattagcataaaaacacatctcttgaaatttagctggtcctaaaatctagaagttctctttattatttaaagggaatgtaaatgaatatggcattatttttacatttattttaataatctaaattctatcacttttttagagttttattttacctatgcctattaaatttcatttttaaagtatcttttgcctcacacatgctactgcagaaacccacaagcatggatggaatcctccttgtggtctgtttctgacattggtttttctcaagtactccttttaaaacttgtggaataatactgaaacccccaacagacaatctgctctcctgtgtttattactgagtaccaaagccacagctttaaccaccgcagcactccattaattgtgggcatgggatgctcaggagaaccaccccttgtgattgtggcctgaaaccctccaggaggcctataattgactatctgacctccaaaacgggagtgactgtattaagggttccacataaagctgggtttggtttattttgtgattggtatgacacattatctgagcaggaagtccagatgttgtcaggcatgtaggcccataaatctggagaatgataaaaatgagattgtaggcatgcaaagagagatgactggaatggaaaaaaaaaaaaacccagtgaccctccctctgcaggagtcgctgcatgacctgaggtgggggctatagcttctttcctactaggtggaaagaaatgtagaagaagtggctttgctgatgtagaattgagtgtcagaggctactgacacattgcttttgccagagtgcatttttttccctacag

SEQ ID NO: 45333 - DNA, 1035 bp, Homo sapiens
aaccaaggtatttgggcaaaaaatagcacaatgaatagaatagtacgtcacatctcaatactaatgttgaatataaatggcctaaatgctccacttaaaggatgcagaatggcagaatagatacaaattcactaaccaagtatcttctttcttcaagagactcacctaacacataaggacttacataaatttaaggtaaaggggcggaaaatgttattccatgcaaatggacaccaaaagtgagcaggagtagctattcttacatcagaaaaaaaaaactttaaagcaataacagttaaaaaagacaaagaaagatattatgtactgataaaagtcattatataatcactagtctaacaggaaaatatcacaatcctaaatatgtatgcacttaacactggagctcccaaatttatgaaacaattactactatacctaacaaatgagatagacagcaacacaataatagtgggggacttcagtactccactgacagcactagagaggtcatcaagacagaaagtcaacaaaaaacaatggacttaaactataccctagaacaaattaacttaacagatatttacagaatgttctacttaacaactgcagaacatacagtcttttcatcagcatatggaacattctccaagataaaccatataataggccacaaaacaggtctcaacaaattaaagaaaatcaaaattatatcaaatactttctcagaccacagtggaaaaaatttgaaatcaactccaaaaggaaccctcaaaaccatgcaaatacatgaaaattaaataacctgctcctgaataatcgttggatcaataataaattcaagatcaaaattaaaaaattatttgaactgaacgataatagtgacacaacctctcaaaacctctgggatacagcaaaggcagtactaagagaaaagttcatggcattaaatggctacatgaaaatgtctgaaacagcacaaataaacaatctaaggtcacacctcgaggagctagaggaacaagaacaaactaaaac

SEQ ID NO: 45334 - DNA, 1051 bp, Homo sapiens
gtaatcagtgcttttaaccagatttcatttacttaggagatttgtttactttatctgattatgagggaactgtatgagtcacaattcaaattaccaataatatcagacagttagattgagcatagctgggtcaagttattgttagtgctgggtgactctctgatgtgagcaaactgtgccccacgttttgactcaacctgctccgtacctctatgctgtcatggactgccatcatggacaacactatgccttgacagggctcagtagtggtccctacttttgacatttttctcctttctcttcttcaatacaagtctatcacttttgtgaactatgcattgttcattatccaagtccactggaaaactgaaacatgaacacaaactttgcctcctctggaagctttccctggcccactagctaggtcatattctagctgtcacacattctcctggctctctgtgcatctgcactgcccttttcccaggtataattagatattcatgtaagtacttctttaatgtacattttcccactgtactgtatgctctaagaatgaagggacactatattgtttactgttctatacccattccctaactcaatgccttgtgtatgtaggaggatcttaatcattttactgaatgaatgaatagaatttcagctagattttatataatagtaggcactccatacatgttgagttgaatactgcctcaattccatgtataagaccttttctcaaatgggattttgtggaacagtggttggaatttcagtcacagtgacagttccatgggagatataatgcctgctcggcatttgattagagctgttcctagtttccaataacaatacaatgccttcctcccaaatgtagtatccagtcaatgagagctcatgggatttgctttattccaaaccatgttaatttccctttacatttgtacatttgctaacctgatgtagtaatggctggatgttatatgaaattaaaaggattaaataaatctccttgcttcaaattcagaatgcttttggttaaattaaa

SEQ ID NO: 45335 - DNA, 1029 bp, Homo sapiens
ggcgacaagtcatccttctgcctcagccttctgaatagctgggattacagggagttaacatttattcagtttatgtgtgctagatactaaatgcttcacatatattaaattgtttaattctttcaataactctatacggtataagatattgttatctccactatgctactaaggaaactgagtcaaggagatgttatgaatacccagtgagactaaataattagtgtaagcattaaataggaaccaaggccattcgtctccagagcccagtttcttctgataataacttaaatactaataaggtcttatgctattaatctcatctcagtttttacagtatcttctaaagctaaaaatgaaataaggtaattttatttttctcctttgtgttctatcaattatttatatgaagcatatgaatgatttcactgaattcaatttgagcatctattaggtgaaaataatttaactgatatttcatgtgtaaataaacaatacggcagattgacttctgagacgtgttagaatagattttgtaaaaccctgaacatgaaattttaattgaaactaatttatgaaatcaggaataaaaatgataatagtcacatatttgatcaaatagaagctggtgcttatggtattaatttttatctagttttgcacgataaattttgaatacttagttaattataaatgtgtgtgtgtctacacacacacacacacacacacacacatatattttaggtaggagtgttagtttgctagggccgccataacataatgggccacgtactgggtggcttaaataacagaaatttatcttttcacagttctggaggctagaaatttaagattaaggtttcagcaggcttggtgtcttctgaagcccttctccttggcttgcagatggctgcttcctcctggtgtcctcatgtggccgcccctagattggtgtgctgtctgtgtcctgatctccttttataaggacaccagtcatattgtatgagggcccaccaacttgacttcatc

SEQ ID NO: 45336 - DNA, 1091 bp, Homo sapiens
agattctataactcaagaggatggcgattagtataacagtcacaaaggccaccattctgttagcagaatacacagacgatatctcaatttttacttctggtaaatatagaagcacttattgaacacttactatgtgaaaggttttgaagtgtctggtatggtggctgtgtcccattgatgtgatggaatataagccatctttctaagtgctgctcagagacaaagagttttctaaggtgatacttcctaactcattctgctcaccaatattatgggttacatttggtgcttagatgtcggggacattaaagttgttcagagttaaatctatggacgtagtcatcaagagtttccatgcattttttcagcaatgtttagtcaaagggctgcatgtgagtggtcttttgagtcatcagtagatgtagtataatgtcacttctgtgtcttcgcttacttttattgccctattgcatagcaagactttatttatcagttttagacaacgattatggtgggaacttgagggcaggatagagcttttctactagttaggacatatatgtagttttcaaacatgaggatgttgctactaatgcatctcctagaatatgaagaagaaaaccacataataaagaatgcaggccaggcgtggtggctcacgcctgtgatcccagcactttgagaggctgaggtgggtggatcctgaggtcaggagttcgagaccagcctggtgaaaccctgactctactaaaaacacaaaaattagccagcaatggtggtgcgcacctgtagtcccagctactcgggaggctgaggcaggagaatttcttgaacccaggaggtggaggttgcagtgagccgagattgcgccactgcactccagcctgggcaacagaacaagactccatcttaaaaaaaaaaaaaaaaaaaaaaaaaaagaaatgcaaaatgtgtctaattacaactaccatccacccctttaaataaccaggataaaaatgtggtataactcttgggaaacctctgtaaattcaatttacaataaggtcaatgaaagtactgcttaaagatacattattgtaatgaccagt

SEQ ID NO: 45337 - DNA, 1061 bp, Homo sapiens
aaataaaataatgtaagatttttgcagtattttaagatcttttgatagactaattatattgcaaaaggttgattgcattataaaattatatattcttcctctacagagtcagtagcaaatgcatgctatttcaaagctatgttgtatatctggaagcttgataattgcagttcatattttcttaccaaactgataatgtgagatttttaaaaaataaccttctaaatccctatgttttgtcctaggtttaaaattctatgagaaccagaccacacattcttttgttcttaggctgtgttgttttcagagatgctgacctgttagtgattaaccaagattagggtcttggatgcttgtggttatcagaaagctttccctgaggatgtctccagttcaaggagaatttcacatttatatctaggagggatgccctaaaattgtattgactgtatataaagatttacatttgctttgtgaatgcttgatgatgctgttgtataatgactgaagtaaaaaatttgtaaaaaatttaacactgagtgtgcatggcctggacttagttttgagatgctaaactgtgctcatttcaccctaaatggagtaagaagtaaatgtagcttagtatatttacagtaaaataagtcatatatgatcttactgtgtcctcagaataaccatacaaggaagtagaatgtgtattcttacaaggtaaaatgtaaaggtgtgaaaaatgaaagaaatccaactgctagccagatttattcttttctttctgcttccaaactgcgtctttgtgatattttccactttgctatttactagtctgtttcccagctatactgtaaattctgtgaaatatttctatttatctcatttttccattacccatagttcttcaacaagtttttattaaatatagcagttaacaagtgaaaaaaatcagtggcagtactggggctcaaacccaggaatgaatctaaatatactcctttgttctcttttactataacgactcatctaaacaattctaaacttcattttgaaattaaaagataagcacc

SEQ ID NO: 45338 - DNA, 1049 bp, Homo sapiens
gagaaatgatgtaaaaacctaaaggagatatacaaaatatctaccaaaaaggagatacttcaaagcaaattatctaaacatagtatattttctcataaaaattagaattgaaatttatgatttttaaaaaagaatataattttcctgactttacatacataattaaatatgtataacacatattcaggtctgtacagtattttagaaatttgaaaaatttaataagatattgatttttaaagatttttagtgcttaatatacttggtccaaatagcaatgactttattttagggatagatgaaacattaacaaattacctaaaacttttgcgtttttacacctttcatttttacttctacaaaatatcagtaatagtggcagctaattttatctggaaacaataagaatatttgcctgacttgggagatattaggcataaattgaatgtttccagctaaaattatatgtcattgggtaaagtaaataatttaaaaattgattagtatttcataaaaggcaaggtcacaggctgtgaaaatatgaaaaagtatgttgaatagataatgatgagaaaaatgtgaagacagttatatttaaatgcaaagatccatggaagaaatcagctgcttgataacttactagaagaatgtattattgccactgtactccaaaccactaatgagaaatgttttttaagatttaagattgtataaatgctttgtacctagaactgatggaagtaattggtaaactacttaatcaagtcccacttggaagtgaaagggaatgagaggatagaaaatgtacgctgggtaagaaacccaacaagtcagtggagttctctttacagaaagaaacaaagatagcagtaattaatgaccctgactctgtgccaaaaaagctttcttctgacaactccaacttaattaaaacttaagacatttcaatggcctccgaaagcccctgatggggtgaactcttgcagactcgtgagaaaattttgtaaattaaaggaaaagatgtgtgttaccactagtgccatggctct

SEQ ID NO: 45339 - DNA, 1052 bp, Homo sapiens
ggtcctgcatgcggtgacatctttagcaggcatgcaggaggttatgaaactctaccttgggaggatctcacagtgaaatttttccccccagagtgagctttaatttcctttctcatgaccaaagcaatttggctttcatttaaaagtttctttgctgccagcagctaataagtgtaacaggactgtaaaacattctgagacaaaaaaagattaatagttttatttgagagagaccagtaatttaaaacataagacctagtcagggtccattatacaataattccaatgttaatgctactttgcaaaatgagcgcttaacttgtttttgctttggttgacctggtgcagggaaacagctaacacgttttgaatggcattccaaaactgaattaatctctgttccctaaagtgtcctgtttatatatgaaatccagaaacagatggtcgtgagctaaaaaccacatgcgaaactttatgcattaaaactacccatattggaattaaatgagacggctgtacttttggctttaattataaatggatcaaaggtggttcagggtttgggtgcataaaaaagcctatttagataaatcattattatgtatttaaaaagtccgttttcccttttttttcttccttttggcaaacctaggtggtgttttaaatctgtcaggagacatatttactcagtacacctttataaatataccagtgttaaaaatatacttgaattagtggttgtgaacttcaaagtaaagtttagacaggtcaggtgagaagcgtcaaggtcgcctttctcaactgagcattcttatctactgtaggccagttggaaaatcaaatcagcatcagtgaatcagaatagagcacagagcttgagagcgtactccattacatagcaactctattgaatcccatggcaaacccggaccaatgagggcactgcagcagcgaaaagtcatccataaaaatgaaaatggcactctaattagctgctaatactgaactaatcattgtgttcttcacttgaaactataatttttattgagaca

SEQ ID NO: 45340 - DNA, 1027 bp, Homo sapiens
attaggatgttggcacatcctgacagtcctctgcaaatgatggtgtcaggccacagagggactgagcgtggcagaagtgacattcaccctagcaagatggaaataaacgccctgtttgataagagaaaacagacaatttatgtccaccctgaagagttaccagctagtgagccattcctatgggtcaagtgctgcatttgcattttgatgggatgttatcaagtaattaatgcaccagtcaggatttattacctcaggagcgaactgaaaggttcattacaaaatcggtttcacttgaagataggcatttcctcagagttagcttttgacatgttgttcctcactctctctgcccgtggcagccatggtagaaggccagtgaggtgaaattcattgcttaataagggcattcactttgggtattcttgtgataataaatgtatacatcaaggccgcactgccttgtcagtttaattgcttcttgtgctccttaacaagccaatcttaatcagtctggaccacgttatgaataatttagggatcagcagacttcacgcttaataagatgtaccagattataaaacttaagtgcactgtttatagaaagcatgcaaaacactttaagtttttattagcagcaaggaaaaaacaagcagtgagttattctaaaatttgcagtttgcgagcaacagctgtgtttcttaatgctgtaaccccctccacttttgttgaaggccacagttcggcctctcgagccttctaagccttggtgagacataatgggaaatttgagcaggctatgagattaaagctcagaatcgatggccaaccagcaattgtcattttagaaaacattcttttatctttttaaatgcaaaacagacctcatttgaaagcagtttccgatggccaaaattacctttttgttgttgttgttctgtagcacacgtgaatttttgacttaattgactggagagaatggacattgagccttctaacttttctttaattaaaaaaaaaaaattga

SEQ ID NO: 45341 - DNA, 1071 bp, Homo sapiens
tttattaatcaaatggcaatcaatgaaataagatttgtactgaatgtatgacactatattagtcactttgggaggatataaacatttgtgggagcgtgcttgcccttagtttgtatgttaggagaagagaaaagtcactaagaaataaaaatatgaacaagaatgaaagaatcaaaatgctcaggacattttgcaggagaatggaattaatctaaaagaaagaatgtatcctttggttttttaatgaaataactttgggagtactttttaaaattaaagattattttacttagaagcagattgaaatctttctttttccagcctgcagagctctctttaaagataaacgttgcagtggtatttttaattattaaggctgggcacttatttccttcttacactcacacacttccaaggggatttggaacatggaagaatttcatagctatttagagaaatgagaacttaggtctttataattgcaaatgttactttccagttctaagttcaggctctattctccatggtattgaatcttccaagttgtgatacatcaatataatgtatgatctgtgcctgaacatccaaacatttgtaagtttctaggatagatgaaggcaaatttgtttcagctagctttgttatgatttattttttctaagtggttagtaacttaccaattaaatatataatttggaaaataaaatttgataattttttctctttcacaagtaattgtagctcaaacacaaagcaatactaatgtagtctggctgtctatgggcaagttacctgaagcagtgtctgagcgtgtttagtcataagcctaagacaaccagaaaatgttcattttgggaagatgatgatttctgctcacctatcagaacctcaaactacatgtgtgcttaagtagtgtttagtgaaggtaaatatttcttttttttttttagacatggtcacttgatttaataacaatacatataccatgttatcactatggaatgtaaattcaggttagacaagagaatttcacaagtgtaatagcattctgtagtatataaaagtgtgtat

SEQ ID NO: 45342 - DNA, 1046 bp, Homo sapiens
cctcatcctcttccttgtcctttcccttcttaaacaatttagtacaaaagccattcgatgaggcctagtaagcctttgtcaccatgggcagggtgggtatacagggtattgcagaggttgggcatttgctattaaagcccaagaagtagaaggagggtgtctgcaccgaggagcatagtgtgagctgttgaaagttattggaaggagaaggacatctacatggggaagtggccacagcaaccactcaatacagatagttatagtctgtgctaggtggggagaatgttataatggggtagaaaagtggtagcaacaataatttgttaaaatacagggagattgatctaataagtgcgaatattaaagatgaaggtaatcagtgtttgtcactgtctgaggaggaagttgaagtatgatataggcaaaagctagaatgaactctggtgctggatgaaaatgggggaatgaaagtgctggttttcaatatatttagcaaatatagaattaaacatagatgtaaggtatatatgtgtgtgactatataactgtagatgaacgtgttttcacatgtatgtatgtatgtatgtctacatacacataaatcccgtagctcagtctattgcaaaggcctgggacagctattccccaataacagtgagcaaacctagtgtccagatcttggtgtctagatacaattctcctagtgaaggaaccagagctttctggagaaatggctgattcagatcagagaaagcataagatgaccctagaacatattgttccaagaagcaagaaacatatcaaagaatgacagagagatgtcaaaggacatattggccaaattgaaaggatttcccctgggcaaatctcgaacaatctgagcttcaaaataaataataatagaaactcgttgtagttaatttaataaaatggtcaatgagtttatatcaatataaataaattgaatacattatgtttggtgagaaataggatatttacataagcacaaagtatcttgccacaaaatgtattaatgttaaaaaaga

SEQ ID NO: 45343 - DNA, 1043 bp, Homo sapiens
agtggagtggcttcacaagggcgtctcttgacccaagggttgcaaagatccgttggagaagcgtggtttcccagggtcacacgttcactcactgcttccctgggccagagaggttcaccttgctctgtgtcgctccaaggtgggctgtcatcctgcctctcttttctttgttctctgtgggtcaagttgtttccttgattagtcccaatgcaagtacatggatgtttcagatgaaggtgctgtatttactcaccccttttcctgttattttcaagtgtaagttatatgtggctcacattcattttggtttttatgtgggaaatatatacaaagatatctgtcaaatgatagtaactacattttgcttctcaattcagactacatagaaaatggaagacctaaaggaatataatgtaattatcattatagaaaaggaaaaaaaaatcaaccaacaatatcttttgagttaagtgatttttcttattgttgtgcttccaaaaacaagagacaggctatccataagaaagagacagtttatcagtagatcaggtagttgaaaagtaaaaaaattttatcttttagtggtaagaaactgatctgatttattttcttctccaatgagttgactcattggatgattaagtgaagtatagacatagcaatatgtgctttaattttacaaagtcattttaccatatcacagagaattggcctccatgttaggtaacaatatttgttcatagtgttgtttatagtttcacttacagttgatcatagattaaaagctgatatttttcagtatttctatagtactggcaattttatcagttggcaatattaaattgtactgacacagtattcctagataggacgtgtaaagctggctggtgtaatgaagagaggcgctgaccttggagttagaagactaggtttctgcatcataatctgccactaaatagctttgggcatgtatctctttgtcatgctgtgacatattgtctgactgtgacaacatctgtgactctggttagaccttgacaact

SEQ ID NO: 45344 - DNA, 1025 bp, Homo sapiens
gaagtaatgatttgtttctcttgctagattgtaagctccatgatggcaaagactatgtctgccttgcttccatttgtaactaaaatctagcagaatgcctaggctaacaaaaaatttttggttaagtgaaaaaagataataaattaattccctcatctgttaatctattggcatgtcacagaattatcatctggtaccagtgaaagaattacttaaagtttgtatgacaactgttatttcgatttatacagatgattcaggattgagtaaaggttgaattaagacatttggtcaggtgtaatgctcaataaattgagcattcgctgagattagtaaatgctgttatttcagtggattgcaattatttaaagtctggtgtatgtaatctttattgtagtccactttaatcaggcataccagtgatctgtaatagaatcatgccacaaagagatttatttttacactcagaaaaattctcatatgtttggttgtttgcttctagacagtttgtggattaggccaggtgcagtgcctcacacctgtaatcccaacactttgggagagtgaggtgggagagtcgcttgaacccaggagtttgagacttgcctgggcaacatagtaagaactcgtctccattaaaaaaacaaaaacaaaaacaacctttttaaacctttttttaaatgtaaaaaaaagcaatcaaatcaatttctaggtcaattttaacagatttgtttaaaaaacaacaaaacacacccaagtagaaagtttttcccttcttctaaaagatgattatcttttttttttcttttttttttttttgagatggagttttgctcttgttgcccaggctggagtgcaatggtgcgatcttggctcaccgtaacctccgcctcctggattcaagtgattctgctgcctcagcctccccattagctgggacaggtgtgtgctaccatgtctggctaattttgaatttttatgggttttcaccatgttaggctggtctcaaacttccgacctcaagt

SEQ ID NO: 45345 - DNA, 1093 bp, Homo sapiens
agctctttgggaagatcttttacgaagaccaactttttaaaatgtaaattacctacctaatataagtgtcctaagacatgtatgtaaacttccggaactgttttgtctgtgtatttagaaaatacacaagaatctttattcaaacctaaaaatataaacttgtgagcactaaactgcttctggctttgtgaattttattgactgacatttaattcagatttctttgcaagtgtactaatttagactaattggggtaaggggaacaccttaatgaactttgacttatgtataattcagatatctttgtacttaaggcttacaagtttgaattatggaatactataagggttttttgtttatttgtatgtttttatatgaaagtacataaatgacagactacctccaagtaatcctgctttaattaatagcagtgatttgtaatcagtgtatcttttaagattctctacaggttttagaaaatattaaaaattccctgtaatttacatttgtgcataatcttggaaatgggttgaaaagcaaaggtaaactgcttcatcccatgttgtatatttgtggactgattgactacaagtgatgtgatgttataaatttgaagtctttgaaactttattaatgtagagaaaacataactagctttttaggttatttcaaagttagtaatagagcaaaggaaatcagaactggccagatattcagacttgacttagaaaaacaggagtttgttgattttgtttggagaagggcacaataaaggggagcccacatagcattataatgcctagtatctttaaacatgtaaagagctatcatgaggcagaagaattaagaaactttatatgtttctaaggggtcatgattgggaccattggctcaagattgaaaatcggtttttaattatccaaagatgaaatggggctgcttcagaaaaaggtctaccactggagataacgctatgaaaagtgaaagagattacttaatcattttgacaaaggcagtattgaccagacatttctatttcagagttggatttgtgcttagttttttttaggtgttgggacccttgtagttgctt

SEQ ID NO: 45346 - DNA, 1039 bp, Homo sapiens
cagcctcaaactcctgagctcaagcgatcctccagccttagcctgtgagtagctggaactataggcacacaccatcatgtccagctaagtttttttagttttttaggggtttctttgtgtgtgtgcttttttgtttcgttttgctttgagacagggtctccctctgtccctcaggctggagtgcattggcatgattgcagctcactgcagcctcaacctcccaggctcaatcaatcctcccaccacagccttgtgagtagctaggactacagatgtgcactaccacacctgactaatttttggatttttagtagagacaggttttcgccacgtggccccagctggtcttggactcctgggctcaacctatccaccggccttggcctcctaaagtgctgggattacagatgtgagccaccgtgcctggccaaagttattattatttttttaaagtaaacatgtactgcagttacctgatgctaccacatattaactgcatgaaaaatattccatagaagtagaaagtccttttgactgtgaacttacaaacatgtgaatggaaactattatgagctataaattgaatataattatttttttcttaatgactttgcagaagggatctgatacaagcttaatatgaaaactaaaaactgccacttttagcaactgaagctaaaatattgtaagatcagaatactcccatcttgtggactgatagaaggctatttattacaattttggggaaaaaaatttctttttttaatgtcttgagtcaattcgaaaaagtgtggtttttttaaaaaaaattttaatagaaataaaagtcataaagtttttccttaaaaacttactgttattaaaacttctggcccataattgatttgttggataatagtcattagtatagtgctattatagcatttgccatcaaaatgccatttatatggccaatacacataaaaattatccaatgaaactatttctcaaatataaattaaaactagaaaatggataattttttaaaactatactacta

SEQ ID NO: 45347 - DNA, 1032 bp, Homo sapiens
gatctaatctaattcattttattgaactactttgactcagttggtttgtgtccagaacgatagcctgtaataggctgaaagttatcatttgtttagtttggaatcagtagcttaaacatgtgtacttaaattgcagcatgttagaacagggagtaactttcttattttattagtgaagaatttgaggctcagagaagttaagtgattttcccaagatcacacaactctgtgaaatatgatctaaattgttcaaatccatacaggacaaaggaagaggacatttgaaaagacagtagttttagaagcccttgaaaatacctccatcaagaagctctggatctgcaaggggtgggggcttttgcattaaaaaaaaaagaaaagaaaagaaaagcagcagctactcttgcacctttcccccagtacgctggagccaccaacaggtaactgcctagaagacaagggatccagaggaatttttttcctgcacctttatacattcatcatctttgactgagactgtattggaaacaattctagccactaaaattttctggaactgtgctctgggactagtgactttgtttccacagaagctatcattttgtaacaaagatggaaagtataatatatgtttaggatttgtaggaaatgggaaattgaagctgggctgggaccttcttagtccccatttttaggtaggaggatataaggactattatggaacctgcattcacattaccagagggtagagtagttaatttggaaaggctttttttgtttgtttttagacagggtctcactctgtcacccaggctggagtgcaatggtacgatcataactccttacagccttgaattcctgggctcaagtgatcctcatgcctcagcctcccgagtagctgggactacaggttctcaccaccacactggcttacttgggaagggattggagctccccagaacaacagcattacctacctttataataatttaaaataatctttgaaagatggtctttttctttttttttttt

SEQ ID NO: 45348 - DNA, 1043 bp, Homo sapiens
ctcatcagctgcttaaaagcacatacaggagtttggaagattgaactgcaccttctacacaggttaaatttcacggctctgaaaatgtcctttttggccaaatcagtaacaatgcttgatttgcagcatttgttgcatgcctttgaaaaaatacagctgcttctttcccaagttgtttattagggaacaaggttaaggcctgtccagctcatgatgtatcagtggcatcatcgtttcatataaggaacagctcactgagagactcacatacacttcttggttatttaaaacaaaagcctcctgtcttaatgtttgggagaagcttaacgtgccaggcagaaatcatagtaaatgtcaggtatcctaggacctgatccagccatgcagaagttactggtttcattcacacaggtttttagaaaaatgtaaaatagcatgtaaaaattggggaattttgcatggaaatccagatgtcttgcttcttttgaacacatggtaggctgggactacaggtctgcaaggcagcctggcactgaatcccaacagtgctgcttccattagatcaggtttatgctcccagatcactggggtctccagttcttcctcttgactcccttatactgaggccagtgtctgttgctctgtattgccaccattgcactagtttttatttttatagaagagaaacagttctctctttttctttctttctcacaggagaaaaaacaaagaaggacttttccctgaccttctagctgcttcacttaatttcattatctgcctggctccctctgagtttgggactctggttgggccaacatgtagtgtgtggtatgggaattacagtgtaagttgagatcccaaatgttggtgaattttaaaaaatttcccaaatattttgaaaagcagaaaccatatgctaacataggtgtttaaaattatgtccaaaccagaacttattattactaatgactaacaattgtaaggttcagtgtcataccatgagagtcccaccatgtggttctgacaacctacaaaggaaa

SEQ ID NO: 45349 - DNA, 1067 bp, Homo sapiens
acttcatactgccctctggttcttcaggcccagaagtctggtttttcctacctgaggtttagactctctgcatgatgctgattgtgatacattctcaggctaaaaaccataaaaaaacagaaacactctcattctggtccattttccaagtgtcagctcccctctaggataatcctagttttgttcactttataaggccttcaagtagtttttatttttgttttgtttgtattttttccagagtttataattatctgcaggaaagtcaacatggtagaagcttgcttgtccataccagaagctgaattccctgtctttaatatcaaacatttctagtttataaacccttaatcatataaaaagatataatatttcagaagatttccaatttcaatcttttttatactgaacttttaacaaattttgttggctttttaaattttagacttctaattcaatagataacgttcttgagaaagaccccagaccaaaaagagacacagatataacttctgaaagtgactatggaaacagaaaagaatgcaatagaaaagttcctcgaagatcaaaaatcccttatgatgccaaaaccattcaaactattaagcaccacaataaaaactacaactcttttgtaaggtacttgttttagttttagaaatttaaggcacacagaagttaataatgctggcttctctcttgaagctatctcttggtgatatttgttactttactaatgttgaagatttgatttttcagccttgcaggttctgatctggtcagtacattcatgtaaatgtatataaaaggatccttttctctgtgtctgtacctaagttgcaaaattaatgtataaacctgaagatatctcatactataaagaatactgactttagaactggaataccttagtttaatctaggtttagttcaatcaaaaacaatgtatgtggttttagtttaatttgaactaataacattagttcaaattccactgcattcatttacagtgggaaataagactagtacacctgagtctacatgactagccttttctctctttgtagg

SEQ ID NO: 45350 - DNA, 1045 bp, Homo sapiens
atatatggtatatataaggtatatatatggtatatatgtaaggtatatatggtgtatatatggtatatatgtaaggtatatatggtatatatatggtatatatggtatatataaggtgtatatatgatatatataaggtatatatatggtatatataaggtgtatatatacggtatatataaggtgtatatatatgatatgtatatataaggtgtatatatatggtatatatatgtaaggtgtatatatatggtgtgtatatataaggtgtatatatatggtatatatatatgtaaggtatatatatggtgtgtatatatataaattcctccttagttttctctaacaatccaagcataaaaaaaaatccctgttagaactgcttttgctgtattccatagattttgttatattgtttccattttcatttgttaagatatttttcagtttccctttgtattttttcattgactcattagatgtttaagagcatgttttttgtttttaaatttccatgtatttgtgaatattctgtagtttctcttgttaatgattttgtcagaaaagatacttgtaattatctcagtcttctagaatttgttatgatttgttttttggcctcatatataatctaacctggagaatgttctgtgtgcagttgagaagcgtgtgtattcttctactgttggatggatgttaggttcatttgatctagagtatagtttaaatttgatattttcttatttactgtctctacgttctgtccattactgaaagtgggctgttgaaatcccctactattgttgtattactgtttatctctcccttcagatttattaatgttttctttatatatttaggtgctgctatattgggttcacacatatttacaactgttatatctcatgttgctgaattgacccttttattattatatagtgacctttgtatctttttatagtttttgacttaaaatctatttaatctgatatatgtatagccacttctgctttcttttggtttctatttgcatggagtatcattt

SEQ ID NO: 45351 - DNA, 1346 bp, Homo sapiens
gcctgcctctccttgaagaagctaagcacccctcacacttcagaaccttcgtgcttgctgcttcctctgcccagaatgctctaccaccaaacattcacaggggtctcctactccattcaaatgttcagatgtcaccttgtcagagagctctttccctgaaaatcctatttgatatagcaccttcctcttgcctgcattctctccaaacataattatttgtatattattaacttccctctcttctttgagggcagggactttgttctgtcacatctatatctttaagacccagaaccaagcctggaacattttggtgttaaatgaatggaggaaggtagtggtgatagtggtggtggtggtggtggtggagattcatggtattattctgttagatattaaagccccaaattagtttttaaagaattcacacacaactttttcaaacactatataaaacaaggtaaatctgtatacacacaaactttaaccaatcttaaacacagtcttacccacgatccgtttcaacctgtatttgatgatgaggctgactagccaacatttaagtaatcactatacagtagacattgcggtaagattatccagtttaattcccacaatactcctttcagtatatgttataccattttatgaaaaaggaaatgaggcttagtgagcttacgatgaggccagctgaagataggaagtggcagccctgggactggatctcagtgtgtttagcttcagaacttcttaagaatgatgggactggctgggtgccatggctcacacttgtaatctcagcactttgggaggtcgaggtgggtggatcatctggggtcaggagctcaagaccagcctggccaacatggtgaaacctcgtctctactaaaaatacaaaaattagccagtcgtggtggtacacacctgtagtcccagctacttgggaggctgaggcaggagaatcagttgaacccaggtggtggaggttgcagtgagccaagatcacaccactgcactccagcttcggcaagagagggagactctgtctcaaaaaaaaaaaagaatgatgggactttctaaaataaaaccctcctggagattcttttacatatgatctgtacatgttagtcatttatatgtttacatacttaaatagtaaagtatttgagaaataatgtttagttttagaaactaggggttaaatgttgtgattgttaagcagtaataaatataaatgataaacaagacacctttttaaaactttgagctaaaaattaaatctcatggcactttgcctaatgacctaagctagatcttgtggtctggttcatacaaacatgttctga

SEQ ID NO: 45352 - DNA, 1030 bp, Homo sapiens
atctgtgaccaaggaaatagcataattagctataatggtgcacacaggagtaatatgattaggaaagatgcttttggccctgggaagcagaattcagaagcgatggaaactgtagatgtttgcagttatgcaactgagagaacattagggctaaaacaagggccaagtgtggtggggctcatgcctgtaatcccaacactttgggaggccgaggcaggtacactgcttgagcccaggaatttgagaccaacctgggcaatacagtgagaccctatctctaaaaaaaaaaaaaaaaaaaaaaattaaaaattagctaggcattgtgacgtgtgcctgtggtcccagctactggggagggaggccaaagtgggaggattgcaagcctgggaggtcaaggctgcagtgagccctgacagcacttaatgtactccagcctgagtgacagagcgagatcctgtctcaaaataaataaataaataaaaaggctaaaacagtgattacagtgagatcaggaagagaaataacgaacagatttgagaaacactgtaggcaaaataacatttgatgtgtgagatctggagataaagttaacaggaatggaaagtgatgttgaagttttaaggttgaataactgggagaattatgaaactactgactaaaactgagtcagttttggtagaatgatgatgaggtttgttgttgttttttttttttttttttttttttttttggcagggtctcactttgtcagccaggctggaatgcagtggcgcgatctcagctcactgcagcctcaagtgatcctcccacctcagtctcccaagtagttgggactataggcacgtgccatgaatgtctggctaatttttttgtattttttgtaaagacggatttcactatgttgcccaggctggtctgaactcctgagctcaagcaatccgtccacctcactcagcctcccaaagtgctagaattataagcatgagccaccatgcctggcagataatgagtcttttggtcttcgtctgga

SEQ ID NO: 45353 - DNA, 1028 bp, Homo sapiens
catatatttgctacctgctttactatgaagattcatgaaaattctcccttaacacttacagtaagtaataggcaaccttcagaatttatttttctttgcttgcattttgagggaaaggaatccatatggggatacttctcaccttcattgaaaataaactgttagccctttccactcctgaaggatctggtccaagaagagtaaaataacttgtctaaatcaagcaactgatctgaacacctgcctttgtaaatacccctacccaggccaatttcaagctgccaatgggaagtcactgaattagtattaatattaaccatgttgtcatctaacctgaaaaattattaaatatcagttagctacaatatgctaattactttaataatttctctccttctgtaagttcttggatcagagtcctactacctaacaaataaagtagaaacctacgaagtggtagcagttaagttagcaaatgttatagtaactagagatgtactaaacatgtatgtagaagcagagaacatcagcaaactttgtaagtccagttcattcttctgtttgcaaagtggaaaacaaaacactttcattagtgttctgttttttttttttaaggcagagtctccctctgtcatccaggctggagtgtcatccaggctggagtgcagtggcatgatagctcactgcaacctccacctcctaggttcaaatgattctcctggctcagcctcccgagtagctgggatgacaggcacctgccaccacacctggctactttttgtatttttagtagagacggggtttcaccatgttggccaggctggtctcaaactcctggcctcaggtgatccacctgcctcagcctcccaaagtgttgggattacaggcatgagccactgcacctggcctcgttagtgccttttagttatattaccttagtgataagttcaaccaataaaaaatttaatttctaggccgggcacaatggctcatgcctgtaatcccagcactttgggaggccaaggcgg

SEQ ID NO: 45354 - DNA, 1035 bp, Homo sapiens
gccttaatagaagggaattaatagttcttctggaataaggagaaaataaaatcttcagcctctgcctggaaaatcttgaacagatcagacaaattctcatggtggaagttgattcacactgtttcagttaattgctgagaattaacatttactgatcactttatgaaatatttcagttaatcttcacaccaatcctgatttgtattctcccattttacataagaaaaactgcaggtaagaagttaaggcaactacaggtaagaagttaagaaacacttttacaactccaaacagaaactctgtaaccttttagcagttattccccattccacctttccttcagcccatggtaacctttaatctactttctgcctctatgaatttctctattttagatatttcatataagtggagtcatacaatatttgtccttttgtgtttggcttgtttatttggcttgttttcaaggttcatccacgtagtagctagcaggtgccagaacttcattcctttttatggctgtattatgatattcctttgtatgcacataccatattttgtttatccattcatctgttgatggacccgtagggttttttcccccttttggctattgtgaataatgctgctttcaattctttggctagctaggagtggaattgtagagtcatatggtagtgtttactttttgagggactaccaaactattttcctatggctgaattatttttaattcccaccagcaacgtatgagggttccactttctccacttccttcccaacaccatcatactatttgttaatatctaatggtatcttattgtggttttgtgtaaatgaacttatacatttatagccgttgctgagaattttggttacaatgaatagaaaccattcacgtcatctttctataacattgaagttggatcctttctgtctttttattttccctaattttgtgcatgtaaaatcactttcggatgtttactaccactcccctggtttcccccaatcactagtgttctagctcttgtc

SEQ ID NO: 45355 - DNA, 1320 bp, Homo sapiens
gtctttgagggcctttgtactctataaattgtttataatatgtacctacagataaaagtagcaaacaaaaagtttgatttaaacttaattattggcaatatgttcaaagttatacagggcaaaatctagtaatttatcaaaactgacacaaaaacaaatctcttattttggtctgttatattagttttcattactacagtatttggcatattgtaagtgctcagtaaaggttaagtagaagtgctataatttcaagagttacttggttacccgggcatacccaatttaataataactttttcatagaacttttcagggattcttctatagaggatttgagcaacatctcccatttaaaaaatcaattgaatattctttgtaagaaaaaattctcttactatttctttcctaatgagatattaaattgataaatttctgaatctatgatttcaggtttccttattaatatttaataatatttctttcctgatgagacattaaattaataaatttcagaatctatgatgtaggaaatttagaggaaagggaatttggaagagctggaaaatagaaattcctttttccctgtgaacacatttctatctcacctccacctgaaactcatttctctctttaagagggaaaagcagagataaaaccaagcaataaaatactagggaactatttgttcacctgtagtcatcggttaaatggaaactttaaaataagaaattctaaaatatatgttgccttatttccttctattttgaggtctaattggtaagacagtggaagcagagctgtgtaattatctgtaactcaccttcatcaaaacaccaataactgccaaaccatcagcctttgaggcagcttcagcaaggctggagtactttgcagaattccagtgagctacgtgaagctaaaaatgatactatggttaattaattatttataccagtgtgatgaaaaaagataagttataagttaacttgttaccatatgatgatgtatcttggcttagatacataaaacttatgtgaacctttatccagtggattagaagagttacattctcactcgtaggaagggttatctgtgtgccaggtagagattacaaaacctggaaccagtaagcaaaatgtcctttcctacgatattgttatttaatattactcctttaaatgtatctctctttgttttgaaaagatcaggaaatatgactaactagtttttgggaaaataattgaagtaattttctctcacatgaggtactttatagtaaatttatgagaaagggttcctggagttcctgggagtctt

SEQ ID NO: 45356 - DNA, 1033 bp, Homo sapiens
aattagaaaatatttttctttttagttgttatatttgtaatgactggttcactagacctttctggataaatgctgtttattcagagacagtgaagtgagcatacagatactggaatgacgagaagagacgtgatggtgactttgagaagcaagactgaaaatagagagctgggagttccaaaaattgtctttaccacctgggcgttttccagaagtccaagatgcctcactagattacagcaatgctgcacacaagcacaaaagacttagaatgggtgtcatatttctcgagcactattttttaaattttcccagtagactgtaagaaaaaaatatcagaagggtctttcagctcacctgatcggttatcgttgtcctcaaaatttacatggaaggaatgccccacattgataatttctttggctgtggctgggttgtaggagacactaataggtttcagagaggtgtcatgtttggtttcactggttttaatatcaacaggggactggttatttccattggcaatgggatacagcttgctccattgttcaggacctaccaggacaaacacgtgtaaaatcaatgtcttatcaaatgcttgattccaagttttaggagtatagttacctgtttgcttattagattagggtttatttcagtgtattaaatgatattctcttaagattaatagaaattctgtgtttgaagatgtcccttttctttctttctttccttctttttctttctttctttctttctttctttctttctttctttctttctttctttccttctttctctctctctctttctttctctctctttttttttttttttttgacagagtcttgctctgtcacccaggctggagtgcagtgatgcgctcttggctcactgcaacctctgcctcccaagctcaagcgattctcatgcgtgagcttcccaagtagctgggattacaggagcatgccaccatgcctggccaatttttttgtatttttagtagagatggggtttcatcatgttgtccagg

SEQ ID NO: 45357 - DNA, 1033 bp, Homo sapiens
tcaagaacctcagcctgccatgactttcttggcttcctttactagcatttaatccttctagtatttgacataattcccatgacaacgtgtggactgaatataacgtccttcatttcacaaatgaggagattgaaattgaaatattttgtcacttgccagaagtcccatgtcagggtggcagtgttgatatttgatcctactttttgtacctccagcccaagagttttttctatgacaatcaggaaccttgagattaaaaacacattgaatgttgtcatatgttggtaagaataaaataccaaaaagaaaatgccttctacacacagcttttctcatgtactcactctaaccttctatttgcacaattggaagcaaatatatcagcctcattgagcttcagtttttttgtttgtgaggcagaaataacaataacaaccttacacagttgtgaggatgagtaaatagtatatataaagtgtctcatgaaaagatagcactcagtgaatggcaactttcctataatgataataattattattatataggagatcaggtaggtgaaaatgttttataaattgcaaattgataaatgcaaggtactcttattataattattttcttacatttaaaaatatttattcactaattttagaatacgttttaatggttggatccatttagtatattcactttagtgctattctaagccattattttaggaaattaaaaatttaaaattagtttaactgaagtgaataccaacgcttctgaaaagtgctttccttttttttcattttacttaatcttaaaactaaatgtctttctgcaagaagagataactcgagacttctgttgggatcaagtatgattaatagcctgaaatcagaaataaagctgctttatggaagagtaagaaaataaggtgcagatgaatctcctaaattattctttgtgtactagaggaaaacaaaataaaatttcctcaacccttaaaaactttgtgagctctaaaaccattgacaaacataattta

SEQ ID NO: 45358 - DNA, 1037 bp, Homo sapiens
gataagggggactactgtatatacaagggaatattattcagccttaaaaagaaatgatacatgctacaatatggaggaagattgaagacactatgctaagtgaaataagccatatacaaagggacaaatactgtgtgattccacttatatgggataactagaatagtcaaatttatagagctagaaaatagagtaattgctgccagagctcgggggaggaaggagtggggagttattgtttaatgaatatggagtttcagtttggaaagatgaaaaagttctggagatgatgcgcgatgggggttgcacagcaacgtcaatgtacttaatgccacagacctgtataccttaaaatgtttaaagtagtaaatttaattttaccacaaaaagaatacaaaattaataataaaattagtgacaaaagtgaatatctatttagaacaagaaaatgatttataataaatcaaatattttacaaagttaaatatcaaaaatatcacaaaatctaaaaaacaatatttcatattcagccactgccagacacaatcctctaagagcttttatctatattttaatttcataattctggattatctcttcatatagcaaaaattttatattattttctgtagagagaatagaaagatatttcagtcttatttcaagcatggttgattaaaatttttgtttgttcttattaatactgggattcataaaacttcacacacatttgaagtactgctataggtttgtgtcttaatacacaggattctttaattttgtactattttcatcaaaaaaattttgtaacatatgatgtggttttaatcgtacgtaagacattatcagatacattcctgagagaacctgtcttaactaggttttctggtcaaattctaaaaccaaattctctgcctgcagctttacacactggatgattgaaattattttccctcgattagctctgtctctgtgcatttcaccatctgtttctcttcaataacctacaaatttctgaacctgggagccattaggaa

SEQ ID NO: 45359 - DNA, 1048 bp, Homo sapiens
atacttgttaactagtatcagtgggtgtctctggcttgaaaaatggatgtctctggcttgaaaaaatttacttagggatttcataccagtttaaaattatttaaataccaaataccaaaccatatgccaatatatatttgtaggatttcagttgactgtaacttataagagtaattcatattatatcacagtaattatttttataaaaacatcacaagtcaagaagatggattaggttaagcaaagcaaagtaacaaacattatagagccatatctaaagaaaaaatacatattttttttacaatgacaaggtgcctcctcatcatttagaggcaaaatcaaaagtgtccaaataactttctaaagccaacagataaaaactaatcatatcttaatcttagtgctaagacagtgttggtgggatttttaaaatgcagtgtgttatggtttaattgacagcattttttttttgtagatgagtataaaataagttcatcttaggatcagtggagaaagtagaaatactgagtagcattttctttttgttcccattgtaatgtagggcatggggtggttaatttattttcatataaatgtcagaggcatttgaaccagagcaactccatcttgaataagggctcggtaaaataaggctgagacttactgggctgcattcccagacggttagggattctgagtcacaggatgagataggaggttggcacaagatacaggtcataaagaccttgctgataaaacaggttgcagtaaagaagctggctaaaccccaccaaaacgaagatggcaacaacagtgatctctggtggttctcactgctacactcccaccaatgccatgacagtttacaaatgccatggcaacatcaggaagttaccctatatgatttaaaaaagggaggcgtgaagaatcaaccccttatttggcatataatcaagaaataaccataaaaatgggcaaccagcagccctcagggctgctctgtctatggagtagccattcttttattcctttgctttcttaataaact

SEQ ID NO: 45360 - DNA, 1095 bp, Homo sapiens
tgatttattagaatcaagtaaaggttgtacattgaaaacagttcggtgattctgctacattgctttcccaagcattcctctcactccaaaggaacagtgctcatataattaaattaaacaatttttttcttgtaaagaatactgtatatttataacaagacaaggccaaaggtctcaaggtattacacatacagaaagaatactataacatttcacgtctagtcatttacaaaccaaaagaagtgagctactttagtctgtagctgtacttttttaaagagccacaatgatgtcattgttttcaatggatgtaatgtctgccaaattatgtatctcattggatgctacatagaaattggatagtttaagtcttttttggagcactgaagaaacaaatctccaacaaatgaaagcagatgaggttcctaatagtccttaaaaaatggatagtgaaataaattattctagtaatatgtattactggaaagtggatttgaacacatggtctggtggctatcagcatagactggggtcagagagacctggatttgagttctagagctgccggcaactagctcagagactttgggagtaatactgtctaggttttaattgtttttaactgtaaagttggagtaacaatagtgtctgccacagtggaaggatgaaatgggacagtatatgtaaagcccctagcccagtgcctggcgcatagaagttgctcaataaatggcctctgttgttgtcacaacttgaacccttcgaccacctctgttagaccattgctgtagatgttgcacctgcgataagatttctgaataaactttttctttaacagctttaagattagttcccatcatttgatgtattttaaatttttatttttatattttctgaagcatactgtttatcatactgaatatgtacttattttatgtatgaagttattatatagttacatattttaccatgaatctgttaaactttgacagatttctctataagcagtaactaattagatctagctacatttttcacagctatttcttctggagagcaatgcatacatttttaaagaagttggccatgtttaga

SEQ ID NO: 45361 - DNA, 1053 bp, Homo sapiens
taaaattatttttacattagaaaatagatttcattttaaactgcaacagtttagaaaatggcatgtagtcatttaaataaataagtagatccagaatatagcataaagtccctaacttaaaccaagatattatgttttatgtttctcaaataaaaagtttgagtttatggcaatttattataacaatgtttttgaaggacttcattgactaaactccatgctaagagtttgccagaaatgctgccttctgtagcaagtaaactttaaggatttaataacattttctagttacagtgggtttctaatcttcataggaacaagttttattttaacaggggctaaaacaggtatctggtgataacagattagcactgaatgtgtttaatcattgagcccagagcactttatctttttttttttttagtgttagctgttagcaagtattgtttactaaaggtttgcacacactcttgcctaattctaaatgtttttagaaacaaattaagatgaaactttaagatttgttagagaaagaataagaaacagcaataaactttattctccttaaaatgtaagatcctgctatgattcttcactggggggaaagaagatacatttagaaaattggttatctcagattcttagtatggttttagttagttagttttaccacttggtagagttaatgatttgacaaatgacatttgcttcttattatcagccagttggttgctagctttaaagagttattataaaggatttttttcagtattaatttatttcataaacatatatttaatttttatatattattatgaaaaaagggaattatttcattcttttttaaaaaagtctagaattagaggctaatatttccttatagaattgtcaggaaacaaactgttgtaataagttgtttttgtgttccaagagatgtgactttgtcagaatacatccaaattcatatttcttagcagatctttaacataacaccatttataattctttctgttttcattcttccttttttctcctggcctattgtaaagcaga

SEQ ID NO: 45362 - DNA, 1015 bp, Homo sapiens
ggccagtagctgcatgggcacttcctaaatgtttcacagattattagtttcacttagaattttctctctctggacctgaatctatgactctaaaacaaacccagaaaaaggaatcagtatgctcagaaagaaagatgtgaaaaacatccattctccagacaacgcatgtgaggaataaaaacaggtaaagtgattttgttcagcaccgtagactaaacttgactctggattgaattttcagagtaaaatgtgattaaaggcaaacatttagtactgtaaaacagaattaagattgtaatatttaggcatgtgtttcatgtgtgtgtatgtatgtgtgtatacctatgtatatatgtgtatgcagatacatacatatatgttacatatatatatatgttttaattttagtgctcaagggaggacccctggatggcacttacagattgattcagtttcactttcactggggttcacttgatggacaaggttcagagcatactgtggataaaaagaaatatgctgcagaagtaagatatacttttttttttctttccagggaaaaatgtttataagttgatatttagcattaatttcaaaagcttaatttgtaaattcaactcacgcccagtgaaccacttcttttacaaaggaccttcacatttgctttttataacctttaattgtgacatcatacttaacgctgcaaaactttctctactgtctccaactccaccatttgcaaaaagtaaacggactcaaactggaggatcctgttttaacagaaatttagaaataaaatgtgtgccttctgtcaaaactgtacatttatttgtcttagagttattgatgaaaacacttgctgttataccaagtactgtgtggatgattagaattaaaatgaaaggaaaattttgatttaaaattatccatattttcaatttcctgagtaacctttattgtgagaaaaagaccattgaataaaatctgtcagctttgattatgtaaatcactcact

SEQ ID NO: 45363 - DNA, 1453 bp, Homo sapiens
agtctcactttaaatactgggtgtgatcagctaatgacttaatggggaatgtaagggatcattttagataaaaggccaagatgaaaaatggacatgtgaaaatagtttttttttttttttactacgacttgccacatattttcaagttgaatgtcttctgttaatttctctttattttgtttgccagtgaatatagaacctcttttttaaaaagtgtttttgaccatcagaggggagtatacctatttgtgtctgctgctctcctaccttcctcctactctgtcaatgtgatagtttgaagctgcgtatttgccttgttctagggcaagagtgctgacttcactaacttcgatcctcgtggcctccttcctgaatccttggattactggacctacccaggctcactgaccacccctcctcttctggaatgtgtgacctggattgtgctcaaggaacccatcagcgtcagcagcgagcaggtttgttttgtaatgacaggtctgtttacgggtggagcatttagtcaaggcagaagaccttggcctccagagtgagagagaactgagatttaatccttctcctgctacttcttgctatggaaatagtgcctttgatggtgcctagcaaataaacagcgttcagtaaatctttgttgttattaactataaacttagttcgtttagtctctaaaattgaatagtcattgtaaggattcaatgagaaagatgtctgtcacctaataaatgcctttttttttttttgccagttatgaggaaactaaggcttagaaaagtgagagttcatattcaaggttacgcaggtatcagtgagttaccagcctactactcactcacataagggctttctgctattttatttatatcagaatgcatttctgaatcctgacagatgagagtcatcccttggagaacatgtatctattaaaactcactccaggttgctttagaggcttagagcaggtattcttacatttccaataaaatatagtgtgtgatcgtcaagtgattagtgcagcttctaagtcactgatgagcagccactaaagtggatacaaatgagtttttcctagacttacctcttagcgcacagttgaaatgtagaaagtgaacattccttaggattcacaagaggatggatcctgaataatttaaggatagctttaggagccaacagtcttgaaaatggtaactatgtgagtagtggtagtgtgatttaaacctacaaaaatgctgaataatagaggtttagagctgcaatgtgcaatagagatcatgttgtccaactttctcatttcactggcttgaatcacattgatcaacagtctgagatgcaggaaaattgaagtgttttccactcagctaccttgcaacagaatcaggcctgggagcaaggattctattcctgtgtcctcccttagaatatgaacttatga

SEQ ID NO: 45364 - DNA, 1042 bp, Homo sapiens
ggagagggcggatgtctgttaatgaggaagtatgggggggcgtggattttaggtaagcagtataaatgggtctgctaattctgctacctttattttctatacccaggctctgtctctgtgatgctaaaacaatgagtcaagttgactaatgtgacagtgtagtttaattggtgcagtgagtagcagaaatcggttatactggtttgatcaaaagtttgacctgtttacactttatgaacagactctctttcagattgctggaattctgttgtaacgaatcaaccctatatatccttagaatgctcccttgcattcagtaaccatagctgtgcatgttataatgtatgtgcatggaaggtggctctacgggggtgattgagggactattactggacaaaagagatcaggttaaaggctgttgattcatgggctgctatattactgtccaaaccacccttttgcatttggatcacgtcttggttagaggggggaaagtagcactttttgagaaccttgaagaagtgggagactgttcaacagctgcctgtatctcagtggtggccagtaaactgaaacaagtttataagggaataaaaatcaaccagtgacaaggggttctaatgttaaatgcatatattggcaaaatgccagtagggctatgtagggtggtgagcactcacaattgttcactaaaatgctgtttttaaaacaggaaagtagaatggttgagtgcaaatccatagcatgagataaattgagcttcttaaggcaaatcagcctaggcaaattcatttccgtgtttttgtgtatttggagatgccagctcgtcactcagcccatggagcttacaggtcctgatcacttgatctaattgtatggatgtggtagtttgtcttccctggggcagaaaacaaagctttaatttggaactaaaattgttattattttgcatctaaaggtatgagtttatagacttttgatgttagatttttaaattagaaggtcactgaaaatttcccttaaaaatgaccccaacgaattt

SEQ ID NO: 45365 - DNA, 1033 bp, Homo sapiens
agatcttcttaaggtttagacttgtaagggatacagtatcatttctgccttattatactggttaaagcaagtcacaaatctagcccaggttcaagggtacaaatgtgtgaatccatttggggccacccatgtaacagattaccataaattttatttaagtataacatcagctttactataccaaaacaggacttacggaaaactgttttggaagctgaagcttaggcagcttactactttccgcaaatctggattttgagtctgagcatgccacagggaaagctgagtctaaaaagtgcaaatgacagcacatctggcttactacgcaaatgggaatacctagcactctccttggttagaaaagaggagaacatttgtggcctctgaggtttttcctagtgtgccaccataatagggtaggattgacttgccttctgcttgagggcagtgggatctaacaaagtacaggacccaagagtccatgctgcttggaagtagtgatttacccgatctcgtgaattggaacagacagcatcccatgcagaaaatgggccacagatgggcagagatcgattccctctgcccttgtgattggatttgagacctaggggagaagggtttcttgactatcactctggccttgaccagagtgagcaacctgtcccccacgcgctccaagccccaatggcattttctgtttgcagtgtcttgaaaaagcttgggataagctactcttccttggagaggtgtcattatagtggagagaattctctttccttctagagactggaatggtaatcctctcttatggaaatacaatgaataaggtgctgcttctcctttccaagaacaggtagattcattgattgctatctgggtttttctcgcattatcacttaaccttatccactatcgctttattttagtcttagcagtattttttgtttgtttgtttttagttcaagttggctgctaagtaatgccatggttaaaggtgaaatgaagaaaatgagtgtttagtttttattacatt

SEQ ID NO: 45366 - DNA, 1057 bp, Homo sapiens
tttctgattcttagctgcctaattttgattagaagtaatataaaattaataaggttcaagacagccttgaagcaatttaaaaatacttttataaatgatagcattcttggttgcctttgattcagtctcttggtttagtacttggactctgagttttagttggctatcagttgaatgagctctacttaaattttggggttattgtatatttacctttaaaaagaagtaaacaggctaggggtggtggctcacacctgtaatcctggcactgtgggaggctgaggcaggtggatcacctgagctcaggagtttgataccagcctgggcaacatggtgaaaccccatctctaccagagatacaaaaaattagccaggctttatcaaagatacaaaaaattagccaggcatgtgcctgtagtcccaactacttgggaggctgaggtgggaggatcgcttgagcctgggaggtggtggttgcagtgagccaagattataccactgcattcaagtctgggtgacagagtaagacactgtctcaaaaaaaaaaaaaagtaaacaactgccaagaacaaaataagtaacccaagaaaaacatgacatcctagtgttgaagaaaaatattcagtactaaaaacattttttgttcctatccttaaattctgatttgaggggcaaggttattgatagagatattatgtttctgaggtgtgctctatatagaaaatgtttgatagtcagcaccttgaatagaattgtgtatatttgtgtataaggctccagtggagggatgttctgcagtgtgtctgtgttcctcatctatttgcagaggatagatttttaagggatgtagtgaaagaggaatctcctgagaggaaagaaagtaggctgagtttttaggtgttgaggcagtgaaagaagagaacagcgaaagacaatctagctcttcaggaagaacccgggatctagcatgcatgaaaacttccagtatgatttctggcaagacatttttttaaaaaaagtttatggtgtgaatgaatggcagaaaggataaaagtcc

SEQ ID NO: 45367 - DNA, 1050 bp, Homo sapiens
atagcaatctggtatacacagagatatttatataaaacacacttcttactgtgtaaactgtggtcaaaaaaagtttaaaagccactaatccaggggagaaattaagagagcctgaagtgaggtaaatgctaatattttaggttgacataagatgggtcttgataagttgtggggagatagaatagaaaaagagtggaaccaaggtggattcttctggcatacacagcaccaggctgtgtaaccctttgagtcagcagttttcaactccacatcatcttccctctttgcttaaaaatcttaccttagttcctgtgttttcttttgtttggtaacttactgagtcatttagctaacaacaggataggactatgggtgcctcaatcctgttgattgtaatgtacagccaagttgagaactgctacttcaagttcttttgttaaccctttactctccacattttttaattcactttatatagagatatgtagatgaaataaaaaaattctgtgtatcaaaatctaaagtatgcatcagtgaaaaattggacagtgtattaatattgagtacttttcagagagattaaaaatacattctgaatcccccccccatccccccacccccgcccctaaatagcgattaggcaactgggtcatggcatatttgactgaaataatgatagaatgttggacttagggtaggagagtgatgagaaagtgttctgtattttgtagggcatccagttgatatatgtacctcatgccgtataccaaggaggcagttatatgtacagttccagaactgaagaagaatattctagcctggagataacatttgagtgttatgccaagcacgattttgcctaaagaactttgcatgtgctcttttatgtattctcaaatatactcaggttttgttaaaatgttacctcattccagaggtgttttttgagtctcctgtccaaatcaagccagtttccccacatttccgtatcctgctttattttccccaacattttatgttgaaaatttacaaatgtacagaaaattataa

SEQ ID NO: 45368 - DNA, 1026 bp, Homo sapiens
tgattgaagatagtttagcatttcatattaaagtacatttaatttcattacagtttgtgaaagagacagacaatgaagtaagaatgcgactattgcagttcgtcactggaacctgccgtttacctctaggaggatttgctgagctcatgggtaaatgtaatttcactgtaatttctctgtacgtaattttgtgataataatggcctttggacatacaatagacttgattgaacctaaagattactcttctgtgctgtaggtagggcttcatttagaagaaagaaaaatgagtggctaatatcaaagcacttgtaagacaaaaatgaatgtgtcctcatatagctgaggtggccattgctttgctccctatggtgactgtgaagggagcgacattctgtagagagagttttcttcccaatgatctaattcttattgctggatctctgcaacaattttcttcttcaggcagaagcagcttacattgtgaatttctttattttgtatcattcatatgactgtgcaacatgttctattatttaagcagttgtcagaagaaaaaagtttaaaggaccagataaactttgtcttattttcttggtgtaggaagtaatgggcctcaaaagttttgcattgaaaaagttggcaaagacacttggttaccaagaagccatacatggtaagttcaagaatcctaaatacgaaggtgaaagccacagagaatcttttgttttgtttttttaaaaatatgtaagatccagtataactgcttattcattaaagtagtcagaatttcaattttgagaacagattaatacagcattctataactgaacactttagcatgttctcattaatagaaatatttgagaaatgcatccagtgattcaacaagtattagtgtacccactaggtataaagtaagatgtaagtattccctgttttttatgaagtttgtgccccatggtggggcacaaatgacaaacagataaacaaataactatttgcaaatcctgggaagtccttcga

SEQ ID NO: 45369 - DNA, 1027 bp, Homo sapiens
acattaacagacatctacaaggtaccctacccaagaacaacagaatgtacattcttctcacctgagcacggcacacactctaagataggccacatgcttggccataaagcaattctgaacaaaataaaaaaaaaaactgaaatcaaaccaagcactctctcagatcacagctcaataaaaatagaaatcaatatcaagatctctcaaaaccacacaattacatggaaattaaacaatttgctcctgcatgacttctgggtaaacaatgaaattaaagcagaaatcaaagacttctttgaaactaatgaaaacaaagatttaccatcccagaatctgtgagacacagctaaagcagtgctaagaggaaagtttatggtgctaaatgcctgtatcaagaagttagaaagatctcaaattgacaacctaacataatatctagaggaagcagagaaacaagagcaaaccaaatccaaagctagcagaagaaaataacaaaattaagagctgaactgaactgaacaaaattgagatgtgaaagccatacaaaaaaaatcaatgaaaccaaaacttggttcttcaaaagaataaacaaaatttatagactgccagctggattaatcaagaaacaaagagaggctgggcacagtggcacatgcctgtaatcctagcactttgggaggccaaggtgggtggatgatgaggtcaggagttcgagaccagcctgaccaacatggtgaaaccctgtctccactaaaaatacaaaaattagccaggcatggtggcacacacctgtaatcccagctacttgggaggccaaggcaggagaattgcttgaactcgggaggcggaggctgcagtgagctgagatcgcaccactgcactccagcctgagcaacagagcaagacactatctcaaaaaaaaaaaaaaagaaagaaagaaaaaaaaagaaacagagaagatccagataaacataatcagaatgacaatgggaatattaacactaacaccagagaaatacaaaaacca

SEQ ID NO: 45370 - DNA, 1030 bp, Homo sapiens
gccagtcaaatttagcagtagggggtgtataccaactttagcaacactgatgttagtaagttcttatttttaactttttaactttaattttattttttctgcttaggtagctaataagttctgatagcccttcttttttaaaaaaaaatatttatttatttatttgtgagatgggacctcactctgccacccaggttggagtgcagtggcatgatctcggctcactgcaacctccacctcccaggctcaagcaatcccacctcagcctccagaatgactgggaccacaggcacaccccaccacacctggctaatttttgtatttttggtagagatggggtttagccatgttgtccaggctgctgttgagctccagccatctgcctgcctcagcctcccaaagtactgggattataagcatcagccaccgtgcctggcccaaccctgcttctattaataacttttattaatacctcactaaatgaacctatgatgaactgttgaattgatggacttgaaaatacaatcagtgatacttccaaaatgtatatacagtagccaagggattagaaaagtggtaaaacctgaaacatatgttaagtaaactttgtagccagttatgaatcatggaatagaacaataccaggattttagagaaattaatgaagggtctttagttgattgcttactttgtaatgataaagagaaggtaaaactgcacctactttttatttttgaagttagagtgatcacacctgttaattcctgctttcctccgttctgcatgtccaagcatcagcaatggtatcactatttagatcctgctcaagatagtttaagaatctggaaactttttgaagtgtggctaaaagctgatttattttgctgccatgatagatgctaagagcttaataatgtgagatttcatggatgctaataaaatttatttccttattgtgctgcatctacttaatagactgggccctgtggtttgtttgtttatttaagtcatctgagcacttaataacaat

SEQ ID NO: 45371 - DNA, 1004 bp, Homo sapiens
gatgatgtggtttgcaggttgctgtgcctgattcacagtgtatgttgtataagccaatgtccatacctgattatgagagcttcttaaattatatgatatcaaatttgttcctgtaactctgtatacagtgcttttctgcaaggtaaaaataacctgtctatgcatctgatttttgctacagtttagacactgtggtttacaaaacagcatgcactcaacttgggactttatgaaaagtactgaatgagcaggaaaaggcacatactcagttttttaaatgtacaatcaacaagtaaaaataacctcatgtaagtaagccatttttatttgcctttctagatattttattttattgtggaaaactgtaaacatggtcagatttggctttttttttcattaactgagcaagactttcaggatattgtagatgcacagatggtaggttgtcctgaattctacattattagattactttaattgagatttgttaaaacggttaggactgttttgtccaggaaagataagaggaccaaacatataaggtgaaattcagaattccgtttccttctaactaatgaaaaactgcttactaaaaaaaaattttatactttccttgctaaggtcccatatattgatttgtacagatccacttagtcattttctcctttttttaagaaccattttcatctgatttttaaactcacgataccagttatctgttaatcaaaattgcattttacaatttaataatgtgatatttcctatgtctacagcataccttattaggtataaaacctactgcaacttagaaaaaggaaagaaaaaagaaaacttttccaactgctgcattaagatagggtggattttatgtgctttttttttttaagagttgaatttcttttcctgacttttaccttttacagcgtattacttagtgaacattacattttcagaatagatcctaatattttattgagggcctatgtgctaaaaactatgcatat

SEQ ID NO: 45372 - DNA, 1044 bp, Homo sapiens
catgcaacatttgtctttctgtgcctggcttatttcacttatcataatgttctccaattccattcatgttgttgcaaatgacagaatttttttctttttaaaggctgaatggtgttctgttgtgcacatatactacattttatttatctgcttctcttttgatggacactttgtttgatttcataacttgactgctgtgaatagtgctatgaggaacatggcatgcagacatctctttggcacactaatttcaagtcttttggctaaatacccagaagtgggattgctggatcatatgctaattctatttttagttttctcaggaacctccctggtttgctatagcagctgtactaatttacatttctaccagcagtgtgcctagcttcccttttctccacatcctcaccagcacctgttgtcttgtctttttgataatagccattctaacaggtgtggagtgatatcttattgtggttttaattcatggttgtctgatgtagtgaagttgaacaactattttcatatatatctgttggttatttgtatgtatccttttcagacatgtctattcaggtcccttgcccattttaaattgggttatttgttttccttctataggattgagttgcatatctattttggatgttaaccccttatcagttgtatggcttgaaaatattttatctcaatccttaggttgtctcatcaccctgttattttctttgttgtgccaaagctttctatttttatgtaattacatttgtctatttttgcttttgttgctttgggtcaaaactaaagaaccctggcccaaaccaatgtcattttatttattttttctatgatttatcctactagttttacattttcagatcttaaatcatcttacatcgatttttgtatatggtaagagatcgatgtcttgtttcattcttctgcatgtggatatccaggtttcctagcaccatttattgaagagactgtctttttcttatgatattttctgataatatctattattgtgttttctgataatatcag

SEQ ID NO: 45373 - DNA, 1031 bp, Homo sapiens
agtaaaaacatcttcttgtagttggaccggccatgactgtctacttcaaatgttctggaaaatattttaaaggagaaatagaacaccaggatatgaagtaaattgtaaataggtggttcatacgtatgtcagtttcaaggaagggaaattgcccttcttgtaagtacatgtctatactgctctttaaaaagaagagaggaaatacaagcacccactgaaaaggttctttttttgttaacattgtgctggttttcatgacttaattctaggtctttccttatgtagtggggcaatccattctacacagtggttgagtgcttaatgaacattttgctgactagtagctatgacagacatgctttggaatttgttaagagcagaaactgtgctgaaacacttcattgggagttgtgaagaagactagaagaggctttggaattagggaaattaggttacctaaaaatgcatgaatgagggtgtttgccgagatcagtggaataattgtggaaagcaccaggacttcttaatggtcatgaaatagtagaccaatgtatgtgtgtgtgtgtgtgtgtgtgtgtgtgtgtgtgttctaatgttggtatatatctagacaataaatattataaaatacaattctgaaaactcaataaatggtttcacatattataaatgtaaatctgttccatgtttattgtggatacaattatagcataaatgacacatatattttgagtatagtgcttcccttttatctgcaggggatacattccaagacatctagtgaatatatgtactagtgagtatgtataccctatatatactattttttttcctatatatacacatctatgataaagtttaacttataaattaggtacactaagagattaacaatgctaactgctactaataaaagatagcagttttatgtgaatttggcctctctctgtcaaaatgacttattgttactgtacttgcctattttcagacttcgattgataggagaaactgaaaggcaaaaacaaaactgc

SEQ ID NO: 45374 - DNA, 1095 bp, Homo sapiens
gtaaaactctaccactatttttcaagaaattatctaaaaatggattaagaaaaacttaaaagtaatactcaaaactataaaactactagaagaactcacagggaaaatgcttcagatcattagtgtatcaaagattttatggccaagacctcaaagtcacagacaacaagaagaccagaagaaaaatgatagcatattgaactagaaggcttctgtctagcaaagaaaacagtcaacagcatgaagagacaacctggtgaataagagaaaatatttgcaaactatccgtccaataaaggactaatattgaaaatatacaaagaactcaaacaactcaacagcaaaaactacacaatcctattaaaaagtgggcagggccgggtgtggtggctcacgcctgtaatccccgcactttgagaggcagaggcgggtggatcacgaagtcaggagatcaagaccatccttgctaacatggtgaaaccccgtctctattgaaaaaatacgaaaaattatccgggcatggtggcgggcgcctgtagtcccagctactctggaggctgaggcaggagaatggcgtgaacctggggggcagagcttgattgcgccactgcactccagcctgggcaacagagcgagactccatctcaaaaaaaaaaaaaaaaatgggcaggccaggtgcagtagcccacacacgtaatcccagcactttgggaggctgaagtggatggattgcttgaggccaagagtttgagaccagcctggctaacatagcaaaaccccatttttattaaaaaaaaaaaaaaagaatgaaagaaaaaatgggtaaagggagggggaggcagagcaagatagctgaaaaaactctcctgcaataccttatctccccaacccctgcactggaatacccagtggaacaacgatatatgcaaaaatcaccttcataagaacaaaaaatcaagttaatgatcacaataattggttttaacatcacagcaaggaaagaggcaccgaagagtataggaaaggcagtcttgaattggcaacaccacccgtcccccattttctggcagtggctgcatggcattaagagagaat

SEQ ID NO: 45375 - DNA, 1048 bp, Homo sapiens
aatatcattatcatccttatttttataactacttatatacttgttaaatatttagtaatctgtgtacagttaattcctagtagaagttatatttttctcaactaatagcttatactgttcttgtgaaatgaagggatatgaaaactaagttactgggtattgttaaggattaatttctgaactgggtggaccccagcaacaataaagtcacaatccttgtgcgcctggtatgggttgatcaattactaacatttgacatagactagagactagaaagtgaacaaagtttcttcatgccttccagagtttcttttcacattcatcaattattgtgattgttacaaggttatgtgaagagggtagaccagttatttttacttccttttaatagagaactgagactcaaagaaactgtgacttgaataatatttacagttaccttttggcaaactcctctttcaaaaccactgtttagagctcaaagtatactacgcttcatcacaagactcaaacggatgaatatattacatgtaaatatataatataattagcatctttggaattattgagcggttgctgttctagactgagaaaaaaaggtagcatttcattaaaatgttggtgttagagaaccagaattacaatgccattcagtattacataataggcctattctgacctgccattttgtggactagatgatatagggaagtaatctaaagtaaaattttactgtaaataaactcttcagtaattcaggaaagcattttatgtactagtgctccaaattcagtaaattaaattctgatgtaatgacctgtctggttccttgttcctaaatccatcaaatgaagctccacctgcaggtccagacagttctggcccaggcttgggattcaatctgatttcctaatcaagggaataaaaaacaaaacaaaacagcagattcaataatgcaatgatttagctgaattattttttttcctatgtggctctgaacttatactgcacttaaattactatgttctgatgtttactaacagctcat

SEQ ID NO: 45376 - DNA, 1130 bp, Homo sapiens
tctcttttaatatactaatgaatgcaaaagcagactctctaagtttgctctgaacacattttatagtcctttaaatggctttttgccatctttaataaataatttgttaatgaatcattttaggaatgaatgctatatctctaccagaaaactatatatttaattaaattgcatattccttttcttcaaaagcattttaatttttgttatttctcattaaaaccaaagccagccaatccattttagtggctgcactaaaacaattcatacagtgtcttttacattcacattgtatgaatataagaaactgtccttttatattttgttttctgatatttttaattcattctgaatgatgtactgaggggaggagaaatgtatttatagcttcctaaggtagagatcatgttctacccaacaattcttaaagctggtttgattctataaaaatgggccaataaatctgccagtcattcattttgtgaattttccctttatgttcaatttcaatattctctgtcagggaaaaatgaggaaatattattccttcatttgggtaggaattccctctgtactcctcgctctccctgtaacacaaggtgttagtagtaataaattctatgtgtccattttgaatgcatggttaatgttggggtgtggcaaaattcttatatcctatttaaccatttattctaattataaactctatgcagcttaaccctgtaattgacatctgaagttaaactgtaggcaagatatttctactaccaaagaagatagtgctgagagcagaaaaaaggcagtagaatagagctccatgagacaatttttttcttgttctttgttctttgtgaaaaataatatcatttaattaaagggcatagcttatctgggtgtccaagaattaaatcatccacaaaaagttaatcttgcatgtaacgttaagcttgtattacagtaatttcctaattttttaacttaaagttgattttgtttccaaactacatgagcatttatcatcttcattgtatacagtaattctttgctgccttatcactttgaaaaatggtatcttcagtcagcttttaaaaatagtgctattttagtttattatgcagagttcatttaaa

SEQ ID NO: 45377 - DNA, 1034 bp, Homo sapiens
ggtgttccatattggcacaatcataggaaaattatgttttatgctttatttatttttcatggaattttacttattgctatgtatctgtcctcaccttttaaattattcattccttgttctttttcagaacgtctgcagcctggtatagcccagcagtggatccagagcaaaagggaagacattgtgaaccaaatgacagaagcctgccttaaccagtcgctagatgcccttctgtccagggacttgatcatgaaagaggactatgaacttgttagtaccaagcctacaaggacctcaaaagtcagacaattactagacactactgacatccaaggagaagaatttgccaaagttatagtacaaaaattgaaagataacaaacaaatgggtcttcagccttacccggaaatacttgtggtttctagatcaccatctttaaatttacttcaaaataaaagcatgtaagtgactgtttttcaagaagaaatgtgtttcataaaaggatatttatatctctgttgctttgactttttttatataaaatccgtgagtattaaagctttattgaaggttctttgggtaaatattagtctccctccatgacactgcagtattttttttaattaatacaagtaaaaagtttgaattttgctacatagttcaatttttatgtctcttttgttaacagaaaccacttttaaaggatagtaattattcttgtttataacagtgccttaaggtatgatgtatttctgatggaagccattttcacattcatgttcttcatggattatttgttacttgtctaagatgcaatttgattttatgaagtatataccctttacccaccagagacagtacagaatccctgccctaaaatcccaggcttaattgccctacaaagggttattaatttaaaactccattattaggattacattttaaagttttatttatgaattccctttaaaaatgatatttcaaaggtaaaacaatacaatataaagaaaaaaataaatatattaataccggct

SEQ ID NO: 45378 - DNA, 2048 bp, Homo sapiens
ggcggccacggcggccgcgctcgggcgcccctcgcgcagcgctccatgcccgtgtggtgctgccgctgctccctggccggtcatttcaggtgacttcctcgccggggatgggaggggagcaggcggggatgccgcgctctcgagctttttggcctggcccgggccgggaccggggtggagggcgagcgcctggaccgcagcgtcctcccgcctcggccgtcctgcctggcgtgggggtggggtggggtgcggtgtggtggggtccttgctccggggagccctgcgctgttcccttttctcgctctggaccgcgcgggtcacgggactgcgggatcggctaggccggactgagtcggttacggcgagctgagacttcccagtagtgcaaagttttagtgaagggggttctacgaagtgcctgcctccctaaaaaaaaattatttcttaaaaagtcttctaaataatgtaatgagtggaaggaaggtagggaactacatttcagtgtcatctaatcacaaatagattctgccttgttaagatgttagccatggtaagacgtgtgtgttgtagaaatttaaagaatgaggcggttttacaatcaccttatggggaaaggttttaggggtgataaaatataatacatttctaaaataaaagtatgttttctagatctagcacatttggtcaacacctcagtcattggtggaaagaccagacactagaaactgattttaaccctggggtgaagaatggttaagcatagggaatactttagtaccttgctttacatatactgatgttccagaataattctatgtaagacttcttccctggtaaaatatgaaattttgatcaagccttcctaaatagtgggtttcatacaatttaggtaacccatgaacttggatggaaagaaaggtatatcatttcactaaattttaaaaactaatattcagttaaaatataagcaacaaatcacagtagtatctgtgactgtcatcagtagagatcataaaatatgtttatatcacattgcagttaatatagaaatactgtttatacttattcaaaattatagtaacacatcactgaatttattgaatgcaacagagaagcacatatatatatcgcgtttactttttatgactgttttaatagaattagttttcttgtaaatcctgtgtatatttaagaacagtattcagagaagaggttaagaagcgtcatcctatagtaaaagagatgtaaggcatagagaaagtttggaacttcttttgtaacagcgataatccaagcttgtctaacctctcagtgagtttagaatgagtctctaggttgtggatattaaggaaaaattgtttcatataataaactgcttgattttaacttttaggcaaatttgttgactactgagacagcggtttgaaggtatcagattcactatggaaacttttaggaaataggttcccctagtgaaacttgttaaactaaataaagcccatgagaatctaacatgcctttcagaaaatattgtgtgaaagctatttgacaccttttgatgcacagtgtaggattcatattcttttgactaatactgggtgttgaataccatttgcttcctgccgtgcacagaaatttggagtagggagtgaaaacaaagtatttgctatgttttggtctggagggacagaaagaaaaacaagctagctgccaaagataaacattatgattaataaaccacactttttattgcaaaaacagttctgttgtgtctaaagtatttttttttttagttgtttaccagctccttcaggaatatgtttctgatttaccagtgctatttctcgagcagtttcaggtcagttcaggtcatcctggccaacatggtgaaaccccgtctctactaaaaactcaaaaattagccgggcagggtggtgtgcacctgtaatcccagctactcgggaggttgaggcaggagaatagcttgaacccaggagacacgttgcagtgacctgagatcgcaccactgcattccagctgggcgacag

SEQ ID NO: 45379 - DNA, 1035 bp, Homo sapiens
ttcccattcccgtcgcctctgatttcattgagcagtggtttgtgtgtgtcatctctgatttctttgagcagtggtttggaggtttctgatcaaaatgactttgatcagaagcctccaaaggtacaggagaacctaacctttgcacatactttggagaaataccagggacagagcagaatataaaacatgttaaatgcagttgccaagaggtagaagcgggcatgggcaagacagctgaggcatctggatctgatcagaggcagtagttggaatgagtcagaaatagatggattgagcatataaaacttcctcccaagggtaggcttgcactgtgaggaggggtttcccttagtagccatgtctgattggtgtctgttttggtcaaaagaggctatgtaaggggaaaccaaatatttggggtacaggttactttctttgcttcaagaaagctctcagtatgtcctgaggaagtctcgcctatcctagggtagactgggaactctgaaggttatagggaagtagaaatgcctgtctctgcctgattcttttctgtttatcaacctcctctgggatcagtgagttcaatcttgtgaaataactgatctatcccatgcttatttatcatctgagagtagtaataaacacacttacccactagtagatacttaatttaatacttccagacattgtggctgttactgactgtatgaagataaaattaattaagggattctattctaaagtaatctgttgtataatgcagaacattacctgtgtgcaggagatactccatgtattgcatgaaaatgtgagaatgctaaaactaatttctagagagccaattgagaaagaaaaattggaaaataacattaagaaattattttaatatatttttgaagtctgggtaacatagcgagatcctatctctaccaaaaaatattttttaaattagccaagtgtggtggcacacctgtagccctggctactctggaggctgaagcaagaggatgacatgagcccgggaggtggaggctg

SEQ ID NO: 45380 - DNA, 1064 bp, Homo sapiens
tggtatcagggctagcctccctcaaagcaggtggcagcttgctacattctctttcttgggtgatttgtatatagtcacaaatgaggtttcacagggcctagtacatagtaagtactctgtgaaagtcagttataataataataataatatgccccattttcaaactgggtgttatagaagcagggcaagaaattatgagaaaaggagccactgcctaaaagagttgattgaaagagatcatagaggtcataggtataacaggtacttggcctttgggcttttcttgctttgtattgaacaaagcagaaataagtaggtcaagggagcttgatggcaagcagtagcctcagctcgtttgtttctcaggcatccactgcctatttctgtatccttaagaagagatgctgctgtatccacatcagcctagattttagaattataattgatggaggagggaaaagcttctttgttgctaattaaaagaaagttaataatattaaaatggaaagccatctaaaattttggaacttaatgaacatttttccttttgttcaaaaaatgaatatactgaatttttgtttccctgacataatattgtacatctgaattatgttgatcatagaccaaagttatcaacattgtgtaggcattggataatattgtaaatttgttttataaatttataactatatgaaagaaggttgtcgggataatatcaagtgatgaaggtatatgaaagtttattggagtaatgtttttgaggtaagttagccaaccatttaggactgcaggagcgcaccttgtccagagtcataattattgtaaatgagatggatatggttaaaaaacagaccaaaaaaaaccatgttacttcttgttttttgacggtacatttttttttttaaactctaatagaatatggaaggctccatgttgacaatcagctttggaagttggatggaactacctggacttaaatttaaggactgggtatcaagtaaacgaaggtaaagattgaactgtattaaaattctttggtgtacgttgaaaaagagaatgtggaa

SEQ ID NO: 45381 - DNA, 1021 bp, Homo sapiens
gtgtataatgttttataagcgtttaggaaaaagacaaataatataattgaaaaaattgacaaagactgaacaaaaattatatgcagaagaaatataaatgtacataaaaaaagtgaaaaatgatcagtttcattagtgttcaagaaagggcaaattaatatacaaacaattttttctcattagattgacaaaaataatattaaaagtcaacagataacattcaaaattgaagtatgggcaaatttcatattctctgtggttatataaattgggctgacacttttagaacacaaattcccaatattttgattagagaaaatttacaaatttaggtaggtctcacaccagttttacttctggaggagatggagggtaagattggagaagggaggagaaaaaatactcactttgtatacttctatatcactgaatattttagagtaagaatatcttcattacttaatacttatgtattacttaatgtatttactttaaaaaataattgcattgagttagaactgtctacacaaatagaaaatgcacccaacttgaagcacaaatgtattaatgagagttcacttttgtgtcaagtgaggacacgtccctctagaatgtatagcttagattacaaattaccaaaatgtcatctcatttgtaagaaaacacaagacatggtttgctcacagtctctctactgctactgaaacttttgtaaacattctttttcccttttaatgaacataaattcaacttctctgttgattcccagagactccttagttgtttccactgcatatgcctcactaaatcagacttcagttaattaaattcgctttacagctgctacaattcttttgggccattaggcttaaggggatctattaaaaatataattttatgatgtcaaattcaagagaaaaatggaagatattggacttgggcagaaaggtgaactatttctaagcaaataaagaaagccactctacccattattcttttttttttttaataaacaagttga

SEQ ID NO: 45382 - DNA, 1035 bp, Homo sapiens
ccgaaacttgattagatcccaaagatgggagaagcctccaaaagaggtgatagtttgtgtctctctaacatgtgcaattgaaacagcataaccaaatatctaggctgaaatttatgtcaaggtaagcaacaactgtcattcgtgctagatctaatggatgtgttttagacattttcatatttgacctataacaggtgacttcgttgaccattccttcctttaaaccctctcttttggtggaatctcatgacactaaaaaattctgatacttttactattattttttttttttgcaattcaatctctcttatgaattcttctactgcttgctctgtaactgatgctacttattctttcatttaacaaatgtttgttcagtatccaccatgtagctggcaccgttctcagcactgggcatacaacaatcaacaaggcaaatttggccccttcccttatagagtttacagtctagtgtaactgagaaactgaatgtgaacaaggacctgatgagtgagacccaacatgaaccaagaccaggtttgaatcacacacttccatcccactccatgattttgccagaaataattaattcaaattcctctgtagtaaggacttagacatctctaaagcaagccagatatctgtttagaagctctggccacctttcatccatctgcctcgtggatcttatctcttgaaatcttttagcacttcaaactcaagatctcaaaaattggtctgttttcttattctgtgaatggcatcctattatcaggcaaagcacttgcctcttgttctttttttctctcttaccttcatcctaagttcctaagttctattatgatatatcctatcacttgaatttaccccctattaactcttgcctagattactaaaaaaggtgcctaactgctctctattggttttaatcaaatcccactcaaaccattcttcacagtacagtcagagccacctttttaaaaatatataatttgggagtgggatttttaagaaaaataatacaaaagaatacag

SEQ ID NO: 45383 - DNA, 1032 bp, Homo sapiens
cattgtcgtccccaatactgagctctactatttacttggaacatattcttccagacattattatgtgtatattgacattgatatatatgtgtacgtgttgttgttttttccaacagtgagattatactatatgattagtgcagttgcatccccttttccttcattttatttaaaggctgcatagtgtctcatgaaccttaatttttttcaatcaagttccttttaatggattttcaatttgaatccaaccttccatgggaaaaacaggattgaaataaatattctcatatacattattctcacactcacgttcaagtaattctgaattctgaatggtagattcccaaacatgtaattcctcaatcaaggcttctctaaggtgcacacccaccagcagtttatagaagtgccaaaattatccactcttcacatacaattgtgaaggccttcctaaatgcattttttttttgccgtatcttatcacgatcagtcaatacataactcagttttaattaggcaattgtgtttgaactctggcattaaagctttgattttgtatttctaccataattagctataatctaaagcttcaggagtataattactacctttcctggccctaccctgtttatgactgttttcataaccttactcatttttactgaaccgttttgcagatcttgaagttggtagttaagaatagatagttgaggccgggcgcggtggctcacgcctgtaatcccagcactttgggaggccgaggcgggtggatcatgaggtcaggagatcgagaccatcctggctaacaaggtgaaaccccgtctctactaaaaatacaaaaaattagccgggcgcggtggcgggcgcctgtagtcccagctactcgggaggctgagacaggagaatggtgtgaacccgggaagcggagcttgcagtgagccgagattgcgccactgcagtccgcagtccggcctgggcgacagagcgagactccgtctcaaaaaaaaaaaaaaaaaaaaaaaaaaaagaata

SEQ ID NO: 45384 - DNA, 1001 bp, Homo sapiens
gttggaacaaattttcaatgtttttaattctcccttttctgcctgttcctaaaaactttcaaaataaccatttcaatgtaatttgtcttgaagaagtttacccaatatctttgtcattgcaataatgtagtatggtgatggtcaatttaattattgcttataaaatgaacttgattgcagtaaccatggtatcgatgagactaatgcagtgaagctttattactaatatatatagccttatcaaagcaagctaagaagcttgctttaataattaataatttaaaaatatttatttagatgggattcagttgtttaaagaagtgagataaattcaaaggtaaataggtattctctgtcaaatttaaatctctaaagaattagagattagttttttatttgtgtataatttaaaaaagacctaataggttactgtctttttaatgcatttgttattctttcgtattttttaagcatcggactggagttagtaccatcatctcttgagtctttcataactacacatttttatatttccttttgtgttttctactttgctttccttgaaggaacaagcattttgtggcctttaccttgtgcaattttagggagtagcagtgtaaaaggtccaagaccacatttacttgaaattcttcctcttttctgatttgtcttaccagatatttcccttcttgcctcattctctaggatttgaataaaacctttgccacttattttattagccttattaatgtcacctttccttcaactcaaatatttgagaaattttatgttacatatatgaatgaagttgaaagctactgtttggaagctaagacttgtatagagtagttttgtatatgaatggttgttctagctcagatttcaggttactcacaacagtattctttctaagaggatatatacaaatgtctctcataatttatgtaaggaaatattatgaaaatgagacttttttagtttgatgtgtgtttcccaaacta

SEQ ID NO: 45385 - DNA, 1059 bp, Homo sapiens
aatccaagcactttgggaggctgaggtggtggggatcacctgaggtcagaagtttgagaccagccttaccaacatggtgaaaccccatctctactaaaaatacaaaattagctgggtgtggtgatgcataactgtaatcccagctacttgggaggctgaggcaagagaatcacttgaacctgggaggtggaggttgcagtgagccgagatcatgccattgcacaccagcctgggtaataagagcaaaactctgtctcaaataaaaggccagggagtgggggagtttatctaagttagtcaaaaccaagtaattaaaatatataataagtagcatagagttttctagtgataattaatagctacaagcatggaataattaaatattaagagaggctgtctggtccaagttctaggcctacatatgatatgcactacattgaactgaatataggggctagtgagaatgagcaggctagaataaagaaagcatgcagctcattagaaggaaataaataaagctgggcaaattagaacagattaagctcaaaagatacttgattttgaaaataaaaactgatgtggagccataatgactattccatagtttgagtctttacagagatgatctaagcaggcatcattcaactaatatttattgagcaactattatattccagatattgttctttgaatgctagatgattcacacacagaccctgtcattggaaagtttcctatttaatagtagaggtaaaatatacatgtgaatcatagaatcaacataaatgcccatcagtgatatgctggataaagaaaatgtggtacatatataccatggaatactatgcagtcataaaaaatgagattatgggccaggcacagtggctcatgcctgtaatcccagcactttgggagtccaaggtgggtggatcacgaggtcagaagttcaagaccagcctggccaagatggtgaaaccccgtctctattaaaaatacaaaaaattagttgggcacagtggcaggcgcatgtaatcccagctactcgggaggctgaggcgg

SEQ ID NO: 45386 - DNA, 1021 bp, Homo sapiens
catgtatctttcccaccccttctactgactcacacacccatctcctctagaaacaacctcacacagacacacccaaaataaagctttaccagcattgtaggtattccttaatccagtcaagttgacacctaaaattaaccatcacactagacttcttatagttctatcccaaacaactgtttgctcttaatggaacatcatttgttccaaataactcagagaatctcagcttaaacttcactttttccaggaagcctttcctgacctcctaataccaaattttccatatatcactgtttccttaacccttcgtaacacttctcattctcatagcacaactttgtccttgcctatttgtgagtttttaaaccttcattgaatacttgtgaggggtatacacatgcaaagatttgaaaaagacagcaacaaatatcaacagcaataatagtggcagtcatggcagcaaaaacaaacaaatgaaaatgcaagagtcgacagcaacggaagtaatgctatgaagtgttttcaagtagggtggaagcccttatatcataacatgagatactgaaggaacacattggagtctgaaaatctctgcagctaaaacaatacaaaggagagtatcatggcaatggaagactatgtaggacttaagaagaggactcccttcaaggatttgctgcctagctgtagggaatggggattgcagacagcctctagctgttagctctttcagtaacttaagtaatccattcaacaaccgtatgacttaagggcttctattagcattttcattttacaaataaagaaattgaagtacaaagcaattaagaaatttgcccatagttatagtacctgccagaggtgagatttcaacctagatgtagtgtaactcacagtggccatgttatgttgccctggagtggtcagaggaaatgaagaattcaaagagctggcagtccaggatatgggggtctgctcgggaagatgtgctgaagaattggtcagtacagtgattaga

SEQ ID NO: 45387 - DNA, 1728 bp, Homo sapiens
atggaggttgtggtgagctgagatcacaccactgcactccagcctggaaaacaaagcgagactatctcaaaaaaaaaaaaagaaaaagagaaagaaagcactaacatccctactgcctctttttcccattccttcttctatatgtctccttcctgcttccttaaggttgttactgcccagctcagccagaaaccacatgaggagtggctctttgagagcatttgaggttccagaacacctccattcctgaggggagtctcttgagcagcgatttggggctgcgccagttgcttggtccttcttcctttggaccaaaggtacagaagcccaactttgtactaaacaaaaatgggcagccatagggctgggagtgcccactggagactgggacagaaatatctagatagtcatagtggcataagatccgcaaatggagattatagaatctgtgttttaagcaagtcagacaaaccagagaatgctggaaaatttatgactgataactagagatcaaggcagaggctatggggcagggtgggtgggggggttcaccagtgtttaagaattaagctagggatgaaaattttttgttttgttttgttctttgtggcctggagttggggaggtggtgatacatgaagacatctggaatcctgagtagttggcaagattgaatcaggagtactggtgtctacagtaaacacagaaatgaatctattcctaagacaaacatttttctgacttggatgctgtgctgtaaacactgctgtggaagggagataatcttagagcacagatgaagcaggtctttgggttcacatggtgaggaaataaatataacctaagagattactgccacaggtgagtcagtgtgctcactgggtaagatctgcaacttgtgtattttgacaacctgagaccaaaacatgaaggacaatctacatacaaatgtagtcaatataaatatacaaatattcgatcatagtattatggcatatttcccaggataaactcttaaaattcatctatgtagaagtatgtttaagtttgatatgtaagataaaatggagtccctctgatagagaggatagggaaaagaagaatcccatggctctgcctgctcaccccccaagtagggctccaggtgactcctgaacaagcttcctataatgcagtgtgagaaataccaatctggcttacccttttaaaaatcattttgaactcttaattaattccatttaatatactgatatctgtattcatggagttgtatcttagtattttaatccaaagcatttcctactcaagttggtatattatagaattttgaagaattttcagtgaaaagaagaaatattagaaatctatattctctttgctaaaaatggatgtgttactttaggtgagttgctatgctcaagtaaagggatttgagactttcagaaataaatagtagttgctggagggtgatagaagatgaagctacacatatcccggttatggcttctgtttccccatgcttccctgatttagccaactctacttactcttctaaattttaaaatgaaaatatcaataaatgaggagggtaaagacatgagtcaaaaggaagtagtcacaagtaaaaagctgcatcagtcatgtgtaataaacagtattaggaattagtctgcttgaatattctcattagcacaaggttaacatgtatcaaataactgttagagattt

SEQ ID NO: 45388 - DNA, 1051 bp, Homo sapiens
tggagtgcagtggcgcgatctcggctcactgcaacctccacctcccaggttcaagtgattcttctgcctcagcctcccaagtagctgggattacaggcatgcaccaccacacccggctaatttttgtatttttagtagagatggggttttaccatgttggccaggctggtcgtgaactcctgacctcaggtgatctgcccacctccacctcccaaagctctgggattacaggcgtgagccaccatgcccggctcctttacccttattttaactggattgtcttatttctgagttgtgagagatttttatatattctagatagaagtcccttatcagataatctgcagtttttcccattctgtgggttgccttgtcactttcttgatagtgtctttgaagcacaggtttttaattttcatgaaatccaatttatctctcttttcttacttgtgctttgatgttatagctaagaatccactgccaaatccaaggtcatgaatatttattcctatgttctcttaacaattttatagtttcagcccttatatgtctttgatccatttgaattaatttttatatatggttaaattttgtaaaggttaaatttcattcttttgcatatgactgtctggttgcagcaccatttgttgaagggactattctttcctcaattgaatggtcttggcatctttgttgaaaatcagttgatgtggttttacttctgggctccctttccttttcattgatctatgtgtctatccttatgtcaataccacactgtcctaacattgctttatggtatgtttttaaatcaggtaatgtgagtctttgtactttcttctttttttaaaattgatgtggctattctggatctatggcaatcctgtatgaatcttagaatcaatttgtcaatttctacaaagaagtcagttcgggttcttacaaggattgtatcaaatatgtagatcaatttgaggagtattgacatcttaagagtaattcttccagtccatgaacatgggatatttttccatttattttaatattcttt

SEQ ID NO: 45389 - DNA, 1094 bp, Homo sapiens
cagctactcgagaggcaaaggtgggaagatcgcttgagcctggaaggtcaaggctacagtgagctgagatggcgccactgcactccagcctgagcgacagggtaagaccctgtctcatgaaaaaaaaaaaaaaaaaaagtaaaatatcattgtttacagatgatttgattgtatgtttaaaacacccaacagaatgactaaaaattattataaacagtgatggaagaaaatacctcatatacagtagcaacaaaaaagaaaaaataagtaggcatatccttttttttaattttaatttttatttttgtttttttttttttgagacagagttttcactgttgttgcccaggctagagtgcaatggtgtgatcttggctcactgcaacctccctctcaggttcaagcgattctcctgcctcagcctcccgagtagttgggattataggcatgtgccaccacacctggctaattttatatttttagtggctaacagggtttctccatgttggtcaggctggtcttgaacttccgacctcaggtgatctgcctgcctcagcctcccaaagtgctgggatacaggcttgagccaccgcacctgaccttggcatgtactttagaaggaatgtacaacataattgaagaaatttgtgagtattactgagggatatgaaggcaggcttttaagtgaaaatgcattctttatttttggatgggaagattaaatattagaaagatgcaactcttctaccagtctgtatattttaaaggaccctaataaattctatcaggatattatttgtttgttttggggtaatatacaaatagagtctgaagtttaacaggaaagttatatgaaaagctaagaaaattctgggaagggaaagaaggaactaccccatcagataatatgcatgttatatagctactataatcacatatatgacaggcttatggatacacagactgattgatggaacttaaaacaggcaatcagaatagattcaattcatataggaatttggtatgtgaaaaaagtggcatttcatataagtggggataaaactgattaatgatgctgggaaaactgagaaaac

SEQ ID NO: 45390 - DNA, 1035 bp, Homo sapiens
ggagcatagaaaatctaaccagatatgaggtaaagccagaagaggcaacctggagaagtttgaactggattttaaaaaatcagtagctgtttgtcaatcaagaggatcaaggtaagagaaagaggcaaagacattcatgcagacagggaaaaggggattcaaaaacagtgcgcaaagtgcattatgcacttacaaactttataaagtctgatatgaagtgggacacagtggaagagagtacttgaaagataaagaaggcagagaccaaattccaaagtccttgcctgatacactaaggaatttcactctatcctgtaaacctgttgtttccaaaaaaaatttttttttatttttttgccccacaagatgtatataagttgatcacggaggtgtgaaaagaaaatattaaaatgtctatttgtatatttgcagtttaatcacccttaatctatttttaagtttatattatatagagtagtaattaataaaatatttctattatatctattacgggttgcatgctcaacatcttattctgatagagatgcatgatcaaaatgatttagaaaccactgctagtgagcgccgagatcgcaccactgcacttcagcctggaggacagagcaagactccgtctcaaaaaaaaagaagaaaccactgctaatggggccaggtgcggtggctcatgcctgtaatcctagcactttgggaggccgaggcaggtggatcacctgaggtcaggagttcgagaccagcttggccaatatggtgaaaccctgtctctattaaaaatacaaaattagccgggcatggtggtgcatgcctgtaatcccagctacttgggaggctgaggcaggagaatcgcttgaacccaggaagcggaggttgtggtgagctgagatcgcaccattgcactccaacctgggcaacaagagcaaaactctgtctcaaaaaaaaaaaaaaaagtaaagaaaagaaaaagaaaccactgccaatgaacatggatatcattgaagggtgctaagcagatctgat

SEQ ID NO: 45391 - DNA, 1060 bp, Homo sapiens
attcagatacctgatacatgaaaatagttgagagaattagctaatttaatctagatattttaatcgacgtgcatatttaattctgtttatatttcttttcattctgaattgttttaattttccagatttttagatatatccgtaatacagtaggacaaaagaatttggcatccaaaacattggtggatcaaagatttttgatttaacttcctgaataaataacttaaagactcagtataatcatggccaaaaaaaagtcatgatatcaggttagtttgccatattttttaaaacttataatgcagactattctgtttttgttttttatttgcagaaagatttatttttataacttgggaatatataacctgatataatagaaaatactgttttcccattgtgtgtagtatttaatgcagtaaataataaattaatactgacagtgaggccaaaaaaaatctaaatgttgctttcagcataatactttttaatgctaattaaaacagtccccatcatttgtctctgtagattattttataaactgagagctgcctgaatcttctcacattgacaaagtaatttgattccaagtttaagactagttttcagtttgatattttcatgttttgtgtgcttatggttaaataaatgttgaaagatattttcaagtttacttagaaattttaaattgtattattgctgattcaatttgcatcattctaattgctcatcctctttggcagtggattaattcactgttgggttaatatgcatctcatgaaatgatatcttttcattcctttgtatacctgtattaggtcagtatacgctttccatgaaatatatttgcatttctaatatagtttacatttattaagttataacgtatgacatttttcccaatatcattttttatacattttaattacttaatgttttaagagttctcttccagagttttgcttttcaattacgtttaaagactgtaaataacaaacagtaaggctgggcgctgtggcttacgcctgtaatcccagcactttggaaggccaaggcacgt

SEQ ID NO: 45392 - DNA, 1035 bp, Homo sapiens
attcttgttataatcatcatgcacaaaagcatttgcccacgtatttccatgaataatcaaagaaagttctgccttcgcagaatcatttcatgatctcgtactttgattttagaagtgatagtacagtgagggtctggaccttcctcagcttgtgatgatcacggacactaacagtaaatctggatgaagccaggtccttgagacccacagcacatctggtatattcactcctgttacactcacatgttcggtgctcccactttcacacacgccacatggggagcatagaaagcacccagcactaaaatcatttccagttttaaaatcactatgacaagtaagaggagacaacccatgtgagtggaccaggcctttctttgagcccctttaagtgaaagttatcttagaaaaggcccagggaagacagggggcctggagaatgaaagaatggccaggttaacaagcacatgtgagtacaaggtttgcatttagctcagctgatgaagcaagagattaaaacagacatggaacttgttgaaaattttgccaacaattgggcaaaagatttctattacaatggacattttgactctcttttaaagaaaaataacagctgacgatggtttaatattactaatataacaggactatttttttctgtcatttacattcaagtgaaagccattcgccaatcttccaaccttttgagaataccctgtcatgtaatatccaagtgaactggtgagtatctagtccccaacccaaatattatgaaaagccctgcctccttccaggtttctgaggattcctgggaaggtgtgcatgagtgcatgcatgtgcttgtgtgtgtgtgcatgtgtgtgtgtgtgtttgtgcttgtgtgcctgtgtgtgtggtggacgtcacagcagaggagctgaatgtgcagaaggcatggtggcttctgttcgtcaagtcacctccccctctgaatggttctgctgaattcctgtttctcttgccctgcagctattgttcttctaccacttcaccttt

SEQ ID NO: 45393 - DNA, 1044 bp, Homo sapiens
gctcacttcctagacggggtggcgggcgggcagaggctgtaatcttagcactttgggaggccacagcaggcggctgggaggtggaggttgtagcgagccgagatcacgccactgcactccagcctgggcaacattgagcattgagtgagcgagactccctctgcaatcccagcacctcgggaggccgaggcgggcagatcacccgaggccaggagctggagaccagcccggtcaacatggcgaaacactgtctccatcaaaaatacaaaaaccagtcagaagtggcggcgcgtgcctggaatcccaggcactgggcaggctgaggcaggagaatcgcccactgcagggaggttgcagcgagccaagatcatggcggtacagtccaggctccgcaagagagggagaccttagaaagagggagacgagggagagggagaccgtagaaagagggagacgggagaggtagaggtagggggagagggagagggagagggaggtcgggagtttgagaccagcctggcaatgtgctgaaaccttgtctcaactaaaagtacaaaaattaagctgggtgtggtggcatgcgcctgtaatcccagctacttgggaggctgaggcaggagaattgcttgaacctgggaggcagaggttgcagtgagccaagatggcgccactgcactccagcccgggcgatagagcaaaactctgtctcaaaaaataaataaataaaaaattaataaaattaaatataataaaatagcacttgatcaatttctgtaaaacttgtaaaatatgtgggacaaagtagcaaacataagaagccgtatttcttcatttcttcctggcaccacaatttcaaaaagtcactgactctgtgggacaggcagctctctggaaagatgctttgaagacaaaacaggagagagcacataggccccccacatctcttgcctgagtcactatactgcttaaaagataaatgacctggtccttgccttgtcctacacataagataatgtcagatggggttagtgattatgcctctgt

SEQ ID NO: 45394 - DNA, 1111 bp, Homo sapiens
ctgtacagtgcatgtagccctttgagactggcttttttcactcagcataatgcgtttaagacccaaattgctgtgtgtatcaatggtttatttctttgtaatgctgagcagtgttccattgtttgagtgtatcagagacttcttaatctttcacctattgaaggacatgtatgttgtttctagtttttggctattacaaataaagctgctataaacattcatgttcagggttttgtgtgaacaaaagttgttacttctaattcccagaagtgtgattgctggaccatatagtaattgtacatttaatttttaaagaaacttccaggaaggctaatttccagagtgattttacaattttacattcttaccaacaatgtatgagagatctagtatctctggatccttgtcaacagttagcattacaagctgagtatcccttatctgaaaggttcgagatcagaacgtttcagattgtggggttttttttcagattttagaacatttgcattatacttactggttcgacatccctaatctgaaaatccaaagtatgaaatactccagtgagcattttatttgagcatcatgttggcactcaaaaagttttgaattttggagcatttcagactttggaattttggatcaggaatgctcaaccagtgtcagggttttgttgttgttgttctgttttgtttttgttgttgttgctgtttttttttttttaattttagctgtcgtaatagctgtgtagtgtatcttatagtggttttaatttgaatttttcccttatggctagtgatgttgaacactatttcacatttcacctaaacatcccttttcatatactcacagatccctttttcttctttggagaagtgtctgattacatcttttctctattttctaatcaggttgctttcatactgttgagttagagagttctttatatattctggatacaagtctgtaaatcagatatgatttacaaatacattcccatccattgagttttagcttttatcactgtattttttatttcttaaagttctattttcaaagtatgtctgatcttttttttaatatatatatactttaagttttagggtacatg

SEQ ID NO: 45395 - DNA, 1037 bp, Homo sapiens
ctccccattttgacaccttggtcttctgttatacattcatataaaactctaatttcacactaaactggtttcatgaactcttcaaaacatattgcaacagatcaatcaacaagtatttattgtgtgcataccatgtgcccagcaaggtatataatcttttataggcaatgacagctacagatttgcttatttcctgcactgagtgttacttagttgatagaccatctggcttcagttttttgttttgtttttttttttcttttagttgcaatgattgaaaacaatgctttaaaatctatattccagtcaggcgcagtggctcacacctgtaatcccagcactttgggaggccaaagcaggcagatcacctgaactgaggagttcgagaccagcctggcaaacatggtgaaaccctgtctctactaaaaatacaaaaagttagctggccatggaagcacatgcctgtaatcccagctacttgggaggctgaggcacaagaatcctttgaacctgggaggcggaggttgcagtaagccgagatcgcgccactgcactccagcctgggtgacagagcaaaactctgactcaaaaaaaaccacaaataaaaataaataaataaaataaaatctatattcttatccacatctcttggtccaggaaaaaagcaaagtgtgggaaacagcaataaatatttgtggaatgaattattatcatgttagacagattttctattttatttagcactatatatacttttgctatattttgtacaaattacagaattgttgtctagaagtccagtatgcattaaaatggtcactagaaatgtggttctaaagccaaaagatggagatttcattagaatgtagaagaggaaacataaatttaactcaattagtaaatattattttagctcattccttatactaggaattatagccggcactagatatacaaagataaatatcactggcttcatcaagttcaatcccttctcactacatttttttttttttttttgagacagagtctcgctc

SEQ ID NO: 45396 - DNA, 1092 bp, Homo sapiens
gtggttgggaaagagggagggtcctgatcagattcttggtgaagtgggaggcgcagtttggtttcgaagatcaggtttaggtactcagtgcatatttggaatgcgatttttaaagggctgtggatattgacaaacccagaggcacagggggcgagggaacattcaccacggggataaagaggcagggatttgggataaacgtggcaagattaattgggaatgggcgaacacgcagaaactgaagaaagccaagttcacttaggttcaggggaaaatggtaaagagcagagccatctaattattatagttttgggagatgatgaggccaggaggcctttgagggtcaaagtgggtgagctggagaaaggtttccatgccgccttcaggatcaatgctaagataagtaattcattcagcagtattttatttatagaaaatgataagtatgagacaaaaatgggaagttagatgaaacttatcggttagtgataaacaatacaaggaatactcatggcatagtaacttcatgataacccctactagtttcaggaagtgagaagcaattagatttttgcattctggtggaaaacacaactttttaccttatgagtggagctgtggatgtgatagtaaatcgatctaatttagactcaagcccccctgccttttttttttttgaaacggagtttcgttcttgttgcccagtctagagtgcaaaggcgcgatctcggttcaccgcaacctccgcttcctggattcaagcgattctcctgcctcagcctccctagtagctgggattacaggcatgcgccatcacgcccggttaatgttatattttgagtagagacggggtttctccatgttggtcaggctggtcttgaacttctgacctcaggtgatccgcccacctcggcctcccagagtgctgggattacaggcgtgagccacgggtccagccgactcaagcctttctgaatcaagagtgcaaggaaggagtttaaaggattcagcggaaagcaatttttaaaaattaagcataagaagtgtttactgatgtgtgacttgctgacctgtccctatgcaggcttggtt

SEQ ID NO: 45397 - DNA, 1031 bp, Homo sapiens
gatattatacacaatgtataatgatcaaatcagggtagttagtatatccatcacattggacatatatcacttccttgtgttatgaatatcccaaatcaactctcagctttttgaaaatatacactaaattgttgttaaccatattcattctatagtactacagaatactagaagttatttttcctatctagctgtaattttgtatccattaaccagtctctccctatcctcccctcccctctactcttcccagcctctgataacttctattctgctatattgggacctttcaatgtggggatttgtctcaggatatagatatttctctttattgtgctaaatttttaaaaaatggaaaatgcagcatggagtattctatttgggatctttcttgataacaatattaaatatttaaggactaatgacatgtttaattactgtgaagcagaataaataatctggagaaaaatctttctgtctttaggtgtttacgaactgacacacaataacaaaactgtatctctgaagactataaatgcagtgcagcaaatgtctctgtatccggaacttattgctagcattttatatcaagccactggtagcaatgtatgtatttttcgttggaccctaatatttattttctcatgtattcatgaatcctcaaattatttaatgccatcctattgtcttgttctctttctgttttttccacataggagattattgagccagtgtatttctatattggcattgtttttggattgcaaggaatatatgttactgctttatttgttacaagttggcttatgagtggaacatggctagcaggaatgcttactgttgcgtggttcgttattaacaggtaagaaagctgttttaattgatttttaaaaactttttgtggctgtagtagtcagagttctgaaaatgcctcccctccccaacagtcctcactctaatcctcagaacctatgaatatgatgagatgccattcccatgattatgatactttgtatagcacattagacaga

SEQ ID NO: 45398 - DNA, 1052 bp, Homo sapiens
agctgcgattacaggtgcgcaccaccacggccagctgatttttgtatttttagtagagatggggtttcaccatgttgcccaggctgatctcgaactcctgggctcaaacgattcagacgcctcagcctcccaaagagctgggattacaggtgtgagcaagcatgcccagcataatttgctttcagtctctatagattagtttgtgttttctagaattatatattaatggagtcatacagcatatactttttggtggtggggctccggctttttttactcagcataattttggtattcatgtatgttgtttatattaatagttcattcttttttatcactaagttctattacatagtatggatatatcatagtgcatttattcagatactgatggacatttgggtagtttccagttttgtggggacatatgctttcatttcttttgggtagaatggctaggtcatatggctggtgtatatttaacttttaagatactgccaaactgttttctaaagtgatcgtaccattctatttttctatcaaaattgtgtgagagttccatgtcgtctatattcttgtatttccctgatgattaatgatattgggtaccttttcatgtgtttattggtcattcaagtattttgtgaaatgtctaagtattttgcccattttaaaagcttagattgctgggggcagggtctcacgcctgtaatcccagcactttgggaggcttaggcaggcggatcatgaggttaagagatcgaggagatcatcctggccaacatggtgaaaccccctctctactaaaaatacaaaaattatccggacatggtggcacgcgcctgtagtcccagctactcaggaggctgaggcaggagaatggtgtgaacccaggagggggaagttgcagtgagccgagattgtgtcactgcactccagcctgggtgacagagtgagactccatctcaaaaaaaaaaaaaaaaaaaaaatagaaaccttgtagcccacagcctcgctaaattcatttattagttttagtatttttttacgat

SEQ ID NO: 45399 - DNA, 1050 bp, Homo sapiens
agggtcactaaaagacatgggacagaaggcagagcaggttttattatagcaggatgatgatacattatctttaataatacttatgttgtattttgccagtcttatttcaaggagagtttatatgttcttattttaacagactagtatactgatgtatattagctatttttcttgtgttaattcattgttttttttgttgttagcttttcatgtagtagtgtactatcctttgtaagatctgtataacataaatttctggcaaatttttcaagtatccacttgccatttgaaatattattatgagcattacctttttaatgttctgccttaaatttttatagtaaatgtttatgtctcactttacttccagcttaatatctttgaaagtcattagttttcacccatctcattctgtgaactaggttctatgttgacttcattttttttgaaatttgtataactatagagatatatgattggtcatagaatcagtgtctattacctctaacgtgtgttctgaaatgtatttatttgtaatcctttttgctttaatattttaggctcttattctgagcatggccgtgcctactataataggtctcagcttatggaaagaggtaaaaaaattagatttttatattaataaaatgtactttatctacaaaggtagtgataaatttatatgtgtgggtaggaaacatgttgagacactatcctaacaaaataaaatgtaacattcttagtaatgcttaattttttttgttattaggaacattgcagaagagctaaaacatttctagaatgccacctgatgccattttctgcagtctaatgctagtgttaattcagtttataattggcaaaggaaattgctgagtaaataggaattaatattaaaacacgttttggtaactccaaaactttatcatctatgaaatgatataaattctgcaaattattggacctgaaaatttatttatttatttagtatgtatgtgcctgaaagatgatcaatttattattgtttggtaatgataaaattatttattg

SEQ ID NO: 45400 - DNA, 1204 bp, Homo sapiens
attaatgtgcaaacatgtacgttttgcttcttcaagtttgtctgttccagtattgaatatgctactaaatgaactactctgcatcagtaaagttcctcctgggacaaagcatgtagacatggatctggccactttacctccgaccactgccatggctgtacttctctataatagatggtaaatgttttcataaactcagaaggcgttgggcaacctctgttttattgcactgtggctttcaaggatattcttttaatggacccattctgctgcagggatttttcaaatctggggaactgtgagtctaatggtggagaaaatttgtgactgcatagatgaaaagcaatctgataaaaatgtggatgacttatgcaggatttaccatgtgtcaattaatgcttcatataatttatacaaacctaaggagtacttgaaaaaataattgagatgacatttataatgtatgaaattttctttttcctgtcttttcttcagggcaattaggacaattgttcaaagtagttttccagtcaaacaggcaaaacccggaccccctcagttaagtgtgtaagttggtggctatgacctttacttggcacttttttcattggagttttaaaaatgtttgcaagtttttaataacctctgttatagaagaagtagagcaggaataggagggcagaaggcctgtgtgaaggtttgtttgaaggagttagaggggctggagagtcaggtaatgtgctagatacagagttctaagaagggaagtgctttgggaattgtgccatttatctgaaagcagtcaagtttttttttttgttttttttttttgagatggagactcactctgtcgcccaggctggaatgcagtggtgtgatctcggctcactgcagcctccacctcctgggttcaagtgattctcccacctcagcctcccaagtagctgggattgcaggtgtgggccaccaagcctggctaatttttgcattttttagtagagactgggtttcaccatgtaggccaggctggtgtcgaactcctgacctcaggtgatccacccgccttggtcttccaaagtgctgggattacaggtgtgagccacggcacccagcctgatatttttttcatttaattaaattgtcttgaaaaagatttgtatgtggggaaattaatatatgtcaatattagagtacaatacaaaag

SEQ ID NO: 45401 - DNA, 1023 bp, Homo sapiens
tttccggggacagcacttgcaggagtgtagctgctgctttcagggtctggtccgggtggctatgggtgacaggagctgtggaatctactgttgagattcttcaccagactagtgttggctctcatcctgactgcatgcctcctttgcccttttttctagtcagattctttagcctttttaataattctgtaggcgacctaaaatctactcagtaaatcaatattctgcttaagttgaccagagttggtttatgttgcttgtgactaagaacactggtggtagcacctctccttggaatatgtgtttttttatgtctttttttctgtgttttcgtgagataaagacagttttggttctgtcacctcttaagtacctgagaaattgttaagcaaattggtgttcattattatttcaggtgtgctatgatttgggcgcagcatacttccagcaaggctccacaaattcagctgtctatgaaaatgccagggaaaaattttttagaaccaaagaactaattgcagaggtaaatccagtcataataggaacttaatgttcagttctttaaaacatctatacatttttttggctttgatttttctgatgataaaaacgtgttcattattataaatgtgtgatgttcaagaaagtactaaaactggtttttaaaaatctgtagtaatataacctggaaatatagccccttttataaatctagtaaattttcttccagcttttttctctctgtttttgtacagttaagctcatattgtaaatactctgtatcttgcttaaatctttgactaggcattataaatgtatcatattatgtggaagtactctgatttacttcatttcccttatgtttgggcatttaggtttattatacagctgcaatatttgtatctgcaagcctaaatttttcttcagatttcagatatgtttaagttcctacaattattgccatgtcaatggttatgtatttttctaaggctataatttatcaaaccacattactttccaggt

SEQ ID NO: 45402 - DNA, 1083 bp, Homo sapiens
cttgattggtgaaatatagtatcttttataaacttggctttcattaattcctaatatgggtaaacatttttactgtgtttatcatttgcatttttcttttttatgattcagatgactgaattgtaaacctagtatatctataactaggtttttatatggctggtgcctggaaaaattcccacttcaatctgctgtccttagtagagatattgattaaatgccctagaggtttaaatgctctgactattctagatagacccattagaaatactcattttactttgctaggaaattaatctgctttctaattttatggtatttcaggtatagtaatttaaaacaaatattttttcaaactttttttttttaatcctgtttgggtagaagcatttctattctttccaattgagtgatgattatgctctttgctcgctcctttaaatctctgctggtatgtgtcttttaaaacctttaagcttgtttttaattttaacactgtttgctctttgttaatgtcttgtcatacatacttggtatgataatgatgtccaccttttgtatgttggcctgaaaactctaagcttcagcaaactttctttgtaaagggtcagttagcaaatatcttaggctttctgggccacattcagtctctattgcatattcttaccatttttttggtcccctttgcatagtttacggcccacaaaaattgttcttagctcaagggacgaacaaaaacagaccataggctggatctggcctatgagcaatagttttttgacccctgttctaaacctttaacctttttgttttttgattcttccagttttaaatttttcttttctttttttttttttttttcctgggacggagtctcgctttgtcacccaggctggagtgcagtggcgccttctcggctcactgcaacctccacctctcctcccgggctcaagccattctcctacctcagcctcccgagtagctgggactacaggtgcccgccaccatgcctggctaatttttgtatttttagtagagacagggtttcatcatcttggccaggctagtctcgaactcccgacc

SEQ ID NO: 45403 - DNA, 1045 bp, Homo sapiens
agttgtatgtgtgtgtatttgcacgtgggagagagagagatctgagcactattttaacctcaccccctgggcttttaccacagttaacatcttggtgtatgccttccattacacttttttttccctatgtaacgtgggatcatactatgtgtatttagcaactcgtttttttttccacttaataaatcacctatctctttgcgttgtctcattttcgttttcattagactataactgttcagaaacaaagttcgtatgctcgaaccagaggatctttctcagattcagatctgtcagtacgcaatgagccctaaattcctcaaaggttgtacagaatgcacagcataaaataactgtgcttagtatgtttgggcagtcattccatctttcctccagtgtgccttgataatagaactaatgtgcacgacattacagattatcttttgtgtattttgtttttcatgttatagcttggacagcttttagcagctacatgcaaagaacttccaggccctaaagaaagtagacggactgccaaagacctttgggaagttgttgttcaaatctgtagtgtgtccagtcagcacaaacgaggaaatgatggcagagttagtttaataaaacagagggaatctacgttaggtatcatgtatcggtatgtattggtacgtttctattagttgtgtttgagttcttaatatttatcctatttatactattaacctattaaaggttgatttcaagaacatcagcttttattctgtatatcataaagttggacaatcttacgagttctgtagtactcacctgtgatgaacctgtctgccttggccacctttggaaagatcttttgtttatatgtcattttaagaaactattaatcatttaatcaactggaattcaaaatcagtagtatttaaggttggatagtattgaagacttcacatgtgattaaaacagggaagaaatgttattaggttagtataacagtagaatattacattccttttcacacttgcagaattggagcattaagaataaacct

SEQ ID NO: 45404 - DNA, 1048 bp, Homo sapiens
ccttcaataagttggtttctgtgccatgttccccatctctaaaatagtacctgcctaagaattgtgaggatgaaataatatatttttatttatttattttttttttttgagatggagtcttgctatgtcacccaggctggagtgcagtagcgcgatcttggctcactgcaagctctgcctcccgggttcacgccattctcctgcctcagcctcccaagtagctggggctacaggcgcccaccaccatgcctggctaattttttgtatttttagtagagacggggtttcaccatgttagccaggatgatgttgatctcctgacctcgtgatccacctgcctcggcctcccaaagtactggtattacaggcgtgagccaccgcacctggcctgaaataatacattttctaagctagatatttagaataaagactggtacatagtaggcttaactattatcttcatgatgaaagtactttaaattgacccagagaaaacaaaatatgactaaatgtttgactagagaaaagtatttctcctgagtgggactctttattgattccaagaatagtgggaatggcactggattgaagattacgtttttaaaaccaactacttgatatatagaattcttacacttgtaacattttgtaaatgtctgtaaaattgtaagccaatctaacttatataactatttaaatttaaataaataatggactatttgctaataatcccacaattcattttccactgtactgggctctggtgagttagggtaaactgtaacccctcagggcaacagaagtaccttgtctaaattcaccttgtaaatgatagagccatgcgtctgaatccacagcctgtattctctacccttgtgctttactgctcttaggaggtgggagcagttagcagttttttgggtgccggcctcgcttttctcttcacagttcaatcttctgactctgtacctgaaggtgtccacatttagccaggctcacagtactcttttcttgattcttgggggctgccagatgcactgatatgata

SEQ ID NO: 45405 - DNA, 1800 bp, Homo sapiens
tgaattggctagggcaatcaatcacagcactactttctgtaaaactttagtagttcagtgataccagttctacccaatcttggtgaattccaacttgtttgcttagttatcttctttagtgttttcctggtggtttttcagtgctcttcggtggtgtcataatgcctccattgcacactggtgacaactgtcccccttttctgaaggtgtttatgtaatttacttcctcctatacatgggaagaaatcatgcactgatttcataaatcaaagtcaaaccagacttctgggtacttatttgagattatttaggcctaattttaatagtctttttatgtctttgcaagtgtgaagggtcatattctgaaagtttctgtaacgttatatattttttaaactctttatctagactgttggcattgatcttgagacacttcacaaatcttgctttgatttcaaagtaattttattaacttttctacattttgaaatcagtgtgccccttagaactttctttcccctgaaactgcctgaaggagtactctattcctaccatcagttttggtgacttactagattcagatagcaaagccaaaaaactcacaaaaaaacataccagcatagccaaatagtttgtatgtgtctggatattatgtctgtcttccataggaatcttcttaaaagtcttcagcttcactggactagtactttttactacattgacaaaaggtaccatccaatctacacattctgaaatactgtcccactccaaacctagatagatagaaaaaagttagaaaagcatgaaggttgtacatcagaaactatcttacatatgtctgatgtacttgttgctgtttttgagatattttaaaagaaaccaaatcataaccaagaagtttagcatgtcaaaacagattatcactctcaaactatttacatgactatgttgaagggaaaaaggacttcagaacttcttaaccagtaccttctacatatgaaattgaaatggtcaaatcccaaagaactcttaaagcagaactataatgttgattcatttcaactgtatttaaattccatttggtctttttgttgatacacattcaggattggaaagtacttctaacagaaagataattactgaacagctaattttttttttgccaaagttttaaatgcatgtttagcagaatgttaaagttcagagactgtagtcccattagaagttgtgaaaaggtaagaagacaacaaatagagagtcttacctgaggctttcttaaccacttcaatggaggtaaaatggcacaaggcagcagcagtcagtattctgtactggaactctaatgaatcaatggctagaatacacagatctaaaagctaacaggaaaaacaaaagtacaagcaatttaggagaaagatgagtactaaatgtctcttgctaaaaccttagggatctagagataaataagccaccacccggccaggcgcggtggctcacgcctgtaatcccagcactttgggaggccgaggcgggtggatcacaaggtcacgagatcgagaccatcctggctaacacggtgaaaccccgcctctactaaaaaatacaaaaaattagctgggcttggtggcacgcgcctgtagtcccagctactcgggaggctgaggcaggagaatggcgtgaacccgggatgcagagcttgcagtgagcagagatcgcgccactgcactccagcctgggcgaaagagcgagactccgtctcaaaaaaaaaaaaaacaagccaccaacctgaaggaagtagac

SEQ ID NO: 45406 - DNA, 1029 bp, Homo sapiens
gctcactgcaacctccacctcccaggttccagcgattctcctgcctcagcctcccaagtaacatgttggctaggctgcctcagccgcccaaactcctgacctcaagtgatctgcctgcctgcctcagccgcccaaagtgctgagattagagacctgagccacagtgcccggccagatcctcctcctcctctacttacttactttgttaaatatgctagcctggaaaagtttactttgaatttatgttctaaaaaatttttttaacaaagtaattttaattctgatatttaacttgataggcactctgtgtatccaaatgtaaagacatcatacagaataattctatgccattataaagcttaaacacaactggcgaaaaaaatgcttttccccattttatatcaaaaagagatactttagtttggactcctaaagaatgaaagtactcagaaaagtgtaaggactttgtttttctagaaatattaagcaacataaacactggggacagaactttatgcgtcaaaagttttgttctagaattaaggagtgaagtcaatatgtcattttgtggtatagcctatttaagactatatatacactaaaacctgtaattaataacattaccattgaatcaataaaaatgtcagtacctgagctatttgaatgaatgtttcctgagaatactgaggtagaagaactttaggagcatctttaagagcatcaacttggagaaagagatttagccaggagatgattgttacaggacaaagttcccattttaaagcctattaaacaaaatttaaaaatgcctgttaatgaatgtagacacatacaccacattatacagcagagcttagaggttaagtacattccccatccaaccataaccattgtcaatattttgatgcattaacctcttagaactggatcctaatacctcagttttgactttttacattgtagtatttgagattcaattataactacttatgttacttagtaacatggtttcttttttgcaactaggaa

SEQ ID NO: 45407 - DNA, 1033 bp, Homo sapiens
gttcgtaatgacagtgctgcattattagagagaaattaattcattcttcatataatcttgcaaaggctcttagagtatgatatcatttaggaggtattaccaccagatatgattaaactccctcagtttttctgctaagttttgttttcatatcagtgccagaatttaacagtggtctctatcctacgagggaaagatagagtagctgcctttagttagaaatatacataaccaaaagtgacagacattaggaattgttcaaaaaggatcttaacctggaacagtggaatgatttcctacaagtgcattatttgccttttgagtaaaataaggtccactatcatccatctttgcggcctgatgagttttagaattcagagcttttcagattttttgaaaggaaatatgtatgtatacaaaaccacacatcacataaaagccctggcagggtctaaggtaacacactatgataaagcattaatatttctgcagtgaaatgtacgaagaactaattaggacaaactctgtagtttatttaaataataaaccagtagactgggtgcggtggctcacgcctgtaatcccagcactttgggaggccaaggttggcagatcacgaggtcaagtgattgagaccattttggctgatacagtgaaaccctgtctctactaaaaaaaaaaaagaaagaaaaatacaaaaaattagctgggcgtggtggcgggcacctgtagtcccagctactcgggaggctgaggcaggagaatggcgtgaacccgggaggcggagcttgcagtgagccgagatcatgccactgcacttcaacctgggcgacagagcaagactccgtctcaaaaaaaaaaaaaaaaattagctgggcatggtggcacatgcctgtagtcccagctactctggaggctgaggcaggagaatcacttgaacctgggagggggaggttgcagtgagcccagatcacgccactgcattccagcctggcgacaaagcgagactccatctcaatcaatcaatagataa

SEQ ID NO: 45408 - DNA, 1050 bp, Homo sapiens
agtgagctcccatcacatccttgcactccagtcttggtgacagagcgagaccttgtctcttttttttctcgagaccaagtcttaatctgtcatccaggctggagtgctgtggcgcgatctcagctcactgcagcctctgcctcctgagcttaagcgattctcctgcctcagcctcctgagtagctgagactacaggcatgcaccaccacgcccagctaatttttgtatttttaatagagatggggttttgcaatattggccaggctggtcttgaactcctaacctcaagcgatctgcccgctttggcctcctagagttgggattacaggcgtgagccaccgcgcccggcctgagaccttatctctttttttttttttttttttttttcagtggtttctctgcttaagacaggcacatcagggtcttcactgtcaatgtggaatatttatttgatgtcggttttatagttttagtggataaactttgggaataaggtagtcttcttattagtgaaataaaatcctttgaagtcttcatctgtagatttggtttcaaacatcgctgtaagccagcatccatgccactgcagggaactcatgcagctgctatggagtagttattgaccagccagaaagtacttacctggttactcatgttttgtttgcatagtaaggcctgggtgagttacatgtacctctcaaacattttagatgttgctctttccagccaccgccagttttatctcatgtggccaacaatagtggcacaccccagaatagtcagccagttcctcaaagcctatggttgctcactcactagcattgtgaaatgtttttccagaatatgccaccaggaaagagctgtttcttcagcactgttgatttgctcaagactaaggttcttggctgggcacggtggctcacgcctataatctcagcactttgggaggccaaggcaggtggatcacgggagttcgagaccagcctggacaacatggtgaaaccccgtctctactaaaaatacaaaaattagctgggcatggtgatgcgc

SEQ ID NO: 45409 - DNA, 1026 bp, Homo sapiens
cacactgatacacctgagttactttacctgctcaaacacaagtgcaatagaaaccaatcagtcctgtaaattaaactcctggaagccatataatccataactcagaacagaatttaaagtgagaagcagctgaatcagctgaatctaatggttaagagccctaattctagaatcagaccttagtgcaagctgaatgactttaggcttgacctctcttagcctccatttcctgttgcataaaatggggatgattagaatgcctccttcagtggttccgaggttaatgagataatgcatgtaagcatttaatacaatgcttggcactatagtaagagcttattaaaaggtcataagagtaacctgagtgtgctgggttttccagcgtttgggcaagtgctatataagctggggggtcaaggaaggcctctccagaaggtgagttctgagccaagccctgcatgatgaaaggggcaagcaagctctgtgaagctctaatcagtgactagtagcagaaggaacagtgagtgtgaaggtcccaccatgccacaggggtgcttagaggaccagcagtgtggccagagtgcagtgagggaaagagactggagaaggagaccagatcagagaggtgggcagggtctgggtcaggagagaacatgcaaaccagaatgaaaagtctagatttcattcaaaatgtgatgggaaatgaaaggattcaataatttcaaaagaatccccctggctactgtgtaggaaacactcgtagtgggtagatggaaggcaaggaaataagatgcagtgattcagaggatggagggtggggttaggaccaggatggcagcagtggagggggaggtaaatgaatgactgagatgaagatttattttgaagatagagacaataaggctgcttagtggactgatgtgaaatgtgaaagagaatcaaggatggtgcttggggctctgatctcccactgtgaataatgatactattaaagggaatgggggccaggcgcagtggctcatgcct

SEQ ID NO: 45410 - DNA, 1032 bp, Homo sapiens
ggcagcagatggtaccaagggcgagagtaaaagcaggtaaaccagttgggattctactgcagtggcccaggggagagagagcaaaatcatggagtcatgttgatgcaggtggggaggagtgactgggttctagatatatttgataagatttgccgaaagattgacttagggtgggacagaaggaggagtcaaagatgactgcaagcctttcagcataagaatctctaaggtcaggatgccatttgctcaggtggggaggatgaacctgagagagcaaatcaagattttgaccatgttaagtttggaacacctgttagatagccaaatgaagatgttgcagaagaagttggagtctggagttccgatgagaggtggaggctggcaatagaaattggagaggcatcaggatcaaattgccatttaaaaacagagaactagatgagatgaatcacctagggagtaagtattaatggagaatgagctctggagcacctggaacctttggaaataagaggatgaggagaatctggcaaaggaaactgagaaagagaaaccaatgacaaagggtagatgattctagggagaaaaccaatagggtccacctaggagagcaagaagagaggtgctgttgccctttcacatgcctccaagggtcaagtggtgccactggatttgaaaagtagcagaaggtcattgattactttagagagagcagcttgcaaagtcataaggtcagcagctggacaatattggatttggaagggaaattagctgggcctggtggtgcgtgtctgtaatcccagttactcaagaggctgaggcaggaggatcaggtgagcctgggagttcaaggctgcggtgaactgtgatcataccactgcactccagcctggttcacagagcaaaaccctgtctctaaataagataattttaaagttggaaacaaagcacaagggaaaacactaagttatgcaaaattagaatatattgatatcaataaccaaacattataataaaacccagaacacagaa

SEQ ID NO: 45411 - DNA, 1054 bp, Homo sapiens
ctgatactcccaaacaatattgttgcctaacttcctgctataagtggtttggtgtaacagtgcctctgcccagcctctgctcagaaccaccagagtgactccagatggatcattgggcttcttccatcctgggttacttcttgagccccactctttggcaatgactagcttggaggctcctgctgcagtgtcaggattgggccagtgggaatgcctctattttcaggtttctcacaggtggagatgacagaatgacacctcgtatttctagactcttttatgtatatttcacatatatttaaaaaattctgggcctggcgcggtggcttatgcttacaatcccagcactttgggaggcggaggcgggtggatcacctgaggtcaggagttcgagaccagcctggccaacatgatgaaacccccgtctctactaaaaatggaaaaattggcagggtgtggtggcttgcgcctataatcccagctactcgggaggctgaggcaggagaatcacttgaactctggaggcggacgttgcagtgagccaagattgtgccattgcactccagcctgggcaacaagagcggaaaaaaaaaaaactccgtctcaaaaaaaattctgactcatctgcaaattgaagaatgatgtagttggtagctggaaatcaactagctgcattttaaaattttctggcagtgttacctccatcttgcttcctttacctatcaaactgtagttatttaataaatgctaaatcagaaaaacaaagattctgatagtgtcagagagaaagctctcctagaaagctactttctgaaaagtccaaccaggttattctttaactgttttggtccatggagtagcaaggcagatttagagagcaaagaatagatacaacatgattttttttttctttcttgagactgagtctcgctccattgcaaaggctggattgcagtggctcgatcttggctcactgcaacctctgcctcccgggttcaagcagttctcctgcttcagcctgccaagtagctgggattacaggcgtgcgccacac

SEQ ID NO: 45412 - DNA, 1057 bp, Homo sapiens
ggagtttaggaccagcctgggcaacgtagcaagaccctgtctctactgaaacttaaaaaaaaaaaaagatcatccaggcatggtggtgcatgcctgtagtcccagctactcgggagactgaggtgggaggcttgcttaagcccagcagtcgaggctgcagtgagccatgattgtgccactgcatgcagcctggacgacagagcaagacactgtctcaaaaataaataataaataaatattcaattcttagccaggtatggtgcctcacatctgtaatctcagcactttgggaggccaagctgggaggattgcttgagcccaggagttcgaggctccagtaagctatgatagcttcacttcactacagcctgggtgacagaacaagactctgtctctaactagctaaattaataaatactcatttcttaagagaaacccttaataattaccatgtgattaggactgaaatgtctgaaggcaagctatctgggttcaaatcctggctctgccactccctagctgtgtgaccttaagcaagctacttaatttcactgtgtctcagtattttttccttatctgtaaaatggagatgataggacctccagcctgggtgacagagtgagattctgtctcaaaaaataaaataaaataaaatgaaagagacaccagagagctccctcatgccttctcccccatgaggacatagtgagaagatgcccaactatgaatcagaaagtgacctttgggctgggtgcggtggctcacgcctgtaatcccagcactttgggaggctaaggcgggcagatcacgaggtcaggagatcgagaccatcctagctaacacagtgaaaccctgtctctactaaacatacaaaaaattagccaggtgtggtggcgggcacctttagtcccagctactcgggaggctgaggcaggagaattgcttgaacctgggaggtggaggttgcagtgagctaagatcgcaccactgcactccagcctgggcgacaagagtgagactctgtctcaaaaaaaaaaaaaaaagaaagtgacctttg

SEQ ID NO: 45413 - DNA, 1063 bp, Homo sapiens
ctatggttgttaccattttacaaatgagaaaactgaggcttatggatattaagtaacttttctaagatcatactatgagtggtagagccaggattcaaaccgaggtggtgtgcatccagagagtgtccagggtccacatcttaatcactcacctggtttcctaaatgtgtctgtaccgaagagtcaccaaggggcacttattaaagtacagattccagggtctacctcagagatagcaaatcagggtctctaggggagggacctagtttctgtggtggtttccactcatgagcctctgctccaatgagctgtatttgcctgtctgtctccaatcttggggacagcagtttttcctatggcctcacctttcttacaggtgcaagaagagttgttgatttttcagcctgtccagctttgtagttgctgttaagatagaatggacttccaagctccttacgtgcagaagcagaaaccagaggtcctatcaaaatagttttaaattgtattaaacatacacaaaagtagagcaatgtgctgaatccctatgtatccatcacctaggttcaataattattataattttgctaattttgagaagcagtttaaaaactcatagagaccagtgcttaacagttaaaaaaacagggagttaaaatcgtcattcaaataatttgggaggtgaaattaattatttttaagtaaattacctaaatgatttgggcaagagccatatatgtatatatattacaaatagcataaaacaaaaaactgataatgttaagtattttggtagctcttttgtgtaatatcactttactcaaatcctccccaataccctattatgtgaagagaaatctgttttttattacatttccttctgaaactcagagggcaaaacagtccaattcaatcaccaaacttgtggagtccacagggtgttcccttatgctacaggagaccagagaggagttgcaaagcctatccacagttgtttggaagactttattgggaaagtggtgtttgagtagcatctattaagagtagactttatgtctaaaagcag

SEQ ID NO: 45414 - DNA, 1383 bp, Homo sapiens
atgcccggctaatttttcatgtttttagtagagatggggtttcaccgtgttaaccaggatggtctcgatctcctgacctcgtgatctgcctgcctcagcctcccaaagtgctaggattataggtgtgaaccacctcgcctggcacaattttctatttttaaaaaatctcatgttcagcaaaatcatacatcacaagttttatggaaaaaatagggtcaagggcagaccactcaaaacattaagaagtttttaagtagagccctgataaaaacaactctactaataaatatcttggcacagtttgttctctattgctgtttgcagctaaccatacagccaggccttcctttgcagctttgtatctgggtacacctgtttcctcctgagacatgaaggtccttgaggacatttgcttcctggagagaaaattgtcaccaaaattaaaaatacaatctagaggtagctttctgaaatcattttaaacataaagagatatgacttaaaaatttttcatctgaactgtcaatttccataaatagcttaatatagtgaaaaattgagaggttcttgaagccactaagtctaataaaaaaatgcaattccatggggttttcggttttctgctttttccttagggtcctcaaagatgaggaaggctttgtctttgtgagaaagctcattctagtcacttcaaaacatactggaaaaatagcatatgagctaatttggtttctgtgacatgatgattctattcccctattacctgtcacatgagagccagttaggactaagaaaacaccagggtggttaaatggtaaattttatgttatgcatatttggccactgtatatatttaaaaattgaggctctacaggagctcttgtttatgtgggctatgcctatcaatgtttaccttagtagtcagtaaaactgggatttttttttcaaaggaacaccattatgaatagatgatgctaacattggtgtatccaccactcagcttcagaaatcaaactttactgatatccttgaatccccatatgtgtccttccctgaatgcattcctttgtcccccagaagtacagactatccaggattcagtgtttatcattcccatgtctttctttatgggttttctaaatttagaatatccccagagacagtttaaaatttttaagccaatgcagccataacacagtatgtgtattattttggaacttttattgacttggttcatccacccctccaggtgccattggtcacccaaccccctccaaagcagaggggcagttctctctagtactttattagctgccttgatgtcttgtttccagtcccttcagaaattatggtggagatacacacatacacattaatggaata

SEQ ID NO: 45415 - DNA, 1106 bp, Homo sapiens
caaataacaacagcaaaccaagaaagcagcttagtctgcactgcatttgcatttcttagtttcattccctattcaaaaatgtcttaggcaaatgtgtgggaatgaacatgcactttaaaattatgggacctagtagatttaatggaatgagccctggattgggagccaggggacctggctttgaatggtcccaacccaggcacttatttaccttagtttcttcacttataaaattaaacacaccatctactgatgaatggataaacaaaatgtgatatatccacagaagggaatcttgttcagctgtgagaaggaatgaagtatggacatgtgctataatgtggatgtgcgttaaagacattatgctaagtgaaagaagccagacacaaagaccatacatttcacgattccacttacatgaaatgtacagaatagctaaatctaaggacataaagtaggttagctaatgggtacaggtttcattctgggttgatgaaatgttccaaaattgattgtgctgatggttgtatttaaaactctgcatatactgaaaaccatttaattgtacattttaaatgagtgaattgtatgctatgtgaattatatctcaataaagttgttcaaaaaaaagagaaaaaaatgaaacagtgatttccacccagcccagatatgttgtgaagctcaaatgaattgtttttacaaataagaaaaccacttaaaactatacaatgaaaattatttttaaacttaattatttcttaaattcgaggctgatatactaaaggaatttttccagtgacagttggcatttctataaaccagaattgtacctctgcttacagctctgtggatgaagatcagggaggaggaacagtttcaagttggtgagagtgttgaggggagggaaaaaatggctggtttgtaagatccttgaggtcagggattatttttatcttgttctcttttgtaatcccagtgcctagtacaatgcctgactcaatcaatgtgaatgagtgaataatgaatcaatggtcaaactaatgaactgggggtctgaatgaaaatgatgaggcactttcactcagccaataaacttttaccagccc

SEQ ID NO: 45416 - DNA, 1054 bp, Homo sapiens
caataccaaaaataaaactatctaatgaacttaatggttctagaaatgccattctggaattttttatttctcttcccgaggatattataaaactgtgccattaacattgcacatttgtctgctaattaaataggttagtcagagaattactgcttattctttccaacaattgcataatttacatgtatatagcagtttttcaaagcattttttaaattgaggttttagctttaatatcagtagggaatgaaagcaattgtagcaaaccaggaccttagatcatactaattcacttttgtctaagaattccaaaggaaggagagatcctcttttttcttctttagaatggaaagaatatgtacaaatacaaaataaattggaatggtggatggagatgagagagtgaaaactggaacagccttagtcttctcagtaataaattgagaggtcagatattgggagtgagggagcaggagaggattcagagtcttgaagagagtagcaaattttgacacagattctcagggaatatggtaggaagtgaacaaggaacaaataaaaggatatgaatatggcaccgaggcacaactgagattcacaactgtgagtctgtagagagtctaatagactggctgttttttcctctggtatcttcctggaagtcatgggttatgatttttcacctcatcctttttcaagtgtaaactgtacataagcatgttaaatcagtcacagtttagccataaatagttcccaccttggtctttattatcatttttaaatgattaaaatttaattttttaatttttaattttacagacaggtcacccaggctggagtgcagtggcatgatcacagcttattgtaaccttgaactcctgggctttaaagcaatcctcccacctcagcctcccaagtagctggaactgtacatgtgccactatgcctggctaattaaaaacaattttttttttagagacagagtcttgctatgttgcccaggctggtctcaaattcctggcctcaaatggttctcctgcctcagcccctaaag

SEQ ID NO: 45417 - DNA, 1050 bp, Homo sapiens
atgtattttctattaagttactgaaataccaaattataaaattaaaagaggccccaaatacttctcttctgacatgttaaacctgcaagttagagtgtaatttgctgataggtaacgagattcttaaaaacctcaatattctcaaccagtaacttcattgctatttattcattctgaagaaaaatataaaattcagaaaatggtctttgcacagagatgcttaccatagtgttagttgtaacagaaagaaaaacaatttaaatttccccaaataggaaacaattgagatgatgctaaatctcacataaatattgtataaacatattatgaaaagttaaatgagaaaatatttccagatagagaaaaaaatacaaaattatatgcaaaatttatgtatattaagtatatacacaaaatcatgtataaattgtcatttcaactatgtaaaataatcattgaaaaaagcctaagaagaaatatatagttgtaccatataaagttgccgatttttacctatagaagaactatttcacatggttcaatctgatactaacacatgaatatctttggaaagtgataaaatttccggtaatattccatgaatttttgtaatttcccacttttgcagaaacatattcaatttgtataattataaaaagaatttttaataaatagtctaaagaaacatttataatttaggcaaatgttttaaaattagattttcatttttggcaatattacaaatttgataccccaaaaagctttgcactaaaatacaatccaagatactttataaagtgtttggaagaactttttaatgcacggctgagctggcaacagagtaaggaaatctccagcagccaaacatgaagcaaaagcataaatcctgtgagagaagcctatgactgctctcagggcatctacggatttctggagatccagagattaggttttaatggcctcatagcaggcacagaacaaattttagtgtccatatagtgaaggagtcagattaaagacctccatgtgaagccaagaccctacctatcc

SEQ ID NO: 45418 - DNA, 2135 bp, Homo sapiens
gagcacactgttcccatgagtgtgagcactgcgctgggatcagctttccatatgtgatattaattagactattttttattttgtgtccttgaagtcagtgctatgggaaaacaacatgcattttgtggaattgtaatgaacctgccagtctatgtactgtgttctcctagcacagtgaccgttccataatctccaccccttgtttgctacctggagctgggctctaggcagagagcagccacgtcccagccacaagatattttgtgctactcatcatgatgaactgcatgaggatgctaacctcagggaaaagtactactgctcccagctgaaacttggaccaacccttcatacctacttttaaggactgcctttggtagaggatctgctctgtcccaggcgtgtgctgcacgagtccatcgtcatctctcagatgtgtctccagcttctttttttgctttttttttgagatggagttttactcttgtcacccaagttggagtgcaatggcgtgatctcggcccactgcaacctgcaacctctgccttccaggttcaagcaattctcctgtctcagcctcctgagtagctgggattacaggcgcccaccaccatgcctgtttgtatttttagtagagatgagatttcaccatgttggccaggctggtctcaaacaacttacctcaggcgatctgcccgcctcgggcttccaaagtgctggggttacaggcatgagccaccgtgcatggcctcaagcctcttttgattgttaaagagcttacttatctacatttggaattctgttagacctggcctgatttctgtaaggcagcataggtgttctgtggcacaggtttgctttcatgacttctgtatgctcaaagcatttctctcccgactatcccagtggatcacatgtgtgagctgagtaacaatcatacaaaccaggaaacatgacaaatagctgataatcctgttcccctatgtgcccatccaccacccctgccacctctccctgggcctccagttgctccctgcccataatgtactggctgttaactagtttgaatagcaatccttggaagaccacatctattctctgaaaatgctttgaacataccaattatttctaattgtagaatgtctatttaaggaatagaggattttgaattagcatgaggtaccaggttgactaatttctccgtctttttcagctgactgagttgaataccttcttcttgaagcatatctttgtgttccaagccagtcatccattaagttggggtagaattctctttattggtggcatcacagctcccacagtgaggtaattctgcacaagcctgactgtcatatgagaacattaacttgctttagattgtcctgtttagcataaggaaagtcatataaactagcagattttccatgaaaataccatcgtaaagaattgtacatccagaatatgacgaaaatgttttgttctcagatgtcagtaacattaaccagacatttaaaaagagaagcacttgatgaacaccacaccaatagtactatccattattatcagattcctttacagtcttggactgccgatctttttttctcctataacatcatattagaaaaaaataacagcatagtgatgctgagttttttaaaaatgagattactggaaaaatgcaaatgtttttatggtagaactgaagtcataaatgacattattttttgaatgagacttttagctttttcagacccaattaatttaatttccttttaaaaaggcccttcctgtagtcctccaggacaactgagataagcttgggtgttcccgccattattcccctggattaatgtggggccctagaggtgaggcttattcagacaccatccctcaagtagactgggcccagtgcagttcaaagcaagcattttcatttgtttcatttttcctatttagaaatggcatttgagttttataactaatacggaatactggcattaatgagtagcaacaccaaagatctgccaaaggtacaaatataatttaagcagttaaaagagttagcttttcagaagctgtaagattgtttatttcattatttttaatgtgcttgcaaaccccataagcagcgggcc

SEQ ID NO: 45419 - DNA, 1067 bp, Homo sapiens
aaggaagaaaaggactgagaaaacgcaggagccctggcttgccggtgagcagagccggcgcagccacagcgcggagccgcggcgcccactggtcctcggagctgccaatcggcgtgtaatcctgtaggaatttctcccgggtttatctgggagtcacactgccgcctcctctccccagtcgcccaggggagcccggagaagcaggctcaggagggagggagccagaggaaaagaagaggaggagaaggaggaggacccggggagggaggcgcggcgcgggaggaggaggggcgcagccgcggagccagtggccccgcttggacgcgctgctctccagatacccccggagctccagccgcgcggatcgcgcgctcccgccgctctgcccctaaacttctgccgtagctccctttcaagccagcgaatttattccttaaaaccagaaactgaacctcggcacgggaaaggagtccgcggaggagcaaaaccacagcagagcaagaagagcttcagagagcagccttcccggagcaccaactccgtgtcgggagtgcagaaaccaacaagtgagagggcgccgcgttcccggggcgcagctgcgggcggcgggagcaggcgcaggaggaggaagcgagcgcccccgagccccgagcccgagtccccgagcctgagccgcaatcgctgcggtactctgctccggattcgtgtgcgcgggctgcgccgagcgctgggcaggaggcttcgttttgccctggttgcaagcagcggctgggagcagccggtccctggggaatatgcggcgcgcgtggatcctgctcaccttgggcttggtggcctgcgtgtcggcggagtcggtgagtgggccaggcggaggatgcgcgcgccgtttagggtgtttgaagctacgagaggagcccgcagggaataggggagcgccacctggggaacccccagtccccaagtatacaccggagatccgctgggacaaatgcgctcgtccggtcaccctttccccctcttcccttcctcagaaaagcgctgctcgctggcgttaccccgcggtccgc

SEQ ID NO: 45420 - DNA, 1034 bp, Homo sapiens
ggaaaatcatccaaaaagggtgattagatatttataaaatgtcaacttagagactagcagagaatctttgttaggcagtgagtcagtctttctaaatagaagctgtttcaaggcccagaatggctaacagtccatttaaattacttttcagtctccgtttgtttcatgtatagcagcaaaaatataaatgaagtcaaaagactgaatttaaaaaaaaattagcaattacagaatattatttccaggactttgcattttaatttgaaaactgcaactgtttcctgggatttagaagtagtgatttgggtttaaagtctccctttaaaggaagaaaggaaaactgcctacagttagtgaattcttaagttttatacttagctctgggggtaaaaaagaggttctcaggaactaaggctcaaaactgcctatgaaaaggaactggtagctgttcctttatggatcctggaggcagctgggaaagcctgttcctagtgatccattcatactttccactggcaggttaggactttggctgcggagcaccaggcaaggggaaaatctgactgagtgtggcagtagtgatatgctgctggttttctgtccattttgtacatgactgtttatctttagaaataatatattgcagactgctataaacacataatttgaactggaaatatgtttaagaaaaggaagtgttttgaactagaggaattttataaacattcttagatgtctgtaaattaaaagaaactgtcaagtcatttgggcccatgcattatctctcggtgtattatgaaaggcaggctctggaaagtttgcattagaagggtaactaaaatcgaaatcatgtaactttgcagttctttagaaaatatagtttggctgttttatgagtgaaacaaattgcttttgctagggaattttataaaaacaagggctctttctctcttagttgggtattagcagaaggaggatgtcatttaagaaggaaagatcttgaaagatcaggcttgcagaaaatggatgtctga

SEQ ID NO: 45421 - DNA, 1047 bp, Homo sapiens
aggatttcaaaaggtgaactggtttgttccctgggtggaactagttttcaagtctccaaaagcccccagagacctgactggccagctagaggtggcttggagtctccttaggttggcaaggcccctgaagctgacccagtcacacagagccccaccagccctgtcattaaggtttatagcaagtccagtcaagccactgtgctgttggcatacctgctggtggggatccagttgtcctgtgaggaatgccatctgggtttagattctcactagattgtccttcttccattgccaaaaatcaaactaaaagattttgcccatccttttcttcttcccaaggcagaagggtgcattgcagaatctccaaaccactgaattcttttcgtggactagaggccaaaataaagtcttagagaaaagccagaagtaatgaagaagaatctttgctaaaaccaatctactcttatttaacttttttagtcaactgtgacagtactatcattttcattctaatcatttggatttaaatcttgaagaagccctggactcattcatctttgttggtttccacgtccagtctgcctctaagtccagctgtgcattcattctgcagatatttatttcatacctactaggtgcttgaggtaaagcagtgagcaaaccaggcagatatccccctgccttcttggagcttgcattctagtgatctttccgttcattttttcatgccttcagtggccagcgtggaacttcctcaggagtgccaaccggccccagaatgccctggcccatgggaacctgcacttaaagatgcagcaccaacaggtgtttacccagctcctgacctgagctcagcactgcaaagaagtcggggtttggaaatgtggtcccttcctgcagcgctaatcttttttttttttcctcttgagatggagtctcactctgtcacccaggctggagtacaatggcactctgcaaccaccacctcactgcagccacctcactgcaaccaccacctcccaggttcaagcgattctcctgcctcag

SEQ ID NO: 45422 - DNA, 1077 bp, Homo sapiens
ttttattggaaattttaaaaacgacaaaaacatcttttggtagtatcatcatctaataagcatgagaaagatgtaacgtcatgacttgcacctgaccctttgtcttcttggatcttacatacttttggacaaccaagagtgaaaagggtggaaacttccgatctcgactgagtaaaaggaaagcctttctaagaggcagtcaaagatggaacaggctacttaagcaggaggcaggacccatacctggagctaagctggtgtttgtttggatggctgtttactgaggatctttagaggagattcaagccatcaactggctggggagagtcgctgacctttatagcttccttctaaccttagaagattctgtacgacattttaaaggtgagtgctgagcaacttaaactatattttatttcctttcctgataacttggtctgactgagactagacatcttttgttgcctatagttgaaggagtctggcattctaggaccaacttgctgttaaactgatggcaagatctctatttgccaaagttaggggactgtgtatgtaaccattgaaatctaacattacctcaaacttcaagggactctgacaggtactttaaccagttagaatggcacacttgactatctggtttgagtcagagcagtgagtgcctgggagaaaacagcaaactcaagacaccatgagtggactttagggagagggaagagagacagagggcccacaggccagcacgaagaatgtaaagggaaagtagccactgtcccaacctgccaggggtttgggaggcactgttaatttcccaagcattcacttatccgcactttgaccaggcaacccttcttcggctggacagggacactcatgctggaccttgatcacccatgacccatgtgtcatagtgcagagctttccttctgaggcttaagtgaccagtgtgacaagaaccctgaaacacctaatgtacagaaggactctaggtccatggtccccaacctttctggcaccagggactggtttcatgggagacagtttttccacaggtgttaggggggatggttttgg

SEQ ID NO: 45423 - DNA, 1771 bp, Homo sapiens
ctatatgtacatatttttgtatgtatatatgtgtgtgcataaatacacacgtttgtgtgtgtgcatgtgtgtgtgtgtgtgtgtgtgtgtgtgtgtatatatatatgcacacatgaatcttaaaattgtttttcctgtggccttaatttaggtgattagggaaatggacaagtcaataggtaggaattaaagacgttaactacaccaggagacttgaccatgaagtccctcctgcctcagctgagctaatttaacagggatacaaagagccgcagaacgattggtttgctgttggtttttttctttttctctccctccctgaaatggaatgcctttcagaatgttttggagtggggtgcattttagatatctctagtccttggcctagccctgacagtgaggtcttggctaagatacttaatgagttctgaatgcccctgtcctcacccttaagcagctgatttttcgaagttttgtttcgcttcatggtataaaaagcctagtcatgtgatctttgtaatgtttcttggttattttaatttttaatggtaaaaaatgcctgacagaaaaaaaaagaaaaacccaagactttcctgtgacacggtgcacttctgccttgtggacctagttggagagactgccttaccttgagaggtttttttttttttttttgagacagagtctctctctgtcacgcaggctggagtgcagtggcgcgatctcggcccactgcaagctccgcctcccaggttcacgtcattctcctgcctcagcctcccaagtagctgggactacagacgcccgccaccaggcccggctaatttttgtatttttagtagagacaggtttcaccatgttggccagatggtcttgatttcttgacctcgtgatccgcccgcctcggcctcccaaagtggtgggattacaggcgtgagccaccgtgcctggcctaccttgagagcttttaactacagataaagagctgaaacttcttgtgaaaatgtcttaattttattcttgggtccgtgggaatttagaactataggcttttaattgttcacagctggtgcatgaatagagtggtaataataattaggaataatatggttcacctcctaagctgttagttttaatccgttaaatttttttgaactgacgtctggcacagtcttcaagtgagaccatttggaggaggtccatcctaggtttcagtcaagaagtgtgcatgtctgtcttgtcctgctaatttgttacagtgatttctatggtttgattttaatgtttttcatctaaaaacacacatgcaaatccagcctacgctcaacaaaatccatccagacactcccactacagagcccttgcgtgacaattttctgtatctaagttagagggagcttgcagcctctcctacatccctctgcggtgggaggagccttgctaggggagagagggggtttgctctaagtctcttgtaaatggaggccgacccagagtgcccagagtgcagtgcttcctgtaattccccagagagcagtttggaaatcataaagctgatttacagttatttattccctgcccctccccccacactattttttgtaaaatcctcaaatttcaaagtattagtacaattgattagtgatgtttacttttcgtcatttcttaatgctccacgttacagaaatttttcaaaatgtttcaaaatgacatatttagtagagaataaggattaaagaaggaatgtgttcttgaagagtgatctggttggagg

SEQ ID NO: 45424 - DNA, 1067 bp, Homo sapiens
gaattatgtgttaatcacttcttatagactgtccagggatattcagatttttctttcaaataacattttattagtgtgtaagtcttaataagtgacaggtaaatagatcattccagtagctaccatgtatgattcataaaggcagaacaggcgtcctgggaaggtgttaggagggaaagctcggatctagggagactgctctgaaaacaaggaaggatgtttatggaatgaactcttttgttcaaccatggcgatgtctggatcagggcagccttggaggatttatggcctccagtctggagaaggtaggtgggctcgcattatctgtgttgtaagaaaagtgtgtgaggtctttgagcctaaggctgtccaggtaacaaaagactctgtcaaaaaaatatgtctatttagagttctttgagagtaatatgttgctatttatttcacatctgtgtcgggtattgagcattttccttgctttgcggttgtaacaagatcctcagctttcttccttttaaaggttggggagctaatttcttgtaggaaataacacattaaatccaagcgtatcactaaaacatgtgtgccttctctttttgctcaattaaaagattgagctgttcgtgttttgtttgatatgggggtacttattgaacattgtcaacctaaagcattttgagtaaccaagagaaaaatcaggatggcctaattcactaaaattccaagtacatttgggatgtatttttatacttcttaattatgagattttaaattgctttatttttaaaggttgagtgtgagctgagtgtgtgtctttttctgtagtcctaccatcctttctgcaaaactcaagtgaaaattatttatttaggatgccctattgagatatagtggaatgtctttgtttgcatttattctttttctgggattttggttatatctatagctgtaaataaaggggaaaggaaggcttggagtgcatgttaggacaagaggtcccaagtaggaaaaaaagtcttgccttagagctatgccttgggaagtgctttttatttagtaacctaatc

SEQ ID NO: 45425 - DNA, 1529 bp, Homo sapiens
ctcttaatttgttggagttttcttttcctggaaaaaatactgcttgggtctcagtttctccacatataaaatcagaataagaccataaattcatgtagttgaaaggggcggtttcaggaagaaaactaagataatgaaagcctccggaaaagggtctgggacgacattatttacagagtactttccacacattgtcagggtggggccgcacaggaaccttgtggggtaggcatcattgacctgtttcaaaaatgaacaaagtcagtcccagagaccttgaatggaggcttatcaaagctaagcatacggcttcaagtttaaccgtcaaatggtagagttagtcatggcttttggatgtgcgggccaggcatggtgcagggccaggtatgttttagccttgtggttcttttcctgatatttcggtcctgtgggcctccccaaagtggctttgcacctatgtttgttatgggcataaggaagttagaattctatgaatatgtactgattttttgtgattctgaatttaaataggcctctataaagctaatacttgaagttttgttgtaatgaagcatcacaaatacttttacataggaaaaaggaccaagctgatctccttaaagcggttgcaaaaaccacccagttgttatacgattgtttgtttcatgtttcttgttatgtggcatatttccagtaagtggagggaccaaatattttatagttacagaaacttcttctctccctccttgaagtttaaaaaagtggatcaaatgtctgcctattttcaaggaggcagggagacagaagatcttttccagattgcaggaaggccaacgcaggttgcacccagagaactatggaaaccactgttgaggaggaaggaattgggtgaaaattaaagaatcaagctagtaaaagtgaaaagaggcctttggtttttttttttggacagtttttaagggccttcataaatacttggtgtactcctcaaagaccaagcgttgaagggttaagtcagggaactaaaacttggattgtgtgttgacccctgtgtagctgtggccagggctcctgattttcccctgacgatccattggtagaacaaggccagtggtactgttttctggtgcaggggaggctcggacctgcaggggagttacggaggctggccactggtttggagcagacaggtaagtagcctctagggaggtggtagctctgtacaacagtctgttcccaatgtctgggtgactcttgttcccaatacttggctctctttttggatgtcagagtcatattcttcattctccatgtctcctgctaatttttggcattgacccatccaggatttatttcagcagctagcatggtgcctgacctatccatagtaggtgcttagtaaatactgcactccacagggggaagagggcaggcacgttctgcctattgacgtggtgggaagagagaccgtgcttagggacaggtttgggagcttcattatttctgccttgggactgtttgaatgcacc

SEQ ID NO: 45426 - DNA, 1049 bp, Homo sapiens
cccgctggaatttgaactgttgcctgtgttctgaaagtgtcttgaattgcttgggatcccaagcctgaagtttacagcatctcatggtgtccaggtatccaagaggagtcataaagttctccgaaaattgtgaaaaccatatacttaagggaccacacgcatgcagtggagtattcttcgatggcagcattttcttttgcgggaaatagcaaatcaggcagtaatgaggtgtaaggtcagaaaaactgcatagaaatcaatgactaggtgttcagagaagttaaaagaaattaataatttttcttctgtatgatttttgctttgggatattttggttattttttactggtttcggatgctattttaatgagtattttgtttatattttgtaggcccatgaatatgaaggataacttagattttaaaagttctttcttctattccccaagggctgatggacttaaaaatacctgtcagttgagccttcaaaatctttttattgacaagtgactcctgacttcaggcctaattggttcctgaatgtttagtcttggggcatggtcataacacaaactcttacttcctgcaggctgtgttatctgtaaagcttatgttttgttttttgtttgtttgtttgtttgtttgtttttgagacggagtctcgctctgtcgccaggctggagtgcagtagtgcaatctcggctcactgcaacctccacatcccaggttcaagctattctcctgcctcagcctcctgagtagctgggattacaggcgcacaccaccacgcccggctaattttttatttttagtagagacggggtttcaccatgttggtcaggctggtcttgaactcctgaccttgtgatccaccctccttagcctcccaaagttctgggattacagacgtgagccactgcgcccagccaaagcttgtgttatatattgggcttccattcctgaaagctggttttatactatacaaataacaaagtcaatatgaaaatgtgtcaaaaatatgaatgtacctcttaaatacacatattaac

SEQ ID NO: 45427 - DNA, 1029 bp, Homo sapiens
gctccaatgactgaaacaaaggccctcagccttgagggagctgacaggtgagttagaggtgagcatgtgatgctgctggaatagggaacacaaggtcattgtcatggattaggatgctctggtcctcagtgcaggtgaacttgaacctagccatgaaaaagcaccagaaatggctctctttgtaattttcacttctccccagcttcccctcccaatatgtagtgctgccccactgctgcatcccaaagccaatgccgtggatcattttaaccggctgctgctttaactggtttgtcttctgctcttttcctaaatccagctctgctcctcctccttggtctgcacttgtaaggcctttatttgatgtgcatgtatctcccattttatagcccacatcatttttcatcttggactataaattcagagaagatgtgggctatgcactttgaccttcacagcacccagcacagtaaaccataatgaatgttttggatgaggatgaggctctgaagttggaagctgacatggctaatgcctatttaattgaaggttattaatgcctctttagcagtgaaggctagatagtcttctgtttacagcagagaaggaacaagccctcaagctttttccagtggtctcaaagaattctctgtcaggtgttgccccagtacacactgacctgaacttagcatcccggagaatgaaagggacagttggggcagtggggcagcttccccccgagaagacaagcgtcttctcctctgggttcatggttcccaggtgggaattcagggcgggggtaagtcagaatatttatgttctagttcagcttattaaatatgagattttccatctcttagtgaatagagtttgccttctgtccagcatgatagttctaagtagggcgaccatatgtcccagttttaatacctatttgcctggattaattattaatagctccccctttaagagtgccctggtttggatgataaatattattgctatccttgttacaagggggaacatata

SEQ ID NO: 45428 - DNA, 1075 bp, Homo sapiens
caggaccatgtgtgaatggatttctcaagtgtttcattaaagatccgtcagaacggttagcactctaaccatgcttcagtctctggcttctgattcctttgtggaattaaaaatgcttttgggaagaggggctaaacaagccttttgtctgaatttccatgtattgattaatggacccagcagagcatcctgctgtgaattctgtctgctgatggtaactcttacaatgagcaaagcttttctgaactggcattttccactcagcctgtaggctgctgtattgggtgtgacaattttttaaaagccatcatgctagaatgaaaatgagccatttctaaatggcctattgatttgcaaaacctttttgtgttggattgaatggtttcatatctcagctgagggaaaaagatgcaggctatttttaatttattgttattttatcttaaagatttgagttgacaacgttttggtcatgatgtttacctactgttgaaaggtctacttgcatgtcatgacttgataataaatgtaaaactctggttcattagcttacactataaaagagttctacagctccacttacagtgtgagccacagtcagtaaatatggatccagaagtcctaattatgactcaagctcacccataaacttggggaccaccttcgcaccaacgctgtccactgggctatttatggaagaagccactaggaactgttaggcggctccatgtgtctggctaacagggtctttattcattcacctcatcacggtattcagtcttgatgctagtgtgcacgcttcctaagaattacagatgggaataaaaggtgtctgggtatacctggggagtatatgtttttgcctgctgatataggatactagggtagcttgtatgcaaaagcatgagcgtctaggtttaaaggattctttttgttaatatctgagttgacttggtatggatccttgtttgatttttttttttttaaatttttatgtatgtatgtatttgcttttgagacagggtcttgctctgttgcccaggctggcatgcagtggcatgatcacagttcactg

SEQ ID NO: 45429 - DNA, 1040 bp, Homo sapiens
atctgtaaaatgttggtgatgaccaccatctggtcttcctcacatgggcacagtgagcactcactggaatagtgttcttcctgtcatagatgtaaagcagcaaactgaaagttctggtggtttatcatgattattatacttgttggctgactttctcatgggcttcttagatgtttctcttaaaggcagaattttaatttaaaaatgcatattatgtaagaatattgtagttgactttgagaattcatgaactgaaacacttaaactctctcaggacctctaaatatttcttgactatttcagagcatttgatttgtcctaatgctatggagttataaaaccattaatggtatgatagctctggaaacaaacattaattcatttgaattcattagaatgataaagcatattgtgcaggggttttcaggcattcagttcataactatcgaaatgtggatcataacaaattttgtttgggtgtgttttcatgtctaaagaggatcttatcataactctcatacttattagttttatgtgaaatacaactagcaagcatatatacataacaaaggaaattgcagattgtagtttctctgagattgatctattttattaaattatttttattaaataattttttattttatttttatatttattttattattattaattttttgttataattaagtcattctgaccttataatttgagaagcatgtgccctgttttcatgctttagttttattgtaagcatctatatttagggaggggggtgtggttatgtgtttgtatatgtatgttcaagtatatctttatttttattttatttttgagacagagtcacactctgttgcccaggctggagtgcattggcatgatctcggctcgttgcaacctttgcctctcaagttcaagcgattctctttcctcagcctcccaggtagctgggattacaggcagcaatcaccacgcccggctaatttttgtatttttagtagagatggggtttcgccatgttggccaggctggcctggaac

SEQ ID NO: 45430 - DNA, 1028 bp, Homo sapiens
gttattagacccaggaatttttaaaacctgaaatcttgcaactgaatatccattttattagaccttttgcctttgtgaccacaggtgaaatggatcaggagtggcccaagcactgttctgtgagttggcatttttctgaagtgtgattttttttttttttttttttttagtacttacatacttccataatatttgcttcttttcttaaaaaaatcttttgtagagatgagatcttactatgttgccctggctgatcttgaactcctgagctcaagcagttctccagccttggcctcccaaagtgctgggattacaagcatgagtcactgcacccagctcatgacacttgctttagatttatatataatatatatatgtaatatacaatatatatgatatatgtaatatatatattatatatcacatataaaatatatattatatatattatatatcatatataaaatatatatgacatatgtgtgtgtgtgtgtgtgtgtcttgtgtttggatgtattcgctgttaattaattttcaaaagtttatttgcacagttgatgtctgaaagctggttccaagtcatttgtgtctatgacttatcggtcttgtgctttctgtgctttcagcaacattatagtgccaaaaatgtagctgtaatatcaattaggaaaaaaattacacataaatccaccaccctaaccagttatctttcttcttcattttctattccctttcagtgcttggccaaatatatatatgtatttgaaatatatgtgtgtgtgtgtgtgtgtgtgtgtgtgtgtgtatatatatatatgagaaattgcaatatagttgtaatattagaaaaaaattaatgtatgctttttaaatttaatatgtcgttacaaacacttttacttattactatgtggtatatgatttttaatggctatgttgagaaaactaatatatcatgcataattatttaccagacatagtacacccctgtagtgggcattgagattgtctccctgatttgtctttaa

SEQ ID NO: 45431 - DNA, 1028 bp, Homo sapiens
taaagagccattctggcactttaatgataaaatcccattgtatttaaaacatttcatgtatttctttagaacaacataaaattaaaatttaacatctgcagtgttctgtgaatagcagtggcaaaatattatgttatgaaaaccctcgatgttcatggaattggtttaaacttttatgcgcaaatacaaaatgattgtctttttcctatgactcaaagatgaaagctgtttcatttgtgtcagcatgtctcagattgaccttaccaagttggtcttactttgttaatttatctgttgtccccttcctctcctctgccctcccttcttgtgcccttaaaaccaaaccctatgccttttgtagctgtcatggtgcaatttgtctttggaaaattcagataatggtaatttagtgtatatgtgattttcaaatatgtaaactttaacttccactttgtataaatttttaagtgtcagactatccattttacacttgctttatttttcattacctgtagctttgggcagatttgcaacagcaaattaatgtgtaaaattggattattactacaaaaccgtttagtcatatctatctaatcagatcttcttttgggaggatttgatgtaagttactgacaagcctcagcaaacccaaagatgttaacagtattttaagaagttgctgcagattcctttggccactgtatttgttaatttcttgcaatttgaaggtacgagtagaggtttaaagaaaaatcagtttttgttcttaaaaatgcatttaagttgtaaacgtctttttaagcctttgaagtgcctctgattctatgtaacttgttgcagactggtgttaatgagtatatgtaacagtttaaaaaaaaagttggtattttataagcacagacaattctaatggtaacttttgtagtcttatgaatagacataaattgtaatttgggaacataaaaactactgaataaatcatgtggcctaatattgaaaatgtcactgttataaattttgtacatttt

SEQ ID NO: 45432 - DNA, 1117 bp, Homo sapiens
ccctgcttcttacccttgccctcaaggtctgcaggaactgccccctgaacaatgcattataagtggacacagtggcggtagcatggctagttgggaggtcattatagtcacctagggaagaaatggtggtggcttggcctaaggtggttatagtggagatggaaaggaactgttcggggaggaacaatcagtaggtctttctaaaaggttggaagaagtaggaagtaaagaaaagaatcaaagagggcattgccatttttgcctgagtagtgggtgaatcatgttctgagaaggaataccatggggaattggctgctaaaccaaggttttctattgggccatgttaaattagagaggactattagacaaccaagtggaggtgtcaagtgaacgattaaatgtcagaatcgaactcagagaagaggtcctctcttggaactggagatactaatttaggggtagtgttagtgttcatttgcctgttggcactctgattcatttcctgctctttcatgctctactctgtatggcttgaggatgaggtgctaccaggagagtggggtgtgcaaggttgacccacacaaactacatctcccaagcttccttgccaactggcctctgggaaagtttggccaatggaagacactggcaaaagaccgcagtcagtaggagaggaaaagccagagtactttcccctgtctttgctctgggcaacatctctagcatgaatgcacttcctctgtagttaagtcaccaccaggcaagccctcctgcatggccctagctcccactattcctaaactcttataactccactttcctccttggtttctctactcctagggaggcatcaacttcctgatgttggtattctctgagttatttccctgtctccagtttgcccttacaactttgtcaacatctttgcaactgactggtattaaattctctctattgcactaccaggtgtgggttctgttttccttcctggacccctggtgatgacacaggagtgaacagcatatagatggtattaaaagccatgggattagatgagattatttacacaggtaagtacagtagcaccctcgcttatccaaaggggatacattccaag

SEQ ID NO: 45433 - DNA, 1109 bp, Homo sapiens
aaaaataaaaattttagcacattgactgaagaagggcaggagtaattgaaggacagaatggtattcgtgatgtggaaattcaacctcggaacaattgagagtggtatttgtccacgtgttgtatttattccatttgaagctagcctggcatttgagataaaaccaatagttaatacttattgtgttaattatcttatttaatcctttcaaagcttagtgaatttgcatatattttctgtattagtccattctcacattgctataaagaaatacctaagactgggtaatttataagaaaagaggtttaattggttcacagttctgcaggctgtacaggaagcatggcggcatctgcttctgggaaggcttcacagagcattcaatcatggcagaaggcaaagggggagtgaggtgtcttagatggcaggagcaggagcaaaggggaggggagatgccacacacttttaaacaaccagatctcatgagaactcgctaacacaagaacagcaccagggggatggtgctaaatcattcatgagaaacagcctgtataatccaatcacctctcaccaggcctcacctccgacattcgaattacaattccacatgagatttgggcagggacacagatctaaatcatatgaagtttcttcattttataggtgagaaaacaaacctagaaggaaactcaattacccaaggtccacacagctaagtaggcagctaagaaggaattcagacccaggatcttgtgaatattaaaccaagctttaaaccacagtttatgtgcagtttccagagttcatgaatttatctgcaaataaagggatggtatgcaagtaattaacagaattattgtgaggactagattaggtaaggcacatcaaatagctttgttgagtgtttggcacatcacagctcactgaatgtaagtttcctttgtatggcatcaagtgtgcaataaacactttttataaggtttctggtgcaaatctcatgcatttgttattgaaattctagaaatggaacttaaaaatgttatttagaaatttcagacttgtattttatttgacagcatcagtgggatgaaggaaagggtgaagagtgat

SEQ ID NO: 45434 - DNA, 1012 bp, Homo sapiens
gacacgcctttgccccacccgaccccgcccgcccccacgtgacgcccacgccccgcccactggcgcccacgtgacccacggtcgtccccgcgcgcggcgtggatcgcggcccaagccgccattgttccgccgagggaggacagcggggcctggcgctggcgccgagacgccgcttagcggccgccactggagacactccctcccgcctcccgggtctcctggcggcggcggagtgaggctgacagcggggaacctgggagacccctccgccctccccgcggtggcagcggccgatccccggctccggcgcgagggacggccgcgatgcgctcggcctgaggttacccggcccggcccttcctcgcttccctcgactattccactgcgtctccgcgccccggcgtcatcctgcgagtccctctgacgggagggaagatggctgcacggagctggcaggacgagctggcccagcaggccgaggagggctcggcccggctgcgggaaatgctctcggtcggcctaggctttctgcgcaccgagctgggcctcgacctggggctggagccgaaacggtaccccggctgggtgatcctggtgggcactggcgcgctcgggctgctgctgctgtttctgctgggctacggctgggccgcggcttgcgccggcgcccgcaaaaagcggaggagcccgccccgcaagcgggaggaggcggcggccgtgccggccgcggcccccgacgacctggccttgctgaagaatctccggagcgaggaacagaagaagaagaaccggaagaaactgtccgagaagcccaaagtgagtatgggatgagcggcagtagagaacgggcgaagggcgggcgtggagaccctcgagcttgggggaggccgcgccccagccgggaaggaaaagagtgcttagtcgaaagccgagaggcagcactcccaagtggaggaggaggtgataggtggtcatgttatttggggaatggggggaactcaggaagtatagg

SEQ ID NO: 45435 - DNA, 1121 bp, Homo sapiens
cccactttggcctcccaaaatgttgggattacaggcatgagcaacctcacccagctcaaaaatttattttagtggacaagttatttgcatattagtgtaggaatgtttataaagatttgctatagtgtaattgccatatctctaagctcaatgaataaaataatagtgtttccttttgtttgctaccagatagccttgcacagtgcttggtactcaaaaataattattgaatgcataatatagtaagatgtccaacaaaagtatttatacagcttactcctattattcatgcttggtaaatacctatgtgagccccctttttctctttaagtggaaagtggctgtttgcctcatctggctgtaattttgtgaggtgaagcactgcctatataatgaccccataagattatgatattgtatttttactataccttttctatgtttagatacacaaacacttaccattgtgttacagttgccacagtattcagtacagcaacatgctgtacaggtttgtagcctaggtttgtgtcagtatactatgtgatgtttgcacaaagatgcatttctcagaatgtattctcattaagcagtgtatgactgtattctaatagtatgcagtgtcttttgtagtcattacttctgttccagtttcactgccactgccctactttaggactttattaccttttgtttagactgttctaacatcatcctaactagttttcctgcttccagtttcttttttgccaatcttttctacccactcgtgtgagtagagtcttttgaagcccaaccctgatcatgtgactttgatgttcacatcctttcagtagtttccccatcacctgttgaataaaatgcaaaattcatgacatggcactcgagtctcttcatgatctaaccctaccttaggcttgtctctcaccattactcctaagacaagaaataattctgcttagctagatttctgtgtctctttatttatgattattttcatttttgttgttgttgtttttggagaccagagtctcactttgtcccaggctggagtgcagtggtgtgaacacagctcactgcagcttccacttcccagactcaagcattcctcccacctcagc

SEQ ID NO: 45436 - DNA, 1084 bp, Homo sapiens
tgcctttatctttttttttttttaattatactttaagttctgggatacatgtgcggaatgtgcaggtttgttacataggtatacatgtgccatggtgatttgctgcacccatcaacctgtcatctaggttttaagccccacatgcattaggtatttgtcttaatgctctcttgccttttatcttttttatgatgaggattatatatatacacacacacacacaatgcctcctgtatgctcagtatcacttttagccaataaaattgagattctggccaggcacagttgctcacacctgtaatctcagcattttaggaggccaaggcaggtggattgcttgagctcaggagtttgacactagcctgggcaacatggcaaaaccctgtctctacaaaaaattaactaggcatggtggtgtgtgcctgtagtcccagctacttgggaggctgaggtgggaagatggcttgagcctgggaggcggaggttgcagtgagtcgagccgagatcacacaccactgcactccagcctgggcaacagagccagaccctgtctcaaaagaaaaaaataaaaatgaaattccagtgtttgtccagggtgaaacacatttgggatctcaatcctggtctcccagcctgctttcaaaacctgtactcttgagagtgtgagggagagtataccttttgttttgtactttactatatgttattgtatacctgtcttcctttactaggttctaagcttcttgagtgcaggcattgagccttatctttgtttcaaggtgttaagagttctgcatagcactctactgagtgaatattatgtaattttcttggaaaacagcagttttttaaaaagaaagataacattacaatgctgcctctagagcaagcctggactattttaagcctctgagaggatatatttgcttattatttttaatccattaacttcccaaaagaatttgcatctggagcattggacctgatggatgcctgtccaggcccttttgaccaccaggacttaacattcatctgagcttgttaatataaaaaaatggcccaaatgcttgaacgtgggaataaa

SEQ ID NO: 45437 - DNA, 1600 bp, Homo sapiens
tggtctaacttaaaacatagattgtaagctatatatgaaataactttgattggccctggtggggaagaccttaaagttcttgagagaattttaaactggggtacaatgagaggcccatgtaattgctaatctgtagaaagccaccatatagattaaagttccatgatcagagaaaactactttttttttcttttgtatttttttttcttttcttgagacagggtctcacttttttgcccaggctagagtacagtggtgcagtcacagctcactgcagccttgacctcccaggctgaagtgatcctcccatttcagtccctcgagtagctgggactacaggggcatgccaccacacccggctatttttttaaattattttttgtagagacagggtctgtctatgttacttgggctggtctcgaacttctgagctcttgctgatcctcttgccttggcctcccaaagtgctggaattacagccgtgagccactgcacctgaccaacaacactttcatgtaaaacccatattgacaatcacaagggtagacacattggatttgaagttttggtttgtaattagttactattcatgtaagtagatctatataatatgctcccatttagggatttgctaatttaagtatgattagtgattttccagggcaaggccttctcgaccagctgttggcaaaatgaaaggacacattggctctgctgtatgaaggagaatcacctcagtgtattcttttttccagcaacccaagaattatattgactttacttttgggataggaggcttattgtttcatggcatcaggcatgtgtgggaagttgctgatgacttctggaatcccagtaatgatgaaagctatataaattctaagagtttagtggaaaattgggagatctacacaggtcagagagaacagctgcgattagagctattatgtagattgatgttgcaaagaaggaactaaaattggcacagataggagcgtatgagcacctttggcttgctgatcatttcagagcctatggaaatgggaactgaatgttcctgaatctgtgggaatgcagttggtcactttcagactttgtgttgtttgaaagaaaagaatgtttcatatttcatttgggaggctacatcaatattgtttgcagttgttctcacataaatggcattgaacttgttggtgagtttttaagacagtttttgaccgaataatttctaatcttcctagtatttagtaaataaatcccaatgactcagtgtcatgtaaatgagtaaaatgaaggtggtatatggcagtatataagtgattatgatggagagtttcctgaagggattaattaaatgaagtttagcagatataagttttgtgagttgccagttgaagagataggagactatagaactgaagctgcaagattgttcagttggtataagtcttacatggaaaagtgtggccacaagaaaatcagaaaaggcaagtttggccagagaagatagcatgaactaaaagtagcatataagaataagatgatgatattagaggccgggtgtggtggctcacacctgtaatcccagcactttgggagg

SEQ ID NO: 45438 - DNA, 1085 bp, Homo sapiens
gtggcatgcacctgtaatctcagctactcaggaggctgaggcaggagaatcacttgaacctgggaggcagaggttgcagtgagccgagatcacaccttggcagtccagcctgggcaacaagagcgaaactccgtctcaaaaaaaaggtaaaaaaagaatgattctggttaaaagccagatttgggaatcacacacttgagtctactcatgagcatctctaagtgctatccatcattttattttaggaatgttaggaaagcttttgtagccttttgtaggctgtggcaatgggtcggaaagcttcttactcccagaacagtagagccatgaaattacagaattagaggttccattagagattgcctaacattcatttgtttatgtatcatctatggctgcttttatgctacaatggaggaattatgtagttgcaacaaagacatatgggccaaaaaataaaaataaagaacaaagatatatggcccataaaacctaaaatagtttctgttttgttttgtttttgctgaggactgttgatggcaatcaataaaatatttttttctgaattttattttgccatacaccctgaatatgtttataaataaaatattttctatctggctgtttacagaaaaagtttgctgacttttgagtagatcatacctgtcactttatagatgtagaaataaggctcggagacaatgagtgaaatattctgagattacacagttaattggtggtcaaattgcaaacacagttttgttctccttttaactgcttccattccattatttttgttagagggactgataccttggtgagataagaaaatctgtggtacagaattttgcttatgaattttatatatatatatatataaacactagggataatctatcaactcttagataacattggtgtacaaaaactttttaaatttaggtacagaggtaggatttgattgtagtatatatggtttcctgcgtataaatctttgcactgatctgctaagcagtttgataatatgatactttttgttgcctgtgcagccaaatgggcggactgttgaagtggctgagggtgaa

SEQ ID NO: 45439 - DNA, 1061 bp, Homo sapiens
acgcacctgtagtcctagctactcagcaggctgaggtgggaggattggtttcagtgagccaagattgtgctaattcactccagcctgggcacccgagaccctgtctcaaaaaaaaaaaaaaaagaaaaaagatatagatgtgcactttgatttggatgtgagattttccaagtaagacaatctatcataccacataaatggtacattcctgagattttattaattttccagttgcttggcattagaaccgactcatttttacttgacttaatctagcttggaagtaggcaaaatgaataagaaattcttaacagtggttccttctactgtgagaaaaagacttttcattcagttcccttttgtgcatcgaattaccctccctttccttttttttttttaatatagagacaggggtctcactatgttgcccacacaacatagtcttgaacttctaatctcaaatgatcctcctgcctcggcctcccaaagtgctgggattacaggcgtgaggtaccacatccagagcccctccccctttttaaaaaaaaatcctgtctatgcatagccccttttcaggaaaaaaaaaacaaacaaaaacaaaacaagacagtcactgatcggtaagtggtttctgggaaccacagtgcagcagctctagcttcttggaatagtggtatgaaatggttgctgctggctgggtgtggtggctcacgcctgtaatcccagcactttgggagcccaaggcaggtggatcgcctgaggtcaggaattcgagaccagcctggccaacatgatgaaacactgtctctactaaaaatacaaaaattagccggatatggtggcacatgcctgtaatcccagctactcgggaggctgaggtaggagaatcacttgaacccaagagacagaggttgcagtaagcagggattgcgccactgcactctagccagggcgaaagagcgagactctgtcaaaaaaaaaaagaaagaaagaaagaaagaaatggttgctacagtttcttaatgcttccaatttcaaaatgtctttgaagaagtggctaa

SEQ ID NO: 45440 - DNA, 1076 bp, Homo sapiens
aaaagaacaaaaatgagaaaaaaaatcaagcacggtaaggagatagagataaagtgcaggttgtgggcacttccctgcacctgcaattctcctacttcttccatttaggaaaataacaatagtaccaagtggaataaccttgaatctcctttaagttaaaccccaccaaaaggggggaaatcaattgcagacttttctactcttaaggagatttgtgacagttttcacactctcatcctgatattgtatcacaaggttactaagatggagaactgctggtataggcaaaatagtgaaatataactagtatgcttcttggataatccatgctttcccatttaaccatgcccagtttgtatatatatttgggacaagtgagaaaaataaatagtgccaaaatgtgaagcaatctaaagtaggaacttgccatatttggccagaaagtgggtgaaattgactctaaagcaattttaattttatcaagtgcattttaaaaaacattgttaatattacaaaaatgaaaatgttgacacaatagaagtagaaaaaacaaaaatctcagaaaatagaacacttttttccatgaggtagttgaaaaccttatacaccagtcagtagtctgcagaccaaaacatcatagcaagaaaatactcagcattctttttttttttcttgagacagagtcttgctctgtcacctaggctgaactgcagtggcatgaccaaggttcactgcaaccttgccctcccgggctcaagtgattctcccacctcagcttcccaagtagctgggactacaggcatgcaccaccacacccgactaattttttattttttgtagagatggggtctcaccatgttgcccaggctggtcttgaactcctgggctcaagtgatccacctgctacggcctcccaaattgttgagattacagatgtgagctgttgtgcccagccagcattcccttttattcatgctctcattcctttatcacttctggcattaccatgaaaatctttagatgtttatagggctataaatattaaagatgtcagttcaccaaatttttaaggacca

SEQ ID NO: 45441 - DNA, 1058 bp, Homo sapiens
tagaaaactgggaacactttaacacatggaaaggtatagccatactggaaatgtcccaaggaagtttgtgacaaatgaccaaatctttttcagttttaaatgttttgagatgcaagattatatgtatttaggggaaaggaaaagggggacagtggtagagataaagcaaatggagtggaacgtgagctgggtcagaaaaaaaaaatgagtacaggccatttcaggcattgaacatcggtaggggagcagatgattcaggtgcaaagaaaatcactccagcactttgttctgagaaaaaatccacagtcagtgcagcttggttaaaaacaggaatgttcaaagaggtaccagtcttgtaggaatcaaatgctcatatgtatgaataaaggaatgtaaggttgagatcaatttgtggaagacatcatatgtcatgtaaggaagttagaccttgtaaaaggtaggaaatatctgcagcggtttttttttttaaagtaagaatgaaaattaattggattgataagatatattgggaaggaaactcttgaagataagaattttttctttttttttttttttttttgagatggaatttcgctcttgttacccagtctggagtgcaatggtgtgatctcagctcactgcaacctccgcctcccgggttcaagcgattcttctgcctcagcctcccgagtagctgtgattacaggcatgcaccagcacgcttggctgatttttgtatttttagtagagataggttttgttatgttggccagcctggtctcaaactcctaacctcaggtaatccgcccacctcagccttccaggtgctgggattacaggcatgagccaccgtgcccagccaataagaatttttcctaatgtctcacttgcgtgtcatcctcctattagatgatagcgcagttgctatcagtaaagacttgtatttagttatgtatactcggctcctaaaacagtgtctgacacatagtagttattttataaatcttggttgtatgaagaccatttaagagaagaccagtttaattatccactcagtt

SEQ ID NO: 45442 - DNA, 1408 bp, Homo sapiens
tcattgcttgatacataatgtaatatatataaataaggaaagaacatgtaactaaggaaatgtcttcatattcttagtgggtgagtattcagaatatgtgtcattttcctctttgctctgttgtactttctttgagcaagttattctgctgtgaacaactttgttagtatatatgttatgttcaagcctcctgtttttaaattaaggcaatccttggtgatcaaaggatagtaggggaagtgagtaataaatataagtcaagcaatcatagaaatgtgaaaatatcccagttttaagaagtcatgtacctgttttttaatattcattttcttttctttaagtttcttcaggattgaatgaaaacctcactgtcaatggaggaggctggaatgaaaagtctgtaaaactctcctcacagatcagtgcaggtgaggagaagtggaactccgtttcacctgcttctgcaggaaagaggaaaactgagccatctgcctggagtcaagacactggagatgctaatacaaatggaaaagactggggaaggagttggagtgaccgttcaatattttctggcattggtaagaagtgttagaaaaatttaactttatttaaaattactaatcttgtacatttttaatttttcagaaatagaaaaaaaaactatgaatagaaaaataagtactgctctgcagaaataatagtaataattaactcatctcacatcctttttgtagagcaaggtgggaattaaataagtaaataacatcatttactctttacatagtgctttcacatactttatcacatttgattatcaacatagctaactggtgtaattatatattcttagtgatgtgatacatgtaatgtgtgggtagactttttgattaatttcaacaattctgttgagtctaaataaaaatagtaaatggaagtacagttgataacatccacttatattttacagtctgcatggtgcctatttataattaaattttcctccggattttaatataaagaccagtagttgagaagtttatttctgttgagagctatcaagttaaaagcagcttaatttgtgtgtgtgtgtgtttgtgtgtgtgtgtgtgtgtattatagaaaagaaatccacattacatgtgggcaattgcaaaatgataaggaaaatcccaaaatgccacctagtgacaactgctgttatttatatttcttctccctccctttctcctgcccgcaactgtatatagtgttttttgttgttttttgtttgtttgtttgtttgtttttttaatggagtcttgctctgtctcccaggctggagtgcagtggcgcgatctcagctcactgcaacctccacctcccgggttcaagcgattctcctacctcagcctcccgagtagctgggatt

SEQ ID NO: 45443 - DNA, 1041 bp, Homo sapiens
ataggggaatgaatacctctgaacagaattctgcttcttttgcatctctcacacttaactctgctgtttctggtatgtgaaaaacagtcttttgttcagctaacaaaaacatttgtttaattttagtgcttgttatttgaaaaactaatcaacatcaagtactgctatcaatataaatagcaggtattataaagtggcagaggcctttacaacaggaagagaagacctaaattcttatgtgcaaatggcttaattcccctctctaggggagtaaggattctgtagcttgagatcactgacagtgtattggcacacagacaaatacacatgcaaggccttccattcaggttcatattcttctgttgctaatgtagtcctgccatacttttagttacaatttgacattttacttctgttcaccgttactcatcatgagtttaaaactaaccctttcaggttatggattcccacataataactataagtatctgtagatttataaaatacatgattactaataaactactgttaattctgcattacttaaatggatatatgttttattaatcatatagaaactacatgtatttaacaaatattacataaatatgggaggccaggtgtggtggctcacatctctaatcccagcacgtagcgaggctgaggtgggaagatcacttgagcctaggagttcaagaccagcctgggcaactacatcaccacataaagttaaagaaaaattagccaggcatggtggtatttgcctgtggtcccagctactcaggaggctgtggtgggaggatcgcattagtccaggaggttgaagctacaatgagcaatgagccatgattgctccactgcactccagactgggtgacagagtgagactctgtctcacaaaaaaaaaaatatatatatatatatatatattttttttttgtggacccagtttactaattttgtagttccgcagcgtctggaatcactaacctagaaagggggtcagcaaactttttgtataaagggacagatagtaaacat

SEQ ID NO: 45444 - DNA, 1025 bp, Homo sapiens
tcggaaagctcatgccgtcttcatttaaaaaaaaaaaattatgagttttttttcctcacaaacctaaatctcaaaatgtactttgtctgaatttttatttcacatccttttttactatttactgttttctactgttagcacttatatgttccctgtggggttttccaccatttttaagcatatgttttccttctccaagtagagttaagaactctctgaaaatggggactagcactctttcatacactcaggacctagtgcaagcctttatacataggtgttcggtggtaataataatgacaataaaaacactggactatgtgccaggcactggtcttagtcttttggattttattatctcatttaatgcttaaaacatttctatgtggtaggttttatttgtttccacactttccagatgaaaaagttgtgacaagggaaagttatctagcttttcccaggccacacagttagttaaatggaggagggtggtattcataccttgctagtctggctctagagttcatgctcttaaccactatctggtacagccttggtgatgatagtaatcatcaaggtaagctggcgacacagtggttaaagcacagttcttacagattaagggagatgaggagagaaagatcagggaggaccatattgtgaaatgcatgccttgaattgctggctaaaggttagggggctgggggttttcagtactagcttagacagtagatacgaattttagtcccgactctaaaatgtagtagtacctcatatggttagggctttgtcacttgtctgggagctgtaaaatcgagcaaataatgtgtcatatctgttttcataggttgttgtgaggctttaatgagataatgggtgaacatgaaagctctgtaaattacagtcatctctcagtatccatggggggttgattccaggacccccctcaggtaccaaaatccccaggtgctgaagtctcctgtgataaaatggcatagtatttgcatataacctacatatgtctt

SEQ ID NO: 45445 - DNA, 1477 bp, Homo sapiens
cacttgggaaagtctttttaatagaacaagaacgatcttaatttaagaatattatcctggtttaacaacagtgccctgtttacaacagattgtgccctatctcatctgcagccgaggaataaaggattctgattagaaagagggttgcctacagattagtaagcaattccttggatcttatgcacagaacttgtaccatttgaatctgttttatgcttaaatcaaagtgctttgatcaaatgcataacctgccatatctttacatatttgttggtagcaatttgtattaaagaaatcacaagtgcaaataaaaagtcatttatcatttgtttaactaaactgtcatggtttagtttacaatttttaaaaagttcttaaaatactgaaaatgcagttgacacttgtgtatggcttatgaagttatttttgatagtcttacattacttgaattgttcaaagtacagtatattttaaattaagaaaagtgaactatatgtatttgttttatacatttaaggcttagactcataaataatgctattgtttatgatttgaaaactttcaggcaaaatccaatttacatttttcccttccctagcaattacttttttccagcttcaactcttcttagttactaatactttgttgactttaaaaatgaaatcattcacaaacttttggtatatgatggagaatgaaaaactagagtcagacagctttaattgacattgtcaacacctccagttatcaggaatacatttttttactgccttaacctgtagtgcgtagaatatgcatcaatttcttgaaggagattcatgtttttataagaattttcatgtaattattgcaattgtggtcaaataaggaacgtttcctgcttgaaattatattgatttaaatgatgtgtgagatgtttcaccattttcaggcactgtgtaattctattgtaataaactggcaggtatctttgtaactataaatagtgcatgctcagccatgtacactgtaaatagcctttaccaaacgtgtttgacaaggaccataattaacatcacttagtgaattgtgataaagaaaaaaaagccatgatttattcgatgtgattggcttgtttttatgtggcgccaagaacgaacctgtttaacagctgtaaccaatggtactgatctatccatccaatgttgtcattatatttgactgtggttcaacagtattgcgttgtcagactaggaaagctaaacgaacaaaatggttttagttttgctgaagactggccttattaatggacagctttcctaacaagagattattaacttttatcaggtgttaacatctgtttcaggaacatggcagtatgtttacatgtcagaagttttgtttaattctatggtatttctaaattgacttgtttaaataaattcagcaaatggatagcattgttttttatttgcttcaatatgggggtagataatag

SEQ ID NO: 45446 - DNA, 1050 bp, Homo sapiens
aaagaagtagaagggaagaaaatcgcaaggaactagactaaaagaatctcgacccttgaatggagttacacgaacggccagatgaaagaaggaaggcccggacctccactcagggccgactaggggactggcggagggtgcacgctgatggatttactcaccgggtgcttggagctccagcagctggctggagcccgcgatgacgtcacggactcgggtcacatggccaagtccgccccgccccctccccgtccccgccgctgcagcggtcgccttcggagcgaagggtaccgacccggcagaagctcggagctctcggggtatcgaggaggcaggcccgcgggcgcacgggcgagcgggccgggagccggagcggcggaggagccggcagcagcggcgcggcgggctccaggcgaggcggtcgacgctcctgaaaacttgcgcgcgcgctcgcgccactgcgcccggagcgatgaagatggtcgcgccctggacgcggttctactccaacagctgctgcttgtgctgccatgtccgcaccggcaccatcctgctcggcgtctggtatctggtgagcgcggcgcgcccggcccgggaccctgcgttgcttccgcgcccctagctgggcttctggcccggcctcgcggtggggtgaggcgtgcgctcatccgcctaaagttgtattattagaaacttaattctccgggtgccgcgtccgcacttcccccggctgggccagcgccgactgggggaggccaggagtttggggcgatgggggaggccaggggcgcggggcggagggccgcactcgacccttggcgcccaggtggtgtgggtcgccgatctccagcctccgcgcagccccgcggcctcgcgtagggcgcaccggggcagacaaactgagcttatctgccgagcacgtgtttcctttcttcttaaagcccgtgggctttgtgtttcgacggctgcggacggagcggtcgcggaggtgacggcgcatattttgcagctctgtggttagggttgcggatttgtcaatgctcgttctcc

SEQ ID NO: 45447 - DNA, 1044 bp, Homo sapiens
tcaggagttttgagaccagcctggctaacatgatgaaaccctgtttctattaaaaatataaaaaattagtggggcgtggtggcacgtgcctgtaaccccagctacttgggaagctgagagaagaatcatttgaacccaggaggcggaggttgcagtgagctgagatcgtgcgattgcactccagcttgggcaacaaaagcgaaactctgtctcaaaataaataaataaataaaacaaaaagtaagagtccacaataagggctcatttaagtaatttcctgttttgcaagataggtaaagtggatcttttttatatgttttcttattgttgattcctaccaataccgtttactaaggctccaagtgtcatgtactttactagatactttgcataaggttaatttttacatattcctggtgaggtagattttcttattcccattttacagatgagaaaactgaggcttagagaactttggtgatttacttgagagcttaaaatcccatggttggtttatgatctgagtgatgttttaatctgttctgtttccactgttttacttttaaaagttgtgcatgtgttttggttttgtcttggaataataaaagttttccttcagtcctgaagtaaagtatattgacttcaggtatttattattattattactatttttaaaattctgggccacgctaactttgggagacttcaggtatttattctagagatcattttttgtttgtctctttttttttcttttattgagttgtgatttatgtactacaattttttttttttgagaccgagtctcgctctgacgcccaggctggagtgcagtggcgtgatctcggctcaccacaacctccgcctcctgggttcaagcgattctcctgctcagcctcctgagtagctgggattacaggtgagctccgggctaatttttgtatttttagtagagatggggtttccccatgttgttcaggctggtcttgaactcctgaccttgtgatccatccgccttggcctcccaaagtgctgagattacag

SEQ ID NO: 45448 - DNA, 1946 bp, Homo sapiens
gaattttgagcttgctgccagggattggtttagcagagttggccagggcctgtgaatggggtgtggtggcttcttgggaggaacctgggttactggtaagagcgtatatggcatttgtaatcaaagcaccaacaattgaatgtcagttgaaaactttatgcacctgtattttatgaacatggtatgtgcatatttccctgaagtctgagtcctcatctgtagaatggtgtagtaatgatcagacttgatagggaggcagcactgtttttataatataaaatggtgcatatggggatggtggtttcttagtttagttcatcacctatgaggaagacgtcctaaaaggatggtactgttgactgaactggtgaatcagaaagacctggttgaatttggggggaaaaacttccataatatattaaaaaattatatctgttgaaatgaggctctaataaaagatacaacatccattttactccttaaactttttccctcagagtctataaccaaagagaccatcctttgacttagaagttcagcaacttacaacatggccgccattatagtccaactccaaggattgccaagagtggctcattttcctgcttgtgtgctgtagagtttttcttaacagttggttcttttttatttttatttttttgatacaagatcacagtttgtcacccaggctggagtgcagtggcaccatctccactcactacatccttgacctcctgggctccaggtccctgccaccccagctccccaggcagctgggactacaggtgcgagccaccacaaccagctaattatttgtattttttgtagatatgggtttcaccatgttgttcaggctggtctcaaactcctgagctcaaatgatccacctcccttggcctcccaaagtgctgggattacaggtgtgagccgccgtgcctagcctaacagtcaattttttttttattttttatttttttccttttttgagactaaatctctctctgtagcgcaggctgcattgcagtggcacgatctcggctcactgcaacctctgcctcccaggtccaagtgattcttctgtttcagcctcccaagtagctgggattacaggctcctggcaccacacgtggctgttttgtatttttagtagagagaggatttcaccatgttggccaggctggtttcgaactcctgacctcaagtgatccgccctcctcagtcttccaaagtgctgggattacaggcgtgagccattgcgcccagcataacagtcaattagtcacttaatctgataccctaaaattgtttgtgctataatttttctctctcaggatgtttaggtctgttactttctggtgttaatagtgtcacctcagaaatcatacaaaggatacaacagatttgaaaataataactagaaactctagaatgaaaaaaaaatactgttgttgataaggtaacagaatttgtgttcactctgaatagaacatccaatttattattttccccactagataataggctgccttgagggctttgccataatatatatgtgatgcttagcattgtgcctggcatatatttgtggcacaatagattaatttttgaataactgaatgaatgagttaatgaatgttatagcgtttattctacattttacttggctgttgatgtatgtttcttccactggactaatgttgggcacagggaccgtgtcttttttttaaaccatttttctgttcagaaaaaaaaaggtttagctcgcccccagcactcatttaattttgtataaacaccctatgaggctgaagcaaatctgagtgattttcattgtaaaataaaataaaaattgttcttggaattatttctaaacagaatatcagtattgtctatttcagaaaaatcggattgttcaaatgaatcttcggccaacagctgttcaagag

SEQ ID NO: 45449 - DNA, 1057 bp, Homo sapiens
caaacagaaaaacagggcacacatgaataccacagggcaagtacaaagagaagggttagaggccagatggataagctaaaaataggattatctggacatcctgcagtactttcagcacagtgtatctaaaatcgacgtcgtcatagtccttccactgaccttttccatttctgataatgacaagatacatcctgtcaccaggcttgaagtcttaggtcttctttgcttctttttctgtgttctttgcttgtagtcagttactgtatctctagtaattctgcctccatgtggaaaggtcttggggttccaaccttggctctcccacacataggccctaagataaagtcactaaacctcaccacctaacatggaagaagaccatctcacagggttgtcatgagaattggagatgaaatgccctattacttcttagccagactattgtaggtgtttccagggtcaaaggagaaaaattacaacaatttagttttaagatcttaattggctttctagaattgggcaacacttcatctcataaaatagagtatcctgtgagctaagcagaggagcttggctttttagagagaaatgggctgaagaaaccagaaacaaagaactaaaagcagatgagtcgtttcaaagggacttttcttttaaggcaggggcaggaagacagaacaatacaaaaataacatggttagcatcaggtgacttcaggttatctgaacctgagcacggtgactgcattttggtttgtagtctagtatgttgaggccctattgtgcaggagctcaatctgcaacaatggccgcctataatttttatttgacaccagattggattcctgcctctaatttagccttcccacttctgccagtttgttctttctaacaacatagctctgatcatgtcatatccttcctcaaaacctttatggcattttcattaactattagaattcctgtcctagtttcgaggcctcttcaccacctggccccatcctacatttttggttctatcctctaacatttccttttataccccctgaccctggcgt
